(19) United States
(12) Patent Application Publication
(10) Pub. No.: US 2004/0005561 A1
(43) Pub. Date: Jan. 8, 2004

(54) Compositions and methods for the detection, diagnosis and therapy of hematological malignancies

(75) Inventors: Alexander Gaiger, Seattle, WA (US); Paul A. Algate, Issaquah, WA (US); Jane Mannion, Edmonds, WA (US); Marc W. Retter, Carnation, WA (US)

Correspondence Address: TOWNSEND AND TOWNSEND AND CREW, LLP, TWO EMBARCADERO CENTER, EIGHTH FLOOR, SAN FRANCISCO, CA, 94111-3834, US

(73) Assignee: Corixa Corporation, Seattle, WA (US)

(21) Appl. No.: 10/154,884

(22) Filed: May 23, 2002

Related U.S. Application Data
(63) Continuation-in-part of application No. 10/057,475, filed on Jan. 22, 2002.
Application No. 10/057,475 is a continuation-in-part of application No. 10/040,862, filed on Nov. 6, 2001.
Application No. 10/040,862 is a continuation-in-part of application No. 09/796,692, filed on Mar. 1, 2001.
(60) Provisional application No. 60/223,378, filed on Aug. 7, 2000.
(60) Provisional application No. 60/223,416, filed on Aug. 4, 2000.
(60) Provisional application No. 60/222,903, filed on Aug. 3, 2000.
(60) Provisional application No. 60/218,950, filed on Jul. 14, 2000.
(60) Provisional application No. 60/206,201, filed on May 22, 2000.
(60) Provisional application No. 60/202,084, filed on May 4, 2000.
(60) Provisional application No. 60/200,999, filed on May 1, 2000.
(60) Provisional application No. 60/200,303, filed on Apr. 28, 2000.
(60) Provisional application No. 60/200,779, filed on Apr. 28, 2000.
(60) Provisional application No. 60/200,545, filed on Apr. 27, 2000.
(60) Provisional application No. 60/190,479, filed on Mar. 17, 2000.
(60) Provisional application No. 60/186,126, filed on Mar. 1, 2000.

(51) Int. Cl. C12Q 1/68; G01N 33/574; C07H 21/04; C12N 9/00; C12P 21/02; C12N 5/06; C07K 16/30

(52) U.S. Cl. 435/6; 435/7.23; 435/69.1; 435/183; 435/320.1; 435/325; 530/350; 530/388.8; 536/23.2

(57) ABSTRACT

Disclosed are methods and compositions for the detection, diagnosis, prognosis, and therapy of hematological malignancies, and in particular, B cell leukemias, lymphomas and multiple myelomas. Disclosed are compositions, methods and kits for eliciting immune and T cell responses to specific malignancy-related antigenic polypeptides and antigenic polypeptide fragments thereof in an animal. Also disclosed are compositions and methods for use in the identification of cells and biological samples containing one or more hematological malignancy-related compositions, and methods for the detection and diagnosis of such diseases and affected cell types. Also disclosed are diagnostic and therapeutic kits, as well as methods for the diagnosis, therapy and/or prevention of a variety of leukemias and lymphomas.

### CROSS-REFERENCES TO RELATED APPLICATIONS

[0001] This application is a continuation in part of the U.S. patent application Ser. No. 10/057,475, filed Jan. 22, 2002, which is a continuation in part of the U.S. patent application Ser. No. 10/040,862, filed Nov. 6, 2001, Attorney Docket No. 014058-013520US, entitled COMPOSITIONS AND METHODS FOR THE DETECTION, DIAGNOSIS AND THERAPY OF HEMATOLOGICAL MALIGNANCIES, which is a continuation in part of U.S. Ser. No. 09/796,692 filed Mar. 1, 2001, which claims priority to U.S. Provisional Patent Application Serial No. 60/186,126, filed Mar. 1, 2000; Serial No. 60/190,479, filed Mar. 17, 2000; Serial No. 60/200,545, filed Apr. 27, 2000; Serial No. 60/200,303, filed Apr. 28, 2000; Serial No. 60/200,779, filed Apr. 28, 2000; Serial No. 60/200,999; filed May 1, 2000; Serial No. 60/202,084, filed May 4, 2000; Serial No. 60/206,201, filed May 22, 2000; Serial No. 60/218,950, filed Jul. 14, 2000; Serial No. 60/222,903, filed Aug. 3, 2000; Serial No. 60/223,416, filed Aug. 4, 2000; and Serial No. 60/223,378, filed Aug. 7, 2000; the entire specification, claims, sequences and figures of each of which is specifically incorporated herein by reference in its entirety without disclaimer and for all purposes.

### STATEMENT AS TO RIGHTS TO INVENTIONS MADE UNDER FEDERALLY SPONSORED RESEARCH AND DEVELOPMENT

[0002] NOT APPLICABLE

### REFERENCE TO A “SEQUENCE LISTING,” A TABLE, OR A COMPUTER PROGRAM LISTING APPENDIX SUBMITTED ON A COMPACT DISK.

[0003] NOT APPLICABLE

### 1. BACKGROUND OF THE INVENTION

[0004] 1.1 Field of the Invention

[0005] The present invention relates generally to the fields of cancer diagnosis and therapy. More particularly, it concerns the surprising discovery of compositions and methods for the detection and immunotherapy of hematological malignancies, and particularly, B cell leukemias, and lymphomas and multiple myelomas. The invention provides new, effective methods, compositions and kits for eliciting immune and T-cell response to antigenic polypeptides, and antigenic peptide fragments isolated therefrom, and methods for the use of such compositions for diagnosis, detection, treatment, monitoring, and/or prevention of various types of human hematological malignancies. In particular, the invention provides polypeptide, peptide, antibody, antigen binding fragment, hybridoma, host cell, vector, and polynucleotide compounds and compositions for use in identification and discrimination between various types of hematological malignancies, and methods for the detection, diagnosis, prognosis, monitoring, and therapy of such conditions in an affected animal.

[0006] 1.2 DESCRIPTION OF RELATED ART

[0007] 1.2.1 Hematological Malignancies

[0008] Hematological malignancies, such as leukemias and lymphomas, are conditions characterized by abnormal growth and maturation of hematopoietic cells. Leukemias are generally neoplastic disorders of hematopoietic stem cells, and include adult and pediatric acute myeloid leukemia (AML), chronic myeloid leukemia (CML), acute lymphocytic leukemia (ALL), chronic lymphocytic leukemia (CLL) and secondary leukemia. Among lymphomas, there are two distinct groups: non-Hodgkin's lymphoma (NHL) and Hodgkin's disease. NHLs are the result of a clonal expansion of B- or T-cells, but the molecular pathogenesis of Hodgkin's disease, including lineage derivation and clonality, remains obscure. Other hematological malignancies include myelodysplastic syndromes (MDS), myeloproliferative syndromes (MPS) and myeloma. Hematological malignancies are generally serious disorders, resulting in a variety of symptoms, including bone marrow failure and organ failure.

[0009] NHLs are the sixth most common cause of cancer related deaths in the United States. Only prostate, breast, lung, colorectal and bladder cancer currently exceed lymphoma in annual incidence. In 1995, more than 45,000 new NHLs were diagnosed, and over 21,000 patients died of these diseases. The average age of lymphoma patients is relatively young (42 years), and the resulting number of years of life lost to these diseases renders NHLs fourth in economic impact among cancers in the United States. In the past 15 years, the American Cancer Society reported a 50% increase in the incidence of NHLs, one of the largest increases for any cancer group. Much of this increase has been attributed to the development of lymphomas in younger men who have acquired AIDS. Lymphomas are also the third most common childhood malignancy and account for approximately 10% of cancers in children. The survival rate (all ages) varies from 73% (low risk) to 26% (high risk).

[0010] 1.3 Deficiencies in the Prior Art

[0011] Treatment for many hematological malignancies, including leukemias and lymphomas, remains difficult, and existing therapies are not universally effective. While treatments involving specific immunotherapy appear to have considerable potential, such treatments have been limited by the small number of known malignancy-associated antigens. Moreover the ability to detect such hematological malignancies in their early stages can be quite difficult depending upon the particular malady. The lack of a sufficient number of specific diagnostic and prognostic markers of the diseases, and identification of cells and tissues that can be affected, has significantly limited the field of oncology.

[0012] Accordingly, there remains a need in the art for improved methods for detecting, screening, diagnosis and treatment of hematological malignancies such as B cell leukemias and lymphomas and multiple myelomas. The present invention fulfills these and other inherent needs in the field, and provides significant advantages in the detection of cells, and cell types that express one or more polypeptides that have been shown to be over-expressed in one or more of such hematological malignancies.

### 2. SUMMARY OF THE INVENTION

[0013] The present invention addresses the foregoing long-felt need and other deficiencies in the art by identifying new and effective strategies for the identification, detection, screening, diagnosis, prognosis, prophylaxis, therapy, and immunomodulation of one or more hematological malignancies, and in particular, B cell leukemias and lymphomas, and multiple myelomas.

[0014] The present invention is based, in part, upon the surprising and unexpected discovery that certain previously unknown or unidentified human polypeptides, peptides, and antigenic fragments derived therefrom have now been identified that are overexpressed in one or more types of hematological malignancies. The genes encoding several of these polypeptides are now identified and obtained in isolated form, and have been characterized using a series of molecular biology methodologies including subtractive library analysis, microarray screening, polynucleotide sequencing, peptide and epitopic identification and characterization, as well as expression profiling, and in vitro whole gene cell priming. A set of these polynucleotides, and the polypeptides, peptides, and antigenic fragments they encode are now identified and implicated in the complex processes of hematological malignancy disease onset, progression, and/or outcome, and in particular, diseases such as leukemias and lymphomas.

[0015] The inventors have further demonstrated that a number of these polynucleotides, and their encoded polypeptides, as well as antibodies, antigen presenting cells, T cells, and the antigen binding fragments derived from such antibodies are useful in the development of particularly advantageous compositions and methods for the detection, diagnosis, prognosis, prophylaxis and/or therapy of one or more of these diseases, and particularly those conditions that are characterized by (a) an increased, altered, elevated, or sustained expression of one or more polynucleotides that comprise at least a first sequence region that comprises a nucleic acid sequence as disclosed in any one of SEQ ID NOs:11,000-11,038 or (b) an increased, altered, elevated, or sustained biological activity of one or more polypeptides that comprise at least a first sequence region that comprises an amino acid sequence as encoded by any one of the above polynucleotides or disclosed in any one of SEQ ID NOs:11,039-11,058.

[0016] The present invention also provides methods and uses for one or more of the disclosed peptide, polypeptide, antibody, antigen binding fragment, and polynucleotide compositions of the present invention in generating an immune response or in generating a T-cell response in an animal, and in particular in a mammal such as a human. The invention also provides methods and uses for one or more of these compositions in the identification, detection, and quantitation of hematological malignancy compositions in clinical samples, isolated cells, whole tissues, and even affected individuals. The compositions and methods disclosed herein also may be used in the preparation of one or more diagnostic reagents, assays, medicaments, or therapeutics, for diagnosis and/or therapy of such diseases.

[0017] In a first important embodiment, there is provided a composition comprising at least a first isolated peptide or polypeptide that comprises an amino acid sequence that is at least about 80%, about 81%, about 82%, about 83%, about 84%, about 85%, about 86%, about 87%, about 88%, about 89%, about 90%, about 91%, about 92%, about 93%, about 94%, about 95%, about 96%, about-97%, about 98%, or about 99% identical to the amino acid sequence encoded by any one of the above polynucleotides or disclosed in any one of SEQ ID NOs:11,039-11,058. Exemplary preferred sequences are those that comprise at least a first coding region that comprises an amino acid sequence that is at least about 85%, about 86%, about 87%, about 88%, about 89%, about 90%, about 91%, about 92%, about 93%, or about 94% identical to the amino acid sequence as encoded by any one of the above polynucleotides or disclosed in any one of SEQ ID NOs:11,039-11,058, with those sequences that comprise at least a first coding region that comprises an amino acid sequence that is at least about 95%, about 96%, about 97%, about 98%, or about 99% identical to the amino acid sequence as encoded by any one of the above polynucleotides or disclosed in any one of SEQ ID NOs:11,039-11,058 being examples of particularly preferred sequences in the practice of the present invention. Likewise, peptide and polypeptide compounds and compositions are also provided that comprise, consist essentially of, or consist of the amino acid sequence as encoded by any one of the above polynucleotides or disclosed in any one of SEQ ID NOs:11,039-11,058.

[0018] In a similar fashion, there are also embodiments disclosed herein that provide compositions and methods for the detection, diagnosis, prognosis, prophylaxis, treatment, and therapy of B cell leukemia, lymphoma and multiple myeloma. Exemplary preferred peptide and polypeptide compounds and compositions relating to this aspect of the invention include, but are not limited to, those peptide and polypeptide compounds or compositions that comprise at least a first isolated peptide or polypeptide that comprises an amino acid sequence that is at least about 80%, about 81%, about 82%, about 83%, about 84%, about 85%, about 86%, about 87%, about 88%, about 89%, about 90%, about 91%, about 92%, about 93%, about 94%, about 95%, about 96%, about 97%, about 98%, or about 99% identical to the amino acid sequence as encoded by any one of the above polynucleotides or disclosed in any one of SEQ ID NOs:11,039-11,058, and those that comprise at least a first coding region that comprises an amino acid sequence that is at least about 85%, about 86%, about 87%, about 88%, about 89%, about 90%, about 91%, about 92%, about 93%, or about 94% identical to the amino acid sequence as encoded by any one of the above polynucleotides or disclosed in any one of SEQ ID NOs:11,039-11,058, and even those sequences that comprise at least a first coding region that comprises an amino acid sequence that is at least about 95%, about 96%, about 97%, about 98%, or about 99% identical to the amino acid sequence as encoded by any one of the above polynucleotides or disclosed in any one of SEQ ID NOs: 11,039-11,058.

[0019] Exemplary peptides of the present invention may be of any suitable length, depending upon the particular application thereof, and encompass those peptides that are about 9, about 10, about 15, about 20, about 25, about 30, about 35, about 40, about 45, about 50, about 55, about 60, about 65, about 70, about 75, about 80, about 85, about 90, about 95, or about 100 or so amino acids in length. Of course, the peptides of the invention may also encompass any intermediate lengths or integers within the stated ranges.

[0020] Exemplary polypeptides and proteins of the present invention may be of any suitable length, depending upon the particular application thereof, and encompass those polypeptides and proteins that are about 100, about 150, about 200, about 250, about 300, about 350, or about 400 or so amino acids in length. Of course, the polypeptides and proteins of the invention may also encompass any intermediate lengths or integers within the stated ranges.

[0021] The peptides, polypeptides, proteins, antibodies, and antigen binding fragments of the present invention will preferably comprise a sequence of at least about 5, 10, 15, 20, 25, 30, 35, 40, 45, 50, 55, 60, 65, 70, 75, 80, 85, 90, 95 or 100 contiguous amino acids from any one of the peptides as encoded by any one of the above polynucleotides or disclosed in any one of SEQ ID NOs:11,039-11,058.

[0022] Furthermore, the polypeptides, proteins, antibodies, and antigen binding fragments of the present invention will even more preferably comprise at least a first isolated coding region that comprises a sequence of at least about 100, 110, 120, 130, 140, 150, 160, 170, 180, 190, or 200 contiguous amino acids from any one of the peptides as encoded by any one of the above polynucleotides or disclosed in any one of SEQ ID NOs:11,039-11,058.

[0023] Likewise, the polypeptides, proteins, antibodies, and antigen binding fragments of the present invention may comprise at least a first isolated coding region that comprises a substantially longer sequence, such as for example, one of at least about 200, 220, 240, 260, 280, or 300 or more contiguous amino acids from any one of the peptides as encoded by any one of the above polynucleotides or disclosed in any one of SEQ ID NOs:11,039-11,058.

[0024] In illustrative embodiments, and particularly in those embodiments concerning methods and compositions relating to B cell leukemias, lymphomas and multiple myelomas, the polypeptides of the invention comprise an amino acid sequence that (a) comprises, (b) consists essentially of, or (c) consists of, the amino acid sequence encoded by any one of the above polynucleotides or disclosed in any one of SEQ ID NOs:11,039-11,058.

[0025] The polypeptides and proteins of the invention preferably comprise an amino acid sequence that is encoded by at least a first nucleic acid segment that comprises an at least 21, 22, 23, 24, 25, 26, 27, 28, 29, or 30 contiguous nucleotide sequence of any one of SEQ ID NOs:11,000-11,038.

[0026] The polypeptides and proteins of the invention may also preferably comprise an amino acid sequence encoded by at least a first nucleic acid segment that comprises an at least about 31, 32, 33, 34, 35, 36, 37, 38, 39, or 40 contiguous nucleotide sequence of any one of SEQ ID NOs:11,000-11,038. The polypeptides and proteins of the invention may also preferably comprise one or more coding regions that comprise an amino acid sequence encoded by at least a first nucleic acid segment that comprises an at least about 41, 42, 43, 44, 45, 46, 47, 48, 49, or 50 contiguous nucleotide sequence of any one of SEQ ID NOs:11,000-11,038. The polypeptides and proteins of the invention may also preferably comprise one or more coding regions that comprise an amino acid sequence encoded by at least a first nucleic acid segment that comprises an at least about 51, 52, 53, 54, 55, 56, 57, 58, 59, or 60 contiguous nucleotide sequence of any one of SEQ ID NOs:11,000-11,038. The polypeptides and proteins of the invention may also preferably comprise one or more coding regions that comprise an amino acid sequence encoded by at least a first nucleic acid segment that comprises an at least about 70, 80, 90, 100, 110, 120, 130, 140 or 150 contiguous nucleotide sequence of any one of SEQ ID NOs:11,000-11,038. The polypeptides and proteins of the invention may also preferably comprise one or more coding regions that comprise an amino acid sequence encoded by at least a first nucleic acid segment that comprises an at least about 175, 200, 225, 250, 275, 300, 325, 350, 375, or 400 contiguous nucleotide sequence of any one of SEQ ID NOs:11,000-11,038. The polypeptides and proteins of the invention may also preferably comprise one or more coding regions that comprise an amino acid sequence encoded by at least a first nucleic acid segment that comprises an at least about 500, 600, 700, 800, 900, 1000, 1100, 1200, 1300, 1400, or 1500 contiguous nucleotide sequence of any one of SEQ ID NOs:11,000-11,038.

[0027] In a second important embodiment, there is provided a composition comprising at least a first isolated polynucleotide that comprises a nucleic acid sequence that is at least about 80%, about 81%, about 82%, about 83%, about 84%, about 85%, about 86%, about 87%, about 88%, about 89%, about 90%, about 91%, about 92%, about 93%, about 94%, about 95%, about 96%, about 97%, about 98%, or about 99% identical to the nucleic acid sequence of any one of SEQ ID NOs:11,000-11,038. Exemplary preferred sequences are those that comprise a nucleic acid sequence that is at least about 85%, about 86%, about 87%, about 88%, about 89%, about 90%, about 91%, about 92%, about 93%, or about 94% identical to the nucleic acid sequence of any one of SEQ ID NOs:11,000-11,038, with those sequences that comprise at least a nucleic acid sequence that is at least about 95%, about 96%, about 97%, about 98%, or about 99% identical to the nucleic acid sequence of any one of SEQ ID NOs:11,000-11,038 being examples of particularly preferred sequences in the practice of the present invention.

[0028] In embodiments that relate particularly to compositions and methods for the detection, diagnosis, prognosis, prophylaxis, treatment, and therapy of B cell leukemias, lymphomas, and multiple myelomas exemplary preferred polynucleotide compositions include those compositions that comprise at least a first isolated nucleic acid segment that comprises a sequence that is at least about 80%, about 81%, about 82%, about 83%, about 84%, about 85%, about 86%, about 87%, about 88%, about 89%, about 90%, about 91%, about 92%, about 93%, about 94%, about 95%, about 96%, about 97%, about 98%, or about 99% identical to the nucleic acid sequence of any one of SEQ ID NOs:11,000-11,038. Such polynucleotides will preferably comprise one or more isolated coding region, each of which may (a) comprise, (b) consist essentially of, or (c) consist of, the nucleic acid sequence of SEQ ID NOs:11,000-11,038.

[0029] Exemplary polynucleotides of the present invention may be of any suitable length, depending upon the particular application thereof, and encompass those polynucleotides that (a) are at least about, or (b) comprise at least a first isolated nucleic acid segment that is at least about 27, 30, 40, 50, 60, 70, 80, 90, 100, 110, 120, 120, 140, 150, 160, 170, 180, 190, 200, 210, 220, 230, 240, 250, 260, 270, 280, 290, 300, 320, 340, 360, 380, 400, 420, 440, 460, 480, 500, 520, 540, 560, 580, 600, 625, 650, 675, 700, 750, 800, 850, 900, 950, or 1000 or so nucleic acids in length, as well as longer polynucleotides that (a) are at least about, or (b) comprise at least a first isolated nucleic acid segment that is at least about 1000, 1025, 1050, 1075, 1100, 150, 1200, 1250, 1300, 1350, 1400, 1450, 1500, 1550, 1600, 1650, 1700, 1750, 1800, 1850, 1900, 1950, 2000, 2100, 2200, 2300, 2400, 2500, 2600, 2700, 2800, 2900, or 3000 or so nucleic acids in length, as well as substantially larger polynucleotides. Of course, the polynucleotides and nucleic acid segments of the invention may also encompass any intermediate lengths or integers within the stated ranges.

[0030] The compositions of the present invention may comprise a single polypeptide or polynucleotide, or alternatively, may comprise two or more such hematological malignancy compounds, such as for example, two or more polypeptides, two or more polynucleotides, or even combinations of one or more peptides or polypeptides, along with one or more polynucleotides. When two or more polypeptides are contemplated for particular applications, the second and/or third and/or fourth, etc. isolated peptides and/or polypeptides will preferably comprise an amino acid sequence that is at least about 91%, 93%, 95%, 97%, or 99% identical to the amino acid sequence encoded by any one of the above polynucleotides or disclosed in any one of SEQ ID NOs:11,039-11,058. Alternatively, the polynucleotides of the invention may comprise one or more coding regions that encode a first fusion protein or peptide, such as an adjuvant-coding region fused in correct reading frame to one or more of the disclosed hematological malignancy peptides or polypeptides. Alternatively, the fusion protein may comprise a hematological malignancy polypeptide or peptide fused, in correct reading frame, to a detectable protein or peptide, or to an immunostimulant protein or peptide, or other such construct. Fusion proteins such as these are particularly useful in those embodiments relating to diagnosis, detection, and therapy of one or more of the hematological malignancies as discussed herein.

[0031] The invention also provides a composition comprising at least a first hybridoma cell line that produces a monoclonal antibody having immunospecificity for one or more of the peptides or polypeptides as disclosed herein, or at least a first monoclonal antibody, or an antigen-binding fragment thereof, that has immunospecificity for such a peptide or polypeptide. The antigen binding fragments may comprise a light chain variable region, a heavy-chain variable region, a Fab fragment, a F(ab)₂ fragment, an Fv fragment, an scFv fragment, or an antigen-binding fragment of such an antibody.

[0032] The invention also provides a composition comprising at least a first isolated antigen-presenting cell that expresses a peptide or polypeptide as disclosed herein, or a plurality of isolated T cells that specifically react with such a peptide or polypeptide. Such pluralities of isolated T cells may be stimulated or expanded by contacting the T cells with one or more peptides or polypeptides as described herein. The T cells may be cloned prior to expansion, and may be obtained from bone marrow, a bone marrow fraction, peripheral blood, or a peripheral blood fraction from a healthy mammal, or from a mammal that is afflicted with at least a first hematological malignancy such as leukemia or lymphoma.

[0033] As described above, the isolated polypeptides of the invention may be on the order of from 9 to about 1000 amino acids in length, or alternatively, may be on the order of from 50 to about 900 amino acids in length, from 75 to about 800 amino acids in length, from 100 to about 700 amino acids in length, or from 125 to about 600 amino acids in length, or any other such suitable range.

[0034] The isolated nucleic acid segments that encode such isolated polypeptides may be on the order of from 27 to about 10,000 nucleotides in length, from 150 to about 8000 nucleotides in length, from 250 to about 6000 nucleotides in length, from 350 to about 4000 nucleotides in length, or from 450 to about 2000 nucleotides in length, or any other such suitable range.

[0035] The nucleic acid segment may be operably positioned under the control of at least a first heterologous, recombinant promoter, such as a tissue-specific, cell-specific, inducible, or otherwise regulated promoter. Such promoters may be further controlled or regulated by the presence of one or more additional enhancers or regulatory regions depending upon the particular cell type in which expression of the polynucleotide is desired. The polynucleotides and nucleic acid segments of the invention may also be comprised within a vector, such as a plasmid, or viral vector. The polypeptides and polynucleotides of the invention may also be comprised within a host cell, such as a recombinant host cell, or a human host cell such as a blood or bone marrow cell.

[0036] The polynucleotides of the invention may comprise at least a first isolated nucleic acid segment operably attached, in frame, to at least a second isolated nucleic acid segment, such that the polynucleotide encodes a fusion protein in which the first peptide or polypeptide is linked to the second peptide or polypeptide.

[0037] The polypeptides of the present invention may comprise a contiguous amino acid of any suitable length, such as for example, those of about 2000, about 1900, about 1850, about 1800, about 1750, about 1700, about 1650, about 1600, about 1550, about 1500, about 1450, about 1400, about 1350, about 1300, about 1250, about 1200, about 1150, about 1100 amino acids, or about 1000 or so amino acids in length. Likewise, the polypeptides and peptides of the present invention may comprise slightly shorter contiguous amino acid coding regions, such as for example, those of about 950, about 900, about 850, about 800, about 750, about 700, about 650, about 600, about 550, about 500, about 450, about 400, about 350, about 300, about 250, about 200, about 150, or even about 100 amino acids or so in length.

[0038] In similar fashion, the polypeptides and peptides of the present invention may comprise even smaller contiguous amino acid coding regions, such as for example, those of about 95, about 90, about 85, about 80, about 75, about 70, about 65, about 60, about 55, about 50, about 45, about 40, about 35, about 30, about 25, about 20, about 15, or even about 9 amino acids or so in length.

[0039] In all such embodiments, those peptides and polypeptides having intermediate lengths including all integers within the preferred ranges (e.g., those peptides and polypeptides that comprise at least a first coding region of at least about 94, about 93, about 92, about 91, about 89, about 88, about 87, about 86, about 84, about 83, about 82, about 81, about 79, about 78, about 77, about 76, about 74, about 73, about 72, about 71, about 69, about 68, about 67, about 66 or so amino acids in length, etc.) are all contemplated to fall within the scope of the present invention.

[0040] In particular embodiments, the peptides and polypeptides of the present invention may comprise a sequence of at least about 9, or about 10, or about 11, or about 12, or about 13, or about 14, or about 15, or about 16, or about 17, or about 18, or about 19, or about 20, or about 21, or about 22, or about 23, or about 24, or about 25, or about 26, or about 27, or about 28, or about 29, or about 30, or about 31, or about 32, or about 33, or about 34, or about 35, or about 36, or about 37, or about 38, or about 39, or about 40, or about 41, or about 42, or about or about 43, or about 45, or about 46, or about 47, or about 48, or about 49, or about 50 contiguous amino acids as disclosed in any one or more of the peptides encoded by any one of the above polynucleotides or disclosed in any one of SEQ ID NOs:11,039-11,058 herein.

[0041] In other embodiments, the peptides and polypeptides of the present invention may comprise a sequence of at least about 51, or about 52, or about 53, or about 54, or about 55, or about 56, or about 57, or about 58, or about 59, or about 60, or about 61, or about 62, or about 63, or about 64, or about 65, or about 66, or about 67, or about 68, or about 69, or about 70, or about 71, or about 72, or about 73, or about 74, or about 75, or about 76, or about 77, or about 78, or about 79, or about 80, or about 81, or about 82, or about 83, or about 84, or about 85, or about 86, or about 87, or about 88, or about 89, or about 90, about 91, or about 92, or about 93,or about 94, or about 95, or about 96, or about 97, or about 98, or about 99, or 100 contiguous amino acids as disclosed in any one or more of the peptides encoded by any one of the above polynucleotides or disclosed in any one of SEQ ID NOs:11,039-11,058 herein.

[0042] In still other embodiments, the preferred peptides and polypeptides of the present invention comprise a sequence of at least about 100, 125, 150, 175, 200, 225, 250, 275, 300, 325, 350, 375, or 400 or more contiguous amino acids as disclosed in any one or more of the peptides encoded by any one of the above polynucleotides or disclosed in any one of SEQ ID NOs:11,039-11,058 herein.

[0043] The polypeptides of the invention typically will comprise at least a first contiguous amino acid sequence according to any one of the peptides encoded by any one of the above polynucleotides or disclosed in any one of SEQ ID NOs:11,039-11,058, but may also, optionally comprise at least a second, at least a third, or even at least a fourth or greater contiguous amino acid sequence according to any one of the peptides encoded by any one of the above polynucleotides or disclosed in any one of SEQ ID NOs:11,039-11,058. A single polypeptide may contain only a single coding region, or alternatively, a single polypeptide may comprise a plurality of identical or distinctly different contiguous amino acid sequences in accordance with any one of the peptides encoded by any one of the above polynucleotides or disclosed in any one of SEQ ID NOs:11,039-11,058. In fact, the polypeptide may comprise a plurality of the same contiguous amino acid sequences, or they may comprise one or more different contiguous amino acid sequences of any of the peptides encoded by any one of the above polynucleotides or disclosed in any one of SEQ ID NOs:11,039-11,058. For example, a single polypeptide can comprise a single contiguous amino acid sequence from one or more of the peptides encoded by any one of the above polynucleotides or disclosed in any one of SEQ ID NOs:11,039-11,058, or alternatively, may comprise two or more distinctly different contiguous amino acid sequences from one or more of the peptides encoded by any one of the above polynucleotides or disclosed in any one of SEQ ID NOs:11,039-11,058. In fact, the polypeptide may comprise 2, 3, 4, or even 5 distinct contiguous amino sequences of any one of the peptides encoded by any one of the above polynucleotides or disclosed in any one of SEQ ID NOs: 11,039-11,058. Alternatively, a single polypeptide may comprise 2, 3, 4, or even 5 distinct coding regions. For example, a polypeptide may comprise at least a first coding region that comprises a first contiguous amino acid sequence of any one of the peptides encoded by any one of the above polynucleotides or disclosed in any one of SEQ ID NOs:11,039-11,058, and at least a second coding region that comprises a second contiguous amino acid sequence of any one of the peptides encoded by any one of the above polynucleotides or disclosed in any one of SEQ ID NOs:11,039-11,058. In contrast, a polypeptide may comprise at least a first coding region that comprises a first contiguous amino acid sequence of any one of the peptides encoded by any one of the above polynucleotides or disclosed in any one of SEQ ID NOs:11,039-11,058, and at least a second coding region that comprises a second distinctly different peptide or polypeptide, such as for example, an adjuvant or an immunostimulant peptide or polypeptide.

[0044] In such cases, the two coding regions may be separate on the same polypeptide, or the two coding regions may be operatively attached, each in the correct reading frame, such that a fusion polypeptide is produced, in which the first amino acid sequence of the first coding region is linked to the second amino acid sequence of the second coding region.

[0045] Throughout this disclosure, a phrase such as “a sequence as disclosed in SEQ ID NO:11,000 to SEQ ID NO:11,004” is intended to encompass any and all contiguous sequences disclosed by any one of these sequence identifiers. That is to say, “a sequence as disclosed in any of SEQ ID NO:11,000 through SEQ ID NO:11,004” means any sequence that is disclosed in any one of SEQ ID NO:1,000, SEQ ID NO:1,001, SEQ ID NO:11,002, SEQ ID NO:11,003, or SEQ ID NO: 11,004. Likewise, “a sequence as disclosed in any of SEQ ID NOs:25 to 37” means any sequence that is disclosed in any one of SEQ ID NO:25, SEQ ID NO:26, SEQ ID NO:27, SEQ ID NO:28, SEQ ID NO:29, SEQ ID NO:30, SEQ ID NO:31, SEQ ID NO:32, SEQ ID NO:33, SEQ ID NO:34, SEQ ID NO:35, SEQ ID NO:36, or SEQ ID NO:37, and so forth.

[0046] Likewise, a phrase such as “at least a first sequence from any one of SEQ ID NO:55 to SEQ ID NO:62” is intended to refer to a first sequence that is disclosed in any one of SEQ ID NO:55, SEQ ID NO:56, SEQ ID NO:57, SEQ ID NO:58, SEQ ID NO:59, SEQ ID NO:60, SEQ ID NO:61, or SEQ ID NO:62.

[0047] It will also be understood that the kits, and compositions of the present invention comprise in an overall and general sense at least one or more particular polynucleotides, polypeptides, and peptides that comprise one or more contiguous sequence regions from one or more of the nucleic acid sequences disclosed herein in SEQ ID NOs:11,000-11,038 or from one or more of the amino acid sequences encoded by any one of the above polynucleotides or disclosed in any one of SEQ ID NOs:11,039-11,058, and that such peptide, polypeptide and polynucleotide compositions may be used in one or more of the particular methods and uses disclosed herein for the diagnosis, detection, prophylaxis, and therapy of one or more hematological cancers, and in particular, lymphomas of a variety of specific types. It will also be understood to the skilled artisan having benefit of the teachings of the present Specification, that the peptide and polypeptide compositions may be used to generate a T cell or an immune response in an animal, and that such compositions may also be administered to an animal from which immunospecific antibodies and antigen binding fragments may be isolated or identified that specifically bind to such peptides or polypeptides. Such an artisan will also recognize that the polynucleotides identified by the present disclosure may be used to produce such peptides, polypeptides, antibodies, and antigen binding fragments, by recombinant protein production methodologies that are also within the capability of the skilled artisan having benefit of the specific amino acid and nucleic acid sequences provided herein.

[0048] Likewise, it will be understood by a skilled artisan in the field, that one or more of the disclosed compositions may used in one or more diagnostic or detection methodologies to identify certain antibodies, peptides, polynucleotides, or polypeptides in a biological sample, in a host cell, or even within the body or tissues of an animal. It will be understood by a skilled artisan in the field, that one or more of the disclosed nucleic acid or amino acid compositions may used in the preparation or manufacture of one or more medicaments for use in the diagnosis, detection, prognosis, prophylaxis, or therapy of one or more hematological malignancies in an animal, and particularly those malignant conditions disclosed and claimed herein.

[0049] It will also be readily apparent to those of skill in the art, that the methods, kits, and uses, of the present invention preferably employ one or more of the compounds and/or compositions disclosed herein that comprise one or more contiguous nucleotide sequences as may be presented in SEQ ID NOs:11,000-11,038 of the attached sequence listing.

[0050] Likewise, it will also be readily apparent to those of skill in the art, that the methods, kits, and uses, of the present invention may also employ one or more of the compounds and compositions disclosed herein that comprise one or more contiguous amino acid sequences of any of the peptides encoded by any one of the above polynucleotides or presented in any one of SEQ ID NOs:11,039-11,058 of the attached sequence listing.

### 3. BRIEF DESCRIPTION OF THE DRAWINGS AND THE APPENDICES

[0051] The invention may be understood by reference to the following description taken in conjunction with the accompanying drawings, in which like reference numerals identify like elements, and in which:

[0052] FIG. 1 illustrates a schematic outline of the microarray chip technology approach used to identify the cDNA targets of the present invention as described Section 5.1;

[0053] FIG. 2 illustrates a schematic outline of the general protocol for in vitro whole gene CD8⁺ T cell priming procedure used to generate antigen-specific lines and to identify clones of interest;

[0054] FIG. 3 illustrates a schematic outline of the general protocol for in vitro whole gene CD4⁺ T cell priming procedure used to generate antigen-specific lines and to identify clones of interest;

[0055] FIG. 4 illustrates the panel of probes used to identify cDNAs that are overexpressed in lymphoma cells;

[0056] FIGS. 5 and 6 illustrate the cDNAs that are highly expressed in lymphoma cells;

[0057] FIG. 7 lists the antigens that have similar tissue expression profiles as the known therapeutics, CD20 and CD52;

[0058] FIG. 8 illustrates the expression of the antigens of FIG. 7 in hematopoietic subsets and hematological malignancies as measured by RealTime PCR;

[0059] FIG. 9 lists the nucleotide sequences of antigens with similar tissue expression profiles as CD20 and CD52;

[0060] FIG. 10 lists the nucleotide and protein sequences of Ly1464;

[0061] FIG. 11 illustrates the results of the TMpred report for Ly1464;

[0062] FIG. 12 lists the MHC Class binding peptides of Ly1464;

[0063] FIG. 13 illustrates the results of analyzing Ly1464 with the TSITES program;

[0064] FIG. 14 lists the immunogenic peptides of Ly1464;

[0065] FIG. 15 illustrates the laboratory procedure used to synthesize recombinant Ra12-Ly1464;

[0066] FIG. 16 lists the Ly1464 nucleotide sequence, the Ra12-Ly1464 nucleotide sequence, the Ra12-Ly1464 amino acid sequence, and the properties of the Ly1464 protein;

[0067] FIG. 17 lists LY1484 nucleotide and amino acid sequences;

[0068] FIG. 18 illustrates the results of the TMpred report for Ly1484 long and Ly1484 short;

[0069] FIG. 19 lists the MHC class I binding peptides of Ly1484 long;

[0070] FIG. 20 lists the MHC class I binding peptides of Ly1484 short;

[0071] FIG. 21 illustrates the results of the TSITES analysis of Ly1484 long;

[0072] FIG. 22 illustrates the results of the TSITES analysis of Ly1484 short;

[0073] FIG. 23 summarizes the attributes of the Lifeseq clone that matches with Ly1456.

[0074] FIG. 24 lists the sequence of GenBank clone on chromosome 15q21 clone b2265b18 (acc. no. AC008131), a clone that matches with Ly1485P.

[0075] FIG. 25 lists the sequence of the human secreted protein-encoding gene 9 cDNA clone HTOHB55 SEQ ID NO:1 (acc. no. AAH19210), a clone that matches with Ly1485P.

[0076] FIG. 26 lists the sequence of human secreted protein-encoding gene 9 cDNA clone HTOHB55 SEQ ID NO:19 (acc. no. AAH19178) on chromosome 15q21, a clone that matches with Ly1485P.

[0077] FIG. 27 lists the nucleotide and amino acid sequences of Ly1488;

[0078] FIG. 28 illustrates the results of the TMpred analysis of Ly1488;

[0079] FIG. 29 lists the nucleotide sequence for the lung cancer associated polynucleotide sequence SEQ ID 265 (Genseq accession number AAF18246), a clone that matches the Ly1449 and Ly1480 sequences.

[0080] FIG. 30 lists the nucleotide sequence for the homo sapiens Genbank clone on chromosome 17 clone RP11-956N15 (accession number AC021581), a clone that matches the Ly1449 and Ly1480 sequences.

[0081] FIG. 31 illustrates the presence of Ly1448P-specific serum antibodies in lymphoma patients.

[0082] FIG. 32 illustrates the presence of TCL-1-specific serum antibodies in lymphoma patients.

[0083] FIG. 33 diagrammatically illustrates the 18 LY1448P exons present on chromosome 1 and the location of these exons in several splice variants.

[0084] FIG. 34 depicts the LY1448P splice forms and the exons used in each.

[0085] FIG. 35 diagrammatically depicts the structure of each of the LY1448P splice forms.

### 4. DESCRIPTION OF ILLUSTRATIVE EMBODIMENTS

[0086] In order that the invention herein described may be more fully understood, the following description of various illustrative embodiments is set forth.

[0087] The present invention is generally directed to compositions and methods for the immunotherapy and diagnosis of Hematological malignancies, such as B cell leukemias and lymphomas and multiple myelomas.

[0088] 4.1 Methods of Nucleic Acid Delivery and DNA Transfection

[0089] In certain embodiments, it is contemplated that one or more RNA or DNA and/or substituted polynucleotide compositions disclosed herein will be used to transfect an appropriate host cell. Technology for introduction of RNAs and DNAs, and vectors comprising them into suitable host cells is well known to those of skill in the art. In particular, such polynucleotides may be used to genetically transform one or more host cells, when therapeutic administration of one or more active peptides, compounds or vaccines is achieved through the expression of one or more polynucleotide constructs that encode one or more therapeutic compounds of interest.

[0090] A variety of means for introducing polynucleotides and/or polypeptides into suitable target cells is known to those of skill in the art. For example, when polynucleotides are contemplated for delivery to cells, several non-viral methods for the transfer of expression constructs into cultured mammalian cells are available to the skilled artisan for his use. These include, for example, calcium phosphate precipitation (Graham and Van Der Eb, 1973; Chen and Okayama, 1987; Rippe et al., 1990); DEAE-dextran precipitation (Gopal, 1985); electroporation (Wong and Neumann, 1982; Fromm et al., 1985; Tur-Kaspa et al., 1986; Potter et al., 1984; Suzuki et al., 1998; Vanbever et al., 1998), direct microinjection (Capecchi, 1980; Harland and Weintraub, 1985), DNA-loaded liposomes (Nicolau and Sene, 1982; Fraley et al., 1979; Takakura, 1998) and lipofectamine-DNA complexes, cell sonication (Fechheimer et al., 1987), gene bombardment using high velocity microprojectiles (Yang et al., 1990; Klein et al., 1992), and receptor-mediated transfection (Curiel et al., 1991; Wagner et al., 1992; Wu and Wu, 1987; Wu and Wu, 1988). Some of these techniques may be successfully adapted for in vivo or ex vivo use.

[0091] A bacterial cell, a yeast cell, or an animal cell transformed with one or more of the disclosed expression vectors represent an important aspect of the present invention. Such transformed host cells are often desirable for use in the expression of the various DNA gene constructs disclosed herein. In some aspects of the invention, it is often desirable to modulate, regulate, or otherwise control the expression of the gene segments disclosed herein. Such methods are routine to those of skill in the molecular genetic arts. Typically, when increased or over-expression of a particular gene is desired, various manipulations may be employed for enhancing the expression of the messenger RNA, particularly by using an active promoter, and in particular, a tissue-specific promoter such as those disclosed herein, as well as by employing sequences, which enhance the stability of the messenger RNA in the particular transformed host cell.

[0092] Typically, the initiation and translational termination region will involve stop codon(s), a terminator region, and optionally, a polyadenylation signal. In the direction of transcription, namely in the 5′ to 3′ direction of the coding or sense sequence, the construct will involve the transcriptional regulatory region, if any, and the promoter, where the regulatory region may be either 5′ or 3′ of the promoter, the ribosomal binding site, the initiation codon, the structural gene having an open reading frame in phase with the initiation codon, the stop codon(s), the polyadenylation signal sequence, if any, and the terminator region. This sequence as a double strand may be used by itself for transformation of a microorganism or eukaryotic host, but will usually be included with a DNA sequence involving a marker, where the second DNA sequence may be joined to the expression construct during introduction of the DNA into the host.

[0093] Where no functional replication system is present, the construct will also preferably include a sequence of at least about 30 or about 40 or about 50 base pairs (bp) or so, preferably at least about 60, about 70, about 80, or about 90 to about 100 or so bp, and usually not more than about 500 to about 1000 or so bp of a sequence homologous with a sequence in the host. In this way, the probability of legitimate recombination is enhanced, so that the gene will be integrated into the host and stably maintained by the host. Desirably, the regulatory regions of the expression construct will be in close proximity to (and also operably positioned relative to) the selected therapeutic gene providing for complementation as well as the gene providing for the competitive advantage. Therefore, in the event that the therapeutic gene is lost, the resulting organism will be likely to also lose the gene providing for the competitive advantage, so that it will be unable to compete in the environment with the gene retaining the intact construct.

[0094] The selected therapeutic gene can be introduced between the transcriptional and translational initiation region and the transcriptional and translational termination region, so as to be under the regulatory control of the initiation region. This construct may be included in a plasmid, which will include at least one replication system, but may include more than one, where one replication system is employed for cloning during the development of the plasmid and the second replication system is necessary for functioning in the ultimate host, in this case, a mammalian host cell. In addition, one or more markers may be present, which have been described previously. Where integration is desired, the plasmid will desirably include a sequence homologous with the host genome.

[0095] Genes or other nucleic acid segments, as disclosed herein, can be inserted into host cells using a variety of techniques that are well known in the art. Five general methods for delivering a nucleic segment into cells have been described: (1) chemical methods (Graham and Van Der Eb, 1973); (2) physical methods such as microinjection (Capecchi, 1980), electroporation (U.S. Pat. No. 5,472,869; Wong and Neumann, 1982; Fromm et al., 1985), microprojectiles bombardment (U.S. Pat. No. 5,874,265, specifically incorporated herein by reference in its entirety), “gene gun” (Yang et al., 1990); (3) viral vectors (Eglitis and Anderson, 1988); (4) receptor-mediated mechanisms (Curiel et al., 1991; Wagner et al., 1992); and (5) bacterial-mediated transformation.

[0096] 4.2 Hematological Malignancy Related-Specific Antibodies and Antigen-Binding Fragments Thereof

[0097] The present invention further provides antibodies and antigen-binding fragments thereof, that specifically bind to (or are immunospecific for) at least a first peptide or peptide variant as disclosed herein. As used herein, an antibody or an antigen-binding fragment is said to “specifically bind” to a peptide if it reacts at a detectable level (within, for example, an ELISA) with the peptide, and does not react detectably with unrelated peptides or proteins under similar conditions. As used herein, “binding” refers to a non-covalent association between two separate molecules such that a “complex” is formed. The ability to bind may be evaluated by, for example, determining a binding constant for the formation of the complex. The binding constant is the value obtained when the concentration of the complex is divided by the product of the component concentrations. In the context of the present invention, in general, two compounds are said to “bind” when the binding constant for complex formation exceeds about 10³ L/mol. The binding constant maybe determined using methods well known in the art.

[0098] Any agent that satisfies the above requirements may be a binding agent. In illustrative embodiments, a binding agent is an antibody or an antigen-binding fragment thereof. Such antibodies may be prepared by any of a variety of techniques known to those of ordinary skill in the art (Harlow and Lane, 1988). In general, antibodies can be produced by cell culture techniques, including the generation of monoclonal antibodies as described herein, or via transfection of antibody genes into suitable bacterial or mammalian cell hosts, in order to allow for the production of recombinant antibodies. In one technique, an immunogen comprising the peptide is initially injected into any of a wide variety of mammals (e.g., mice, rats, rabbits, sheep or goats). In this step, the peptides of this invention may serve as the immunogen without modification. Alternatively, particularly for relatively short peptides, a superior immune response may be elicited if the peptide is joined to a carrier protein, such as bovine serum albumin or keyhole limpet hemocyanin. The immunogen is injected into the animal host, preferably according to a predetermined schedule incorporating one or more booster immunizations, and the animals are bled periodically. Polyclonal antibodies specific for the peptide may then be purified from such antisera by, for example, affinity chromatography using the peptide coupled to a suitable solid support.

[0099] Monoclonal antibodies specific for the antigenic peptide of interest may be prepared, for example, using the technique of Kohler and Milstein (1976) and improvements thereto. Briefly, these methods involve the preparation of immortal cell lines capable of producing antibodies having the desired specificity (i.e., reactivity with the peptide of interest). Such cell lines may be produced, for example, from spleen cells obtained from an animal immunized as described above. The spleen cells are then immortalized by, for example, fusion with a myeloma cell fusion partner, preferably one that is syngeneic with the immunized animal. A variety of fusion techniques may be employed. For example, the spleen cells and myeloma cells may be combined with a nonionic detergent for a few minutes and then plated at low density on a selective medium that supports the growth of hybrid cells, but not myeloma cells. A preferred selection technique uses HAT (hypoxanthine, aminopterin, thymidine) selection. After a sufficient time, usually about 1 to 2 weeks, colonies of hybrids are observed. Single colonies are selected and their culture supernatants tested for binding activity against the peptide. Hybridomas having high reactivity and specificity are preferred.

[0100] Monoclonal antibodies may be isolated from the supernatants of growing hybridoma colonies. In addition, various techniques may be employed to enhance the yield, such as injection of the hybridoma cell line into the peritoneal cavity of a suitable vertebrate host, such as a mouse. Monoclonal antibodies may then be harvested from the ascites fluid or the blood. Contaminants may be removed from the antibodies by conventional techniques, such as chromatography, gel filtration, precipitation, and extraction. The peptides of this invention may be used in the purification process in, for example, an affinity chromatography step.

[0101] Within certain embodiments, the use of antigen-binding fragments of antibodies may be preferred. Such fragments include Fab fragments, which may be prepared using standard techniques. Briefly, immunoglobulins may be purified from rabbit serum by affinity chromatography on Protein A bead columns (Harlow and Lane, 1988) and digested by papain to yield Fab and Fc fragments. The Fab and Fc fragments may be separated by affinity chromatography on Protein A bead columns.

[0102] Monoclonal antibodies and fragments thereof may be coupled to one or more therapeutic agents. Suitable agents in this regard include radioactive tracers and chemotherapeutic agents, which may be used, for example, to purge autologous bone marrow in vitro). Representative therapeutic agents include radionuclides, differentiation inducers, drugs, toxins, and derivatives thereof. Preferred radionuclides include ⁹⁰y, ¹²³I, ¹²⁵I, ¹³¹I, ¹⁸⁶Re, ¹⁸⁸Re, ²¹¹At, and ²¹²Bi. Preferred drugs include methotrexate, and pyrimidine and purine analogs. Preferred differentiation inducers include phorbol esters and butyric acid. Preferred toxins include ricin, abrin, diptheria toxin, cholera toxin, gelonin, Pseudomonas exotoxin, Shigella toxin, and pokeweed antiviral protein. For diagnostic purposes, coupling of radioactive agents may be used to facilitate tracing of metastases or to determine the location of hematological malignancy related-positive tumors.

[0103] A therapeutic agent may be coupled (e.g., covalently bonded) to a suitable monoclonal antibody either directly or indirectly (e.g., via a linker group). A direct reaction between an agent and an antibody is possible when each possesses a substituent capable of reacting with the other. For example, a nucleophilic group, such as an amino or sulfhydryl group, on one may be capable of reacting with a carbonyl-containing group, such as an anhydride or an acid halide, or with an alkyl group containing a good leaving group (e.g., a halide) on the other.

[0104] Alternatively, it may be desirable to couple a therapeutic agent and an antibody via a linker group. A linker group can function as a spacer to distance an antibody from an agent in order to avoid interference with binding capabilities. A linker group can also serve to increase the chemical reactivity of a substituent on an agent or an antibody, and thus increase the coupling efficiency. An increase in chemical reactivity may also facilitate the use of agents, or functional groups on agents, which otherwise would not be possible.

[0105] It will be evident to those skilled in the art that a variety of bifunctional or polyfunctional reagents, both homo- and hetero-functional (such as those described in the catalog of the Pierce Chemical Co., Rockford, Ill.), may be employed as the linker group. Coupling may be affected, for example, through amino groups, carboxyl groups, and sulfhydryl groups or oxidized carbohydrate residues. There are numerous references describing such methodology, e.g., U.S. Pat. No. 4,671,958.

[0106] Where a therapeutic agent is more potent when free from the antibody portion of the immunoconjugates of the present invention, it may be desirable to use a linker group that is cleavable during or upon internalization into a cell. A number of different cleavable linker groups have been described. The mechanisms for the intracellular release of an agent from these linker groups include cleavage by reduction of a disulfide bond (U.S. Pat. No. 4,489,710), by irradiation of a photolabile bond (U.S. Pat. No. 4,625,014), by hydrolysis of derivatized amino acid side chains (U.S. Pat. No. 4,638,045), by serum complement-mediated hydrolysis (U.S. Pat. No. 4,671,958), and acid-catalyzed hydrolysis (U.S. Pat. No. 4,569,789).

[0107] It may be desirable to couple more than one agent to an antibody. In one embodiment, multiple molecules of an agent are coupled to one antibody molecule. In another embodiment, more than one type of agent may be coupled to one antibody. Regardless of the particular embodiment, immunoconjugates with more than one agent may be prepared in a variety of ways. For example, more than one agent may be coupled directly to an antibody molecule, or linkers that provide multiple sites for attachment can be used. Alternatively, a carrier can be used. A carrier may bear the agents in a variety of ways, including covalent bonding either directly or via a linker group. Suitable carriers include proteins such as albumins (U.S. Pat. No. 4,507,234), peptides and polysaccharides such as aminodextran (U.S. Pat. No. 4,699,784). A carrier may also bear an agent by noncovalent bonding or by encapsulation, such as within a liposome vesicle (U.S. Pat. No. 4,429,008 and U.S. Pat. No. 4,873,088). Carriers specific for radionuclide agents include radiohalogenated small molecules and chelating compounds. For example, U.S. Pat. No. 4,735,792 discloses representative radiohalogenated small molecules and their synthesis. A radionuclide chelate may be formed from chelating compounds that include those containing nitrogen and sulfur atoms as the donor atoms for binding the metal, or metal oxide, radionuclide. For example, U.S. Pat. No. 4,673,562 discloses representative chelating compounds and their synthesis.

[0108] A variety of routes of administration for the antibodies and immunoconjugates may be used. Typically, administration will be intravenous, intramuscular, subcutaneous or in the bed of a resected tumor. It will be evident that the precise dose of the antibody/immunoconjugate will vary depending upon the antibody used, the antigen density on the tumor, and the rate of clearance of the antibody.

[0109] Also provided herein are anti-idiotypic antibodies that mimic an immunogenic portion of hematological malignancy related. Such antibodies may be raised against an antibody, or an antigen-binding fragment thereof, that specifically binds to an immunogenic portion of hematological malignancy related, using well-known techniques. Anti-idiotypic antibodies that mimic an immunogenic portion of hematological malignancy related are those antibodies that bind to an antibody, or antigen-binding fragment thereof, that specifically binds to an immunogenic portion of hematological malignancy related, as described herein.

[0110] Irrespective of the source of the original hematological malignancy related peptide-specific antibody, the intact antibody, antibody multimers, or any one of a variety of functional, antigen-binding regions of the antibody may be used in the present invention. Exemplary functional regions include scFv, Fv, Fab′, Fab and F(ab′)₂ fragments of the hematological malignancy related peptide-specific antibodies. Techniques for preparing such constructs are well known to those in the art and are further exemplified herein.

[0111] The choice of antibody construct may be influenced by various factors. For example, prolonged half-life can result from the active readsorption of intact antibodies within the kidney, a property of the Fc piece of immunoglobulin. IgG based antibodies, therefore, are expected to exhibit slower blood clearance than their Fab′ counterparts. However, Fab′ fragment-based compositions will generally exhibit better tissue penetrating capability.

[0112] Antibody fragments can be obtained by proteolysis of the whole immunoglobulin by the non-specific thiol protease, papain. Papain digestion yields two identical antigen-binding fragments, termed “Fab fragments,” each with a single antigen-binding site, and a residual “Fc fragment.”

[0113] Papain should first be activated by reducing the sulfhydryl group in the active site with cysteine, 2-mercaptoethanol or dithiothreitol. Heavy metals in the stock enzyme should be removed by chelation with EDTA (2 mM) to ensure maximum enzyme activity. Enzyme and substrate are normally mixed together in the ratio of 1:100 by weight. After incubation, the reaction can be stopped by irreversible alkylation of the thiol group with iodoacetamide or simply by dialysis. The completeness of the digestion should be monitored by SDS-PAGE and the various fractions separated by Protein A-Sepharose or ion exchange chromatography.

[0114] The usual procedure for preparation of F(ab′)₂ fragments from IgG of rabbit and human origin is limited proteolysis by the enzyme pepsin. The conditions, 100×antibody excess wt./wt. in acetate buffer at pH 4.5, 37° C., suggest that antibody is cleaved at the C-terminal side of the inter-heavy-chain disulfide bond. Rates of digestion of mouse IgG may vary with subclass and it may be difficult to obtain high yields of active F(ab′)₂ fragments without some undigested or completely degraded IgG. In particular, IgG_{2b} is highly susceptible to complete degradation. The other subclasses require different incubation conditions to produce optimal results, all of which is known in the art.

[0115] Pepsin treatment of intact antibodies yields an F(ab′)₂ fragment that has two antigen-combining sites and is still capable of cross-linking antigen. Digestion of rat IgG by pepsin requires conditions including dialysis in 0.1 M acetate buffer, pH 4.5, and then incubation for four hrs with 1% wt./wt. pepsin; IgG₁ and IgG₂ₐ digestion is improved if first dialyzed against 0.1 M formate buffer, pH 2.8, at 4° C., for 16 hrs followed by acetate buffer. IgG_{2b} gives more consistent results with incubation in staphylococcal V8 protease (3% wt./wt.) in 0.1 M sodium phosphate buffer, pH 7.8, for four hrs at 37° C.

[0116] A Fab fragment also contains the constant domain of the light chain and the first constant domain (CHI) of the heavy chain. Fab′ fragments differ from Fab fragments by the addition of a few residues at the carboxyl terminus of the heavy chain CH1 domain including one or more cysteine(s) from the antibody hinge region. F(ab′)₂ antibody fragments were originally produced as pairs of Fab′ fragments that have hinge cysteines between them. Other chemical couplings of antibody fragments are also known.

[0117] The term “variable,” as used herein in reference to antibodies, means that certain portions of the variable domains differ extensively in sequence among antibodies, and are used in the binding and specificity of each particular antibody to its particular antigen. However, the variability is not evenly distributed throughout the variable domains of antibodies. It is concentrated in three segments termed “hypervariable regions,” both in the light chain and the heavy chain variable domains.

[0118] The more highly conserved portions of variable domains are called the framework region (FR). The variable domains of native heavy and light chains each comprise four FRs (FR1, FR2, FR3 and FR4, respectively), largely adopting a β-sheet configuration, connected by three hypervariable regions, which form loops connecting, and in some cases, forming part of, the β-sheet structure.

[0119] The hypervariable regions in each chain are held together in close proximity by the FRs and, with the hypervariable regions from the other chain, contribute to the formation of the antigen-binding site of antibodies (Kabat et al., 1991, specifically incorporated herein by reference). The constant domains are not involved directly in binding an antibody to an antigen, but exhibit various effector functions, such as participation of the antibody in antibody-dependent cellular toxicity.

[0120] The term “hypervariable region,” as used herein, refers to the amino acid residues of an antibody that are responsible for antigen-binding. The hypervariable region comprises amino acid residues from a “complementarity determining region” or “CDR” (i.e. residues 24-34 (L1), 50-56 (L2) and 89-97 (L3) in the light chain variable domain and 31-35 (H1), 50-56 (H2) and 95-102 (H3) in the heavy chain variable domain (Kabat et al., 1991, specifically incorporated herein by reference) and/or those residues from a “hypervariable loop” (i.e., residues 26-32 (Li), 50-52(L2) and 91-96 (L3) in the light chain variable domain and 26-32 (H1), 53-55 (H2) and 96-101 (H3) in the heavy chain variable domain). “Framework” or “FR” residues are those variable domain residues other than the hypervariable region residues as herein defined.

[0121] An “Fv” fragment is the minimum antibody fragment that contains a complete antigen-recognition and binding site. This region consists of a dimer of one heavy chain and one light chain variable domain in tight, con-covalent association. It is in this configuration that three hypervariable regions of each variable domain interact to define an antigen-binding site on the surface of the V_{H}-V_{L} dimer. Collectively, six hypervariable regions confer antigen-binding specificity to the antibody. However, even a single variable domain (or half of an Fv comprising only three hypervariable regions specific for an antigen) has the ability to recognize and bind antigen, although at a lower affinity than the entire binding site.

[0122] “Single-chain Fv” or “sFv” antibody fragments comprise the V_{H} and V_{L} domains of antibody, wherein these domains are present in a single polypeptide chain. Generally, the Fv polypeptide further comprises a polypeptide linker between the V_{H} and V_{L} domains that enables the sFv to form the desired structure for antigen binding.

[0123] “Diabodies” are small antibody fragments with two antigen-binding sites, which fragments comprise a heavy chain variable domain (V_{H}) connected to a light chain variable domain (V_{L}) in the same polypeptide chain (V_{H}-V_{L}). By using a linker that is too short to allow pairing between the two domains on the same chain, the domains are forced to pair with the complementary domains of another chain and create two antigen-binding sites. Diabodies are described in European Pat. Appl. No. EP 404,097 and Intl. Pat. Appl. Publ. No. WO 93/11161, each specifically incorporated herein by reference. “Linear antibodies”, which can be bispecific or monospecific, comprise a pair of tandem Fd segments (V_{H}-C_{H}1-V_{H}-C_{H}1) that form a pair of antigen binding regions, as described in Zapata et al. (1995), specifically incorporated herein by reference.

[0124] Other types of variants are antibodies with improved biological properties relative to the parent antibody from which they are generated. Such variants, or second-generation compounds, are typically substitutional variants involving one or more substituted hypervariable region residues of a parent antibody. A convenient way for generating such substitutional variants is affinity maturation using phage display.

[0125] In affinity maturation using phage display, several hypervariable region sites (e.g., 6 to 7 sites) are mutated to generate all possible amino substitutions at each site. The antibody variants thus generated are displayed in a monovalent fashion from filamentous phage particles as fusions to the gene III product of M13 packaged within each particle. The phage-displayed variants are then screened for their biological activity (e.g., binding affinity) as herein disclosed. In order to identify candidate hypervariable region sites for modification, alanine-scanning mutagenesis can be performed on hypervariable region residues identified as contributing significantly to antigen binding.

[0126] Alternatively, or in addition, the crystal structure of the antigen-antibody complex be delineated and analyzed to identify contact points between the antibody and target. Such contact residues and neighboring residues are candidates for substitution. Once such variants are generated, the panel of variants is subjected to screening, and antibodies with analogues but different or even superior properties in one or more relevant assays are selected for further development.

[0127] In using a Fab′ or antigen binding fragment of an antibody, with the attendant benefits on tissue penetration, one may derive additional advantages from modifying the fragment to increase its half-life. A variety of techniques may be employed, such as manipulation or modification of the antibody molecule itself, and also conjugation to inert carriers. Any conjugation for the sole purpose of increasing half-life, rather than to deliver an agent to a target, should be approached carefully in that Fab′ and other fragments are chosen to penetrate tissues. Nonetheless, conjugation to non-protein polymers, such PEG and the like, is contemplated.

[0128] Modifications other than conjugation are therefore based upon modifying the structure of the antibody fragment to render it more stable, and/or to reduce the rate of catabolism in the body. One mechanism for such modifications is the use of D-amino acids in place of L-amino acids. Those of ordinary skill in the art will understand that the introduction of such modifications needs to be followed by rigorous testing of the resultant molecule to ensure that it still retains the desired biological properties. Further stabilizing modifications include the use of the addition of stabilizing moieties to either the N-terminal or the C-terminal, or both, which is generally used to prolong the half-life of biological molecules. By way of example only, one may wish to modify the termini by acylation or amination.

[0129] Moderate conjugation-type modifications for use with the present invention include incorporating a salvage receptor binding epitope into the antibody fragment. Techniques for achieving this include mutation of the appropriate region of the antibody fragment or incorporating the epitope as a peptide tag that is attached to the antibody fragment. Intl. Pat. Appl. Publ. No. WO 96/32478 is specifically incorporated herein by reference for the purposes of further exemplifying such technology. Salvage receptor binding epitopes are typically regions of three or more amino acids from one or two lops of the Fc domain that are transferred to the analogous position on the antibody fragment. The salvage receptor-binding epitopes disclosed in Intl. Pat. Appl. Publ. No. WO 98/45331 are incorporated herein by reference for use with the present invention.

[0130] 4.3 T Cell Compositions Specific for Hematological Malignancy-Related Peptides

[0131] Immunotherapeutic compositions may also, or alternatively, comprise T cells specific for hematological malignancy related. Such cells may generally be prepared in vitro or ex vivo, using standard procedures. For example, T cells may be present within (or isolated from) bone marrow, peripheral blood or a fraction of bone marrow or peripheral blood of a mammal, such as a patient, using a commercially available cell separation system, such as the Isolex™ System, available from Nexell Therapeutics, Inc. (Irvine, Calif.; see also U.S. Pat. No. 5,240,856; U.S. Pat. No. 5,215,926; Intl. Pat. Appl. Publ. No. WO 89/06280; Intl. Pat. Appl. Publ. No. WO 91/16116 and Intl. Pat. Appl. Publ. No. WO 92/07243). Alternatively, T cells may be derived from related or unrelated humans, non-human mammals, cell lines or cultures.

[0132] T cells may be stimulated with hematological malignancy related peptide, polynucleotide encoding a hematological malignancy related peptide and/or an antigen-presenting cell (APC) that expresses a hematological malignancy related peptide. Such stimulation is performed under conditions and for a time sufficient to permit the generation of T cells that are specific for the hematological malignancy related peptide. Preferably, a hematological malignancy related peptide or polynucleotide is present within a delivery vehicle, such as a microsphere, to facilitate the generation of antigen-specific T cells. Briefly, T cells, which may be isolated from a patient or a related or unrelated donor by routine techniques (such as by Ficoll/Hypaque® density gradient centrifugation of peripheral blood lymphocytes), are incubated with hematological malignancy related peptide. For example, T cells may be incubated in vitro for 2-9 days (typically 4 days) at 37° C. with hematological malignancy related peptide (e.g., 5 to 25 μg/ml) or cells synthesizing a comparable amount of hematological malignancy related peptide. It may be desirable to incubate a separate aliquot of a T cell sample in the absence of hematological malignancy related peptide to serve as a control.

[0133] T cells are considered to be specific for a hematological malignancy related peptide if the T cells kill target cells coated with a hematological malignancy related peptide or expressing a gene encoding such a peptide. T cell specificity may be evaluated using any of a variety of standard techniques. For example, within a chromium release assay or proliferation assay, a stimulation index of more than two fold increase in lysis and/or proliferation, compared to negative controls, indicates T cell specificity. Such assays may be performed, for example, as described in Chen et al. (1994). Alternatively, detection of the proliferation of T cells may be accomplished by a variety of known techniques. For example, T cell proliferation can be detected by measuring an increased rate of DNA synthesis (e.g., by pulse-labeling cultures of T cells with tritiated thymidine and measuring the amount of tritiated thymidine incorporated into DNA). Other ways to detect T cell proliferation include measuring increases in interleukin-2 (IL-2) production, Ca²⁺ flux, or dye uptake, such as 3-(4,5-dimethylthiazol-2-yl)-2,5-diphenyl-tetrazolium. Alternatively, synthesis of lymphokines (such as interferon-gamma) can be measured or the relative number of T cells that can respond to a hematological malignancy related peptide may be quantified. Contact with a hematological malignancy related peptide (200 ng/ml −100 μg/ml, preferably 100 ng/ml −25 μg/ml) for 3-7 days should result in at least a two-fold increase in proliferation of the T cells and/or contact as described above for 2-3 hrs should result in activation of the T cells, as measured using standard cytokine assays in which a two-fold increase in the level of cytokine release (e.g., TNF or IFN-γ) is indicative of T cell activation (Coligan et al., 1998). hematological malignancy related specific T cells may be expanded using standard techniques. Within preferred embodiments, the T cells are derived from a patient or a related or unrelated donor and are administered to the patient following stimulation and expansion.

[0134] T cells that have been activated in response to a hematological malignancy related peptide, polynucleotide or hematological malignancy related-expressing APC may be CD4⁺ and/or CD8⁺. Specific activation of CD4⁺ or CD8⁺ T cells may be detected in a variety of ways. Methods for detecting specific T cell activation include detecting the proliferation of T cells, the production of cytokines (e.g., lymphokines), or the generation of cytolytic activity (i.e., generation of cytotoxic T cells specific for hematological malignancy related). For CD4⁺ T cells, a preferred method for detecting specific T cell activation is the detection of the proliferation of T cells. For CD8⁺ T cells, a preferred method for detecting specific T cell activation is the detection of the generation of cytolytic activity.

[0135] For therapeutic purposes, CD4⁺ or CD8⁺ T cells that proliferate in response to the hematological malignancy related peptide, polynucleotide or APC can be expanded in number either in vitro or in vivo. Proliferation of such T cells in vitro may be accomplished in a variety of ways. For example, the T cells can be re-exposed to hematological malignancy related peptide, with or without the addition of T cell growth factors, such as interleukin-2, and/or stimulator cells that synthesize a hematological malignancy related peptide. The addition of stimulator cells is preferred where generating CD8⁺ T cell responses. T cells can be grown to large numbers in vitro with retention of specificity in response to intermittent restimulation with hematological malignancy related peptide. Briefly, for the primary in vitro stimulation (IVS), large numbers of lymphocytes (e.g., greater than 4×10⁷) may be placed in flasks with media containing human serum hematological malignancy related peptide (e.g., peptide at 10 μg/ml) may be added directly, along with tetanus toxoid (e.g., 5 μg/ml). The flasks may then be incubated (e.g., 37° C. for 7 days). For a second IVS, T cells are then harvested and placed in new flasks with 2-3×10⁷ irradiated peripheral blood mononuclear cells hematological malignancy related peptide (e.g., 10 μg/ml) is added directly. The flasks are incubated at 37° C. for 7 days. On day 2 and day 4 after the second IVS, 2-5 units of interleukin-2 (IL-2) may be added. For a third IVS, the T cells may be placed in wells and stimulated with the individual's own EBV transformed B cells coated with the peptide. IL-2 may be added on days 2 and 4 of each cycle. As soon as the cells are shown to be specific cytotoxic T cells, they may be expanded using a 10-day stimulation cycle with higher IL-2 (20 units) on days 2, 4 and 6.

[0136] Alternatively, one or more T cells that proliferate in the presence of hematological malignancy related peptide can be expanded in number by cloning. Methods for cloning cells are well known in the art, and include limiting dilution. Responder T cells may be purified from the peripheral blood of sensitized patients by density gradient centrifugation and sheep red cell rosetting and established in culture by stimulating with the nominal antigen in the presence of irradiated autologous filler cells. In order to generate CD4⁺ T cell lines, hematological malignancy related peptide is used as the antigenic stimulus and autologous peripheral blood lymphocytes (PBL) or lymphoblastoid cell lines (LCL) immortalized by infection with Epstein Barr virus are used as antigen-presenting cells. In order to generate CD8⁺ T cell lines, autologous antigen-presenting cells transfected with an expression vector that produces hematological malignancy related peptide may be used as stimulator cells. Established T cell lines may be cloned 2-4 days following antigen stimulation by plating stimulated T cells at a frequency of 0.5 cells per well in 96-well flat-bottom plates with 1×10⁶ irradiated PBL or LCL cells and recombinant interleukin-2 (rIL2) (50 U/ml). Wells with established clonal growth may be identified at approximately 2-3 weeks after initial plating and restimulated with appropriate antigen in the presence of autologous antigen-presenting cells, then subsequently expanded by the addition of low doses of rIL2 (10 U/ml) 2-3 days following antigen stimulation. T cell clones may be maintained in 24-well plates by periodic restimulation with antigen and rIL2 approximately every two weeks. Cloned and/or expanded cells may be administered back to the patient as described, for example, by Chang et al., (1996).

[0137] Within certain embodiments, allogeneic T-cells may be primed (i.e., sensitized to hematological malignancy related) in vivo and/or in vitro. Such priming may be achieved by contacting T cells with a hematological malignancy related peptide, a polynucleotide encoding such a peptide or a cell producing such a peptide under conditions and for a time sufficient to permit the priming of T cells. In general, T cells are considered to be primed if, for example, contact with a hematological malignancy related peptide results in proliferation and/or activation of the T cells, as measured by standard proliferation, chromium release and/or cytokine release assays as described herein. A stimulation index of more than two fold increase in proliferation or lysis, and more than three fold increase in the level of cytokine, compared to negative controls indicates T-cell specificity. Cells primed in vitro may be employed, for example, within bone marrow transplantation or as donor lymphocyte infusion.

[0138] T cells specific for hematological malignancy related can kill cells that express hematological malignancy related protein. Introduction of genes encoding T-cell receptor (TCR) chains for hematological malignancy related are used as a means to quantitatively and qualitatively improve responses to hematological malignancy related bearing leukemia and cancer cells. Vaccines to increase the number of T cells that can react to hematological malignancy related positive cells are one method of targeting hematological malignancy related bearing cells. T cell therapy with T cells specific for hematological malignancy related is another method. An alternative method is to introduce the TCR chains specific for hematological malignancy related into T cells or other cells with lytic potential. In a suitable embodiment, the TCR alpha and beta chains are cloned out from a hematological malignancy related specific T cell line and used for adoptive T cell therapy, such as described in WO 96/30516, incorporated herein by reference.

[0139] 4.4 Pharmaceutical Compositions and Vaccine Formulations

[0140] Within certain aspects, peptides, polynucleotides, antibodies and/or T cells may be incorporated into pharmaceutical compositions or immunogenic compositions (i.e., vaccines). Alternatively, a pharmaceutical composition may comprise an antigen-presenting cell (e.g., a dendritic cell) transfected with a hematological malignancy related polynucleotide such that the antigen-presenting cell expresses a hematological malignancy related peptide. Pharmaceutical compositions comprise one or more such compounds or cells and a physiologically acceptable carrier or excipient. Vaccines may comprise one or more such compounds or cells and an immunostimulant, such as an adjuvant or a liposome (into which the compound is incorporated). An immunostimulant may be any substance that enhances or potentiates an immune response (antibody- and/or cell-mediated) to an exogenous antigen. Examples of immunostimulants include adjuvants, biodegradable microspheres (e.g., polylactic galactide) and liposomes (into which the compound is incorporated) (U.S. Pat. No. 4,235,877). Vaccine preparation is generally described in, for example, Powell and Newman (1995). Pharmaceutical compositions and vaccines within the scope of the present invention may also contain other compounds, which may be biologically active or inactive. For example, one or more immunogenic portions of other tumor antigens may be present, either incorporated into a fusion peptide or as a separate compound, within the composition or vaccine.

[0141] Within certain embodiments, pharmaceutical compositions and vaccines are designed to elicit T cell responses specific for a hematological malignancy related peptide in a patient, such as a human. In general, T cell responses may be favored through the use of relatively short peptides (e.g., comprising less than 23 consecutive amino acid residues of a native hematological malignancy related peptide, preferably 4-16 consecutive residues, more preferably 8-16 consecutive residues and still more preferably 8-10 consecutive residues). Alternatively, or in addition, a vaccine may comprise an immunostimulant that preferentially enhances a T cell response. In other words, the immunostimulant may enhance the level of a T cell response to a hematological malignancy related peptide by an amount that is proportionally greater than the amount by which an antibody response is enhanced. For example, when compared to a standard oil based adjuvant, such as CFA, an immunostimulant that preferentially enhances a T cell response may enhance a proliferative T cell response by at least two fold, a lytic response by at least 10%, and/or T cell activation by at least two fold compared to hematological malignancy related-negative control cell lines, while not detectably enhancing an antibody response. The amount by which a T cell or antibody response to a hematological malignancy related peptide is enhanced may generally be determined using any representative technique known in the art, such as the techniques provided herein.

[0142] A pharmaceutical composition or vaccine may contain DNA encoding one or more of the peptides as described above, such that the peptide is generated in situ. As noted above, the DNA may be present within any of a variety of delivery systems known to those of ordinary skill in the art, including nucleic acid expression systems, bacterial and viral expression systems and mammalian expression systems. Numerous gene delivery techniques are well known in the art (Rolland, 1998, and references cited therein). Appropriate nucleic acid expression systems contain the necessary DNA, cDNA or RNA sequences for expression in the patient (such as a suitable promoter and terminating signal). Bacterial delivery systems involve the administration of a bacterium (such as Bacillus-Calmette-Guerrin) that expresses an immunogenic portion of the peptide on its cell surface or secretes such an epitope. In a preferred embodiment, the DNA may be introduced using a viral expression system (e.g., vaccinia or other pox virus, retrovirus, or adenovirus), which may involve the use of a non-pathogenic (defective), replication competent virus (Fisher-Hoch et al., 1989; Flexner et al., 1989; Flexner et al., 1990; U.S. Pat. No. 4,603,112, U.S. Pat. No. 4,769,330, U.S. Pat. No. 5,017,487; Intl. Pat. Appl. Publ. No. WO 89/01973; U.S. Pat. No. 4,777,127; Great Britain Patent No. GB 2,200,651; European Patent No. EP 0,345,242; Intl. Pat. Appl. Publ. No. WO 91/02805; Berkner, 1988; Rosenfeld et al., 1991; Kolls et al., 1994; Kass-Eisler et al., 1993; Guzman et al., 1993a; and Guzman et al., 1993). Techniques for incorporating DNA into such expression systems are well known to those of ordinary skill in the art. The DNA may also be “naked,” as described, for example, in Ulmer et al. (1993) and reviewed by Cohen (1993). The uptake of naked DNA may be increased by coating the DNA onto biodegradable beads, which are efficiently transported into the cells. It will be apparent that a vaccine may comprise both a polynucleotide and a peptide component. Such vaccines may provide for an enhanced immune response.

[0143] As noted above, a pharmaceutical composition or vaccine may comprise an antigen-presenting cell that expresses a hematological malignancy related peptide. For therapeutic purposes, as described herein, the antigen-presenting cell is preferably an autologous dendritic cell. Such cells may be prepared and transfected using standard techniques (Reeves et al., 1996; Tuting et al., 1998; and Nair et al., 1998). Expression of a hematological malignancy related peptide on the surface of an antigen-presenting cell may be confirmed by in vitro stimulation and standard proliferation as well as chromium release assays, as described herein.

[0144] It will be apparent to those of ordinary skill in the art having the benefit of the present teachings that a vaccine may contain pharmaceutically acceptable salts of the polynucleotides and peptides provided herein. Such salts may be prepared from pharmaceutically acceptable non-toxic bases, including organic bases (e.g., salts of primary, secondary and tertiary amines and basic amino acids) and inorganic bases (e.g., sodium, potassium, lithium, ammonium, calcium and magnesium salts). The phrases “pharmaceutically or pharmacologically acceptable” refer to molecular entities and compositions that do not produce an adverse, allergic or other significant untoward reaction when administered to an animal, or a human, as appropriate. As used herein, “pharmaceutically acceptable carrier” includes any and all solvents, dispersion media, coatings, antibacterial and antifungal agents, isotonic and absorption delaying agents and the like. The use of such media and agents for pharmaceutical active substances is well known in the art. Except insofar as any conventional media or agent is incompatible with the active ingredient, its use in the therapeutic compositions is contemplated. For human administration, preparations should meet sterility, pyrogenicity, and general safety and purity standards as required by the Food and Drug Administration Office of Biologics standards. Supplementary active ingredients can also be incorporated into the compositions.

[0145] While any suitable carrier known to those of ordinary skill in the art may be employed in the pharmaceutical compositions of this invention, the type of carrier will vary depending on the mode of administration. Compositions of the present invention may be formulated for any appropriate manner of administration, including for example, topical, oral, nasal, intravenous, intracranial, intraperitoneal, subcutaneous or intramuscular administration. For parenteral administration, such as subcutaneous injection, the carrier preferably comprises water, saline, alcohol, a fat, a wax or a buffer. For oral administration, any of the above carriers or a solid carrier, such as mannitol, lactose, starch, magnesium stearate, sodium saccharine, talcum, cellulose, glucose, sucrose, and magnesium carbonate, may be employed. Biodegradable microspheres (e.g., polylactate polyglycolate) may also be employed as carriers for the pharmaceutical compositions of this invention. Suitable biodegradable microspheres are disclosed, for example, in U.S. Pat. Nos. 4,897,268; 5,075,109; 5,928,647; 5,811,128; 5,820,883; 5,853,763; 5,814,344 and 5,942,252. For certain topical applications, formulation as a cream or lotion, using well-known components, is preferred.

[0146] Such compositions may also comprise buffers (e.g., neutral buffered saline or phosphate buffered saline), carbohydrates (e.g., glucose, mannose, sucrose or dextrans), mannitol, proteins, peptides or amino acids such as glycine, antioxidants, bacteriostats, chelating agents such as EDTA or glutathione, adjuvants (e.g., aluminum hydroxide), solutes that render the formulation isotonic, hypotonic or weakly hypertonic with the blood of a recipient, suspending agents, thickening agents and/or preservatives. Alternatively, compositions of the present invention may be formulated as a lyophilizate, or formulated with one or more liposomes, microspheres, nanoparticles, or micronized delivery systems using well-known technology.

[0147] Any of a variety of immunostimulants, such as adjuvants, may be employed in the preparation of vaccine compositions of this invention. Most adjuvants contain a substance designed to protect the antigen from rapid catabolism, such as aluminum hydroxide or mineral oil, and a stimulator of immune responses, such as lipid A, Bortadella pertussis or Mycobacterium tuberculosis derived proteins. Suitable adjuvants are commercially available as, for example, alum-based adjuvants (e.g., Alhydrogel, Rehydragel, aluminum phosphate, Algammulin, aluminum hydroxide); oil based adjuvants (Freund's Incomplete Adjuvant and Complete Adjuvant (Difco Laboratories, Detroit, Mich.), Specol, RIBI, TiterMax, Montamide ISA50 or Seppic MONTANIDE ISA 720); nonionic block copolymer-based adjuvants, cytokines (e.g., GM-CSF or Flat3-ligand); Merck Adjuvant 65 (Merck and Company, Inc., Rahway, N.J.); AS-2 (SmithKline Beecham, Philadelphia, Pa.); salts of calcium, iron or zinc; an insoluble suspension of acylated tyrosine; acylated sugars; cationically or anionically derivatized polysaccharides; polyphosphazenes; biodegradable microspheres; monophosphoryl lipid A and Quil A. Cytokines, such as GM-CSF or interleukin-2, -7, or -12, may also be used as adjuvants.

[0148] Hemocyanins and hemoerythrins may also be used in the invention. The use of hemocyanin from keyhole limpet (KLH) is particularly preferred, although other molluscan and arthropod hemocyanins and hemoerythrins may be employed. Various polysaccharide adjuvants may also be used. Polyamine varieties of polysaccharides are particularly preferred, such as chitin and chitosan, including deacetylated chitin.

[0149] A further preferred group of adjuvants are the muramyl dipeptide (MDP, N-acetylmuramyl-L-alanyl-D-isoglutamine) group of bacterial peptidoglycans. Derivatives of muramyl dipeptide, such as the amino acid derivative threonyl-MDP, and the fatty acid derivative MTPPE, are also contemplated.

[0150] U.S. Pat. No. 4,950,645 describes a lipophilic disaccharide-tripeptide derivative of muramyl dipeptide that is proposed for use in artificial liposomes formed from phosphatidyl choline and phosphatidyl glycerol. It is said to be effective in activating human monocytes and destroying tumor cells, but is non-toxic in generally high doses. The compounds of U.S. Pat. No. 4,950,645, and Intl. Pat. Appl. Publ. No. WO 91/16347 are also proposed for use in achieving particular aspects of the present invention.

[0151] BCG and BCG-cell wall skeleton (CWS) may also be used as adjuvants in the invention, with or without trehalose dimycolate. Trehalose dimycolate may be used itself. Azuma et al. (1988) show that trehalose dimycolate administration correlates with augmented resistance to influenza virus infection in mice. Trehalose dimycolate may be prepared as described in U.S. Pat. No. 4,579,945.

[0152] Amphipathic and surface-active agents, e.g., saponin and derivatives such as QS21 (Cambridge Biotech), form yet another group of preferred adjuvants for use with the immunogens of the present invention. Nonionic block copolymer surfactants (Rabinovich et al., 1994; Hunter et al., 1991) may also be employed. Oligonucleotides, as described by Yamamoto et al. (1988) are another useful group of adjuvants. Quil A and lentinen are also preferred adjuvants.

[0153] Superantigens are also contemplated for use as adjuvants in the present invention. “Superantigens” are generally bacterial products that stimulate a greater proportion of T lymphocytes than peptide antigens without a requirement for antigen processing (Mooney et. al., 1994). Superantigens include Staphylococcus exoproteins, such as the α, β, γ and δ enterotoxins from S. aureus and S. epidermidis, and the α, β, γ and δ E. coli exotoxins.

[0154] Common Staphylococcus enterotoxins are known as staphylococcal enterotoxin A (SEA) and staphylococcal enterotoxin B (SEB), with enterotoxins through E (SEE) being described (Rott et. al., 1992). Streptococcus pyogenes B (SEB), Clostridium perfringens enterotoxin (Bowness et. al., 1992), cytoplasmic membrane-associated protein (CAP) from S. pyogenes (Sato et. al., 1994) and toxic shock syndrome toxin-i (TSST-1) from S. aureus (Schwab et. al., 1993) are further useful superantigens.

[0155] One group of adjuvants particularly preferred for use in the invention are the detoxified endotoxins, such as the refined detoxified endotoxin of U.S. Pat. No. 4,866,034. These refined detoxified endotoxins are effective in producing adjuvant responses in mammals.

[0156] The detoxified endotoxins may be combined with other adjuvants. Combination of detoxified endotoxins with trehalose dimycolate is contemplated, as described in U.S. Pat. No. 4,435,386. Combinations of detoxified endotoxins with trehalose dimycolate and endotoxic glycolipids is also contemplated (U.S. Pat. No. 4,505,899), as is combination of detoxified endotoxins with cell wall skeleton (CWS) or CWS and trehalose dimycolate, as described in U.S. Pat. Nos. 4,436,727, 4,436,728 and 4,505,900. Combinations of just CWS and trehalose dimycolate, without detoxified endotoxins are also envisioned to be useful, as described in U.S. Pat. No. 4,520,019.

[0157] MPL is currently one preferred immunopotentiating agent for use herein. References that concern the uses of MPL include Tomai et al. (1987), Chen et al. (1991) and Garg and Subbarao (1992), that each concern certain roles of MPL in the reactions of aging mice; Elliott et al. (1991), that concerns the D-galactosamine loaded mouse and its enhanced sensitivity to lipopolysaccharide and MPL; Chase et al. (1986), that relates to bacterial infections; and Masihi et al. (1988), that describes the effects of MPL and endotoxin on resistance of mice to Toxoplasma gondii. Fitzgerald (1991) also reported on the use of MPL to up-regulate the immunogenicty of a syphilis vaccine and to confer significant protection against challenge infection in rabbits.

[0158] Thus MPL is known to be safe for use, as shown in the above model systems. Phase-I clinical trials have also shown MPL to be safe for use (Vosika et al., 1984). Indeed, 100 μg/m² is known to be safe for human use, even on an outpatient basis (Vosika et al., 1984).

[0159] MPL generally induces polyclonal B cell activation (Baker et al., 1994), and has been shown to augment antibody production in many systems, for example, in immunologically immature mice (Baker et al., 1988); in aging mice (Tomai and Johnson, 1989); and in nude and Xid mice (Madonna and Vogel, 1986; Myers et al., 1995). Antibody production has been shown against erythrocytes (Hraba et al., 1993); T cell dependent and independent antigens; Pnu-immune vaccine (Garg and Subbarao, 1992); isolated tumor-associated antigens (U.S. Pat. No. 4,877,611); against syngeneic tumor cells (Livingston et al., 1985; Ravindranath et al., 1994a;b); and against tumor-associated gangliosides (Ravindranath et al., 1994a;b).

[0160] Another useful attribute of MPL is that is augments IgM responses, as shown by Baker et al. (1988a), who describe the ability of MPL to increase antibody responses in young mice. This is a particularly useful feature of an adjuvant for use in certain embodiments of the present invention. Myers et al. (1995) recently reported on the ability of MPL to induce IgM antibodies, by virtue T cell-independent antibody production.

[0161] In the Myers et al. (1995) studies, MPL was conjugated to the hapten, TNP. MPL was proposed for use as a carrier for other haptens, such as peptides.

[0162] MPL also activates and recruits macrophages (Verma et al., 1992). Tomai and Johnson (1989) showed that MPL-stimulated T cells enhance IL-1 secretion by macrophages. MPL is also known to activate superoxide production, lysozyme activity, phagocytosis, and killing of Candida in murine peritoneal macrophages (Chen et al., 1991).

[0163] The effects of MPL on T cells include the endogenous production of cytotoxic factors, such as TNF, in serum of BCG-primed mice by MPL (Bennett et al., 1988). Kovach et al. (1990) and Elliot et al. (1991) also show that MPL induces TNF activity. MPL is known to act with TNF-α to induce release of IFN-γ by NK cells. IFN-γ production by T cells in response to MPL was also documented by Tomai and Johnson (1989), and Odean et al. (1990).

[0164] MPL is also known to be a potent T cell adjuvant. For example, MPL stimulates proliferation of melanoma-antigen specific CTLs (Mitchell et al., 1988, 1993). Further, Baker et al. (1988b) showed that nontoxic MPL inactivated suppressor T cell activity. Naturally, in the physiological environment, the inactivation of T suppressor cells allows for increased benefit for the animal, as realized by, e.g., increased antibody production. Johnson and Tomai (1988) have reported on the possible cellular and molecular mediators of the adjuvant action of MPL.

[0165] MPL is also known to induce aggregation of platelets and to phosphorylate a platelet protein prior to induction of serotonin secretion (Grabarek et al., 1990). This study shows that MPL is involved in protein kinase C activation and signal transduction.

[0166] Many articles concern the structure and function of MPL include. These include Johnson et al. (1990), that describes the structural characterization of MPL homologs obtained from Salmonella minnesota Re595 lipopolysaccharide. The work of Johnson et al. (1990), in common with Grabarek et al. (1990), shows that the fatty acid moieties of MPL can vary, even in commercial species. In separating MPL into eight fractions by thin layer chromatography, Johnson et al. (1990) found that three were particularly active, as assessed using human platelet responses. The chemical components of the various MPL species were characterized by Johnson et al. (1990).

[0167] Baker et al. (1992) further analyzed the structural features that influence the ability of lipid A and its analogs to abolish expression of suppressor T cell activity. They reported that decreasing the number of phosphate groups in lipid A from two to one (i.e., creating monophosphoryl lipid A, MPL) as well as decreasing the fatty acyl content, primarily by removing the residue at the 3 position, resulted in a progressive reduction in toxicity; however, these structural modifications did not influence its ability to abolish the expression of Ts function (Baker et al., 1992). These types of MPL are ideal for use in the present invention.

[0168] Baker et al. (1992) also showed that reducing the fatty acyl content from five to four (lipid A precursor IV_{A} or Iₐ) eliminated the capacity to influence Ts function but not to induce polyclonal activation of B cells. These studies show that in order to be able to abolish the expression of Ts function, lipid A must be a glucosamine disaccharide; may have either one or two phosphate groups; and must have at least five fatty acyl groups. Also, the chain length of the nonhydroxylated fatty acid, as well as the location of acyloxyacyl groups (2′ versus 3′ position), may play an important role (Baker et al., 1992).

[0169] In examining the relationship between chain length and position of fatty acyl groups on the ability of lipid A to abolish the expression of suppressor T-cell (Ts) activity, Baker et al. (1994) found that fatty acyl chain lengths of C₁₂ to C₁₄ appeared to be optimal for bioactivity. Therefore, although their use is still possible, lipid A preparations with fatty acyl groups of relatively short chain length (C₁₀ to C₁₂ from Pseudomonas aeruginosa and Chromobacterium violaceum) or predominantly long chain length (C₁₈ from Helicobacter pylori) are less preferred for use in this invention.

[0170] Baker et al. (1994) also showed that the lipid A proximal inner core region oligosaccharides of some bacterial lipopolysaccharides increase the expression of Ts activity; due mainly to the capacity of such oligosaccharides, which are relatively conserved in structure among gram-negative bacterial, to enlarge or expand upon the population of CD8⁺ Ts generated during the course of a normal antibody response to unrelated microbial antigens. The minimal structure required for the expression of the added immunosuppression observed was reported to be a hexasaccharide containing one 2-keto-3-deoxyoctonate residue, two glucose residues, and three heptose residues to which are attached two pyrophosphorylethanolamine groups (Baker et al., 1994). This information may be considered in utilizing or even designing further adjuvants for use in the invention.

[0171] In a generally related line of work, Tanamoto et al. (1994a;b; 1995) described the dissociation of endotoxic activities in a chemically synthesized Lipid A precursor after acetylation or succinylation. Thus, compounds such as “acetyl 406” and “succinyl 516” (Tanamoto et al, 1994a;b; 1995) are also contemplated for use in the invention.

[0172] Synthetic MPLs form a particularly preferred group of antigens. For example, Brade et al. (1993) described an artificial glycoconjugate containing the bisphosphorylated glucosamine disaccharide backbone of lipid A that binds to anti-Lipid A MAbs. This is one candidate for use in certain aspects of the invention.

[0173] The MPL derivatives described in U.S. Pat. No. 4,987,237 are particularly contemplated for use in the present invention. U.S. Pat. No. 4,987,237 describes MPL derivatives that contain one or more free groups, such as amines, on a side chain attached to the primary hydroxyl groups of the monophosphoryl lipid A nucleus through an ester group. The derivatives provide a convenient method for coupling the lipid A through coupling agents to various biologically active materials. The immunostimulant properties of lipid A are maintained. All MPL derivatives in accordance with U.S. Pat. No. 4,987,237 are envisioned for use in the MPL adjuvant-incorporated cells of this invention.

[0174] Various adjuvants, even those that are not commonly used in humans, may still be employed in animals, where, for example, one desires to raise antibodies or to subsequently obtain activated T cells. The toxicity or other adverse effects that may result from either the adjuvant or the cells, e.g., as may occur using non-irradiated tumor cells, is irrelevant in such circumstances.

[0175] Within the vaccines provided herein, the adjuvant composition is preferably designed to induce an immune response predominantly of the Th1 type. High levels of Th1-type cytokines (e.g., IFN-γ, TNFα, IL-2 and IL-12) tend to favor the induction of cell-mediated immune responses to an administered antigen. In contrast, high levels of Th2-type cytokines (e.g., IL-4, IL-5, IL-6 and IL-10) tend to favor the induction of humoral immune responses. Following application of a vaccine as provided herein, a patient will support an immune response that includes Th1- and Th2-type responses. Within a preferred embodiment, in which a response is predominantly Th1-type, the level of Th1-type cytokines will increase to a greater extent than the level of Th2-type cytokines. The levels of these cytokines may be readily assessed using standard assays. For a review of the families of cytokines see e.g., Mosmann and Coffman (1989).

[0176] Preferred adjuvants for use in eliciting a predominantly Th1-type response include, for example, a combination of monophosphoryl lipid A, preferably 3-de-O-acylated monophosphoryl lipid A (3D-MPL), together with an aluminum salt. MPL adjuvants are available from Corixa Corporation (Seattle, Wash.; see e.g., U.S. Pat. Nos. 4,436,727; 4,877,611; 4,866,034 and 4,912,094, each of which is specifically incorporated herein by reference in its entirety). CpG-containing oligonucleotides (in which the CpG dinucleotide is unmethylated) also induce a predominantly Th1 response. Such oligonucleotides are well known and are described, for example, in Intl. Pat. Appl. Publ. No. WO 96/02555 and Intl. Pat. Appl. Publ. No. WO 99/33488. Immunostimulatory DNA sequences are also described, for example, by Sato et al. (1996). Another preferred adjuvant is a saponin, preferably QS21 (Aquila Biopharmaceuticals Inc., Framingham, Mass.), which may be used alone or in combination with other adjuvants. For example, an enhanced system involves the combination of a monophosphoryl lipid A and saponin derivative, such as the combination of QS21 and 3D-MPL (see e.g., Intl. Pat. Appl. Publ. No. WO 94/00153), or a less reactogenic composition where the QS21 is quenched with cholesterol (see e.g., Intl. Pat. Appl. Publ. No. WO 96/33739). Other preferred formulations comprise an oil-in-water emulsion and tocopherol. A particularly potent adjuvant formulation involving QS21, 3D-MPL and tocopherol in an oil-in-water emulsion has also been described (see e.g., Intl. Pat. Appl. Publ. No. WO 95/17210).

[0177] Other preferred adjuvants include Montamide ISA 720 (Seppic), SAF (Chiron), ISCOMS (CSL), MF-59 (Chiron), the SBAS series of adjuvants (e.g., SBAS-2 or SBAS-4, available from SmithKline Beecham, Rixensart, Belgium), Detox (Corixa Corporation), RC-529 (Corixa Corporation) and aminoalkyl glucosaminide 4-phosphates (AGPs).

[0178] Any vaccine provided herein may be prepared using well-known methods that result in a combination of one or more antigens, one or more immunostimulants or adjuvants and one or more suitable carriers, excipients, or pharmaceutically acceptable buffers. The compositions described herein may be administered as part of a sustained release formulation (i.e., a formulation such as a capsule, sponge or gel [composed of polysaccharides, for example] that effects a slow release of compound following administration). Such formulations may generally be prepared using well-known technology (Coombes et al., 1996) and administered by, for example, oral, rectal or subcutaneous implantation, or by implantation at the desired target site. Sustained-release formulations may contain a peptide, polynucleotide or antibody dispersed in a carrier matrix and/or contained within a reservoir surrounded by a rate-controlling membrane.

[0179] Carriers for use within such formulations are preferably biocompatible, and may also be biodegradable; preferably the formulation provides a relatively constant level of active component release. Such carriers include microparticles of poly(lactide-co-glycolide), as well as polyacrylate, latex, starch, cellulose and dextran. Other delayed-release carriers include supramolecular biovectors, which comprise a non-liquid hydrophilic core (e.g., a cross-linked polysaccharide or oligosaccharide) and, optionally, an external layer comprising an amphiphilic compound, such as a phospholipid (U.S. Pat. No. 5,151,254; Intl. Pat. Appl. Publ. No. WO 94/20078; Intl. Pat. Appl. Publ. No. WO/94/23701; and Intl. Pat. Appl. Publ. No. WO 96/06638). The amount of active compound contained within a sustained release formulation depends upon the site of implantation, the rate and expected duration of release and the nature of the condition to be treated or prevented.

[0180] Any of a variety of delivery vehicles may be employed within pharmaceutical compositions and vaccines to facilitate production of an antigen-specific immune response that targets tumor cells. Delivery vehicles include antigen-presenting cells (APCs), such as dendritic cells, macrophages, B cells, monocytes and other cells that may be engineered to be efficient APCs. Such cells may, but need not, be genetically modified to increase the capacity for presenting the antigen, to improve activation and/or maintenance of the T cell response, to have anti-tumor effects per se and/or to be immunologically compatible with the receiver (i.e., matched HLA haplotype). APCs may generally be isolated from any of a variety of biological fluids and organs, including tumor and peritumoral tissues, and may be autologous, allogeneic, syngeneic or xenogeneic cells.

[0181] Certain preferred embodiments of the present invention use dendritic cells or progenitors thereof as antigen-presenting cells. Dendritic cells are highly potent APCs (Banchereau and Steinman, 1998) and have been shown to be effective as a physiological adjuvant for eliciting prophylactic or therapeutic antitumor immunity (Timmerman and Levy, 1999). In general, dendritic cells may be identified based on their typical shape (stellate in situ, with marked cytoplasmic processes (dendrites) visible in vitro), their ability to take up, process and present antigens with high efficiency and their ability to activate naive T cell responses. Dendritic cells may, of course, be engineered to express specific cell-surface receptors or ligands that are not commonly found on dendritic cells in vivo or ex vivo, and such modified dendritic cells are contemplated by the present invention. As an alternative to dendritic cells, secreted vesicles antigen-loaded dendritic cells (called exosomes) may be used within a vaccine (Zitvogel et al., 1998).

[0182] Dendritic cells and progenitors may be obtained from peripheral blood, bone marrow, tumor-infiltrating cells, peritumoral tissues-infiltrating cells, lymph nodes, spleen, skin, umbilical cord blood or any other suitable tissue or fluid. For example, dendritic cells may be differentiated ex vivo by adding a combination of cytokines such as GM-CSF, IL-4, IL-13 and/or TNFα to cultures of monocytes harvested from peripheral blood. Alternatively, CD34 positive cells harvested from peripheral blood, umbilical cord blood or bone marrow may be differentiated into dendritic cells by adding to the culture medium combinations of GM-CSF, IL-3, TNFα, CD40 ligand, LPS, flt3 ligand and/or other compound(s) that induce differentiation, maturation and proliferation of dendritic cells.

[0183] Dendritic cells are conveniently categorized as “immature” and “mature” cells, which allows a simple way to discriminate between two well characterized phenotypes. However, this nomenclature should not be construed to exclude all possible intermediate stages of differentiation. Immature dendritic cells are characterized as APC with a high capacity for antigen uptake and processing, which correlates with the high expression of Fcγ receptor and mannose receptor. The mature phenotype is typically characterized by a lower expression of these markers, but a high expression of cell surface molecules responsible for T cell activation such as class I and class II MHC, adhesion molecules (e.g., CD54 and CD11) and costimulatory molecules (e.g., CD40, CD80, CD86 and 4-1BB).

[0184] APCs may generally be transfected with a polynucleotide encoding a hematological malignancy related peptide, such that the peptide, or an immunogenic portion thereof, is expressed on the cell surface. Such transfection may take place ex vivo, and a composition or vaccine comprising such transfected cells may then be used for therapeutic purposes, as described herein. Alternatively, a gene delivery vehicle that targets a dendritic or other antigen-presenting cell may be administered to a patient, resulting in transfection that occurs in vivo. In vivo and ex vivo transfection of dendritic cells, for example, may generally be performed using any methods known in the art, such as those described in Intl. Pat. Appl. Publ. No. WO 97/24447, or the gene gun approach described by Mahvi et al. (1997). Antigen loading of dendritic cells may be achieved by incubating dendritic cells or progenitor cells with the hematological malignancy related peptide, DNA (naked or within a plasmid vector) or RNA; or with antigen-expressing recombinant bacterium or viruses (e.g., vaccinia, fowlpox, adenovirus or lentivirus vectors). Prior to loading, the peptide may be covalently conjugated to an immunological partner that provides T cell help (e.g., a carrier molecule). Alternatively, a dendritic cell may be pulsed with a non-conjugated immunological partner, separately or in the presence of the peptide.

[0185] Combined therapeutics is also contemplated, and the same type of underlying pharmaceutical compositions may be employed for both single and combined medicaments. Vaccines and pharmaceutical compositions may be presented in unit-dose or multi-dose containers, such as sealed ampoules or vials. Such containers are preferably hermetically sealed to preserve sterility of the formulation until use. In general, formulations may be stored as suspensions, solutions or emulsions in oily or aqueous vehicles. Alternatively, a vaccine or pharmaceutical composition may be stored in a freeze-dried condition requiring only the addition of a sterile liquid carrier immediately prior to use.

[0186] 4.5 Diagnostic and Prognostic Methods for Hematological Malignancy Diseases

[0187] The present invention further provides methods for detecting a malignant disease associated with one or more of the polypeptide or polynucleotide compositions disclosed herein, and for monitoring the effectiveness of an immunization or therapy for such a disease. To determine the presence or absence of a malignant disease associated with one or more of the polypeptide or polynucleotide compositions disclosed herein, a patient may be tested for the level of T cells specific for one or more of such compositions. Within certain methods, a biological sample comprising CD4⁺ and/or CD8⁺ T cells isolated from a patient is incubated with one or more of the polypeptide or polynucleotide compositions disclosed herein, and/or an APC that expresses one or more of such peptides or polypeptides, and the presence or absence of specific activation of the T cells is detected, as described herein. Suitable biological samples include, but are not limited to, isolated T cells. For example, T cells may be isolated from a patient by routine techniques (such as by Ficoll/Hypaque density gradient centrifugation of peripheral blood lymphocytes). T cells may be incubated in vitro for 2-9 days (typically 4 days) at 37° C. with one or more of the disclosed peptide, polypeptide or polynucleotide compositions (e.g., 5-25 μg/ml). It may be desirable to incubate another aliquot of a T cell sample in the absence of the composition to serve as a control. For CD4⁺ T cells, activation is preferably detected by evaluating proliferation of the T cells. For CD8⁺ T cells, activation is preferably detected by evaluating cytolytic activity. A level of proliferation that is at least two fold greater and/or a level of cytolytic activity that is at least 20% greater than in disease-free patients indicates the presence of a malignant disease associated with expression or one or more of the disclosed polypeptide or polynucleotide compositions. Further correlation may be made, using methods well known in the art, between the level of proliferation and/or cytolytic activity and the predicted response to therapy. In particular, patients that display a higher antibody, proliferative and/or lytic response may be expected to show a greater response to therapy.

[0188] Within other methods, a biological sample obtained from a patient is tested for the level of antibody specific for one or more of the hematological malignancy-related peptides or polypeptide s disclosed herein. The biological sample is incubated with hematological malignancy-related peptide or polypeptide, or a polynucleotide encoding such a peptide or polypeptide, and/or an APC that expresses such a peptide or polypeptide under conditions and for a time sufficient to allow immunocomplexes to form. Immunocomplexes formed between the selected peptide or polypeptide and antibodies in the biological sample that specifically bind to the selected peptide or polypeptide are then detected. A biological sample for use within such methods may be any sample obtained from a patient that would be expected to contain antibodies. Suitable biological samples include blood, sera, ascites, bone marrow, pleural effusion, and cerebrospinal fluid.

[0189] The biological sample is incubated with the selected peptide or polypeptide in a reaction mixture under conditions and for a time sufficient to permit immunocomplexes to form between the selected peptide or polypeptide and antibodies that are immunospecific for such a peptide or polypeptide. For example, a biological sample and a selected peptide or polypeptide peptide may be incubated at 4° C. for 24-48 hrs.

[0190] Following the incubation, the reaction mixture is tested for the presence of immunocomplexes. Detection of immunocomplexes formed between the selected peptide or polypeptide and antibodies present in the biological sample may be accomplished by a variety of known techniques, such as radioimmunoassays (RIA) and enzyme linked immunosorbent assays (ELISA). Suitable assays are well known in the art and are amply described in the scientific and patent literature (Harlow and Lane, 1988). Assays that may be used include, but are not limited to, the double monoclonal antibody sandwich immunoassay technique (U.S. Pat. No. 4,376,110); monoclonal-polyclonal antibody sandwich assays (Wide et al., 1970); the “western blot” method (U.S. Pat. No. 4,452,901); immunoprecipitation of labeled ligand (Brown et al., 1980); enzyme-linked immunosorbent assays (Raines and Ross, 1982); immunocytochemical techniques, including the use of fluorochromes (Brooks et al., 1980); and neutralization of activity (Bowen-Pope et al., 1984). Other immunoassays include, but are not limited to, those described in U.S. Pat. Nos. 3,817,827; 3,850,752; 3,901,654; 3,935,074; 3,984,533; 3,996,345; 4,034,074; and 4,098,876.

[0191] For detection purposes, the selected peptide or polypeptide may either be labeled or unlabeled. Unlabeled polypeptide peptide may be used in agglutination assays or in combination with labeled detection reagents that bind to the immunocomplexes (e.g., anti-immunoglobulin, protein G, Protein A or a lectin and secondary antibodies, or antigen-binding fragments thereof, capable of binding to the antibodies that specifically bind to the selected hematological malignancy-related peptide or polypeptide). If the selected peptide or polypeptide is labeled, the reporter group may be any suitable reporter group known in the art, including radioisotopes, fluorescent groups, luminescent groups, enzymes, biotin and dye particles.

[0192] Within certain assays, unlabeled peptide or polypeptide is immobilized on a solid support. The solid support may be any material known to those of ordinary skill in the art to which the peptide may be attached. For example, the solid support may be a test well in a microtiter plate or a nitrocellulose or other suitable membrane. Alternatively, the support may be a bead or disc, such as glass, fiberglass, latex or a plastic material such as polystyrene or polyvinylchloride. The support may also be a magnetic particle or a fiber optic sensor, such as those disclosed, for example, in U.S. Pat. No. 5,359,681. The peptide may be immobilized on the solid support using a variety of techniques known to those of skill in the art, which are amply described in the patent and scientific literature. In the context of the present invention, the term “immobilization” refers to both noncovalent association, such as adsorption, and covalent attachment (which may be a direct linkage between the antigen and functional groups on the support or may be a linkage by way of a cross-linking agent). Immobilization by adsorption to a well in a microtiter plate or to a membrane is preferred. In such cases, adsorption may be achieved by contacting the selected peptide or polypeptide, in a suitable buffer, with the solid support for a suitable amount of time. The contact time varies with temperature, but is typically between about 1 hour and about 1 day. In general, contacting a well of a plastic microtiter plate (such as polystyrene or polyvinylchloride) with an amount of peptide ranging from about 10 ng to about 10 μg, and preferably about 100 ng to about 1 μg, is sufficient to immobilize an adequate amount of peptide.

[0193] Following immobilization, the remaining protein binding sites on the support are typically blocked. Any suitable blocking agent known to those of ordinary skill in the art, such as bovine serum albumin, Tween™ 20TM (Sigma Chemical Co., St. Louis, Mo.), heat-inactivated normal goat serum (NGS), or BLOTTO (buffered solution of nonfat dry milk which also contains a preservative, salts, and an antifoaming agent) may be used. The support is then incubated with a biological sample suspected of containing specific antibody. The sample can be applied neat, or, more often, it can be diluted, usually in a buffered solution which contains a small amount (0.1%-5.0% by weight) of protein, such as BSA, NGS, or BLOTTO. In general, an appropriate contact time (i.e., incubation time) is a period of time that is sufficient to detect the presence of antibody or an antigen binding fragment that is immunospecific for the selected peptide or polypeptide within a sample containing such an antibody or binding fragment thereof. Preferably, the contact time is sufficient to achieve a level of binding that is at least about 95% of that achieved at equilibrium between bound and unbound antibody or antibody fragment. Those of ordinary skill in the art will recognize that the time necessary to achieve equilibrium may be readily determined by assaying the level of binding that occurs over a period of time. At room temperature, an incubation time of about 30 min is generally sufficient.

[0194] Unbound sample may then be removed by washing the solid support with an appropriate buffer, such as PBS containing 0.1% Tween™ 20. A detection reagent that binds to the immunocomplexes and that comprises at least a first detectable label or “reporter” molecule may then be added. The detection reagent is incubated with the immunocomplex for an amount of time sufficient to detect the bound antibody or antigen binding fragment thereof. An appropriate amount of time may generally be determined by assaying the level of binding that occurs over a period of time. Unbound label or detection reagent is then removed and bound label or detection reagent is detected using a suitable assay or analytical instrument. The method employed for detecting the reporter group depends upon the nature of the reporter group. For radioactive labels, scintillation counting or autoradiographic methods are generally appropriate. Spectroscopic methods may be used to detect dyes, luminescent or chemiluminescent moieties and various chromogens, fluorescent labels and such like. Biotin may be detected using avidin, coupled to a different reporter group (commonly a radioactive or fluorescent group or an enzyme). Enzyme reporter groups (e.g., horseradish peroxidase, β-galactosidase, alkaline phosphatase and glucose oxidase) may generally be detected by the addition of substrate (generally for a specific period of time), followed by spectroscopic or other analysis of the reaction products. Regardless of the specific method employed, a level of bound detection reagent that is at least two fold greater than background (i.e., the level observed for a biological sample obtained from a disease-free individual) indicates the presence of a malignant disease associated with expression of the selected peptide or polypeptide.

[0195] In general, methods for monitoring the effectiveness of an immunization or therapy involve monitoring changes in the level of antibodies or T cells specific for the selected peptide or polypeptide in a sample, or in an animal such as a human patient. Methods in which antibody levels are monitored may comprise the steps of: (a) incubating a first biological sample, obtained from a patient prior to a therapy or immunization, with a selected peptide or polypeptide, wherein the incubation is performed under conditions and for a time sufficient to allow immunocomplexes to form; (b) detecting immunocomplexes formed between the selected peptide or polypeptide and antibodies or antigen binding fragments in the biological sample that specifically bind to the selected peptide or polypeptide; (c) repeating steps (a) and (b) using a second biological sample taken from the patient at later time, such as for example, following a given therapy or immunization; and (d) comparing the number of immunocomplexes detected in the first and second biological samples. Alternatively, a polynucleotide encoding the selected peptide or polypeptide, or an APC expressing the selected peptide or polypeptide may be employed in place of the selected peptide or polypeptide itself. Within such methods, immunocomplexes between the selected peptide or polypeptide encoded by a polynucleotide, or expressed by the APC, and antibodies and/or antigen binding fragments in the biological sample are detected.

[0196] Methods in which T cell activation and/or the number of hematological malignancy polypeptide-specific precursors are monitored may comprise the steps of: (a) incubating a first biological sample comprising CD4⁺ and/or CD8⁺ cells (e.g., bone marrow, peripheral blood or a fraction thereof), obtained from a patient prior to a therapy or immunization, with a hematological malignancy peptide or polypeptide, wherein the incubation is performed under conditions and for a time sufficient to allow specific activation, proliferation and/or lysis of T cells; (b) detecting an amount of activation, proliferation and/or lysis of the T cells; (c) repeating steps (a) and (b) using a second biological sample comprising CD4⁺ and/or CD8⁺ T cells, and taken from the same patient following therapy or immunization; and (d) comparing the amount of activation, proliferation and/or lysis of T cells in the first and second biological samples. Alternatively, a polynucleotide encoding a hematological malignancy related peptide, or an APC expressing such a peptide may be employed in place of the hematological malignancy peptide itself.

[0197] A biological sample for use within such methods may be any sample obtained from a patient that would be expected to contain antibodies, CD4⁺ T cells and/or CD8⁺ T cells. Suitable biological samples include blood, sera, ascites, bone marrow, pleural effusion and cerebrospinal fluid. A first biological sample may be obtained prior to initiation of therapy or immunization or part way through a therapy or vaccination regime. The second biological sample should be obtained in a similar manner, but at a time following additional therapy or immunization. The second biological sample may be obtained at the completion of, or part way through, therapy or immunization, provided that at least a portion of therapy or immunization takes place between the isolation of the first and second biological samples.

[0198] Incubation and detection steps for both samples may generally be performed as described above. A statistically significant increase in the number of immunocomplexes in the second sample relative to the first sample reflects successful therapy or immunization.

[0199] 4.6 Administration of Pharmaceutical Compositions and Formulations

[0200] In certain embodiments, the present invention concerns formulation of one or more of the polynucleotide, polypeptide, peptide, antibody, or antigen binding fragment compositions disclosed herein in pharmaceutically acceptable solutions for administration to a cell or an animal, either alone, or in combination with one or more other modalities of anti-cancer therapy, or in combination with one or more diagnostic or therapeutic agents.

[0201] It will also be understood that, if desired, the nucleic acid segment, RNA, or DNA compositions disclosed herein may be administered in combination with other agents as well, such as, e.g., proteins or peptides or various pharmaceutically-active agents. As long as the composition comprises at least one of the genetic expression constructs disclosed herein, there is virtually no limit to other components that may also be included, given that the additional agents do not cause a significant adverse effect upon contact with the target cells or host tissues. The RNA- or DNA-derived compositions may thus be delivered along with various other agents as required in the particular instance. Such RNA or DNA compositions may be purified from host cells or other biological sources, or alternatively may be chemically synthesized as described herein. Likewise, such compositions may comprise substituted or derivatized RNA or DNA compositions. Such compositions may include one or more therapeutic gene constructs, either alone, or in combination with one or more modified peptide or nucleic acid substituent derivatives, and/or other anticancer therapeutics.

[0202] The formulation of pharmaceutically-acceptable excipients and carrier solutions are well-known to those of skill in the art, as is the development of suitable dosing and treatment regimens for using the particular compositions described herein in a variety of treatment regimens, including e.g., oral, intravenous, intranasal, transdermal, intraprostatic, intratumoral, and/or intramuscular administration and formulation.

[0203] 4.6.1 Injectable Delivery

[0204] For example, the pharmaceutical compositions disclosed herein may be administered parenterally, intravenously, intramuscularly, or even intraperitoneally as described in U.S. Pat. No. 5,543,158, U.S. Pat. No. 5,641,515 and U.S. Pat. No. 5,399,363 (each specifically incorporated herein by reference in its entirety). Solutions of the active compounds as free-base or pharmacologically acceptable salts may be prepared in water suitably mixed with a surfactant, such as hydroxypropylcellulose. Dispersions may also be prepared in glycerol, liquid polyethylene glycols, and mixtures thereof and in oils. Under ordinary conditions of storage and use, these preparations contain a preservative to prevent the growth of microorganisms.

[0205] The pharmaceutical forms suitable for injectable use include sterile aqueous solutions or dispersions and sterile powders for the extemporaneous preparation of sterile injectable solutions or dispersions (U.S. Pat. No. 5,466,468, specifically incorporated herein by reference in its entirety). In all cases the form must be sterile and must be fluid to the extent that easy syringability exists. It must be stable under the conditions of manufacture and storage and must be preserved against the contaminating action of microorganisms, such as bacteria and fungi. The carrier can be a solvent or dispersion medium containing, for example, water, ethanol, polyol (e.g., glycerol, propylene glycol, and liquid polyethylene glycol, and the like), suitable mixtures thereof, and/or vegetable oils. Proper fluidity may be maintained, for example, by the use of a coating, such as lecithin, by the maintenance of the required particle size in the case of dispersion and by the use of surfactants. The prevention of the action of microorganisms can be brought about by various antibacterial and antifungal agents, for example, parabens, chlorobutanol, phenol, sorbic acid, thimerosal, and the like. In many cases, it will be preferable to include isotonic agents, for example, sugars or sodium chloride. Prolonged absorption of the injectable compositions can be brought about by the use in the compositions of agents delaying absorption, for example, aluminum monostearate and gelatin.

[0206] For parenteral administration in an aqueous solution, for example, the solution should be suitably buffered if necessary and the liquid diluent first rendered isotonic with sufficient saline or glucose. These particular aqueous solutions are especially suitable for intravenous, intramuscular, subcutaneous and intraperitoneal administration. In this connection, sterile aqueous media that can be employed will be known to those of skill in the art in light of the present disclosure. For example, one dosage may be dissolved in 1 ml of isotonic NaCl solution and either added to 1000 ml of hypodermoclysis fluid or injected at the proposed site of infusion, (see for example, Hoover, 1975). Some variation in dosage will necessarily occur depending on the condition of the subject being treated. The person responsible for administration will, in any event, determine the appropriate dose for the individual subject. Moreover, for human administration, preparations should meet sterility, pyrogenicity, and general safety and purity standards as required by FDA Office of Biologics standards.

[0207] Sterile injectable solutions may be prepared by incorporating the gene therapy constructs in the required amount in the appropriate solvent with several of the other ingredients enumerated above, as required, followed by filtered sterilization. Generally, dispersions are prepared by incorporating the various sterilized active ingredients into a sterile vehicle which contains the basic dispersion medium and the required other ingredients from those enumerated above. In the case of sterile powders for the preparation of sterile injectable solutions, the preferred methods of preparation are vacuum-drying and freeze-drying techniques which yield a powder of the active ingredient plus any additional desired ingredient from a previously sterile-filtered solution thereof.

[0208] The compositions disclosed herein may be formulated in a neutral or salt form. Pharmaceutically-acceptable salts, include the acid addition salts and which are formed with inorganic acids such as, for example, hydrochloric or phosphoric acids, or such organic acids as acetic, oxalic, tartaric, mandelic, and the like. Salts formed with the free carboxyl groups can also be derived from inorganic bases such as, for example, sodium, potassium, ammonium, calcium, or ferric hydroxides, and such organic bases as isopropylamine, trimethylamine, histidine, procaine and the like. Upon formulation, solutions will be administered in a manner compatible with the dosage formulation and in such amount as is therapeutically effective. The formulations are easily administered in a variety of dosage forms such as injectable solutions, drug release capsules and the like.

[0209] As used herein, “carrier” includes any and all solvents, dispersion media, vehicles, coatings, diluents, antibacterial and antifungal agents, isotonic and absorption delaying agents, buffers, carrier solutions, suspensions, colloids, and the like. The use of such media and agents for pharmaceutical active substances is well known in the art. Except insofar as any conventional media or agent is incompatible with the active ingredient, its use in the therapeutic compositions is contemplated. Supplementary active ingredients can also be incorporated into the compositions.

[0210] 4.6.2 Intranasal Delivery

[0211] One may use nasal solutions or sprays, aerosols or even inhalants for the treatment of hematological malignancies with one of more of the disclosed peptides and polynucleotides. Nasal solutions are usually aqueous solutions designed for administration to the nasal passages in drops or sprays. Nasal solutions are prepared so that they are similar in many respects to nasal secretions, so that normal ciliary action is maintained. Thus, the aqueous nasal solutions usually are isotonic and slightly buffered to maintain a pH of from about 5.5 to about 6.5. In addition, antimicrobial preservatives, similar to those used in ophthalmic preparations, and appropriate drug stabilizers, if required, may be included in the formulation. Various commercial nasal preparations are known.

[0212] Inhalations and inhalants are pharmaceutical preparations designed for delivering a drug or compound into the respiratory tree of a patient. A vapor or mist is administered and reaches the affected area, often to give relief from symptoms of bronchial and nasal congestion. However, this route can also be employed to deliver agents into the systemic circulation. Inhalations may be administered by the nasal or oral respiratory routes. The administration of inhalation solutions is only effective if the droplets are sufficiently fine and uniform in size so that the mist reaches the bronchioles.

[0213] Another group of products, also known as inhalations, and sometimes called insufflations, consists of finely powdered or liquid drugs that are carried into the respiratory passages by the use of special delivery systems, such as pharmaceutical aerosols, that hold a solution or suspension of the drug in a liquefied gas propellant. When released through a suitable valve and oral adapter, a metered does of the inhalation is propelled into the respiratory tract of the patient.

[0214] Particle size is of importance in the administration of this type of preparation. It has been reported that the optimum particle size for penetration into the pulmonary cavity is of the order of about 0.5 to about 7 μm. Fine mists are produced by pressurized aerosols and hence their use in considered advantageous.

[0215] 4.6.3 Liposome-, Nanocapsule-, and Microparticle-Mediated Delivery

[0216] In certain embodiments, the inventors contemplate the use of liposomes, nanocapsules, microparticles, microspheres, lipid particles, vesicles, and the like, for the introduction of the polynucleotide compositions of the present invention into suitable host cells. In particular, the polynucleotide compositions of the present invention may be formulated for delivery either encapsulated in a lipid particle, a liposome, a vesicle, a nanosphere, or a nanoparticle or the like.

[0217] Such formulations may be preferred for the introduction of pharmaceutically acceptable formulations of the nucleic acids disclosed herein. The formation and use of liposomes is generally known to those of skill in the art (see for example, Couvreur et al., 1977; Couvreur, 1988; Lasic, 1998; which describes the use of liposomes and nanocapsules in the targeted antibiotic therapy for intracellular bacterial infections and diseases). Recently, liposomes were developed with improved serum stability and circulation half-lives (Gabizon and Papahadjopoulos, 1988; Allen and Choun, 1987; U.S. Pat. No. 5,741,516, specifically incorporated herein by reference in its entirety). Further, various methods of liposome and liposome like preparations as potential drug carriers have been reviewed (Takakura, 1998; Chandran et al., 1997; Margalit, 1995; U.S. Pat. No. 5,567,434; U.S. Pat. No. 5,552,157; U.S. Pat. No. 5,565,213; U.S. Pat. No. 5,738,868 and U.S. Pat. No. 5,795,587, each specifically incorporated herein by reference in its entirety).

[0218] Liposomes have been used successfully with a number of cell types that are normally resistant to transfection by other procedures including T cell suspensions, primary hepatocyte cultures and PC12 cells (Renneisen et al., 1990; Muller et al., 1990). In addition, liposomes are free of the DNA length constraints that are typical of viral-based delivery systems. Liposomes have been used effectively to introduce genes, drugs (Heath and Martin, 1986; Heath et al., 1986; Balazsovits et al., 1989; Fresta and Puglisi, 1996), radiotherapeutic agents (Pikul et al., 1987), enzymes (Imaizumi et al, 1990a; Imaizumi et al., 1990b), viruses (Faller and Baltimore, 1984), transcription factors and allosteric effectors (Nicolau and Gersonde, 1979) into a variety of cultured cell lines and animals. In addition, several successful clinical trails examining the effectiveness of liposome-mediated drug delivery have been completed (Lopez-Berestein et al., 1985a; 1985b; Coune, 1988; Sculier et al., 1988). Furthermore, several studies suggest that the use of liposomes is not associated with autoimmune responses, toxicity or gonadal localization after systemic delivery (Mori and Fukatsu, 1992).

[0219] Liposomes are formed from phospholipids that are dispersed in an aqueous medium and spontaneously form multilamellar concentric bilayer vesicles (also termed multilamellar vesicles (MLVs). MLVs generally have diameters of from 25 nm to 4 μm. Sonication of MLVs results in the formation of small unilamellar vesicles (SUVs) with diameters in the range of 200 to 500 Å, containing an aqueous solution in the core.

[0220] Liposomes bear resemblance to cellular membranes and are contemplated for use in connection with the present invention as carriers for the peptide compositions. They are widely suitable as both water- and lipid-soluble substances can be entrapped, i.e. in the aqueous spaces and within the bilayer itself, respectively. It is possible that the drug-bearing liposomes may even be employed for site-specific delivery of active agents by selectively modifying the liposomal formulation.

[0221] In addition to the teachings of Couvreur et al. (1977; 1988), the following information may be utilized in generating liposomal formulations. Phospholipids can form a variety of structures other than liposomes when dispersed in water, depending on the molar ratio of lipid to water. At low ratios the liposome is the preferred structure. The physical characteristics of liposomes depend on pH, ionic strength and the presence of divalent cations. Liposomes can show low permeability to ionic and polar substances, but at elevated temperatures undergo a phase transition which markedly alters their permeability. The phase transition involves a change from a closely packed, ordered structure, known as the gel state, to a loosely packed, less-ordered structure, known as the fluid state. This occurs at a characteristic phase-transition temperature and results in an increase in permeability to ions, sugars, and drugs.

[0222] Alternatively, the invention provides for pharmaceutically acceptable nanocapsule formulations of the polynucleotide compositions of the present invention. Nanocapsules can generally entrap compounds in a stable and reproducible way (Henry-Michelland et al., 1987; Quintanar-Guerrero et al., 1998; Douglas et al., 1987). To avoid side effects due to intracellular polymeric overloading, such ultrafine particles (sized around 0.1 μm) should be designed using polymers able to be degraded in vivo. Biodegradable polyalkyl-cyanoacrylate nanoparticles that meet these requirements are contemplated for use in the present invention, and such particles may be are easily made, as described (Couvreur et al., 1980; 1988; zur Muhlen et al., 1998; Zambaux et al. 1998; Pinto-Alphandry et al., 1995 and U.S. Pat. No. 5,145,684, specifically incorporated herein by reference in its entirety). In particular, methods of polynucleotide delivery to a target cell using either nanoparticles or nanospheres (Schwab et al., 1994; Truong-Le et al., 1998) are also particularly contemplated to be useful in formulating the disclosed compositions for administration to an animal, and to a human in particular.

[0223] 4.7 Therapeutic Agents and Kits

[0224] The invention also provides one or more of the hematological malignancy-related compositions formulated with one or more pharmaceutically acceptable excipients, carriers, diluents, adjuvants, and/or other components for use in the preparation of medicaments, or diagnostic reagents, as well as various kits comprising one or more of such compositions, medicaments, or formulations intended for administration to an animal in need thereof, or for use in one or more diagnostic assays for identifying polynucleotides, polypeptides, and/or antibodies that are specific for one or more hematological malignancy-related compounds as described herein. In addition to the disclosed epitopes, antibodies and antigen binding fragments, antibody- or antigen binding fragment-encoding polynucleotides or additional anticancer agents, polynucleotides, peptides, antigens, or other therapeutic compounds as may be employed in the formulation of particular compositions and formulations disclosed herein, and particularly in the preparation of anticancer agents or anti-hematological malignancies therapies for administration to the affected mammal.

[0225] As such, preferred animals for administration of the pharmaceutical compositions disclosed herein include mammals, and particularly humans. Other preferred animals include primates, sheep, goats, bovines, equines, porcines, lupines, canines, and felines, as well as any other mammalian species commonly considered pets, livestock, or commercially relevant animal species. The compositions and formulations may include partially or significantly purified polypeptide, polynucleotide, or antibody or antigen binding fragment compositions, either alone, or in combination with one or more additional active ingredients, anticancer agents, vaccines, adjuvants, or other therapeutics which may be obtained from natural or recombinant sources, or which may be obtainable naturally or either chemically synthesized, or alternatively produced in vitro from recombinant host cells expressing one or more nucleic acid segments that encode one or more such additional active ingredients, carriers, adjuvants, cofactors, or other therapeutic compound.

[0226] 4.8 Diagnostic Reagents and Kits

[0227] The invention further provides diagnostic reagents and kits comprising one or more such reagents for use in a variety of diagnostic assays, including for example, immunoassays such as ELISA and “sandwich”-type immunoassays. Such kits may preferably include at least a first peptide, or a first antibody or antigen binding fragment of the invention, a functional fragment thereof, or a cocktail thereof, and means for signal generation. The kit's components may be pre-attached to a solid support, or may be applied to the surface of a solid support when the kit is used. The signal generating means may come pre-associated with an antibody of the invention or may require combination with one or more components, e.g., buffers, antibody-enzyme conjugates, enzyme substrates, or the like, prior to use. Kits may also include additional reagents, e.g., blocking reagents for reducing nonspecific binding to the solid phase surface, washing reagents, enzyme substrates, and the like. The solid phase surface may be in the form of microtiter plates, microspheres, or other materials suitable for immobilizing proteins, peptides, or polypeptides. Preferably, an enzyme that catalyzes the formation of a chemiluminescent or chromogenic product or the reduction of a chemiluminescent or chromogenic substrate is a component of the signal generating means. Such enzymes are well known in the art.

[0228] Such kits are useful in the detection, monitoring and diagnosis of conditions characterized by over-expression or inappropriate expression of hematological malignancy-related peptides, polypeptides, antibodies, and/or polynucleotides, as well as hybridomas, host cells, and vectors comprising one or more such compositions as disclosed herein.

[0229] The therapeutic and diagnostic kits of the present invention may also be prepared that comprise at least one of the antibody, peptide, antigen binding fragment, hybridoma, vector, vaccine, polynucleotide, or cellular compositions disclosed herein and instructions for using the composition as a diagnostic reagent or therapeutic agent. Containers for use in such kits may typically comprise at least one vial, test tube, flask, bottle, syringe or other suitable container, into which one or more of the diagnostic and/or therapeutic composition(s) may be placed, and preferably suitably aliquoted. Where a second therapeutic agent is also provided, the kit may also contain a second distinct container into which this second diagnostic and/or therapeutic composition may be placed. Alternatively, a plurality of compounds may be prepared in a single pharmaceutical composition, and may be packaged in a single container means, such as a vial, flask, syringe, bottle, or other suitable single container. The kits of the present invention will also typically include a means for containing the vial(s) in close confinement for commercial sale, such as, e.g., injection or blow-molded plastic containers into which the desired vial(s) are retained. Where a radiolabel, chromogenic, fluorigenic, or other type of detectable label or detecting means is included within the kit, the labeling agent may be provided either in the same container as the diagnostic or therapeutic composition itself, or may alternatively be placed in a second distinct container means into which this second composition may be placed and suitably aliquoted. Alternatively, the detection reagent and the label may be prepared in a single container means, and in most cases, the kit will also typically include a means for containing the vial(s) in close confinement for commercial sale and/or convenient packaging and delivery.

[0230] 4.9 Polynucleotide Compositions

[0231] As used herein, the terms “DNA segment” and “polynucleotide” refer to a DNA molecule that has been isolated free of total genomic DNA of a particular species. Therefore, a DNA segment encoding a polypeptide refers to a DNA segment that contains one or more coding sequences yet is substantially isolated away from, or purified free from, total genomic DNA of the species from which the DNA segment is obtained. Included within the terms “DNA segment” and “polynucleotide” are DNA segments and smaller fragments of such segments, and also recombinant vectors, including, for example, plasmids, cosmids, phagemids, phage, viruses, and the like.

[0232] As will be understood by those skilled in the art, the DNA segments of this invention can include genomic sequences, extra-genomic and plasmid-encoded sequences and smaller engineered gene segments that express, or may be adapted to express, proteins, polypeptides, peptides and the like. Such segments may be naturally isolated, or modified synthetically by the hand of man.

[0233] “Isolated,” as used herein, means that a polynucleotide is substantially away from other coding sequences, and that the DNA segment does not contain large portions of unrelated coding DNA, such as large chromosomal fragments or other functional genes or polypeptide coding regions. Of course, this refers to the DNA segment as originally isolated, and does not exclude genes or coding regions later added to the segment by the hand of man.

[0234] As will be recognized by the skilled artisan, polynucleotides may be single-stranded (coding or antisense) or double-stranded, and may be DNA (genomic, cDNA or synthetic) or RNA molecules. RNA molecules include mRNA molecules, which contain introns and correspond to a DNA molecule in a one-to-one manner, and mRNA molecules, which do not contain introns. Additional coding or non-coding sequences may, but need not, be present within a polynucleotide of the present invention, and a polynucleotide may, but need not, be linked to other molecules and/or support materials.

[0235] Polynucleotides may comprise a native sequence (i.e., an endogenous sequence that encodes a hematological malignancy-related tumor protein or a portion thereof) or may comprise a variant, or a biological or antigenic functional equivalent of such a sequence. Polynucleotide variants may contain one or more substitutions, additions, deletions and/or insertions, as further described below, preferably such that the immunogenicity of the encoded polypeptide is not diminished, relative to a native tumor protein. The effect on the immunogenicity of the encoded polypeptide may generally be assessed as described herein. The term “variants” also encompasses homologous genes of xenogenic origin.

[0236] When comparing polynucleotide or polypeptide sequences, two sequences are said to be “identical” if the sequence of nucleotides or amino acids in the two sequences is the same when aligned for maximum correspondence, as described below. Comparisons between two sequences are typically performed by comparing the sequences over a comparison window to identify and compare local regions of sequence similarity. A “comparison window” as used herein, refers to a segment of at least about 20 contiguous positions, usually 30 to about 75, 40 to about 50, in which a sequence may be compared to a reference sequence of the same number of contiguous positions after the two sequences are optimally aligned.

[0237] Optimal alignment of sequences for comparison may be conducted using the Megalign program in the Lasergene suite of bioinformatics software (DNASTAR, Inc., Madison, Wis.), using default parameters. This program embodies several alignment schemes described in the following references: Dayhoff, M. O. (1978) A model of evolutionary change in proteins—Matrices for detecting distant relationships. In Dayhoff, M. O. (ed.) Atlas of Protein Sequence and Structure, National Biomedical Research Foundation, Washington D.C. Vol. 5, Suppl. 3, pp. 345-358; Hein J. (1990) Unified Approach to Alignment and Phylogenes pp. 626-645 Methods in Enzymology vol. 183, Academic Press, Inc., San Diego, Calif.; Higgins, D. G. and Sharp, P. M. (1989) CABIOS 5:151-153; Myers, E. W. and Muller W. (1988) CABIOS 4:11-17; Robinson, E. D. (1971) Comb. Theor 11:105; Santou, N. Nes, M. (1987) Mol. Biol. Evol. 4:406-425; Sneath, P. H. A. and Sokal, R. R. (1973) Numerical Taxonomy—the Principles and Practice of Numerical Taxonomy, Freeman Press, San Francisco, Calif.; Wilbur, W. J. and Lipman, D. J. (1983) Proc. Natl. Acad., Sci. USA 80:726-730.

[0238] Alternatively, optimal alignment of sequences for comparison may be conducted by the local identity algorithm of Smith and Waterman (1981) Add. APL. Math 2:482, by the identity alignment algorithm of Needleman and Wunsch (1970) J. Mol. Biol. 48:443, by the search for similarity methods of Pearson and Lipman (1988) Proc. Natl. Acad. Sci. USA 85: 2444, by computerized implementations of these algorithms (GAP, BESTFIT, BLAST, FASTA, and TFASTA in the Wisconsin Genetics Software Package, Genetics Computer Group (GCG), 575 Science Dr., Madison, Wis.), or by inspection.

[0239] One preferred example of algorithms that are suitable for determining percent sequence identity and sequence similarity are the BLAST and BLAST 2.0 algorithms, which are described in Altschul et al. (1977) Nucl. Acids Res. 25:3389-3402 and Altschul et al. (1990) J. Mol. Biol. 215:403-410, respectively. BLAST and BLAST 2.0 can be used, for example with the parameters described herein, to determine percent sequence identity for the polynucleotides and polypeptides of the invention. Software for performing BLAST analyses is publicly available through the National Center for Biotechnology Information. In one illustrative example, cumulative scores can be calculated using, for nucleotide sequences, the parameters M (reward score for a pair of matching residues; always >0) and N (penalty score for mismatching residues; always <0). For amino acid sequences, a scoring matrix can be used to calculate the cumulative score. Extension of the word hits in each direction are halted when: the cumulative alignment score falls off by the quantity X from its maximum achieved value; the cumulative score goes to zero or below, due to the accumulation of one or more negative-scoring residue alignments; or the end of either sequence is reached. The BLAST algorithm parameters W, T and X determine the sensitivity and speed of the alignment. The BLASTN program (for nucleotide sequences) uses as defaults a wordlength (W) of 11, and expectation (E) of 10, and the BLOSUM62 scoring matrix (see Henikoff and Henikoff (1989) Proc. Natl. Acad. Sci. USA 89:10915) alignments, (B) of 50, expectation (E) of 10, M=5, N=-4 and a comparison of both strands.

[0240] Preferably, the “percentage of sequence identity” is determined by comparing two optimally aligned sequences over a window of comparison of at least 20 positions, wherein the portion of the polynucleotide or polypeptide sequence in the comparison window may comprise additions or deletions (i.e., gaps) of 20 percent or less, usually 5 to 15 percent, or 10 to 12 percent, as compared to the reference sequences (which does not comprise additions or deletions) for optimal alignment of the two sequences. The percentage is calculated by determining the number of positions at which the identical nucleic acid bases or amino acid residue occurs in both sequences to yield the number of matched positions, dividing the number of matched positions by the total number of positions in the reference sequence (i.e., the window size) and multiplying the results by 100 to yield the percentage of sequence identity.

[0241] Therefore, the present invention encompasses polynucleotide and polypeptide sequences having substantial identity to the sequences disclosed herein, for example those comprising at least 50% sequence identity, preferably at least 55%, 60%, 65%, 70%, 75%, 80%, 85%, 90%, 95%, 96%, 97%, 98%, or 99% or higher, sequence identity compared to a polynucleotide or polypeptide sequence of this invention using the methods described herein, (e.g., BLAST analysis using standard parameters, as described below). One skilled in this art will recognize that these values can be appropriately adjusted to determine corresponding identity of proteins encoded by two nucleotide sequences by taking into account codon degeneracy, amino acid similarity, reading frame positioning and the like.

[0242] In additional embodiments, the present invention provides isolated polynucleotides and polypeptides comprising various lengths of contiguous stretches of sequence identical to or complementary to one or more of the sequences disclosed herein. For example, polynucleotides are provided by this invention that comprise at least about 15, 20, 30, 40, 50, 75, 100, 150, 200, 300, 400, 500 or 1000 or more contiguous nucleotides of one or more of the sequences disclosed herein as well as all intermediate lengths there between. It will be readily understood that “intermediate lengths”, in this context, means any length between the quoted values, such as 16, 17, 18, 19, etc.; 21, 22, 23, etc.; 30, 31, 32, etc.; 50, 51, 52, 53, etc.; 100, 101, 102, 103, etc.; 150, 151, 152, 153, etc.; including all integers through 200-500; 500-1,000, and the like.

[0243] The polynucleotides of the present invention, or fragments thereof, regardless of the length of the coding sequence itself, may be combined with other DNA sequences, such as promoters, polyadenylation signals, additional restriction enzyme sites, multiple cloning sites, other coding segments, and the like, such that their overall length may vary considerably. It is therefore contemplated that a nucleic acid fragment of almost any length may be employed, with the total length preferably being limited by the ease of preparation and use in the intended recombinant DNA protocol. For example, illustrative DNA segments with total lengths of about 10,000, about 5000, about 3000, about 2,000, about 1,000, about 500, about 200, about 100, about 50 base pairs in length, and the like, (including all intermediate lengths) are contemplated to be useful in many implementations of this invention.

[0244] In other embodiments, the present invention is directed to polynucleotides that are capable of hybridizing under moderately stringent conditions to a polynucleotide sequence provided herein, or a fragment thereof, or a complementary sequence thereof. Hybridization techniques are well known in the art of molecular biology. For purposes of illustration, suitable moderately stringent conditions for testing the hybridization of a polynucleotide of this invention with other polynucleotides include prewashing in a solution of 5×SSC, 0.5% SDS, 1.0 mM EDTA (pH 8.0); hybridizing at 50° C.-65° C., 5×SSC, overnight; followed by washing twice at 65° C. for 20 minutes with each of 2×, 0.5×and 0.2×SSC containing 0.1% SDS.

[0245] Moreover, it will be appreciated by those of ordinary skill in the art that, as a result of the degeneracy of the genetic code, there are many nucleotide sequences that encode a polypeptide as described herein. Some of these polynucleotides bear minimal homology to the nucleotide sequence of any native gene. Nonetheless, polynucleotides that vary due to differences in codon usage are specifically contemplated by the present invention. Further, alleles of the genes comprising the polynucleotide sequences provided herein are within the scope of the present invention. Alleles are endogenous genes that are altered as a result of one or more mutations, such as deletions, additions and/or substitutions of nucleotides. The resulting mRNA and protein may, but need not, have an altered structure or function. Alleles may be identified using standard techniques (such as hybridization, amplification and/or database sequence comparison).

[0246] 4.10 Probes and Primers

[0247] In other embodiments of the present invention, the polynucleotide sequences provided herein can be advantageously used as probes or primers for nucleic acid hybridization. As such, it is contemplated that nucleic acid segments that comprise a sequence region of at least about 15, 20, 25, 30, 35, 40, 45, 50, 55, 60, 65, 70, 75, 80, 85, 90, or 95 nucleotide long contiguous sequence that has the same sequence as, or is complementary to, at least a 15, 20, 25, 30, 35, 40, 45, 50, 55, 60, 65, 70, 75, 80, 85, 90, or 95 nucleotide long contiguous sequence the disclosed polynucleotides will find particular utility in a variety of hybridization embodiments. Longer contiguous identical or complementary sequences, e.g., those of about 100, 110, 120, 130, 140, 150, 160, 170, 180, 190, 200, 210, 220, 230, 240, 250, 260, 270, 280, 290, 300, 310, 320, 330, 340, 350, 360, 370, 380, 390, 400, 410, 420, 430, 440, 450, 460, 470, 480, 490, 500, 525, 550, 575, 600, 650, 700, 750, 800, 850, 900, 950, or even 1000 or so nucleotides (including all intermediate lengths) and all full-length sequences as the disclosed polynucleotides will also be of use in certain embodiments as probes, primers, or amplification targets and such like.

[0248] The ability of such nucleic acid probes to specifically hybridize to a sequence of interest will enable them to be of use in detecting the presence of complementary sequences in a given sample. However, other uses are also envisioned, such as the use of the sequence information for the preparation of mutant species primers, or primers, for use in preparing other genetic constructions, and for identifying and characterizing full-length polynucleotides and full, or substantially full-length cDNAs, mRNAs, and such like.

[0249] Polynucleotide molecules having sequence regions consisting of contiguous nucleotide stretches identical or complementary to one or more polynucleotide sequences as disclosed herein, are particularly contemplated as hybridization probes for use in, e.g., Southern hybridization analyses and Northern blotting. This would allow a gene product, or fragment thereof, to be analyzed, both in diverse cell types and also in various bacterial cells. The total size of fragment, as well as the size of the complementary stretch(es), will ultimately depend on the intended use or application of the particular nucleic acid segment. Smaller fragments will generally find use in hybridization embodiments, wherein the length of the contiguous complementary region may be varied, such as between about 15, 20, 25, 30, 35, 40, 45, 50, 55, 60 or so and up to and including larger contiguous complementary sequences, including those of about 70, 80, 90, 100, 120, 140, 160, 180, or 200 or so nucleotides in length may also be used, according to the given desired goal, and the particular length of the complementary sequences one wishes to detect by hybridization analysis.

[0250] The use of a hybridization probe of about between about 20 and about 500 nucleotides in length allows the formation of a duplex molecule that is both stable and selective. Molecules having contiguous complementary sequences over stretches greater than about 20 or so bases in length are generally preferred, though, in order to increase stability and selectivity of the hybrid, and thereby improve the quality and degree of specific hybrid molecules obtained. One will generally prefer to design nucleic acid molecules having gene-complementary stretches of between about 25 and 300 or so contiguous nucleotides, or even longer where desired.

[0251] Hybridization probes may be selected from any portion of any of the sequences disclosed herein. All that is required is to review the disclosed sequences, or to any contiguous portion of such a sequence, from about 15 to 30 nucleotides in length up to and including the full length sequence, that one wishes to utilize as a probe or primer. The choice of probe and primer sequences may be governed by various factors. For example, one may wish to employ primers from towards the termini of the total sequence.

[0252] Small polynucleotide segments or fragments may be readily prepared by, for example, directly synthesizing the fragment by chemical means, as is commonly practiced using an automated oligonucleotide synthesizer. Also, fragments may be obtained by application of nucleic acid reproduction technology, such as the PCR™ technology of U.S. Pat. No. 4,683,202 (incorporated herein by reference), by introducing selected sequences into recombinant vectors for recombinant production, and by other recombinant DNA techniques generally known to those of skill in the art of molecular biology.

[0253] The nucleotide sequences of the invention may be used for their ability to selectively form duplex molecules with complementary stretches of the entire gene or gene fragments of interest. Depending on the application envisioned, one will typically desire to employ varying conditions of hybridization to achieve varying degrees of selectivity of probe towards target sequence. For applications requiring high selectivity, one will typically desire to employ relatively stringent conditions to form the hybrids, e.g., one will select relatively low salt and/or high temperature conditions, such as provided by a salt concentration of from about 0.02 M to about 0.15 M salt at temperatures of from about 50° C. to about 70° C. Such selective conditions tolerate little, if any, mismatch between the probe and the template or target strand, and would be particularly suitable for isolating related sequences.

[0254] Of course, for some applications, for example, where one desires to prepare mutants employing a mutant primer strand hybridized to an underlying template, less stringent (reduced stringency) hybridization conditions will typically be needed in order to allow formation of the heteroduplex. In these circumstances, one may desire to employ salt conditions such as those of from about 0.15 M to about 0.9 M salt, at temperatures ranging from about 20° C. to about 55° C. Cross-hybridizing species can thereby be readily identified as positively hybridizing signals with respect to control hybridizations. In any case, it is generally appreciated that conditions can be rendered more stringent by the addition of increasing amounts of formamide, which serves to destabilize the hybrid duplex in the same manner as increased temperature. Thus, hybridization conditions can be readily manipulated, and thus will generally be a method of choice depending on the desired results.

[0255] 4.11 Polynucleotide Identification and Characterization

[0256] Polynucleotides may be identified, prepared and/or manipulated using any of a variety of well established techniques. For example, a polynucleotide may be identified, as described in more detail below, by screening a microarray of cDNAs for tumor-associated expression (i.e., expression that is at least two fold greater in a tumor than in normal tissue, as determined using a representative assay provided herein). Such screens may be performed, for example, using a Synteni microarray (Palo Alto, Calif.) according to the manufacturer's instructions (and essentially as described by Schena et al., Proc. Natl. Acad. Sci. USA 93:10614-10619, 1996 and Heller et al., Proc. Natl. Acad. Sci. USA 94:2150-2155, 1997). Alternatively, polynucleotides may be amplified from cDNA prepared from cells expressing the proteins described herein, such as hematological malignancy-related tumor cells. Such polynucleotides may be amplified via polymerase chain reaction (PCR). For this approach, sequence-specific primers may be designed based on the sequences provided herein, and may be purchased or synthesized.

[0257] An amplified portion of a polynucleotide of the present invention may be used to isolate a full length gene from a suitable library (e.g., a hematological malignancy-related tumor cDNA library) using well known techniques. Within such techniques, a library (cDNA or genomic) is screened using one or more polynucleotide probes or primers suitable for amplification. Preferably, a library is size-selected to include larger molecules. Random primed libraries may also be preferred for identifying 5′ and upstream regions of genes. Genomic libraries are preferred for obtaining introns and extending 5′ sequences.

[0258] For hybridization techniques, a partial sequence may be labeled (e.g., by nick-translation or end-labeling with ³²P) using well known techniques. A bacterial or bacteriophage library is then generally screened by hybridizing filters containing denatured bacterial colonies (or lawns containing phage plaques) with the labeled probe (see Sambrook et al., Molecular Cloning: A Laboratory Manual, Cold Spring Harbor Laboratories, Cold Spring Harbor, N.Y., 1989). Hybridizing colonies or plaques are selected and expanded, and the DNA is isolated for further analysis. cDNA clones may be analyzed to determine the amount of additional sequence by, for example, PCR using a primer from the partial sequence and a primer from the vector. Restriction maps and partial sequences may be generated to identify one or more overlapping clones. The complete sequence may then be determined using standard techniques, which may involve generating a series of deletion clones. The resulting overlapping sequences can then assembled into a single contiguous sequence. A full length cDNA molecule can be generated by ligating suitable fragments, using well known techniques.

[0259] Alternatively, there are numerous amplification techniques for obtaining a full length coding sequence from a partial cDNA sequence. Within such techniques, amplification is generally performed via PCR. Any of a variety of commercially available kits may be used to perform the amplification step. Primers may be designed using, for example, software or algorithms or formulas well known in the art.

[0260] One such amplification technique is inverse PCR (see Triglia et al., Nucl. Acids Res. 16:8186, 1988), which uses restriction enzymes to generate a fragment in the known region of the gene. The fragment is then circularized by intramolecular ligation and used as a template for PCR with divergent primers derived from the known region. Within an alternative approach, sequences adjacent to a partial sequence may be retrieved by amplification with a primer to a linker sequence and a primer specific to a known region. The amplified sequences are typically subjected to a second round of amplification with the same linker primer and a second primer specific to the known region. A variation on this procedure, which employs two primers that initiate extension in opposite directions from the known sequence, is described in WO 96/38591. Another such technique is known as “rapid amplification of cDNA ends” or RACE. This technique involves the use of an internal primer and an external primer, which hybridizes to a polyA region or vector sequence, to identify sequences that are 5′ and 3′ of a known sequence. Additional techniques include capture PCR (Lagerstrom et al., PCR Methods Applic. 1:111-19, 1991) and walking PCR (Parker et al., Nucl. Acids. Res. 19:3055-60, 1991). Other methods employing amplification may also be employed to obtain a full length cDNA sequence.

[0261] In certain instances, it is possible to obtain a full length cDNA sequence by analysis of sequences provided in an expressed sequence tag (EST) database, such as that available from GenBank. Searches for overlapping ESTs may generally be performed using well known programs (e.g., NCBI BLAST searches), and such ESTs may be used to generate a contiguous full length sequence. Full length DNA sequences may also be obtained by analysis of genomic fragments.

[0262] 4.12 Polynucleotide Expression in Host Cells

[0263] In other embodiments of the invention, polynucleotide sequences or fragments thereof which encode polypeptides of the invention, or fusion proteins or functional equivalents thereof, may be used in recombinant DNA molecules to direct expression of a polypeptide in appropriate host cells. Due to the inherent degeneracy of the genetic code, other DNA sequences that encode substantially the same or a functionally equivalent amino acid sequence may be produced and these sequences may be used to clone and express a given polypeptide.

[0264] As will be understood by those of skill in the art, it may be advantageous in some instances to produce polypeptide-encoding nucleotide sequences possessing non-naturally occurring codons. For example, codons preferred by a particular prokaryotic or eukaryotic host can be selected to increase the rate of protein expression or to produce a recombinant RNA transcript having desirable properties, such as a half-life which is longer than that of a transcript generated from the naturally occurring sequence.

[0265] Moreover, the polynucleotide sequences of the present invention can be engineered using methods generally known in the art in order to alter polypeptide encoding sequences for a variety of reasons, including but not limited to, alterations which modify the cloning, processing, and/or expression of the gene product. For example, DNA shuffling by random fragmentation and PCR reassembly of gene fragments and synthetic oligonucleotides may be used to engineer the nucleotide sequences. In addition, site-directed mutagenesis may be used to insert new restriction sites, alter glycosylation patterns, change codon preference, produce splice variants, or introduce mutations, and so forth.

[0266] In another embodiment of the invention, natural, modified, or recombinant nucleic acid sequences may be ligated to a heterologous sequence to encode a fusion protein. For example, to screen peptide libraries for inhibitors of polypeptide activity, it may be useful to encode a chimeric protein that can be recognized by a commercially available antibody. A fusion protein may also be engineered to contain a cleavage site located between the polypeptide-encoding sequence and the heterologous protein sequence, so that the polypeptide may be cleaved and purified away from the heterologous moiety.

[0267] Sequences encoding a desired polypeptide may be synthesized, in whole or in part, using chemical methods well known in the art (see Caruthers, M. H. et al. (1980) Nucl. Acids Res. Symp. Ser. 215-223, Horn, T. et al. (1980) Nucl. Acids Res. Symp. Ser. 225-232). Alternatively, the protein itself may be produced using chemical methods to synthesize the amino acid sequence of a polypeptide, or a portion thereof. For example, peptide synthesis can be performed using various solid-phase techniques (Roberge, J. Y. et al. (1995) Science 269:202-204) and automated synthesis may be achieved, for example, using the ABI 431A Peptide Synthesizer (Perkin Elmer, Palo Alto, Calif.).

[0268] A newly synthesized peptide may be substantially purified by preparative high performance liquid chromatography (e.g., Creighton, T. (1983) Proteins, Structures and Molecular Principles, W H Freeman and Co., New York, N.Y.) or other comparable techniques available in the art. The composition of the synthetic peptides may be confirmed by amino acid analysis or sequencing (e.g., the Edman degradation procedure). Additionally, the amino acid sequence of a polypeptide, or any part thereof, may be altered during direct synthesis and/or combined using chemical methods with sequences from other proteins, or any part thereof, to produce a variant polypeptide.

[0269] In order to express a desired polypeptide, the nucleotide sequences encoding the polypeptide, or functional equivalents, may be inserted into appropriate expression vector, i.e., a vector which contains the necessary elements for the transcription and translation of the inserted coding sequence. Methods which are well known to those skilled in the art may be used to construct expression vectors containing sequences encoding a polypeptide of interest and appropriate transcriptional and translational control elements. These methods include in vitro recombinant DNA techniques, synthetic techniques, and in vivo genetic recombination. Such techniques are described in Sambrook, J. et al. (1989) Molecular Cloning, A Laboratory Manual, Cold Spring Harbor Press, Plainview, N.Y., and Ausubel, F. M. et al. (1989) Current Protocols in Molecular Biology, John Wiley & Sons, New York. N.Y.

[0270] A variety of expression vector/host systems may be utilized to contain and express polynucleotide sequences. These include, but are not limited to, microorganisms such as bacteria transformed with recombinant bacteriophage, plasmid, or cosmid DNA expression vectors; yeast transformed with yeast expression vectors; insect cell systems infected with virus expression vectors (e.g., baculovirus); plant cell systems transformed with virus expression vectors (e.g., cauliflower mosaic virus, CaMV; tobacco mosaic virus, TMV) or with bacterial expression vectors (e.g., Ti or pBR322 plasmids); or animal cell systems.

[0271] The “control elements” or “regulatory sequences” present in an expression vector are those non-translated regions of the vector—enhancers, promoters, 5′ and 3′ untranslated regions—which interact with host cellular proteins to carry out transcription and translation. Such elements may vary in their strength and specificity. Depending on the vector system and host utilized, any number of suitable transcription and translation elements, including constitutive and inducible promoters, may be used. For example, when cloning in bacterial systems, inducible promoters such as the hybrid lacZ promoter of the PBLUESCRIPT phagemid (Stratagene, La Jolla, Calif) or PSPORT1 plasmid (Gibco BRL, Gaithersburg, Md.) and the like may be used. In mammalian cell systems, promoters from mammalian genes or from mammalian viruses are generally preferred. If it is necessary to generate a cell line that contains multiple copies of the sequence encoding a polypeptide, vectors based on SV40 or EBV may be advantageously used with an appropriate selectable marker.

[0272] In bacterial systems, a number of expression vectors may be selected depending upon the use intended for the expressed polypeptide. For example, when large quantities are needed, for example for the induction of antibodies, vectors which direct high level expression of fusion proteins that are readily purified may be used. Such vectors include, but are not limited to, the multifunctional E. coli cloning and expression vectors such as BLUESCRIPT (Stratagene), in which the sequence encoding the polypeptide of interest may be ligated into the vector in frame with sequences for the amino-terminal Met and the subsequent 7 residues of .beta.-galactosidase so that a hybrid protein is produced; pIN vectors (Van Heeke, G. and S. M. Schuster (1989) J. Biol. Chem. 264:5503-5509); and the like. pGEX Vectors (Promega, Madison, Wis.) may also be used to express foreign polypeptides as fusion proteins with glutathione S-transferase (GST). In general, such fusion proteins are soluble and can easily be purified from lysed cells by adsorption to glutathione-agarose beads followed by elution in the presence of free glutathione. Proteins made in such systems may be designed to include heparin, thrombin, or factor XA protease cleavage sites so that the cloned polypeptide of interest can be released from the GST moiety at will.

[0273] In the yeast, Saccharomyces cerevisiae, a number of vectors containing constitutive or inducible promoters such as alpha factor, alcohol oxidase, and PGH may be used. For reviews, see Ausubel et al. (supra) and Grant et al. (1987) Methods Enzymol. 153:516-544.

[0274] In cases where plant expression vectors are used, the expression of sequences encoding polypeptides may be driven by any of a number of promoters. For example, viral promoters such as the 35S and 19S promoters of CaMV may be used alone or in combination with the omega leader sequence from TMV (Takamatsu, N. (1987) EMBO J. 6:307-311. Alternatively, plant promoters such as the small subunit of RUBISCO or heat shock promoters may be used (Coruzzi, G. et al. (1984) EMBO J. 3:1671-1680; Broglie, R. et al. (1984) Science 224:838-843; and Winter, J. et al. (1991) Results Probl. Cell Differ. 17:85-105). These constructs can be introduced into plant cells by direct DNA transformation or pathogen-mediated transfection. Such techniques are described in a number of generally available reviews (see, for example, Hobbs, S. or Murry, L. E. in McGraw Hill Yearbook of Science and Technology (1992) McGraw Hill, New York, N.Y.; pp. 191-196).

[0275] An insect system may also be used to express a polypeptide of interest. For example, in one such system, Autographa californica nuclear polyhedrosis virus (AcNPV) is used as a vector to express foreign genes in Spodoptera frugiperda cells or in Trichoplusia larvae. The sequences encoding the polypeptide may be cloned into a non-essential region of the virus, such as the polyhedrin gene, and placed under control of the polyhedrin promoter. Successful insertion of the polypeptide-encoding sequence will render the polyhedrin gene inactive and produce recombinant virus lacking coat protein. The recombinant viruses may then be used to infect, for example, S. frugiperda cells or Trichoplusia larvae in which the polypeptide of interest may be expressed (Engelhard, E. K. et al. (1994) Proc. Natl. Acad. Sci. 91:3224-3227).

[0276] In mammalian host cells, a number of viral-based expression systems are generally available. For example, in cases where an adenovirus is used as an expression vector, sequences encoding a polypeptide of interest may be ligated into an adenovirus transcription/translation complex consisting of the late promoter and tripartite leader sequence. Insertion in a non-essential E1 or E3 region of the viral genome may be used to obtain a viable virus which is capable of expressing the polypeptide in infected host cells (Logan, J. and Shenk, T. (1984) Proc. Natl. Acad. Sci. 81:3655-3659). In addition, transcription enhancers, such as the Rous sarcoma virus (RSV) enhancer, may be used to increase expression in mammalian host cells.

[0277] Specific initiation signals may also be used to achieve more efficient translation of sequences encoding a polypeptide of interest. Such signals include the ATG initiation codon and adjacent sequences. In cases where sequences encoding the polypeptide, its initiation codon, and upstream sequences are inserted into the appropriate expression vector, no additional transcriptional or translational control signals may be needed. However, in cases where only coding sequence, or a portion thereof, is inserted, exogenous translational control signals including the ATG initiation codon should be provided. Furthermore, the initiation codon should be in the correct reading frame to ensure translation of the entire insert. Exogenous translational elements and initiation codons may be of various origins, both natural and synthetic. The efficiency of expression may be enhanced by the inclusion of enhancers which are appropriate for the particular cell system which is used, such as those described in the literature (Scharf, D. et al. (1994) Results Probl. Cell Differ. 20:125-162).

[0278] In addition, a host cell strain may be chosen for its ability to modulate the expression of the inserted sequences or to process the expressed protein in the desired fashion. Such modifications of the polypeptide include, but are not limited to, acetylation, carboxylation glycosylation, phosphorylation, lipidation, and acylation. Post-translational processing which cleaves a “prepro” form of the protein may also be used to facilitate correct insertion, folding and/or function. Different host cells such as CHO, HeLa, MDCK, HEK293, and W138, which have specific cellular machinery and characteristic mechanisms for such post-translational activities, may be chosen to ensure the correct modification and processing of the foreign protein.

[0279] For long-term, high-yield production of recombinant proteins, stable expression is generally preferred. For example, cell lines which stably express a polynucleotide of interest may be transformed using expression vectors which may contain viral origins of replication and/or endogenous expression elements and a selectable marker gene on the same or on a separate vector. Following the introduction of the vector, cells may be allowed to grow for 1-2 days in an enriched media before they are switched to selective media. The purpose of the selectable marker is to confer resistance to selection, and its presence allows growth and recovery of cells which successfully express the introduced sequences. Resistant clones of stably transformed cells may be proliferated using tissue culture techniques appropriate to the cell type.

[0280] Any number of selection systems may be used to recover transformed cell lines. These include, but are not limited to, the herpes simplex virus thymidine kinase (Wigler, M. et al. (1977) Cell 11:223-32) and adenine phosphoribosyltransferase (Lowy, I. et al. (1990) Cell 22:817-23) genes which can be employed in tk.sup.- or aprt.sup.-cells, respectively. Also, antimetabolite, antibiotic or herbicide resistance can be used as the basis for selection; for example, dhfr which confers resistance to methotrexate (Wigler, M. et al. (1980) Proc. Natl. Acad. Sci. 77:3567-70); npt, which confers resistance to the aminoglycosides, neomycin and G-418 (Colbere-Garapin, F. et al (1981) J. Mol. Biol. 150:1-14); and als or pat, which confer resistance to chlorsulfuron and phosphinotricin acetyltransferase, respectively (Murry, supra). Additional selectable genes have been described, for example, trpB, which allows cells to utilize indole in place of tryptophan, or hisD, which allows cells to utilize histinol in place of histidine (Hartman, S. C. and R. C. Mulligan (1988) Proc. Natl. Acad. Sci. 85:8047-51). Recently, the use of visible markers has gained popularity with such markers as anthocyanins, beta-glucuronidase and its substrate GUS, and luciferase and its substrate luciferin, being widely used not only to identify transformants, but also to quantify the amount of transient or stable protein expression attributable to a specific vector system (Rhodes, C. A. et al. (1995) Methods Mol. Biol. 55:121-131).

[0281] Although the presence/absence of marker gene expression suggests that the gene of interest is also present, its presence and expression may need to be confirmed. For example, if the sequence encoding a polypeptide is inserted within a marker gene sequence, recombinant cells containing sequences can be identified by the absence of marker gene function. Alternatively, a marker gene can be placed in tandem with a polypeptide-encoding sequence under the control of a single promoter. Expression of the marker gene in response to induction or selection usually indicates expression of the tandem gene as well.

[0282] Alternatively, host cells which contain and express a desired polynucleotide sequence may be identified by a variety of procedures known to those of skill in the art. These procedures include, but are not limited to, DNA-DNA or DNA-RNA hybridizations and protein bioassay or immunoassay techniques which include membrane, solution, or chip based technologies for the detection and/or quantification of nucleic acid or protein.

[0283] A variety of protocols for detecting and measuring the expression of polynucleotide-encoded products, using either polyclonal or monoclonal antibodies specific for the product are known in the art. Examples include enzyme-linked immunosorbent assay (ELISA), radioimmunoassay (RIA), and fluorescence activated cell sorting (FACS). A two-site, monoclonal-based immunoassay utilizing monoclonal antibodies reactive to two non-interfering epitopes on a given polypeptide may be preferred for some applications, but a competitive binding assay may also be employed. These and other assays are described, among other places, in Hampton, R. et al. (1990; Serological Methods, a Laboratory Manual, APS Press, St Paul. Minn.) and Maddox, D. E. et al. (1983; J. Exp. Med. 158:1211-1216).

[0284] A wide variety of labels and conjugation techniques are known by those skilled in the art and may be used in various nucleic acid and amino acid assays. Means for producing labeled hybridization or PCR probes for detecting sequences related to polynucleotides include oligolabeling, nick translation, end-labeling or PCR amplification using a labeled nucleotide. Alternatively, the sequences, or any portions thereof may be cloned into a vector for the production of an mRNA probe. Such vectors are known in the art, are commercially available, and may be used to synthesize RNA probes in vitro by addition of an appropriate RNA polymerase such as T7, T3, or SP6 and labeled nucleotides. These procedures may be conducted using a variety of commercially available kits. Suitable reporter molecules or labels, which may be used include radionuclides, enzymes, fluorescent, chemiluminescent, or chromogenic agents as well as substrates, cofactors, inhibitors, magnetic particles, and the like.

[0285] Host cells transformed with a polynucleotide sequence of interest may be cultured under conditions suitable for the expression and recovery of the protein from cell culture. The protein produced by a recombinant cell may be secreted or contained intracellularly depending on the sequence and/or the vector used. As will be understood by those of skill in the art, expression vectors containing polynucleotides of the invention may be designed to contain signal sequences which direct secretion of the encoded polypeptide through a prokaryotic or eukaryotic cell membrane. Other recombinant constructions may be used to join sequences encoding a polypeptide of interest to nucleotide sequence encoding a polypeptide domain which will facilitate purification of soluble proteins. Such purification facilitating domains include, but are not limited to, metal chelating peptides such as histidine-tryptophan modules that allow purification on immobilized metals, protein A domains that allow purification on immobilized immunoglobulin, and the domain utilized in the FLAGS extension/affinity purification system (Immunex Corp., Seattle, Wash.). The inclusion of cleavable linker sequences such as those specific for Factor XA or enterokinase (Invitrogen. San Diego, Calif.) between the purification domain and the encoded polypeptide may be used to facilitate purification. One such expression vector provides for expression of a fusion protein containing a polypeptide of interest and a nucleic acid encoding 6 histidine residues preceding a thioredoxin or an enterokinase cleavage site. The histidine residues facilitate purification on IMIAC (immobilized metal ion affinity chromatography) as described in Porath, J. et al. (1992, Prot. Exp. Purif. 3:263-281) while the enterokinase cleavage site provides a means for purifying the desired polypeptide from the fusion protein. A discussion of vectors which contain fusion proteins is provided in Kroll, D. J. et al. (1993; DNA Cell Biol. 12:441-453).

[0286] In addition to recombinant production methods, polypeptides of the invention, and fragments thereof, may be produced by direct peptide synthesis using solid-phase techniques (Merrifield J. (1963) J. Am. Chem. Soc. 85:2149-2154). Protein synthesis may be performed using manual techniques or by automation. Automated synthesis may be achieved, for example, using Applied Biosystems 431A Peptide Synthesizer (Perkin Elmer). Alternatively, various fragments may be chemically synthesized separately and combined using chemical methods to produce the full length molecule.

[0287] 4.13 Site-Specific Mutagenesis

[0288] Site-specific mutagenesis is a technique useful in the preparation of individual peptides, or biologically functional equivalent polypeptides, through specific mutagenesis of the underlying polynucleotides that encode them. The technique, well-known to those of skill in the art, further provides a ready ability to prepare and test sequence variants, for example, incorporating one or more of the foregoing considerations, by introducing one or more nucleotide sequence changes into the DNA. Site-specific mutagenesis allows the production of mutants through the use of specific oligonucleotide sequences which encode the DNA sequence of the desired mutation, as well as a sufficient number of adjacent nucleotides, to provide a primer sequence of sufficient size and sequence complexity to form a stable duplex on both sides of the deletion junction being traversed. Mutations may be employed in a selected polynucleotide sequence to improve, alter, decrease, modify, or otherwise change the properties of the polynucleotide itself, and/or alter the properties, activity, composition, stability, or primary sequence of the encoded polypeptide.

[0289] In certain embodiments of the present invention, the inventors contemplate the mutagenesis of the disclosed polynucleotide sequences to alter one or more properties of the encoded polypeptide, such as the antigenicity of a polypeptide vaccine. The techniques of site-specific mutagenesis are well-known in the art, and are widely used to create variants of both polypeptides and polynucleotides. For example, site-specific mutagenesis is often used to alter a specific portion of a DNA molecule. In such embodiments, a primer comprising typically about 14 to about 25 nucleotides or so in length is employed, with about 5 to about 10 residues on both sides of the junction of the sequence being altered.

[0290] As will be appreciated by those of skill in the art, site-specific mutagenesis techniques have often employed a phage vector that exists in both a single stranded and double stranded form. Typical vectors useful in site-directed mutagenesis include vectors such as the M13 phage. These phage are readily commercially-available and their use is generally well-known to those skilled in the art. Double-stranded plasmids are also routinely employed in site directed mutagenesis that eliminates the step of transferring the gene of interest from a plasmid to a phage.

[0291] In general, site-directed mutagenesis in accordance herewith is performed by first obtaining a single-stranded vector or melting apart of two strands of a double-stranded vector that includes within its sequence a DNA sequence that encodes the desired peptide. An oligonucleotide primer bearing the desired mutated sequence is prepared, generally synthetically. This primer is then annealed with the single-stranded vector, and subjected to DNA polymerizing enzymes such as E. coli polymerase I Klenow fragment, in order to complete the synthesis of the mutation-bearing strand. Thus, a heteroduplex is formed wherein one strand encodes the original non-mutated sequence and the second strand bears the desired mutation. This heteroduplex vector is then used to transform appropriate cells, such as E. coli cells, and clones are selected which include recombinant vectors bearing the mutated sequence arrangement.

[0292] The preparation of sequence variants of the selected peptide-encoding DNA segments using site-directed mutagenesis provides a means of producing potentially useful species and is not meant to be limiting as there are other ways in which sequence variants of peptides and the DNA sequences encoding them may be obtained. For example, recombinant vectors encoding the desired peptide sequence may be treated with mutagenic agents, such as hydroxylamine, to obtain sequence variants. Specific details regarding these methods and protocols are found in the teachings of Maloy et al., 1994; Segal, 1976; Prokop and Bajpai, 1991; Kuby, 1994; and Maniatis et al., 1982, each incorporated herein by reference, for that purpose.

[0293] As used herein, the term “oligonucleotide directed mutagenesis procedure” refers to template-dependent processes and vector-mediated propagation which result in an increase in the concentration of a specific nucleic acid molecule relative to its initial concentration, or in an increase in the concentration of a detectable signal, such as amplification. As used herein, the term “oligonucleotide directed mutagenesis procedure” is intended to refer to a process that involves the template-dependent extension of a primer molecule. The term template dependent process refers to nucleic acid synthesis of an RNA or a DNA molecule wherein the sequence of the newly synthesized strand of nucleic acid is dictated by the well-known rules of complementary base pairing (see, for example, Watson, 1987). Typically, vector mediated methodologies involve the introduction of the nucleic acid fragment into a DNA or RNA vector, the clonal amplification of the vector, and the recovery of the amplified nucleic acid fragment. Examples of such methodologies are provided by U.S. Pat. No. 4,237,224, specifically incorporated herein by reference in its entirety.

[0294] 4.14 Polynucleotide Amplification Techniques

[0295] A number of template dependent processes are available to amplify the target sequences of interest present in a sample. One of the best known amplification methods is the polymerase chain reaction (PCR™) which is described in detail in U.S. Pat. Nos. 4,683,195, 4,683,202 and 4,800,159, each of which is incorporated herein by reference in its entirety. Briefly, in PCR™, two primer sequences are prepared which are complementary to regions on opposite complementary strands of the target sequence. An excess of deoxynucleoside triphosphates is added to a reaction mixture along with a DNA polymerase (e.g., Taq polymerase). If the target sequence is present in a sample, the primers will bind to the target and the polymerase will cause the primers to be extended along the target sequence by adding on nucleotides. By raising and lowering the temperature of the reaction mixture, the extended primers will dissociate from the target to form reaction products, excess primers will bind to the target and to the reaction product and the process is repeated. Preferably reverse transcription and PCR™ amplification procedure may be performed in order to quantify the amount of mRNA amplified. Polymerase chain reaction methodologies are well known in the art.

[0296] Another method for amplification is the ligase chain reaction (referred to as LCR), disclosed in Eur. Pat. Appl. Publ. No. 320,308 (specifically incorporated herein by reference in its entirety). In LCR, two complementary probe pairs are prepared, and in the presence of the target sequence, each pair will bind to opposite complementary strands of the target such that they abut. In the presence of a ligase, the two probe pairs will link to form a single unit. By temperature cycling, as in PCR™, bound ligated units dissociate from the target and then serve as “target sequences” for ligation of excess probe pairs. U.S. Pat. No. 4,883,750, incorporated herein by reference in its entirety, describes an alternative method of amplification similar to LCR for binding probe pairs to a target sequence.

[0297] Qbeta Replicase, described in PCT Intl. Pat. Appl. Publ. No. PCT/US87/00880, incorporated herein by reference in its entirety, may also be used as still another amplification method in the present invention. In this method, a replicative sequence of RNA that has a region complementary to that of a target is added to a sample in the presence of an RNA polymerase. The polymerase will copy the replicative sequence that can then be detected.

[0298] An isothermal amplification method, in which restriction endonucleases and ligases are used to achieve the amplification of target molecules that contain nucleotide 5′-[α-thio]triphosphates in one strand of a restriction site (Walker et al., 1992, incorporated herein by reference in its entirety), may also be useful in the amplification of nucleic acids in the present invention.

[0299] Strand Displacement Amplification (SDA) is another method of carrying out isothermal amplification of nucleic acids which involves multiple rounds of strand displacement and synthesis, i.e. nick translation. A similar method, called Repair Chain Reaction (RCR) is another method of amplification which may be useful in the present invention and is involves annealing several probes throughout a region targeted for amplification, followed by a repair reaction in which only two of the four bases are present. The other two bases can be added as biotinylated derivatives for easy detection. A similar approach is used in SDA.

[0300] Sequences can also be detected using a cyclic probe reaction (CPR). In CPR, a probe having a 3′ and 5′ sequences of non-target DNA and an internal or “middle” sequence of the target protein specific RNA is hybridized to DNA which is present in a sample. Upon hybridization, the reaction is treated with RNaseH, and the products of the probe are identified as distinctive products by generating a signal that is released after digestion. The original template is annealed to another cycling probe and the reaction is repeated. Thus, CPR involves amplifying a signal generated by hybridization of a probe to a target gene specific expressed nucleic acid.

[0301] Still other amplification methods described in Great Britain Pat. Appl. No. 2 202 328, and in PCT Intl. Pat. Appl. Publ. No. PCT/US89/01025, each of which is incorporated herein by reference in its entirety, may be used in accordance with the present invention. In the former application, “modified” primers are used in a PCR-like, template and enzyme dependent synthesis. The primers may be modified by labeling with a capture moiety (e.g., biotin) and/or a detector moiety (e.g., enzyme). In the latter application, an excess of labeled probes is added to a sample. In the presence of the target sequence, the probe binds and is cleaved catalytically. After cleavage, the target sequence is released intact to be bound by excess probe. Cleavage of the labeled probe signals the presence of the target sequence.

[0302] Other nucleic acid amplification procedures include transcription-based amplification systems (TAS) (Kwoh et al., 1989; PCT Intl. Pat. Appl. Publ. No. WO 88/10315, incorporated herein by reference in its entirety), including nucleic acid sequence based amplification (NASBA) and 3SR. In NASBA, the nucleic acids can be prepared for amplification by standard phenol/chloroform extraction, heat denaturation of a sample, treatment with lysis buffer and minispin columns for isolation of DNA and RNA or guanidinium chloride extraction of RNA. These amplification techniques involve annealing a primer that has sequences specific to the target sequence. Following polymerization, DNA/RNA hybrids are digested with RNase H while double stranded DNA molecules are heat-denatured again. In either case the single stranded DNA is made fully double stranded by addition of second target-specific primer, followed by polymerization. The double stranded DNA molecules are then multiply transcribed by a polymerase such as T7 or SP6. In an isothermal cyclic reaction, the RNAs are reverse transcribed into DNA, and transcribed once again with a polymerase such as T7 or SP6. The resulting products, whether truncated or complete, indicate target-specific sequences.

[0303] Eur. Pat. Appl. Publ. No. 329,822, incorporated herein by reference in its entirety, disclose a nucleic acid amplification process involving cyclically synthesizing single-stranded RNA (“ssRNA”), ssDNA, and double-stranded DNA (dsDNA), which may be used in accordance with the present invention. The ssRNA is a first template for a first primer oligonucleotide, which is elongated by reverse transcriptase (RNA-dependent DNA polymerase). The RNA is then removed from resulting DNA:RNA duplex by the action of ribonuclease H(RNase H, an RNase specific for RNA in a duplex with either DNA or RNA). The resultant ssDNA is a second template for a second primer, which also includes the sequences of an RNA polymerase promoter (exemplified by T7 RNA polymerase) 5′ to its homology to its template. This primer is then extended by DNA polymerase (exemplified by the large “Klenow” fragment of E. coli DNA polymerase I), resulting as a double-stranded DNA (“dsDNA”) molecule, having a sequence identical to that of the original RNA between the primers and having additionally, at one end, a promoter sequence. This promoter sequence can be used by the appropriate RNA polymerase to make many RNA copies of the DNA. These copies can then re-enter the cycle leading to very swift amplification. With proper choice of enzymes, this amplification can be done isothermally without addition of enzymes at each cycle. Because of the cyclical nature of this process, the starting sequence can be chosen to be in the form of either DNA or RNA.

[0304] PCT Intl. Pat. Appl. Publ. No. WO 89/06700, incorporated herein by reference in its entirety, disclose a nucleic acid sequence amplification scheme based on the hybridization of a promoter/primer sequence to a target single-stranded DNA (“ssDNA”) followed by transcription of many RNA copies of the sequence. This scheme is not cyclic; i.e. new templates are not produced from the resultant RNA transcripts. Other amplification methods include “RACE” (Frohman, 1990), and “one-sided PCR” (Ohara, 1989) which are well-known to those of skill in the art.

[0305] Methods based on ligation of two (or more) oligonucleotides in the presence of nucleic acid having the sequence of the resulting “di-oligonucleotide”, thereby amplifying the di-oligonucleotide (Wu and Dean, 1996, incorporated herein by reference in its entirety), may also be used in the amplification of DNA sequences of the present invention.

[0306] 4.15 In Vivo Polynucleotide Delivery Techniques

[0307] In additional embodiments, genetic constructs comprising one or more of the polynucleotides of the invention are introduced into cells in vivo. This may be achieved using any of a variety or well known approaches, several of which are outlined below for the purpose of illustration.

[0308] 4.15.1 Adenovirus

[0309] One of the preferred methods for in vivo delivery of one or more nucleic acid sequences involves the use of an adenovirus expression vector. “Adenovirus expression vector” is meant to include those constructs containing adenovirus sequences sufficient to (a) support packaging of the construct and (b) to express a polynucleotide that has been cloned therein in a sense or antisense orientation. Of course, in the context of an antisense construct, expression does not require that the gene product be synthesized.

[0310] The expression vector comprises a genetically engineered form of an adenovirus. Knowledge of the genetic organization of adenovirus, a 36 kb, linear, double-stranded DNA virus, allows substitution of large pieces of adenoviral DNA with foreign sequences up to 7 kb (Grunhaus and Horwitz, 1992). In contrast to retrovirus, the adenoviral infection of host cells does not result in chromosomal integration because adenoviral DNA can replicate in an episomal manner without potential genotoxicity. Also, adenoviruses are structurally stable, and no genome rearrangement has been detected after extensive amplification. Adenovirus can infect virtually all epithelial cells regardless of their cell cycle stage. So far, adenoviral infection appears to be linked only to mild disease such as acute respiratory disease in humans.

[0311] Adenovirus is particularly suitable for use as a gene transfer vector because of its mid-sized genome, ease of manipulation, high titer, wide target-cell range and high infectivity. Both ends of the viral genome contain 100-200 base pair inverted repeats (ITRs), which are cis elements necessary for viral DNA replication and packaging. The early (E) and late (L) regions of the genome contain different transcription units that are divided by the onset of viral DNA replication. The E1 region (E1A and E1B) encodes proteins responsible for the regulation of transcription of the viral genome and a few cellular genes. The expression of the E2 region (E2A and E2B) results in the synthesis of the proteins for viral DNA replication. These proteins are involved in DNA replication, late gene expression and host cell shut-off (Renan, 1990). The products of the late genes, including the majority of the viral capsid proteins, are expressed only after significant processing of a single primary transcript issued by the major late promoter (MLP). The MLP, (located at 16.8 m.u.) is particularly efficient during the late phase of infection, and all the mRNA's issued from this promoter possess a 5′-tripartite leader (TPL) sequence which makes them preferred mRNA's for translation.

[0312] In a current system, recombinant adenovirus is generated from homologous recombination between shuttle vector and provirus vector. Due to the possible recombination between two proviral vectors, wild-type adenovirus may be generated from this process. Therefore, it is critical to isolate a single clone of virus from an individual plaque and examine its genomic structure.

[0313] Generation and propagation of the current adenovirus vectors, which are replication deficient, depend on a unique helper cell line, designated 293, which was transformed from human embryonic kidney cells by Ad5 DNA fragments and constitutively expresses E1 proteins (Graham et al., 1977). Since the E3 region is dispensable from the adenovirus genome (Jones and Shenk, 1978), the current adenovirus vectors, with the help of 293 cells, carry foreign DNA in either the E1, the D3 or both regions (Graham and Prevec, 1991). In nature, adenovirus can package approximately 105% of the wild-type genome (Ghosh-Choudhury et al., 1987), providing capacity for about 2 extra kB of DNA. Combined with the approximately 5.5 kB of DNA that is replaceable in the E1 and E3 regions, the maximum capacity of the current adenovirus vector is under 7.5 kB, or about 15% of the total length of the vector. More than 80% of the adenovirus viral genome remains in the vector backbone and is the source of vector-borne cytotoxicity. Also, the replication deficiency of the E1-deleted virus is incomplete. For example, leakage of viral gene expression has been observed with the currently available vectors at high multiplicities of infection (MOI) (Mulligan, 1993).

[0314] Helper cell lines may be derived from human cells such as human embryonic kidney cells, muscle cells, hematopoietic cells or other human embryonic mesenchymal or epithelial cells. Alternatively, the helper cells may be derived from the cells of other mammalian species that are permissive for human adenovirus. Such cells include, e.g., Vero cells or other monkey embryonic mesenchymal or epithelial cells. As stated above, the currently preferred helper cell line is 293.

[0315] Recently, Racher et al. (1995) disclosed improved methods for culturing 293 cells and propagating adenovirus. In one format, natural cell aggregates are grown by inoculating individual cells into 1 liter siliconized spinner flasks (Techne, Cambridge, UK) containing 100-200 ml of medium. Following stirring at 40 rpm, the cell viability is estimated with trypan blue. In another format, Fibra-Cel microcarriers (Bibby Sterlin, Stone, UK) (5 g/l) is employed as follows. A cell inoculum, resuspended in 5 ml of medium, is added to the carrier (50 ml) in a 250 ml Erlenmeyer flask and left stationary, with occasional agitation, for 1 to 4 h. The medium is then replaced with 50 ml of fresh medium and shaking initiated. For virus production, cells are allowed to grow to about 80% confluence, after which time the medium is replaced (to 25% of the final volume) and adenovirus added at an MOI of 0.05. Cultures are left stationary overnight, following which the volume is increased to 100% and shaking commenced for another 72 h.

[0316] Other than the requirement that the adenovirus vector be replication defective, or at least conditionally defective, the nature of the adenovirus vector is not believed to be crucial to the successful practice of the invention. The adenovirus may be of any of the 42 different known serotypes or subgroups A-F. Adenovirus type 5 of subgroup C is the preferred starting material in order to obtain a conditional replication-defective adenovirus vector for use in the present invention, since Adenovirus type 5 is a human adenovirus about which a great deal of biochemical and genetic information is known, and it has historically been used for most constructions employing adenovirus as a vector.

[0317] As stated above, the typical vector according to the present invention is replication defective and will not have an adenovirus E1 region. Thus, it will be most convenient to introduce the polynucleotide encoding the gene of interest at the position from which the E1-coding sequences have been removed. However, the position of insertion of the construct within the adenovirus sequences is not critical to the invention. The polynucleotide encoding the gene of interest may also be inserted in lieu of the deleted E3 region in E3 replacement vectors as described by Karlsson et al. (1986) or in the E4 region where a helper cell line or helper virus complements the E4 defect.

[0318] Adenovirus is easy to grow and manipulate and exhibits broad host range in vitro and in vivo. This group of viruses can be obtained in high titers, e.g., 10⁹-10¹¹ plaque-forming units per ml, and they are highly infective. The life cycle of adenovirus does not require integration into the host cell genome. The foreign genes delivered by adenovirus vectors are episomal and, therefore, have low genotoxicity to host cells. No side effects have been reported in studies of vaccination with wild-type adenovirus (Couch et al., 1963; Top et al., 1971), demonstrating their safety and therapeutic potential as in vivo gene transfer vectors.

[0319] Adenovirus vectors have been used in eukaryotic gene expression (Levrero et al., 1991; Gomez-Foix et al., 1992) and vaccine development (Grunhaus and Horwitz, 1992; Graham and Prevec, 1992). Recently, animal studies suggested that recombinant adenovirus could be used for gene therapy (Stratford-Perricaudet and Perricaudet, 1991; Stratford-Perricaudet et al., 1990; Rich et al., 1993). Studies in administering recombinant adenovirus to different tissues include trachea instillation (Rosenfeld et al., 1991; Rosenfeld et al., 1992), muscle injection (Ragot et al., 1993), peripheral intravenous injections (Herz and Gerard, 1993) and stereotactic inoculation into the brain (Le Gal La Salle et al., 1993).

[0320] 4.15.2 Retroviruses

[0321] The retroviruses are a group of single-stranded RNA viruses characterized by an ability to convert their RNA to double-stranded DNA in infected cells by a process of reverse-transcription (Coffin, 1990). The resulting DNA then stably integrates into cellular chromosomes as a provirus and directs synthesis of viral proteins. The integration results in the retention of the viral gene sequences in the recipient cell and its descendants. The retroviral genome contains three genes, gag, pol, and env that code for capsid proteins, polymerase enzyme, and envelope components, respectively. A sequence found upstream from the gag gene contains a signal for packaging of the genome into virions. Two long terminal repeat (LTR) sequences are present at the 5′ and 3′ ends of the viral genome. These contain strong promoter and enhancer sequences and are also required for integration in the host cell genome (Coffin, 1990).

[0322] In order to construct a retroviral vector, a nucleic acid encoding one or more oligonucleotide or polynucleotide sequences of interest is inserted into the viral genome in the place of certain viral sequences to produce a virus that is replication-defective. In order to produce virions, a packaging cell line containing the gag, pol, and env genes but without the LTR and packaging components is constructed (Mann et al., 1983). When a recombinant plasmid containing a cDNA, together with the retroviral LTR and packaging sequences is introduced into this cell line (by calcium phosphate precipitation for example), the packaging sequence allows the RNA transcript of the recombinant plasmid to be packaged into viral particles, which are then secreted into the culture media (Nicolas and Rubenstein, 1988; Temin, 1986; Mann et al., 1983). The media containing the recombinant retroviruses is then collected, optionally concentrated, and used for gene transfer. Retroviral vectors are able to infect a broad variety of cell types. However, integration and stable expression require the division of host cells (Paskind et al., 1975).

[0323] A novel approach designed to allow specific targeting of retrovirus vectors was recently developed based on the chemical modification of a retrovirus by the chemical addition of lactose residues to the viral envelope. This modification could permit the specific infection of hepatocytes via sialoglycoprotein receptors.

[0324] A different approach to targeting of recombinant retroviruses was designed in which biotinylated antibodies against a retroviral envelope protein and against a specific cell receptor were used. The antibodies were coupled via the biotin components by using streptavidin (Roux et al., 1989). Using antibodies against major histocompatibility complex class I and class II antigens, they demonstrated the infection of a variety of human cells that bore those surface antigens with an ecotropic virus in vitro (Roux et al., 1989).

[0325] 4.15.3 Adeno-Assoclated Viruses

[0326] AAV (Ridgeway, 1988; Hermonat and Muzycska, 1984) is a parovirus, discovered as a contamination of adenoviral stocks. It is a ubiquitous virus (antibodies are present in 85% of the US human population) that has not been linked to any disease. It is also classified as a dependovirus, because its replications is dependent on the presence of a helper virus, such as adenovirus. Five serotypes have been isolated, of which AAV-2 is the best characterized. AAV has a single-stranded linear DNA that is encapsidated into capsid proteins VP1, VP2 and VP3 to form an icosahedral virion of 20 to 24 nm in diameter (Muzyczka and McLaughlin, 1988).

[0327] The AAV DNA is approximately 4.7 kilobases long. It contains two open reading frames and is flanked by two ITRs. There are two major genes in the AAV genome: rep and cap. The rep gene codes for proteins responsible for viral replications, whereas cap codes for capsid protein VP1-3. Each ITR forms a T-shaped hairpin structure. These terminal repeats are the only essential cis components of the AAV for chromosomal integration. Therefore, the AAV can be used as a vector with all viral coding sequences removed and replaced by the cassette of genes for delivery. Three viral promoters have been identified and named p5, p19, and p40, according to their map position. Transcription from p5 and p19 results in production of rep proteins, and transcription from p40 produces the capsid proteins (Hermonat and Muzyczka, 1984).

[0328] There are several factors that prompted researchers to study the possibility of using rAAV as an expression vector. One is that the requirements for delivering a gene to integrate into the host chromosome are surprisingly few. It is necessary to have the 145-bp ITRs, which are only 6% of the AAV genome. This leaves room in the vector to assemble a 4.5-kb DNA insertion. While this carrying capacity may prevent the AAV from delivering large genes, it is amply suited for delivering the antisense constructs of the present invention.

[0329] AAV is also a good choice of delivery vehicles due to its safety. There is a relatively complicated rescue mechanism: not only wild type adenovirus but also AAV genes are required to mobilize rAAV. Likewise, AAV is not pathogenic and not associated with any disease. The removal of viral coding sequences minimizes immune reactions to viral gene expression, and therefore, rAAV does not evoke an inflammatory response.

[0330] 4.15.4 Other Viral Vectors as Expression Constructs

[0331] Other viral vectors may be employed as expression constructs in the present invention for the delivery of oligonucleotide or polynucleotide sequences to a host cell. Vectors derived from viruses such as vaccinia virus (Ridgeway, 1988; Coupar et al., 1988), lentiviruses, polio viruses and herpes viruses may be employed. They offer several attractive features for various mammalian cells (Friedmann, 1989; Ridgeway, 1988; Coupar et al., 1988; Horwich et al., 1990).

[0332] With the recent recognition of defective hepatitis B viruses, new insight was gained into the structure-function relationship of different viral sequences. In vitro studies showed that the virus could retain the ability for helper-dependent packaging and reverse transcription despite the deletion of up to 80% of its genome (Horwich et al., 1990). This suggested that large portions of the genome could be replaced with foreign genetic material. The hepatotropism and persistence (integration) were particularly attractive properties for liver-directed gene transfer. Chang et al. (1991) introduced the chloramphenicol acetyltransferase (CAT) gene into duck hepatitis B virus genome in the place of the polymerase, surface, and pre-surface coding sequences. It was cotransfected with wild-type virus into an avian hepatoma cell line. Culture media containing high titers of the recombinant virus were used to infect primary duckling hepatocytes. Stable CAT gene expression was detected for at least 24 days after transfection (Chang et al., 1991).

[0333] 4.15.5 Non-Viral Vectors

[0334] In order to effect expression of the oligonucleotide or polynucleotide sequences of the present invention, the expression construct must be delivered into a cell. This delivery may be accomplished in vitro, as in laboratory procedures for transforming cells lines, or in vivo or ex vivo, as in the treatment of certain disease states. As described above, one preferred mechanism for delivery is via viral infection where the expression construct is encapsulated in an infectious viral particle.

[0335] Once the expression construct has been delivered into the cell the nucleic acid encoding the desired oligonucleotide or polynucleotide sequences may be positioned and expressed at different sites. In certain embodiments, the nucleic acid encoding the construct may be stably integrated into the genome of the cell. This integration may be in the specific location and orientation via homologous recombination (gene replacement) or it may be integrated in a random, non-specific location (gene augmentation). In yet further embodiments, the nucleic acid may be stably maintained in the cell as a separate, episomal segment of DNA. Such nucleic acid segments or “episomes” encode sequences sufficient to permit maintenance and replication independent of or in synchronization with the host cell cycle. How the expression construct is delivered to a cell and where in the cell the nucleic acid remains is dependent on the type of expression construct employed.

[0336] In certain embodiments of the invention, the expression construct comprising one or more oligonucleotide or polynucleotide sequences may simply consist of naked recombinant DNA or plasmids. Transfer of the construct may be performed by any of the methods mentioned above which physically or chemically permeabilize the cell membrane. This is particularly applicable for transfer in vitro but it may be applied to in vivo use as well. Dubensky et al. (1984) successfully injected polyomavirus DNA in the form of calcium phosphate precipitates into liver and spleen of adult and newborn mice demonstrating active viral replication and acute infection. Benvenisty and Reshef (1986) also demonstrated that direct intraperitoneal injection of calcium phosphate-precipitated plasmids results in expression of the transfected genes. It is envisioned that DNA encoding a gene of interest may also be transferred in a similar manner in vivo and express the gene product.

[0337] Another embodiment of the invention for transferring a naked DNA expression construct into cells may involve particle bombardment. This method depends on the ability to accelerate DNA-coated microprojectiles to a high velocity allowing them to pierce cell membranes and enter cells without killing them (Klein et al., 1987). Several devices for accelerating small particles have been developed. One such device relies on a high voltage discharge to generate an electrical current, which in turn provides the motive force (Yang et al., 1990). The microprojectiles used have consisted of biologically inert substances such as tungsten or gold beads.

[0338] Selected organs including the liver, skin, and muscle tissue of rats and mice have been bombarded in vivo (Yang et al., 1990; Zelenin et al., 1991). This may require surgical exposure of the tissue or cells, to eliminate any intervening tissue between the gun and the target organ, i.e. ex vivo treatment. Again, DNA encoding a particular gene may be delivered via this method and still be incorporated by the present invention.

[0339] 4.16 Antisense Oligonucleotides

[0340] The end result of the flow of genetic information is the synthesis of protein. DNA is transcribed by polymerases into messenger RNA and translated on the ribosome to yield a folded, functional protein. Thus there are several steps along the route where protein synthesis can be inhibited. The native DNA segment coding for a polypeptide described herein, as all such mammalian DNA strands, has two strands: a sense strand and an antisense strand held together by hydrogen bonding. The messenger RNA coding for polypeptide has the same nucleotide sequence as the sense DNA strand except that the DNA thymidine is replaced by uridine. Thus, synthetic antisense nucleotide sequences will bind to a mRNA and inhibit expression of the protein encoded by that mRNA.

[0341] The targeting of antisense oligonucleotides to mRNA is thus one mechanism to shut down protein synthesis, and, consequently, represents a powerful and targeted therapeutic approach. For example, the synthesis of polygalactauronase and the muscarine type 2 acetylcholine receptor are inhibited by antisense oligonucleotides directed to their respective mRNA sequences (U.S. Pat. No. 5,739,119 and U.S. Pat. No. 5,759,829, each specifically incorporated herein by reference in its entirety). Further, examples of antisense inhibition have been demonstrated with the nuclear protein cyclin, the multiple drug resistance gene (MDG1), ICAM-1, E-selectin, STK-1, striatal GABAA receptor and human EGF (Jaskulski et al., 1988; Vasanthakumar and Ahmed, 1989; Peris et al., 1998; U.S. Pat. No. 5,801,154; U.S. Pat. No. 5,789,573; U.S. Pat. No. 5,718,709 and U.S. Pat. No. 5,610,288, each specifically incorporated herein by reference in its entirety). Antisense constructs have also been described that inhibit and can be used to treat a variety of abnormal cellular proliferations, e.g. cancer (U.S. Pat. No. 5,747,470; U.S. Pat. No. 5,591,317 and U.S. Pat. No. 5,783,683, each specifically incorporated herein by reference in its entirety).

[0342] Therefore, in exemplary embodiments, the invention provides oligonucleotide sequences that comprise all, or a portion of, any sequence that is capable of specifically binding to polynucleotide sequence described herein, or a complement thereof. In one embodiment, the antisense oligonucleotides comprise DNA or derivatives thereof. In another embodiment, the oligonucleotides comprise RNA or derivatives thereof. In a third embodiment, the oligonucleotides are modified DNAs comprising a phosphorothioated modified backbone. In a fourth embodiment, the oligonucleotide sequences comprise peptide nucleic acids or derivatives thereof. In each case, preferred compositions comprise a sequence region that is complementary, and more preferably substantially-complementary, and even more preferably, completely complementary to one or more portions of polynucleotides disclosed herein.

[0343] Selection of antisense compositions specific for a given gene sequence is based upon analysis of the chosen target sequence (i.e. in these illustrative examples the rat and human sequences) and determination of secondary structure, Tm, binding energy, relative stability, and antisense compositions were selected based upon their relative inability to form dimers, hairpins, or other secondary structures that would reduce or prohibit specific binding to the target mRNA in a host cell.

[0344] Highly preferred target regions of the mRNA, are those which are at or near the AUG translation initiation codon, and those sequences which were substantially complementary to 5′ regions of the mRNA. These secondary structure analyses and target site selection considerations were performed using v.4 of the OLIGO primer analysis software (Rychlik, 1997) and the BLASTN 2.0.5 algorithm software (Altschul et al., 1997).

[0345] The use of an antisense delivery method employing a short peptide vector, termed MPG (27 residues), is also contemplated. The MPG peptide contains a hydrophobic domain derived from the fusion sequence of HIV gp41 and a hydrophilic domain from the nuclear localization sequence of SV40 T-antigen (Morris et al., 1997). It has been demonstrated that several molecules of the MPG peptide coat the antisense oligonucleotides and can be delivered into cultured mammalian cells in less than 1 hour with relatively high efficiency (90%). Further, the interaction with MPG strongly increases both the stability of the oligonucleotide to nuclease and the ability to cross the plasma membrane (Morris et al., 1997).

[0346] 4.17 Ribozymes

[0347] Although proteins traditionally have been used for catalysis of nucleic acids, another class of macromolecules has emerged as useful in this endeavor. Ribozymes are RNA-protein complexes that cleave nucleic acids in a site-specific fashion. Ribozymes have specific catalytic domains that possess endonuclease activity (Kim and Cech, 1987; Gerlach et al., 1987; Forster and Symons, 1987). For example, a large number of ribozymes accelerate phosphoester transfer reactions with a high degree of specificity, often cleaving only one of several phosphoesters in an oligonucleotide substrate (Cech et al., 1981; Michel and Westhof, 1990; Reinhold-Hurek and Shub, 1992). This specificity has been attributed to the requirement that the substrate bind via specific base-pairing interactions to the internal guide sequence (“IGS”) of the ribozyme prior to chemical reaction.

[0348] Ribozyme catalysis has primarily been observed as part of sequence-specific cleavage/ligation reactions involving nucleic acids (Joyce, 1989; Cech et al., 1981). For example, U.S. Pat. No. 5,354,855 (specifically incorporated herein by reference) reports that certain ribozymes can act as endonucleases with a sequence specificity greater than that of known ribonucleases and approaching that of the DNA restriction enzymes. Thus, sequence-specific ribozyme-mediated inhibition of gene expression may be particularly suited to therapeutic applications (Scanlon et al., 1991; Sarver et al., 1990). Recently, it was reported that ribozymes elicited genetic changes in some cells lines to which they were applied; the altered genes included the oncogenes H-ras, c-fos and genes of HIV. Most of this work involved the modification of a target mRNA, based on a specific mutant codon that is cleaved by a specific ribozyme.

[0349] Six basic varieties of naturally-occurring enzymatic RNAs are known presently. Each can catalyze the hydrolysis of RNA phosphodiester bonds in trans (and thus can cleave other RNA molecules) under physiological conditions. In general, enzymatic nucleic acids act by first binding to a target RNA. Such binding occurs through the target binding portion of a enzymatic nucleic acid which is held in close proximity to an enzymatic portion of the molecule that acts to cleave the target RNA. Thus, the enzymatic nucleic acid first recognizes and then binds a target RNA through complementary base-pairing, and once bound to the correct site, acts enzymatically to cut the target RNA. Strategic cleavage of such a target RNA will destroy its ability to direct synthesis of an encoded protein. After an enzymatic nucleic acid has bound and cleaved its RNA target, it is released from that RNA to search for another target and can repeatedly bind and cleave new targets.

[0350] The enzymatic nature of a ribozyme is advantageous over many technologies, such as antisense technology (where a nucleic acid molecule simply binds to a nucleic acid target to block its translation) since the concentration of ribozyme necessary to affect a therapeutic treatment is lower than that of an antisense oligonucleotide. This advantage reflects the ability of the ribozyme to act enzymatically. Thus, a single ribozyme molecule is able to cleave many molecules of target RNA. In addition, the ribozyme is a highly specific inhibitor, with the specificity of inhibition depending not only on the base pairing mechanism of binding to the target RNA, but also on the mechanism of target RNA cleavage. Single mismatches, or base-substitutions, near the site of cleavage can completely eliminate catalytic activity of a ribozyme. Similar mismatches in antisense molecules do not prevent their action (Woolf et al., 1992). Thus, the specificity of action of a ribozyme is greater than that of an antisense oligonucleotide binding the same RNA site.

[0351] The enzymatic nucleic acid molecule may be formed in a hammerhead, hairpin, a hepatitis δ virus, group I intron or RNaseP RNA (in association with an RNA guide sequence) or Neurospora VS RNA motif. Examples of hammerhead motifs are described by Rossi et al. (1992). Examples of hairpin motifs are described by Hampel et al. (Eur. Pat. Appl. Publ. No. EP 0360257), Hampel and Tritz (1989), Hampel et al. (1990) and U.S. Pat. No. 5,631,359 (specifically incorporated herein by reference). An example of the hepatitis δ virus motif is described by Perrotta and Been (1992); an example of the RNaseP motif is described by Guerrier-Takada et al. (1983); Neurospora VS RNA ribozyme motif is described by Collins (Saville and Collins, 1990; Saville and Collins, 1991; Collins and Olive, 1993); and an example of the Group I intron is described in (U.S. Pat. No. 4,987,071, specifically incorporated herein by reference). All that is important in an enzymatic nucleic acid molecule of this invention is that it has a specific substrate binding site which is complementary to one or more of the target gene RNA regions, and that it have nucleotide sequences within or surrounding that substrate binding site which impart an RNA cleaving activity to the molecule. Thus the ribozyme constructs need not be limited to specific motifs mentioned herein.

[0352] In certain embodiments, it may be important to produce enzymatic cleaving agents which exhibit a high degree of specificity for the RNA of a desired target, such as one of the sequences disclosed herein. The enzymatic nucleic acid molecule is preferably targeted to a highly conserved sequence region of a target mRNA. Such enzymatic nucleic acid molecules can be delivered exogenously to specific cells as required. Alternatively, the ribozymes can be expressed from DNA or RNA vectors that are delivered to specific cells.

[0353] Small enzymatic nucleic acid motifs (e.g., of the hammerhead or the hairpin structure) may also be used for exogenous delivery. The simple structure of these molecules increases the ability of the enzymatic nucleic acid to invade targeted regions of the mRNA structure. Alternatively, catalytic RNA molecules can be expressed within cells from eukaryotic promoters (e.g., Scanlon et al., 1991; Kashani-Sabet et al., 1992; Dropulic et al., 1992; Weerasinghe et al., 1991; Ojwang et al., 1992; Chen et al., 1992; Sarver et al., 1990). Those skilled in the art realize that any ribozyme can be expressed in eukaryotic cells from the appropriate DNA vector. The activity of such ribozymes can be augmented by their release from the primary transcript by a second ribozyme (Int. Pat. Appl. Publ. No. WO 93/23569, and Int. Pat. Appl. Publ. No. WO 94/02595, both hereby incorporated by reference; Ohkawa et al., 1992; Taira et al., 1991; and Ventura et al., 1993).

[0354] Ribozymes may be added directly, or can be complexed with cationic lipids, lipid complexes, packaged within liposomes, or otherwise delivered to target cells. The RNA or RNA complexes can be locally administered to relevant tissues ex vivo, or in vivo through injection, aerosol inhalation, infusion pump or stent, with or without their incorporation in biopolymers.

[0355] Ribozymes may be designed as described in Int. Pat. Appl. Publ. No. WO 93/23569 and Int. Pat. Appl. Publ. No. WO 94/02595, each specifically incorporated herein by reference) and synthesized to be tested in vitro and in vivo, as described. Such ribozymes can also be optimized for delivery. While specific examples are provided, those in the art will recognize that equivalent RNA targets in other species can be utilized when necessary.

[0356] Hammerhead or hairpin ribozymes may be individually analyzed by computer folding (Jaeger et al., 1989) to assess whether the ribozyme sequences fold into the appropriate secondary structure. Those ribozymes with unfavorable intramolecular interactions between the binding arms and the catalytic core are eliminated from consideration. Varying binding arm lengths can be chosen to optimize activity. Generally, at least 5 or so bases on each arm are able to bind to, or otherwise interact with, the target RNA.

[0357] Ribozymes of the hammerhead or hairpin motif may be designed to anneal to various sites in the mRNA message, and can be chemically synthesized. The method of synthesis used follows the procedure for normal RNA synthesis as described in Usman et al. (1987) and in Scaringe et al. (1990) and makes use of common nucleic acid protecting and coupling groups, such as dimethoxytrityl at the 5′-end, and phosphoramidites at the 3′-end. Average stepwise coupling yields are typically >98%. Hairpin ribozymes may be synthesized in two parts and annealed to reconstruct an active ribozyme (Chowrira and Burke, 1992). Ribozymes may be modified extensively to enhance stability by modification with nuclease resistant groups, for example, 2′-amino, 2′-C-allyl, 2′-flouro, 2′-o-methyl, 2′-H (for a review see e.g., Usman and Cedergren, 1992). Ribozymes may be purified by gel electrophoresis using general methods or by high pressure liquid chromatography and resuspended in water.

[0358] Ribozyme activity can be optimized by altering the length of the ribozyme binding arms, or chemically synthesizing ribozymes with modifications that prevent their degradation by serum ribonucleases (see e.g., Int. Pat. Appl. Publ. No. WO 92/07065; Perrault et al, 1990; Pieken et al., 1991; Usman and Cedergren, 1992; Int. Pat. Appl. Publ. No. WO 93/15187; Int. Pat. Appl. Publ. No. WO 91/03162; Eur. Pat. Appl. Publ. No.92110298.4; U.S. Pat. No. 5,334,711; and Int. Pat. Appl. Publ. No. WO 94/13688, which describe various chemical modifications that can be made to the sugar moieties of enzymatic RNA molecules), modifications which enhance their efficacy in cells, and removal of stem II bases to shorten RNA synthesis times and reduce chemical requirements.

[0359] Sullivan et al. (Int. Pat. Appl. Publ. No. WO 94/02595) describes the general methods for delivery of enzymatic RNA molecules. Ribozymes may be administered to cells by a variety of methods known to those familiar to the art, including, but not restricted to, encapsulation in liposomes, by iontophoresis, or by incorporation into other vehicles, such as hydrogels, cyclodextrins, biodegradable nanocapsules, and bioadhesive microspheres. For some indications, ribozymes may be directly delivered ex vivo to cells or tissues with or without the aforementioned vehicles. Alternatively, the RNA/vehicle combination may be locally delivered by direct inhalation, by direct injection or by use of a catheter, infusion pump or stent. Other routes of delivery include, but are not limited to, intravascular, intramuscular, subcutaneous or joint injection, aerosol inhalation, oral (tablet or pill form), topical, systemic, ocular, intraperitoneal and/or intrathecal delivery. More detailed descriptions of ribozyme delivery and administration are provided in Int. Pat. Appl. Publ. No. WO 94/02595 and Int. Pat. Appl. Publ. No. WO 93/23569, each specifically incorporated herein by reference.

[0360] Another means of accumulating high concentrations of a ribozyme(s) within cells is to incorporate the ribozyme-encoding sequences into a DNA expression vector. Transcription of the ribozyme sequences are driven from a promoter for eukaryotic RNA polymerase I (pol I), RNA polymerase II (pol II), or RNA polymerase III (pol III). Transcripts from pol II or pol III promoters will be expressed at high levels in all cells; the levels of a given pol II promoter in a given cell type will depend on the nature of the gene regulatory sequences (enhancers, silencers, etc.) present nearby. Prokaryotic RNA polymerase promoters may also be used, providing that the prokaryotic RNA polymerase enzyme is expressed in the appropriate cells (Elroy-Stein and Moss, 1990; Gao and Huang, 1993; Lieber et al., 1993; Zhou et al., 1990). Ribozymes expressed from such promoters can function in mammalian cells (e.g. Kashani-Saber et al., 1992; Ojwang et al., 1992; Chen et al., 1992; Yu et al., 1993; L'Huillier et al., 1992; Lisziewicz et al., 1993). Such transcription units can be incorporated into a variety of vectors for introduction into mammalian cells, including but not restricted to, plasmid DNA vectors, viral DNA vectors (such as adenovirus or adeno-associated vectors), or viral RNA vectors (such as retroviral, semliki forest virus, sindbis virus vectors).

[0361] Ribozymes may be used as diagnostic tools to examine genetic drift and mutations within diseased cells. They can also be used to assess levels of the target RNA molecule. The close relationship between ribozyme activity and the structure of the target RNA allows the detection of mutations in any region of the molecule which alters the base-pairing and three-dimensional structure of the target RNA. By using multiple ribozymes, one may map nucleotide changes which are important to RNA structure and function in vitro, as well as in cells and tissues. Cleavage of target RNAs with ribozymes may be used to inhibit gene expression and define the role (essentially) of specified gene products in the progression of disease. In this manner, other genetic targets may be defined as important mediators of the disease. These studies will lead to better treatment of the disease progression by affording the possibility of combinational therapies (e.g., multiple ribozymes targeted to different genes, ribozymes coupled with known small molecule inhibitors, or intermittent treatment with combinations of ribozymes and/or other chemical or biological molecules). Other in vitro uses of ribozymes are well known in the art, and include detection of the presence of mRNA associated with an IL-5 related condition. Such RNA is detected by determining the presence of a cleavage product after treatment with a ribozyme using standard methodology.

[0362] 4.18 Peptide Nucleic Acids

[0363] In certain embodiments, the inventors contemplate the use of peptide nucleic acids (PNAs) in the practice of the methods of the invention. PNA is a DNA mimic in which the nucleobases are attached to a pseudopeptide backbone (Good and Nielsen, 1997). PNA is able to be utilized in a number methods that traditionally have used RNA or DNA. Often PNA sequences perform better in techniques than the corresponding RNA or DNA sequences and have utilities that are not inherent to RNA or DNA. A review of PNA including methods of making, characteristics of, and methods of using, is provided by Corey (1997) and is incorporated herein by reference. As such, in certain embodiments, one may prepare PNA sequences that are complementary to one or more portions of the ACE mRNA sequence, and such PNA compositions may be used to regulate, alter, decrease, or reduce the translation of ACE-specific mRNA, and thereby alter the level of ACE activity in a host cell to which such PNA compositions have been administered.

[0364] PNAs have 2-aminoethyl-glycine linkages replacing the normal phosphodiester backbone of DNA (Nielsen et al., 1991; Hanvey et al., 1992; Hyrup and Nielsen, 1996; Neilsen, 1996). This chemistry has three important consequences: firstly, in contrast to DNA or phosphorothioate oligonucleotides, PNAs are neutral molecules; secondly, PNAs are achiral, which avoids the need to develop a stereoselective synthesis; and thirdly, PNA synthesis uses standard Boc (Dueholm et al., 1994) or Fmoc (Thomson et al., 1995) protocols for solid-phase peptide synthesis, although other methods, including a modified Merrifield method, have been used (Christensen et al., 1995).

[0365] PNA monomers or ready-made oligomers are commercially available from PerSeptive Biosystems (Framingham, Mass.). PNA syntheses by either Boc or Fmoc protocols are straightforward using manual or automated protocols (Norton et al., 1995). The manual protocol lends itself to the production of chemically modified PNAs or the simultaneous synthesis of families of closely related PNAs.

[0366] As with peptide synthesis, the success of a particular PNA synthesis will depend on the properties of the chosen sequence. For example, while in theory PNAs can incorporate any combination of nucleotide bases, the presence of adjacent purines can lead to deletions of one or more residues in the product. In expectation of this difficulty, it is suggested that, in producing PNAs with adjacent purines, one should repeat the coupling of residues likely to be added inefficiently. This should be followed by the purification of PNAs by reverse-phase high-pressure liquid chromatography (Norton et al., 1995) providing yields and purity of product similar to those observed during the synthesis of peptides.

[0367] Modifications of PNAs for a given application may be accomplished by coupling amino acids during solid-phase synthesis or by attaching compounds that contain a carboxylic acid group to the exposed N-terminal amine. Alternatively, PNAs can be modified after synthesis by coupling to an introduced lysine or cysteine. The ease with which PNAs can be modified facilitates optimization for better solubility or for specific functional requirements. Once synthesized, the identity of PNAs and their derivatives can be confirmed by mass spectrometry. Several studies have made and utilized modifications of PNAs (Norton et al., 1995; Haaima et al., 1996; Stetsenko et al., 1996; Petersen et al., 1995; Ulmann et al., 1996; Koch et al., 1995; Orum et al., 1995; Footer et al., 1996; Griffith et al., 1995; Kremsky et al., 1996; Pardridge et al., 1995; Boffa et al., 1995; Landsdorp et al., 1996; Gambacorti-Passerini et al., 1996; Armitage et al., 1997; Seeger et al., 1997; Ruskowski et al., 1997). U.S. Pat. No. 5,700,922 discusses PNA-DNA-PNA chimeric molecules and their uses in diagnostics, modulating protein in organisms, and treatment of conditions susceptible to therapeutics.

[0368] In contrast to DNA and RNA, which contain negatively charged linkages, the PNA backbone is neutral. In spite of this dramatic alteration, PNAs recognize complementary DNA and RNA by Watson-Crick pairing (Egholm et al., 1993), validating the initial modeling by Nielsen et al. (1991). PNAs lack 3′ to 5′ polarity and can bind in either parallel or anti-parallel fashion, with the anti-parallel mode being preferred (Egholm et al., 1993).

[0369] Hybridization of DNA oligonucleotides to DNA and RNA is destabilized by electrostatic repulsion between the negatively charged phosphate backbones of the complementary strands. By contrast, the absence of charge repulsion in PNA-DNA or PNA-RNA duplexes increases the melting temperature (Tm) and reduces the dependence of Tm on the concentration of mono- or divalent cations (Nielsen et al., 1991). The enhanced rate and affinity of hybridization are significant because they are responsible for the surprising ability of PNAs to perform strand invasion of complementary sequences within relaxed double-stranded DNA. In addition, the efficient hybridization at inverted repeats suggests that PNAs can recognize secondary structure effectively within double-stranded DNA. Enhanced recognition also occurs with PNAs immobilized on surfaces, and Wang et al. have shown that support-bound PNAs can be used to detect hybridization events (Wang et al., 1996).

[0370] One might expect that tight binding of PNAs to complementary sequences would also increase binding to similar (but not identical) sequences, reducing the sequence specificity of PNA recognition. As with DNA hybridization, however, selective recognition can be achieved by balancing oligomer length and incubation temperature. Moreover, selective hybridization of PNAs is encouraged by PNA-DNA hybridization being less tolerant of base mismatches than DNA-DNA hybridization. For example, a single mismatch within a 16 bp PNA-DNA duplex can reduce the Tm by up to 15° C. (Egholm et al., 1993). This high level of discrimination has allowed the development of several PNA-based strategies for the analysis of point mutations (Wang et al., 1996; Carlsson et al., 1996; Thiede et al., 1996; Webb and Hurskainen, 1996; Perry-O'Keefe et al., 1996).

[0371] High-affinity binding provides clear advantages for molecular recognition and the development of new applications for PNAs. For example, 11-13 nucleotide PNAs inhibit the activity of telomerase, a ribonucleo-protein that extends telomere ends using an essential RNA template, while the analogous DNA oligomers do not (Norton et al., 1996).

[0372] Neutral PNAs are more hydrophobic than analogous DNA oligomers, and this can lead to difficulty solubilizing them at neutral pH, especially if the PNAs have a high purine content or if they have the potential to form secondary structures. Their solubility can be enhanced by attaching one or more positive charges to the PNA termini (Nielsen et al., 1991).

[0373] Findings by Allfrey and colleagues suggest that strand invasion will occur spontaneously at sequences within chromosomal DNA (Boffa et al., 1995; Boffa et al., 1996). These studies targeted PNAs to triplet repeats of the nucleotides CAG and used this recognition to purify transcriptionally active DNA (Boffa et al., 1995) and to inhibit transcription (Boffa et al., 1996). This result suggests that if PNAs can be delivered within cells then they will have the potential to be general sequence-specific regulators of gene expression. Studies and reviews concerning the use of PNAs as antisense and anti-gene agents include Nielsen et al. (1993b), Hanvey et al. (1992), and Good and Nielsen (1997). Koppelhus et al. (1997) have used PNAs to inhibit HIV-1 inverse transcription, showing that PNAs may be used for antiviral therapies.

[0374] Methods of characterizing the antisense binding properties of PNAs are discussed in Rose (1993) and Jensen et al. (1997). Rose uses capillary gel electrophoresis to determine binding of PNAs to their complementary oligonucleotide, measuring the relative binding kinetics and stoichiometry. Similar types of measurements were made by Jensen et al. using BIAcore™ technology.

[0375] Other applications of PNAs include use in DNA strand invasion (Nielsen et al., 1991), antisense inhibition (Hanvey et al., 1992), mutational analysis (Orum et al., 1993), enhancers of transcription (Mollegaard et al., 1994), nucleic acid purification (Orum et al., 1995), isolation of transcriptionally active genes (Boffa et al., 1995), blocking of transcription factor binding (Vickers et al., 1995), genome cleavage (Veselkov et al., 1996), biosensors (Wang et al., 1996), in situ hybridization (Thisted et al., 1996), and in a alternative to Southern blotting (Perry-O'Keefe, 1996).

[0376] 4.19 Polypeptide, Peptides and Peptide Variants

[0377] The present invention, in other aspects, provides polypeptide compositions. Generally, a polypeptide of the invention will be an isolated polypeptide (or an epitope, variant, or active fragment thereof) derived from a mammalian species. Preferably, the polypeptide is encoded by a polynucleotide sequence disclosed herein or a sequence which hybridizes under moderately stringent conditions to a polynucleotide sequence disclosed herein. Alternatively, the polypeptide may be defined as a polypeptide which comprises a contiguous amino acid sequence from an amino acid sequence disclosed herein, or which polypeptide comprises an entire amino acid sequence disclosed herein.

[0378] In the present invention, a polypeptide composition is also understood to comprise one or more polypeptides that are immunologically reactive with antibodies generated against a polypeptide of the invention, particularly a polypeptide having the amino acid sequence encoded by the disclosed polynucleotides, or to active fragments, or to variants or biological functional equivalents thereof.

[0379] Likewise, a polypeptide composition of the present invention is understood to comprise one or more polypeptides that are capable of eliciting antibodies that are immunologically reactive with one or more polypeptides encoded by one or more contiguous nucleic acid sequences disclosed in this application, or to active fragments, or to variants thereof, or to one or more nucleic acid sequences which hybridize to one or more of these sequences under conditions of moderate to high stringency.

[0380] As used herein, an active fragment of a polypeptide includes a whole or a portion of a polypeptide which is modified by conventional techniques, e.g., mutagenesis, or by addition, deletion, or substitution, but which active fragment exhibits substantially the same structure function, antigenicity, etc., as a polypeptide as described herein.

[0381] In certain illustrative embodiments, the polypeptides of the invention will comprise at least an immunogenic portion of a hematological malignancy-related tumor protein or a variant thereof, as described herein. As noted above, a “hematological malignancy-related tumor protein” is a protein that is expressed by hematological malignancy-related tumor cells. Proteins that are hematological malignancy-related tumor proteins also react detectably within an immunoassay (such as an ELISA) with antisera from a patient with hematological malignancy. Polypeptides as described herein may be of any length. Additional sequences derived from the native protein and/or heterologous sequences may be present, and such sequences may (but need not) possess further immunogenic or antigenic properties.

[0382] An “immunogenic portion,” as used herein is a portion of a protein that is recognized (i.e., specifically bound) by a B-cell and/or T-cell surface antigen receptor. Such immunogenic portions generally comprise at least 5 amino acid residues, more preferably at least 10, and still more preferably at least 20 amino acid residues of a hematological malignancy-related tumor protein or a variant thereof. Certain preferred immunogenic portions include peptides in which an N-terminal leader sequence and/or transmembrane domain have been deleted. Other preferred immunogenic portions may contain a small N- and/or C-terminal deletion (e.g., 1-30 amino acids, preferably 5-15 amino acids), relative to the mature protein.

[0383] Immunogenic portions may generally be identified using well known techniques, such as those summarized in Paul, Fundamental Immunology, 3rd ed., 243-247 (Raven Press, 1993) and references cited therein. Such techniques include screening polypeptides for the ability to react with antigen-specific antibodies, antisera and/or T-cell lines or clones. As used herein, antisera and antibodies are “antigen-specific” if they specifically bind to an antigen (i.e., they react with the protein in an ELISA or other immunoassay, and do not react detectably with unrelated proteins). Such antisera and antibodies may be prepared as described herein, and using well known techniques. An immunogenic portion of a native hematological malignancy-related tumor protein is a portion that reacts with such antisera and/or T-cells at a level that is not substantially less than the reactivity of the full length polypeptide (e.g., in an ELISA and/or T-cell reactivity assay). Such immunogenic portions may react within such assays at a level that is similar to or greater than the reactivity of the full length polypeptide. Such screens may generally be performed using methods well known to those of ordinary skill in the art, such as those described in Harlow and Lane, Antibodies: A Laboratory Manual, Cold Spring Harbor Laboratory, 1988. For example, a polypeptide may be immobilized on a solid support and contacted with patient sera to allow binding of antibodies within the sera to the immobilized polypeptide. Unbound sera may then be removed and bound antibodies detected using, for example, ¹²⁵I-labeled Protein A.

[0384] As noted above, a composition may comprise a variant of a native hematological malignancy-related tumor protein. A polypeptide “variant,” as used herein, is a polypeptide that differs from a native hematological malignancy-related tumor protein in one or more substitutions, deletions, additions and/or insertions, such that the immunogenicity of the polypeptide is not substantially diminished. In other words, the ability of a variant to react with antigen-specific antisera may be enhanced or unchanged, relative to the native protein, or may be diminished by less than 50%, and preferably less than 20%, relative to the native protein. Such variants may generally be identified by modifying one of the above polypeptide sequences and evaluating the reactivity of the modified polypeptide with antigen-specific antibodies or antisera as described herein. Preferred variants include those in which one or more portions, such as an N-terminal leader sequence or transmembrane domain, have been removed. Other preferred variants include variants in which a small portion (e.g., 1-30 amino acids, preferably 5-15 amino acids) has been removed from the N- and/or C-terminal of the mature protein.

[0385] Polypeptide variants encompassed by the present invention include those exhibiting at least about 70%, 75%, 80%, 85%, 90%, 91%, 92%, 93%, 94%, 95%, 96%, 97%, 98%, or 99% or more identity (determined as described above) to the polypeptides disclosed herein.

[0386] Preferably, a variant contains conservative substitutions. A “conservative substitution” is one in which an amino acid is substituted for another amino acid that has similar properties, such that one skilled in the art of peptide chemistry would expect the secondary structure and hydropathic nature of the polypeptide to be substantially unchanged. Amino acid substitutions may generally be made on the basis of similarity in polarity, charge, solubility, hydrophobicity, hydrophilicity and/or the amphipathic nature of the residues. For example, negatively charged amino acids include aspartic acid and glutamic acid; positively charged amino acids include lysine and arginine; and amino acids with uncharged polar head groups having similar hydrophilicity values include leucine, isoleucine and valine; glycine and alanine; asparagine and glutamine; and serine, threonine, phenylalanine and tyrosine. Other groups of amino acids that may represent conservative changes include: (1) ala, pro, gly, glu, asp, gln, asn, ser, thr; (2) cys, ser, tyr, thr; (3) val, ile, leu, met, ala, phe; (4) lys, arg, his; and (5) phe, tyr, trp, his. A variant may also, or alternatively, contain nonconservative changes. In a preferred embodiment, variant polypeptides differ from a native sequence by substitution, deletion or addition of five amino acids or fewer. Variants may also (or alternatively) be modified by, for example, the deletion or addition of amino acids that have minimal influence on the immunogenicity, secondary structure and hydropathic nature of the polypeptide.

[0387] As noted above, polypeptides may comprise a signal (or leader) sequence at the N-terminal end of the protein, which co-translationally or post-translationally directs transfer of the protein. The polypeptide may also be conjugated to a linker or other sequence for ease of synthesis, purification or identification of the polypeptide (e.g., poly-His), or to enhance binding of the polypeptide to a solid support. For example, a polypeptide may be conjugated to an immunoglobulin Fc region.

[0388] Polypeptides may be prepared using any of a variety of well known techniques. Recombinant polypeptides encoded by DNA sequences as described above may be readily prepared from the DNA sequences using any of a variety of expression vectors known to those of ordinary skill in the art. Expression may be achieved in any appropriate host cell that has been transformed or transfected with an expression vector containing a DNA molecule that encodes a recombinant polypeptide. Suitable host cells include prokaryotes, yeast, and higher eukaryotic cells, such as mammalian cells and plant cells. Preferably, the host cells employed are E. coli, yeast or a mammalian cell line such as COS or CHO. Supernatants from suitable host/vector systems which secrete recombinant protein or polypeptide into culture media may be first concentrated using a commercially available filter. Following concentration, the concentrate may be applied to a suitable purification matrix such as an affinity matrix or an ion exchange resin. Finally, one or more reverse phase HPLC steps can be employed to further purify a recombinant polypeptide.

[0389] Portions and other variants having less than about 100 amino acids, and generally less than about 50 amino acids, may also be generated by synthetic means, using techniques well known to those of ordinary skill in the art. For example, such polypeptides may be synthesized using any of the commercially available solid-phase techniques, such as the Merrifield solid-phase synthesis method, where amino acids are sequentially added to a growing amino acid chain. See Merrifield, J. Am. Chem. Soc. 85:2149-2146, 1963. Equipment for automated synthesis of polypeptides is commercially available from suppliers such as Perkin Elmer/Applied BioSystems Division (Foster City, Calif.), and may be operated according to the manufacturer's instructions.

[0390] Within certain specific embodiments, a polypeptide may be a fusion protein that comprises multiple polypeptides as described herein, or that comprises at least one polypeptide as described herein and an unrelated sequence, such as a known tumor protein. A fusion partner may, for example, assist in providing T helper epitopes (an immunological fusion partner), preferably T helper epitopes recognized by humans, or may assist in expressing the protein (an expression enhancer) at higher yields than the native recombinant protein. Certain preferred fusion partners are both immunological and expression enhancing fusion partners. Other fusion partners may be selected so as to increase the solubility of the protein or to enable the protein to be targeted to desired intracellular compartments. Still further fusion partners include affinity tags, which facilitate purification of the protein.

[0391] Fusion proteins may generally be prepared using standard techniques, including chemical conjugation. Preferably, a fusion protein is expressed as a recombinant protein, allowing the production of increased levels, relative to a non-fused protein, in an expression system. Briefly, DNA sequences encoding the polypeptide components may be assembled separately, and ligated into an appropriate expression vector. The 3′ end of the DNA sequence encoding one polypeptide component is ligated, with or without a peptide linker, to the 5′ end of a DNA sequence encoding the second polypeptide component so that the reading frames of the sequences are in phase. This permits translation into a single fusion protein that retains the biological activity of both component polypeptides.

[0392] A peptide linker sequence may be employed to separate the first and second polypeptide components by a distance sufficient to ensure that each polypeptide folds into its secondary and tertiary structures. Such a peptide linker sequence is incorporated into the fusion protein using standard techniques well known in the art. Suitable peptide linker sequences may be chosen based on the following factors: (1) their ability to adopt a flexible extended conformation; (2) their inability to adopt a secondary structure that could interact with functional epitopes on the first and second polypeptides; and (3) the lack of hydrophobic or charged residues that might react with the polypeptide functional epitopes. Preferred peptide linker sequences contain Gly, Asn and Ser residues. Other near neutral amino acids, such as Thr and Ala may also be used in the linker sequence. Amino acid sequences which may be usefully employed as linkers include those disclosed in Maratea et al., Gene 40:39-46, 1985; Murphy et al., Proc. Natl. Acad. Sci. USA 83:8258-8262, 1986; U.S. Pat. No. 4,935,233 and U.S. Pat. No. 4,751,180. The linker sequence may generally be from 1 to about 50 amino acids in length. Linker sequences are not required when the first and second polypeptides have non-essential N-terminal amino acid regions that can be used to separate the functional domains and prevent steric interference.

[0393] The ligated DNA sequences are operably linked to suitable transcriptional or translational regulatory elements. The regulatory elements responsible for expression of DNA are located only 5′ to the DNA sequence encoding the first polypeptides. Similarly, stop codons required to end translation and transcription termination signals are only present 3′ to the DNA sequence encoding the second polypeptide.

[0394] Fusion proteins are also provided. Such proteins comprise a polypeptide as described herein together with an unrelated immunogenic protein. Preferably the immunogenic protein is capable of eliciting a recall response. Examples of such proteins include tetanus, tuberculosis and hepatitis proteins (see, for example, Stoute et al. New Engl. J. Med., 336:86-91, 1997).

[0395] Within preferred embodiments, an immunological fusion partner is derived from protein D, a surface protein of the gram-negative bacterium Haemophilus influenza B (WO 91/18926). Preferably, a protein D derivative comprises approximately the first third of the protein (e.g., the first N-terminal 100-110 amino acids), and a protein D derivative may be lipidated. Within certain preferred embodiments, the first 109 residues of a Lipoprotein D fusion partner is included on the N-terminus to provide the polypeptide with additional exogenous T-cell epitopes and to increase the expression level in E. coli (thus functioning as an expression enhancer). The lipid tail ensures optimal presentation of the antigen to antigen presenting cells. Other fusion partners include the non-structural protein from influenza virus, NS1 (hemagglutinin). Typically, the N-terminal 81 amino acids are used, although different fragments that include T-helper epitopes may be used.

[0396] In another embodiment, the immunological fusion partner is the protein known as LYTA, or a portion thereof (preferably a C-terminal portion). LYTA is derived from Streptococcus pneumoniae, which synthesizes an N-acetyl-L-alanine amidase known as amidase LYTA (encoded by the LytA gene; Gene 43:265-292, 1986). LYTA is an autolysin that specifically degrades certain bonds in the peptidoglycan backbone. The C-terminal domain of the LYTA protein is responsible for the affinity to the choline or to some choline analogues such as DEAE. This property has been exploited for the development of E. coli C-LYTA expressing plasmids useful for expression of fusion proteins. Purification of hybrid proteins containing the C-LYTA fragment at the amino terminus has been described (see Biotechnology 10:795-798, 1992). Within a preferred embodiment, a repeat portion of LYTA may be incorporated into a fusion protein. A repeat portion is found in the C-terminal region starting at residue 178. A particularly preferred repeat portion incorporates residues 188-305.

[0397] In general, polypeptides (including fusion proteins) and polynucleotides as described herein are isolated. An “isolated” polypeptide or polynucleotide is one that is removed from its original environment. For example, a naturally-occurring protein is isolated if it is separated from some or all of the coexisting materials in the natural system. Preferably, such polypeptides are at least about 90% pure, more preferably at least about 95% pure and most preferably at least about 99% pure. A polynucleotide is considered to be isolated if, for example, it is cloned into a vector that is not a part of the natural environment.

[0398] 4.20 Binding Agents

[0399] The present invention further employs agents, such as antibodies and antigen-binding fragments thereof, that specifically bind to a hematological malignancy-related antigen. As used herein, an antibody, or antigen-binding fragment thereof, is said to “specifically bind” to a hematological malignancy-related antigen if it reacts at a detectable level (within, for example, an ELISA) with, and does not react detectably with unrelated proteins under similar conditions. As used herein, “binding” refers to a noncovalent association between two separate molecules such that a complex is formed. The ability to bind may be evaluated by, for example, determining a binding constant for the formation of the complex. The binding constant is the value obtained when the concentration of the complex is divided by the product of the component concentrations. In general, two compounds are said to “bind,” in the context of the present invention, when the binding constant for complex formation exceeds about 10³ L/mol. The binding constant maybe determined using methods well known in the art.

[0400] Binding agents may be further capable of differentiating between patients with and without a hematological malignancy. Such binding agents generate a signal indicating the presence of a hematological malignancy in at least about 20% of patients with the disease, and will generate a negative signal indicating the absence of the disease in at least about 90% of individuals without the disease. To determine whether a binding agent satisfies this requirement, biological samples (e.g., blood, sera, urine and/or tumor biopsies) from patients with and without a hematological malignancy (as determined using standard clinical tests) may be assayed as described herein for the presence of polypeptides that bind to the binding agent. It will be apparent that a statistically significant number of samples with and without the disease should be assayed. Each binding agent should satisfy the above criteria; however, those of ordinary skill in the art will recognize that binding agents may be used in combination to improve sensitivity.

[0401] Any agent that satisfies the above requirements may be a binding agent. For example, a binding agent may be a ribosome, with or without a peptide component, an RNA molecule or a polypeptide. In a preferred embodiment, a binding agent is an antibody or an antigen-binding fragment thereof. Antibodies may be prepared by any of a variety of techniques known to those of ordinary skill in the art. See, e.g., Harlow and Lane, Antibodies: A Laboratory Manual, Cold Spring Harbor Laboratory, 1988. In general, antibodies can be produced by cell culture techniques, including the generation of monoclonal antibodies as described herein, or via transfection of antibody genes into suitable bacterial or mammalian cell hosts, in order to allow for the production of recombinant antibodies. In one technique, an immunogen comprising the polypeptide is initially injected into any of a wide variety of mammals (e.g., mice, rats, rabbits, sheep or goats). In this step, the polypeptides of this invention may serve as the immunogen without modification. Alternatively, particularly for relatively short polypeptides, a superior immune response may be elicited if the polypeptide is joined to a carrier protein, such as bovine serum albumin or keyhole limpet hemocyanin. The immunogen is injected into the animal host, preferably according to a predetermined schedule incorporating one or more booster immunizations, and the animals are bled periodically. Polyclonal antibodies specific for the polypeptide may then be purified from such antisera by, for example, affinity chromatography using the polypeptide coupled to a suitable solid support.

[0402] Monoclonal antibodies specific for an antigenic polypeptide of interest may be prepared, for example, using the technique of Kohler and Milstein, Eur. J. Immunol. 6:511-519, 1976, and improvements thereto. Briefly, these methods involve the preparation of immortal cell lines capable of producing antibodies having the desired specificity (i.e., reactivity with the polypeptide of interest). Such cell lines may be produced, for example, from spleen cells obtained from an animal immunized as described above. The spleen cells are then immortalized by, for example, fusion with a myeloma cell fusion partner, preferably one that is syngeneic with the immunized animal. A variety of fusion techniques may be employed. For example, the spleen cells and myeloma cells may be combined with a nonionic detergent for a few minutes and then plated at low density on a selective medium that supports the growth of hybrid cells, but not myeloma cells. A preferred selection technique uses HAT (hypoxanthine, aminopterin, thymidine) selection. After a sufficient time, usually about 1 to 2 weeks, colonies of hybrids are observed. Single colonies are selected and their culture supernatants tested for binding activity against the polypeptide. Hybridomas having high reactivity and specificity are preferred.

[0403] Monoclonal antibodies may be isolated from the supernatants of growing hybridoma colonies. In addition, various techniques may be employed to enhance the yield, such as injection of the hybridoma cell line into the peritoneal cavity of a suitable vertebrate host, such as a mouse. Monoclonal antibodies may then be harvested from the ascites fluid or the blood. Contaminants may be removed from the antibodies by conventional techniques, such as chromatography, gel filtration, precipitation, and extraction. The polypeptides of this invention may be used in the purification process in, for example, an affinity chromatography step.

[0404] Within certain embodiments, the use of antigen-binding fragments of antibodies may be preferred. Such fragments include Fab fragments, which may be prepared using standard techniques. Briefly, immunoglobulins may be purified from rabbit serum by affinity chromatography on Protein A bead columns (Harlow and Lane, Antibodies: A Laboratory Manual, Cold Spring Harbor Laboratory, 1988) and digested by papain to yield Fab and Fc fragments. The Fab and Fc fragments may be separated by affinity chromatography on protein A bead columns.

[0405] Monoclonal antibodies, and fragments thereof, of the present invention may be coupled to one or more therapeutic agents, such as radionuclides, differentiation inducers, drugs, toxins, and derivatives thereof. Preferred radionuclides include ⁹⁰y, ¹²³I, ¹²⁵I, ¹³¹I, ¹⁸⁶Re, ¹⁸⁸Re, ²¹¹At, and ²¹²Bi. Preferred drugs include methotrexate, and pyrimidine and purine analogs. Preferred differentiation inducers include phorbol esters and butyric acid. Preferred toxins include ricin, abrin, diptheria toxin, cholera toxin, gelonin, Pseudomonas exotoxin, Shigella toxin, and pokeweed antiviral protein. For certain in vivo and ex vivo therapies, an antibody or fragment thereof is preferably coupled to a cytotoxic agent, such as a radioactive or chemotherapeutic moiety.

[0406] A therapeutic agent may be coupled (e.g., covalently bonded) to a suitable monoclonal antibody either directly or indirectly (e.g., via a linker group). A direct reaction between an agent and an antibody is possible when each possesses a substituent capable of reacting with the other. For example, a nucleophilic group, such as an amino or sulfhydryl group, on one may be capable of reacting with a carbonyl-containing group, such as an anhydride or an acid halide, or with an alkyl group containing a good leaving group (e.g., a halide) on the other.

[0407] Alternatively, it may be desirable to couple a therapeutic agent and an antibody via a linker group. A linker group can function as a spacer to distance an antibody from an agent in order to avoid interference with binding capabilities. A linker group can also serve to increase the chemical reactivity of a substituent on an agent or an antibody, and thus increase the coupling efficiency. An increase in chemical reactivity may also facilitate the use of agents, or functional groups on agents, which otherwise would not be possible.

[0408] It will be evident to those skilled in the art that a variety of bifunctional or polyfunctional reagents, both homo- and hetero-functional (such as those described in the catalog of the Pierce Chemical Co., Rockford, Ill.), may be employed as the linker group. Coupling may be effected, for example, through amino groups, carboxyl groups, sulfhydryl groups or oxidized carbohydrate residues. There are numerous references describing such methodology, e.g., U.S. Pat. No. 4,671,958.

[0409] Where a therapeutic agent is more potent when free from the antibody portion of the immunoconjugates of the present invention, it may be desirable to use a linker group which is cleavable during or upon internalization into a cell. A number of different cleavable linker groups have been described. The mechanisms for the intracellular release of an agent from these linker groups include cleavage by reduction of a disulfide bond (e.g., U.S. Pat. No. 4,489,710), by irradiation of a photolabile bond (e.g., U.S. Pat. No. 4,625,014), by hydrolysis of derivatized amino acid side chains (e.g., U.S. Pat. No. 4,638,045), by serum complement-mediated hydrolysis (e.g., U.S. Pat. No. 4,671,958), and acid-catalyzed hydrolysis (e.g., U.S. Pat. No. 4,569,789).

[0410] It may be desirable to couple more than one agent to an antibody. In one embodiment, multiple molecules of an agent are coupled to one antibody molecule. In another embodiment, more than one type of agent may be coupled to one antibody. Regardless of the particular embodiment, immunoconjugates with more than one agent may be prepared in a variety of ways. For example, more than one agent may be coupled directly to an antibody molecule, or linkers which provide multiple sites for attachment can be used. Alternatively, a carrier can be used.

[0411] A carrier may bear the agents in a variety of ways, including covalent bonding either directly or via a linker group. Suitable carriers include proteins such as albumins (e.g., U.S. Pat. No. 4,507,234), peptides and polysaccharides such as aminodextran (e.g., U.S. Pat. No. 4,699,784). A carrier may also bear an agent by noncovalent bonding or by encapsulation, such as within a liposome vesicle (e.g., U.S. Pat. Nos. 4,429,008 and 4,873,088). Carriers specific for radionuclide agents include radiohalogenated small molecules and chelating compounds. For example, U.S. Pat. No. 4,735,792 discloses representative radiohalogenated small molecules and their synthesis. A radionuclide chelate may be formed from chelating compounds that include those containing nitrogen and sulfur atoms as the donor atoms for binding the metal, or metal oxide, radionuclide. For example, U.S. Pat. No. 4,673,562 discloses representative chelating compounds and their synthesis.

[0412] A variety of routes of administration for the antibodies and immunoconjugates may be used. Typically, administration will be intravenous, intramuscular, subcutaneous or in the bed of a resected tumor. It will be evident that the precise dose of the antibody/immunoconjugate will vary depending upon the antibody used, the antigen density on the tumor, and the rate of clearance of the antibody.

[0413] 4.21 Vaccines

[0414] In certain preferred embodiments of the present invention, vaccines are provided. The vaccines will generally comprise one or more pharmaceutical compositions, such as those discussed above, in combination with an immunostimulant. An immunostimulant may be any substance that enhances or potentiates an immune response (antibody and/or cell-mediated) to an exogenous antigen. Examples of immunostimulants include adjuvants, biodegradable microspheres (e.g., polylactic galactide) and liposomes (into which the compound is incorporated; see e.g., Fullerton, U.S. Pat. No. 4,235,877). Vaccine preparation is generally described in, for example, M. F. Powell and M. J. Newman, eds., “Vaccine Design (the subunit and adjuvant approach),” Plenum Press (NY, 1995). Pharmaceutical compositions and vaccines within the scope of the present invention may also contain other compounds, which may be biologically active or inactive. For example, one or more immunogenic portions of other tumor antigens may be present, either incorporated into a fusion polypeptide or as a separate compound, within the composition or vaccine.

[0415] Illustrative vaccines may contain DNA encoding one or more of the polypeptides as described above, such that the polypeptide is generated in situ. As noted above, the DNA may be present within any of a variety of delivery systems known to those of ordinary skill in the art, including nucleic acid expression systems, bacteria and viral expression systems. Numerous gene delivery techniques are well known in the art, such as those described by Rolland, Crit. Rev. Therap. Drug Carrier Systems 15:143-198, 1998, and references cited therein. Appropriate nucleic acid expression systems contain the necessary DNA sequences for expression in the patient (such as a suitable promoter and terminating signal). Bacterial delivery systems involve the administration of a bacterium (such as Bacillus-Calmette-Guerrin) that expresses an immunogenic portion of the polypeptide on its cell surface or secretes such an epitope. In a preferred embodiment, the DNA may be introduced using a viral expression system (e.g., vaccinia or other pox virus, retrovirus, or adenovirus), which may involve the use of a non-pathogenic (defective), replication competent virus. Suitable systems are disclosed, for example, in Fisher-Hoch et al., Proc. Natl. Acad. Sci. USA 86:317-321, 1989; Flexner et al., Ann. N.Y. Acad. Sci. 569:86-103, 1989; Flexner et al., Vaccine 8:17-21, 1990; U.S. Pat. Nos. 4,603,112, 4,769,330, and 5,017,487; WO 89/01973; U.S. Pat. No. 4,777,127; GB 2,200,651; EP 0,345,242; WO 91/02805; Berkner, Biotechniques 6:616-627, 1988; Rosenfeld et al., Science 252:431-434, 1991; Kolls et al., Proc. Natl. Acad. Sci. USA 91:215-219, 1994; Kass-Eisler et al., Proc. Natl. Acad. Sci. USA 90:11498-11502, 1993; Guzman et al., Circulation 88:2838-2848, 1993; and Guzman et al., Cir. Res. 73:1202-1207, 1993. Techniques for incorporating DNA into such expression systems are well known to those of ordinary skill in the art. The DNA may also be “naked,” as described, for example, in Ulmer et al., Science 259:1745-1749, 1993 and reviewed by Cohen, Science 259:1691-1692, 1993. The uptake of naked DNA may be increased by coating the DNA onto biodegradable beads, which are efficiently transported into the cells. It will be apparent that a vaccine may comprise both a polynucleotide and a polypeptide component. Such vaccines may provide for an enhanced immune response.

[0416] It will be apparent that a vaccine may contain pharmaceutically acceptable salts of the polynucleotides and polypeptides provided herein. Such salts may be prepared from pharmaceutically acceptable non-toxic bases, including organic bases (e.g., salts of primary, secondary and tertiary amines and basic amino acids) and inorganic bases (e.g., sodium, potassium, lithium, ammonium, calcium and magnesium salts).

[0417] While any suitable carrier known to those of ordinary skill in the art may be employed in the vaccine compositions of this invention, the type of carrier will vary depending on the mode of administration. Compositions of the present invention may be formulated for any appropriate manner of administration, including for example, topical, oral, nasal, intravenous, intracranial, intraperitoneal, subcutaneous or intramuscular administration. For parenteral administration, such as subcutaneous injection, the carrier preferably comprises water, saline, alcohol, a fat, a wax or a buffer. For oral administration, any of the above carriers or a solid carrier, such as mannitol, lactose, starch, magnesium stearate, sodium saccharine, talcum, cellulose, glucose, sucrose, and magnesium carbonate, may be employed. Biodegradable microspheres (e.g., polylactate polyglycolate) may also be employed as carriers for the pharmaceutical compositions of this invention. Suitable biodegradable microspheres are disclosed, for example, in U.S. Pat. Nos. 4,897,268; 5,075,109; 5,928,647; 5,811,128; 5,820,883; 5,853,763; 5,814,344 and 5,942,252. One may also employ a carrier comprising the particulate-protein complexes described in U.S. Pat. No. 5,928,647, which are capable of inducing a class I-restricted cytotoxic T lymphocyte responses in a host.

[0418] Such compositions may also comprise buffers (e.g., neutral buffered saline or phosphate buffered saline), carbohydrates (e.g., glucose, mannose, sucrose or dextrans), mannitol, proteins, polypeptides or amino acids such as glycine, antioxidants, bacteriostats, chelating agents such as EDTA or glutathione, adjuvants (e.g., aluminum hydroxide), solutes that render the formulation isotonic, hypotonic or weakly hypertonic with the blood of a recipient, suspending agents, thickening agents and/or preservatives. Alternatively, compositions of the present invention may be formulated as a lyophilizate. Compounds may also be encapsulated within liposomes using well known technology.

[0419] Any of a variety of immunostimulants may be employed in the vaccines of this invention. For example, an adjuvant may be included. Most adjuvants contain a substance designed to protect the antigen from rapid catabolism, such as aluminum hydroxide or mineral oil, and a stimulator of immune responses, such as lipid A, Bortadella pertussis or Mycobacterium tuberculosis derived proteins. Suitable adjuvants are commercially available as, for example, Freund's Incomplete Adjuvant and Complete Adjuvant (Difco Laboratories, Detroit, Mich.); Merck Adjuvant 65 (Merck and Company, Inc., Rahway, N.J.); AS-2 (SmithKline Beecham, Philadelphia, Pa.); aluminum salts such as aluminum hydroxide gel (alum) or aluminum phosphate; salts of calcium, iron or zinc; an insoluble suspension of acylated tyrosine; acylated sugars; cationically or anionically derivatized polysaccharides; polyphosphazenes; biodegradable microspheres; monophosphoryl lipid A and quil A. Cytokines, such as GM-CSF or interleukin-2, -7, or -12, may also be used as adjuvants.

[0420] Within the vaccines provided herein, the adjuvant composition is preferably designed to induce an immune response predominantly of the Th1 type. High levels of Th1-type cytokines (e.g., IFN-γ, TNFα, IL-2 and IL-12) tend to favor the induction of cell mediated immune responses to an administered antigen. In contrast, high levels of Th2-type cytokines (e.g., IL-4, IL-5, IL-6 and IL-10) tend to favor the induction of humoral immune responses. Following application of a vaccine as provided herein, a patient will support an immune response that includes Th1- and Th2-type responses. Within a preferred embodiment, in which a response is predominantly Th1-type, the level of Th1-type cytokines will increase to a greater extent than the level of Th2-type cytokines. The levels of these cytokines may be readily assessed using standard assays. For a review of the families of cytokines, see Mosmann and Coffman, Ann. Rev. Immunol. 7:145-173, 1989.

[0421] Preferred adjuvants for use in eliciting a predominantly Th1-type response include, for example, a combination of monophosphoryl lipid A, preferably 3-de-O-acylated monophosphoryl lipid A (3D-MPL), together with an aluminum salt. MPL adjuvants are available from Corixa Corporation (Seattle, Wash.; see U.S. Pat. Nos. 4,436,727; 4,877,611; 4,866,034 and 4,912,094). CpG-containing oligonucleotides (in which the CpG dinucleotide is unmethylated) also induce a predominantly Th1 response. Such oligonucleotides are well known and are described, for example, in WO 96/02555, WO 99/33488 and U.S. Pat. Nos. 6,008,200 and 5,856,462. Immunostimulatory DNA sequences are also described, for example, by Sato et al., Science 273:352, 1996. Another preferred adjuvant is a saponin, preferably QS21 (Aquila Biopharmaceuticals Inc., Framingham, Mass.), which may be used alone or in combination with other adjuvants. For example, an enhanced system involves the combination of a monophosphoryl lipid A and saponin derivative, such as the combination of QS21 and 3D-MPL as described in WO 94/00153, or a less reactogenic composition where the QS21 is quenched with cholesterol, as described in WO 96/33739. Other preferred formulations comprise an oil-in-water emulsion and tocopherol. A particularly potent adjuvant formulation involving QS21, 3D-MPL and tocopherol in an oil-in-water emulsion is described in WO 95/17210.

[0422] Other preferred adjuvants include Montamide ISA 720 (Seppic, France), SAF (Chiron, Calif., United States), ISCOMS (CSL), MF-59 (Chiron), the SBAS series of adjuvants (e.g., SBAS-2 or SBAS-4, available from SmithKline Beecham, Rixensart, Belgium), Detox (Corixa, Hamilton, Mont.), RC-529 (Corixa, Hamilton, Mont.) and other aminoalkyl glucosaminide 4-phosphates (AGPs), such as those described in pending U.S. patent application Ser. Nos. 08/853,826 and 09/074,720, the disclosures of which are incorporated herein by reference in their entireties.

[0423] Any vaccine provided herein may be prepared using well known methods that result in a combination of antigen, immune response enhancer and a suitable carrier or excipient. The compositions described herein may be administered as part of a sustained release formulation (i.e., a formulation such as a capsule, sponge or gel (composed of polysaccharides, for example) that effects a slow release of compound following administration). Such formulations may generally be prepared using well known technology (see, e.g., Coombes et al., Vaccine 14:1429-1438, 1996) and administered by, for example, oral, rectal or subcutaneous implantation, or by implantation at the desired target site. Sustained-release formulations may contain a polypeptide, polynucleotide or antibody dispersed in a carrier matrix and/or contained within a reservoir surrounded by a rate controlling membrane.

[0424] Carriers for use within such formulations are biocompatible, and may also be biodegradable; preferably the formulation provides a relatively constant level of active component release. Such carriers include microparticles of poly(lactide-co-glycolide), polyacrylate, latex, starch, cellulose, dextran and the like. Other delayed-release carriers include supramolecular biovectors, which comprise a non-liquid hydrophilic core (e.g., a cross-linked polysaccharide or oligosaccharide) and, optionally, an external layer comprising an amphiphilic compound, such as a phospholipid (see e.g., U.S. Pat. No. 5,151,254 and PCT applications WO 94/20078, WO/94/23701 and WO 96/06638). The amount of active compound contained within a sustained release formulation depends upon the site of implantation, the rate and expected duration of release and the nature of the condition to be treated or prevented.

[0425] Any of a variety of delivery vehicles may be employed within pharmaceutical compositions and vaccines to facilitate production of an antigen-specific immune response that targets tumor cells. Delivery vehicles include antigen presenting cells (APCs), such as dendritic cells, macrophages, B cells, monocytes and other cells that may be engineered to be efficient APCs. Such cells may, but need not, be genetically modified to increase the capacity for presenting the antigen, to improve activation and/or maintenance of the T cell response, to have anti-tumor effects per se and/or to be immunologically compatible with the receiver (i.e., matched HLA haplotype). APCs may generally be isolated from any of a variety of biological fluids and organs, including tumor and peritumoral tissues, and may be autologous, allogeneic, syngeneic or xenogeneic cells.

[0426] Certain preferred embodiments of the present invention use dendritic cells or progenitors thereof as antigen-presenting cells. Dendritic cells are highly potent APCs (Banchereau and Steinman, Nature 392:245-251, 1998) and have been shown to be effective as a physiological adjuvant for eliciting prophylactic or therapeutic antitumor immunity (see Timmerman and Levy, Ann. Rev. Med. 50:507-529, 1999). In general, dendritic cells may be identified based on their typical shape (stellate in situ, with marked cytoplasmic processes (dendrites) visible in vitro), their ability to take up, process and present antigens with high efficiency and their ability to activate naive T cell responses. Dendritic cells may, of course, be engineered to express specific cell-surface receptors or ligands that are not commonly found on dendritic cells in vivo or ex vivo, and such modified dendritic cells are contemplated by the present invention. As an alternative to dendritic cells, secreted vesicles antigen-loaded dendritic cells (called exosomes) may be used within a vaccine (see Zitvogel et al., Nature Med. 4:594-600, 1998).

[0427] Dendritic cells and progenitors may be obtained from peripheral blood, bone marrow, tumor-infiltrating cells, peritumoral tissues-infiltrating cells, lymph nodes, spleen, skin, umbilical cord blood or any other suitable tissue or fluid. For example, dendritic cells may be differentiated ex vivo by adding a combination of cytokines such as GM-CSF, IL-4, IL-13 and/or TNFα to cultures of monocytes harvested from peripheral blood. Alternatively, CD34 positive cells harvested from peripheral blood, umbilical cord blood or bone marrow may be differentiated into dendritic cells by adding to the culture medium combinations of GM-CSF, IL-3, TNFα, CD40 ligand, LPS, flt3 ligand and/or other compound(s) that induce differentiation, maturation and proliferation of dendritic cells.

[0428] Dendritic cells are conveniently categorized as “immature” and “mature” cells, which allows a simple way to discriminate between two well characterized phenotypes. However, this nomenclature should not be construed to exclude all possible intermediate stages of differentiation. Immature dendritic cells are characterized as APC with a high capacity for antigen uptake and processing, which correlates with the high expression of Fcγ receptor and mannose receptor. The mature phenotype is typically characterized by a lower expression of these markers, but a high expression of cell surface molecules responsible for T cell activation such as class I and class II MHC, adhesion molecules (e.g., CD54 and CD11) and costimulatory molecules (e.g., CD40, CD80, CD86 and 4-1BB).

[0429] APCs may generally be transfected with a polynucleotide encoding a hematological malignancy-related tumor protein (or portion or other variant thereof) such that the hematological malignancy-related tumor polypeptide, or an immunogenic portion thereof, is expressed on the cell surface. Such transfection may take place ex vivo, and a composition or vaccine comprising such transfected cells may then be used for therapeutic purposes, as described herein. Alternatively, a gene delivery vehicle that targets a dendritic or other antigen presenting cell may be administered to a patient, resulting in transfection that occurs in vivo. In vivo and ex vivo transfection of dendritic cells, for example, may generally be performed using any methods known in the art, such as those described in WO 97/24447, or the gene gun approach described by Mahvi et al., Immunology and cell Biology 75:456-460, 1997. Antigen loading of dendritic cells may be achieved by incubating dendritic cells or progenitor cells with the hematological malignancy-related tumor polypeptide, DNA (naked or within a plasmid vector) or RNA; or with antigen-expressing recombinant bacterium or viruses (e.g., vaccinia, fowlpox, adenovirus or lentivirus vectors). Prior to loading, the polypeptide may be covalently conjugated to an immunological partner that provides T cell help (e.g., a carrier molecule). Alternatively, a dendritic cell may be pulsed with a non-conjugated immunological partner, separately or in the presence of the polypeptide.

[0430] Vaccines and pharmaceutical compositions may be presented in unit-dose or multi-dose containers, such as scaled ampoules or vials. Such containers are preferably hermetically sealed to preserve sterility of the formulation until use. In general, formulations may be stored as suspensions, solutions or emulsions in oily or aqueous vehicles. Alternatively, a vaccine or pharmaceutical composition may be stored in a freeze-dried condition requiring only the addition of a sterile liquid carrier immediately prior to use.

[0431] 4.22 Cancer Therapy

[0432] In further aspects of the present invention, the compositions described herein may be used for immunotherapy of cancer, such as hematological malignancy. Within such methods, pharmaceutical compositions and vaccines are typically administered to a patient. As used herein, a “patient” refers to any warm-blooded animal, preferably a human. A patient may or may not be afflicted with cancer. Accordingly, the above pharmaceutical compositions and vaccines may be used to prevent the development of a cancer or to treat a patient afflicted with a cancer. A cancer may be diagnosed using criteria generally accepted in the art, including the presence of a malignant tumor. Pharmaceutical compositions and vaccines may be administered either prior to or following surgical removal of primary tumors and/or treatment such as administration of radiotherapy or conventional chemotherapeutic drugs. Administration may be by any suitable method, including administration by intravenous, intraperitoneal, intramuscular, subcutaneous, intranasal, intradermal, anal, vaginal, topical and oral routes.

[0433] Within certain embodiments, immunotherapy may be active immunotherapy, in which treatment relies on the in vivo stimulation of the endogenous host immune system to react against tumors with the administration of immune response-modifying agents (such as polypeptides and polynucleotides as provided herein).

[0434] Within other embodiments, immunotherapy may be passive immunotherapy, in which treatment involves the delivery of agents with established tumor-immune reactivity (such as effector cells or antibodies) that can directly or indirectly mediate antitumor effects and does not necessarily depend on an intact host immune system. Examples of effector cells include T cells as discussed above, T lymphocytes (such as CD8⁺ cytotoxic T lymphocytes and CD4⁺ T-helper tumor-infiltrating lymphocytes), killer cells (such as Natural Killer cells and lymphokine-activated killer cells), B cells and antigen-presenting cells (such as dendritic cells and macrophages) expressing a polypeptide provided herein. T cell receptors and antibody receptors specific for the polypeptides recited herein may be cloned, expressed and transferred into other vectors or effector cells for adoptive immunotherapy. The polypeptides provided herein may also be used to generate antibodies or anti-idiotypic antibodies (as described above and in U.S. Pat. No. 4,918,164) for passive immunotherapy.

[0435] Effector cells may generally be obtained in sufficient quantities for adoptive immunotherapy by growth in vitro, as described herein. Culture conditions for expanding single antigen-specific effector cells to several billion in number with retention of antigen recognition in vivo are well known in the art. Such in vitro culture conditions typically use intermittent stimulation with antigen, often in the presence of cytokines (such as IL-2) and non-dividing feeder cells. As noted above, immunoreactive polypeptides as provided herein may be used to rapidly expand antigen-specific T cell cultures in order to generate a sufficient number of cells for immunotherapy. In particular, antigen-presenting cells, such as dendritic, macrophage, monocyte, fibroblast and/or B cells, may be pulsed with immunoreactive polypeptides or transfected with one or more polynucleotides using standard techniques well known in the art. For example, antigen-presenting cells can be transfected with a polynucleotide having a promoter appropriate for increasing expression in a recombinant virus or other expression system. Cultured effector cells for use in therapy must be able to grow and distribute widely, and to survive long term in vivo. Studies have shown that cultured effector cells can be induced to grow in vivo and to survive long term in substantial numbers by repeated stimulation with antigen supplemented with IL-2 (see, for example, Cheever et al., Immunological Reviews 157:177, 1997).

[0436] Alternatively, a vector expressing a polypeptide recited herein may be introduced into antigen presenting cells taken from a patient and clonally propagated ex vivo for transplant back into the same patient. Transfected cells may be reintroduced into the patient using any means known in the art, preferably in sterile form by intravenous, intracavitary, intraperitoneal or intratumor administration.

[0437] Routes and frequency of administration of the therapeutic compositions described herein, as well as dosage, will vary from individual to individual, and may be readily established using standard techniques. In general, the pharmaceutical compositions and vaccines may be administered by injection (e.g., intracutaneous, intramuscular, intravenous or subcutaneous), intranasally (e.g., by aspiration) or orally. Preferably, between 1 and 10 doses may be administered over a 52 week period. Preferably, 6 doses are administered, at intervals of 1 month, and booster vaccinations may be given periodically thereafter. Alternate protocols may be appropriate for individual patients. A suitable dose is an amount of a compound that, when administered as described above, is capable of promoting an anti-tumor immune response, and is at least 10-50% above the basal (i.e., untreated) level. Such response can be monitored by measuring the anti-tumor antibodies in a patient or by vaccine-dependent generation of cytolytic effector cells capable of killing the patient's tumor cells in vitro. Such vaccines should also be capable of causing an immune response that leads to an improved clinical outcome (e.g., more frequent remissions, complete or partial or longer disease-free survival) in vaccinated patients as compared to non-vaccinated patients. In general, for pharmaceutical compositions and vaccines comprising one or more polypeptides, the amount of each polypeptide present in a dose ranges from about 25 μg to 5 mg per kg of host. Suitable dose sizes will vary with the size of the patient, but will typically range from about 0.1 mL to about 5 mL.

[0438] In general, an appropriate dosage and treatment regimen provides the active compound(s) in an amount sufficient to provide therapeutic and/or prophylactic benefit. Such a response can be monitored by establishing an improved clinical outcome (e.g., more frequent remissions, complete or partial, or longer disease-free survival) in treated patients as compared to non-treated patients. Increases in preexisting immune responses to a hematological malignancy-related tumor protein generally correlate with an improved clinical outcome. Such immune responses may generally be evaluated using standard proliferation, cytotoxicity or cytokine assays, which may be performed using samples obtained from a patient before and after treatment.

[0439] 4.23 Cancer Detection and Diagnosis

[0440] In general, a cancer may be detected in a patient based on the presence of one or more hematological malignancy-related tumor proteins and/or polynucleotides encoding such proteins in a biological sample (for example, blood, sera, sputum urine and/or tumor biopsies) obtained from the patient. In other words, such proteins may be used as markers to indicate the presence or absence of a cancer such as hematological malignancy. In addition, such proteins may be useful for the detection of other cancers. The binding agents provided herein generally permit detection of the level of antigen that binds to the agent in the biological sample. Polynucleotide primers and probes may be used to detect the level of mRNA encoding a tumor protein, which is also indicative of the presence or absence of a cancer. In general, a hematological malignancy-related tumor sequence should be present at a level that is at least three fold higher in tumor tissue than in normal tissue

[0441] There are a variety of assay formats known to those of ordinary skill in the art for using a binding agent to detect polypeptide markers in a sample. See, e.g., Harlow and Lane, Antibodies: A Laboratory Manual, Cold Spring Harbor Laboratory, 1988. In general, the presence or absence of a cancer in a patient may be determined by (a) contacting a biological sample obtained from a patient with a binding agent; (b) detecting in the sample a level of polypeptide that binds to the binding agent; and (c) comparing the level of polypeptide with a predetermined cut-off value.

[0442] In a preferred embodiment, the assay involves the use of binding agent immobilized on a solid support to bind to and remove the polypeptide from the remainder of the sample. The bound polypeptide may then be detected using a detection reagent that contains a reporter group and specifically binds to the binding agent/polypeptide complex. Such detection reagents may comprise, for example, a binding agent that specifically binds to the polypeptide or an antibody or other agent that specifically binds to the binding agent, such as an anti-immunoglobulin, protein G, protein A or a lectin. Alternatively, a competitive assay may be utilized, in which a polypeptide is labeled with a reporter group and allowed to bind to the immobilized binding agent after incubation of the binding agent with the sample. The extent to which components of the sample inhibit the binding of the labeled polypeptide to the binding agent is indicative of the reactivity of the sample with the immobilized binding agent. Suitable polypeptides for use within such assays include full length hematological malignancy-related tumor proteins and portions thereof to which the binding agent binds, as described above.

[0443] The solid support may be any material known to those of ordinary skill in the art to which the tumor protein may be attached. For example, the solid support may be a test well in a microtiter plate or a nitrocellulose or other suitable membrane. Alternatively, the support may be a bead or disc, such as glass, fiberglass, latex or a plastic material such as polystyrene or polyvinylchloride. The support may also be a magnetic particle or a fiber optic sensor, such as those disclosed, for example, in U.S. Pat. No. 5,359,681. The binding agent may be immobilized on the solid support using a variety of techniques known to those of skill in the art, which are amply described in the patent and scientific literature. In the context of the present invention, the term “immobilization” refers to both noncovalent association, such as adsorption, and covalent attachment (which may be a direct linkage between the agent and functional groups on the support or may be a linkage by way of a cross-linking agent). Immobilization by adsorption to a well in a microtiter plate or to a membrane is preferred. In such cases, adsorption may be achieved by contacting the binding agent, in a suitable buffer, with the solid support for a suitable amount of time. The contact time varies with temperature, but is typically between about 1 hour and about 1 day. In general, contacting a well of a plastic microtiter plate (such as polystyrene or polyvinylchloride) with an amount of binding agent ranging from about 10 ng to about 10 μg, and preferably about 100 ng to about 1 μg, is sufficient to immobilize an adequate amount of binding agent.

[0444] Covalent attachment of binding agent to a solid support may generally be achieved by first reacting the support with a bifunctional reagent that will react with both the support and a functional group, such as a hydroxyl or amino group, on the binding agent. For example, the binding agent may be covalently attached to supports having an appropriate polymer coating using benzoquinone or by condensation of an aldehyde group on the support with an amine and an active hydrogen on the binding partner (see, e.g., Pierce Immunotechnology Catalog and Handbook, 1991, at A12-A13).

[0445] In certain embodiments, the assay is a two-antibody sandwich assay. This assay may be performed by first contacting an antibody that has been immobilized on a solid support, commonly the well of a microtiter plate, with the sample, such that polypeptides within the sample are allowed to bind to the immobilized antibody. Unbound sample is then removed from the immobilized polypeptide-antibody complexes and a detection reagent (preferably a second antibody capable of binding to a different site on the polypeptide) containing a reporter group is added. The amount of detection reagent that remains bound to the solid support is then determined using a method appropriate for the specific reporter group.

[0446] More specifically, once the antibody is immobilized on the support as described above, the remaining protein binding sites on the support are typically blocked. Any suitable blocking agent known to those of ordinary skill in the art, such as bovine serum albumin or Tween 20™ (Sigma Chemical Co., St. Louis, Mo.). The immobilized antibody is then incubated with the sample, and polypeptide is allowed to bind to the antibody. The sample may be diluted with a suitable diluent, such as phosphate-buffered saline (PBS) prior to incubation. In general, an appropriate contact time (i.e., incubation time) is a period of time that is sufficient to detect the presence of polypeptide within a sample obtained from an individual with hematological malignancy. Preferably, the contact time is sufficient to achieve a level of binding that is at least about 95% of that achieved at equilibrium between bound and unbound polypeptide. Those of ordinary skill in the art will recognize that the time necessary to achieve equilibrium may be readily determined by assaying the level of binding that occurs over a period of time. At room temperature, an incubation time of about 30 minutes is generally sufficient.

[0447] Unbound sample may then be removed by washing the solid support with an appropriate buffer, such as PBS containing 0.1% Tween 20™. The second antibody, which contains a reporter group, may then be added to the solid support. Preferred reporter groups include those groups recited above.

[0448] The detection reagent is then incubated with the immobilized antibody-polypeptide complex for an amount of time sufficient to detect the bound polypeptide. An appropriate amount of time may generally be determined by assaying the level of binding that occurs over a period of time. Unbound detection reagent is then removed and bound detection reagent is detected using the reporter group. The method employed for detecting the reporter group depends upon the nature of the reporter group. For radioactive groups, scintillation counting or autoradiographic methods are generally appropriate. Spectroscopic methods may be used to detect dyes, luminescent groups and fluorescent groups. Biotin may be detected using avidin, coupled to a different reporter group (commonly a radioactive or fluorescent group or an enzyme). Enzyme reporter groups may generally be detected by the addition of substrate (generally for a specific period of time), followed by spectroscopic or other analysis of the reaction products.

[0449] To determine the presence or absence of a cancer, such as hematological malignancy, the signal detected from the reporter group that remains bound to the solid support is generally compared to a signal that corresponds to a predetermined cut-off value. In one preferred embodiment, the cut-off value for the detection of a cancer is the average mean signal obtained when the immobilized antibody is incubated with samples from patients without the cancer. In general, a sample generating a signal that is three standard deviations above the predetermined cut-off value is considered positive for the cancer. In an alternate preferred embodiment, the cut-off value is determined using a Receiver Operator Curve, according to the method of Sackett et al., Clinical Epidemiology: A Basic Science for Clinical Medicine, Little Brown and Co., 1985, p. 106-7. Briefly, in this embodiment, the cut-off value may be determined from a plot of pairs of true positive rates (i.e., sensitivity) and false positive rates (100%-specificity) that correspond to each possible cut-off value for the diagnostic test result. The cut-off value on the plot that is the closest to the upper left-hand corner (i.e., the value that encloses the largest area) is the most accurate cut-off value, and a sample generating a signal that is higher than the cut-off value determined by this method may be considered positive. Alternatively, the cut-off value may be shifted to the left along the plot, to minimize the false positive rate, or to the right, to minimize the false negative rate. In general, a sample generating a signal that is higher than the cut-off value determined by this method is considered positive for a cancer.

[0450] In a related embodiment, the assay is performed in a flow-through or strip test format, wherein the binding agent is immobilized on a membrane, such as nitrocellulose. In the flow-through test, polypeptides within the sample bind to the immobilized binding agent as the sample passes through the membrane. A second, labeled binding agent then binds to the binding agent-polypeptide complex as a solution containing the second binding agent flows through the membrane. The detection of bound second binding agent may then be performed as described above. In the strip test format, one end of the membrane to which binding agent is bound is immersed in a solution containing the sample. The sample migrates along the membrane through a region containing second binding agent and to the area of immobilized binding agent. Concentration of second binding agent at the area of immobilized antibody indicates the presence of a cancer. Typically, the concentration of second binding agent at that site generates a pattern, such as a line, that can be read visually. The absence of such a pattern indicates a negative result. In general, the amount of binding agent immobilized on the membrane is selected to generate a visually discernible pattern when the biological sample contains a level of polypeptide that would be sufficient to generate a positive signal in the two-antibody sandwich assay, in the format discussed above. Preferred binding agents for use in such assays are antibodies and antigen-binding fragments thereof. Preferably, the amount of antibody immobilized on the membrane ranges from about 25 ng to about 1 μg, and more preferably from about 50 ng to about 500 ng. Such tests can typically be performed with a very small amount of biological sample.

[0451] Of course, numerous other assay protocols exist that are suitable for use with the tumor proteins or binding agents of the present invention. The above descriptions are intended to be exemplary only. For example, it will be apparent to those of ordinary skill in the art that the above protocols may be readily modified to use hematological malignancy-related tumor polypeptides to detect antibodies that bind to such polypeptides in a biological sample. The detection of such hematological malignancy-related tumor protein specific antibodies may correlate with the presence of a cancer.

[0452] A cancer may also, or alternatively, be detected based on the presence of T cells that specifically react with a hematological malignancy-related tumor protein in a biological sample. Within certain methods, a biological sample comprising CD4⁺ and/or CD8⁺ T cells isolated from a patient is incubated with a hematological malignancy-related tumor polypeptide, a polynucleotide encoding such a polypeptide and/or an APC that expresses at least an immunogenic portion of such a polypeptide, and the presence or absence of specific activation of the T cells is detected. Suitable biological samples include, but are not limited to, isolated T cells. For example, T cells may be isolated from a patient by routine techniques (such as by Ficoll/Hypaque density gradient centrifugation of peripheral blood lymphocytes). T cells may be incubated in vitro for 2-9 days (typically 4 days) at 37° C. with polypeptide (e.g., 5-25 μg/ml). It may be desirable to incubate another aliquot of a T cell sample in the absence of hematological malignancy-related tumor polypeptide to serve as a control. For CD4⁺ T cells, activation is preferably detected by evaluating proliferation of the T cells. For CD8⁺ T cells, activation is preferably detected by evaluating cytolytic activity. A level of proliferation that is at least two fold greater and/or a level of cytolytic activity that is at least 20% greater than in disease-free patients indicates the presence of a cancer in the patient.

[0453] As noted above, a cancer may also, or alternatively, be detected based on the level of mRNA encoding a hematological malignancy-related tumor protein in a biological sample. For example, at least two oligonucleotide primers may be employed in a polymerase chain reaction (PCR) based assay to amplify a portion of a hematological malignancy-related tumor cDNA derived from a biological sample, wherein at least one of the oligonucleotide primers is specific for (i.e., hybridizes to) a polynucleotide encoding the hematological malignancy-related tumor protein. The amplified cDNA is then separated and detected using techniques well known in the art, such as gel electrophoresis. Similarly, oligonucleotide probes that specifically hybridize to a polynucleotide encoding a hematological malignancy-related tumor protein may be used in a hybridization assay to detect the presence of polynucleotide encoding the tumor protein in a biological sample.

[0454] To permit hybridization under assay conditions, oligonucleotide primers and probes should comprise an oligonucleotide sequence that has at least about 60%, preferably at least about 75% and more preferably at least about 90%, identity to a portion of a polynucleotide encoding a hematological malignancy-related tumor protein that is at least 10 nucleotides, and preferably at least 20 nucleotides, in length. Preferably, oligonucleotide primers and/or probes hybridize to a polynucleotide encoding a polypeptide described herein under moderately stringent conditions, as defined above. Oligonucleotide primers and/or probes which may be usefully employed in the diagnostic methods described herein preferably are at least 10-40 nucleotides in length. In a preferred embodiment, the oligonucleotide primers comprise at least 10 contiguous nucleotides, more preferably at least 15 contiguous nucleotides, of a DNA molecule having a sequence disclosed in this application. Techniques for both PCR based assays and hybridization assays are well known in the art (see, for example, Mullis et al., Cold Spring Harbor Symp. Quant. Biol., 51:263, 1987; Erlich ed., PCR Technology, Stockton Press, NY, 1989).

[0455] One preferred assay employs RT-PCR, in which PCR is applied in conjunction with reverse transcription. Typically, RNA is extracted from a biological sample, such as biopsy tissue, and is reverse transcribed to produce cDNA molecules. PCR amplification using at least one specific primer generates a cDNA molecule, which may be separated and visualized using, for example, gel electrophoresis. Amplification may be performed on biological samples taken from a test patient and from an individual who is not afflicted with a cancer. The amplification reaction may be performed on several dilutions of cDNA spanning two orders of magnitude. A two-fold or greater increase in expression in several dilutions of the test patient sample as compared to the same dilutions of the non-cancerous sample is typically considered positive.

[0456] In another embodiment, the compositions described herein may be used as markers for the progression of cancer. In this embodiment, assays as described above for the diagnosis of a cancer may be performed over time, and the change in the level of reactive polypeptide(s) or polynucleotide(s) evaluated. For example, the assays may be performed every 24-72 hours for a period of 6 months to 1 year, and thereafter performed as needed. In general, a cancer is progressing in those patients in whom the level of polypeptide or polynucleotide detected increases over time. In contrast, the cancer is not progressing when the level of reactive polypeptide or polynucleotide either remains constant or decreases with time.

[0457] Certain in vivo diagnostic assays may be performed directly on a tumor. One such assay involves contacting tumor cells with a binding agent. The bound binding agent may then be detected directly or indirectly via a reporter group. Such binding agents may also be used in histological applications. Alternatively, polynucleotide probes may be used within such applications.

[0458] As noted above, to improve sensitivity, multiple hematological malignancy-related tumor protein markers may be assayed within a given sample. It will be apparent that binding agents specific for different proteins provided herein may be combined within a single assay. Further, multiple primers or probes may be used concurrently. The selection of tumor protein markers may be based on routine experiments to determine combinations that results in optimal sensitivity. In addition, or alternatively, assays for tumor proteins provided herein may be combined with assays for other known tumor antigens.

[0459] 4.24 Preparation of DNA Sequences

[0460] Certain nucleic acid sequences of cDNA molecules encoding portions of hematological malignancy-related antigens were isolated by PCR™-based subtraction. This technique serves to normalize differentially expressed cDNAs, facilitating the recovery of rare transcripts, and also has the advantage of permitting enrichment of cDNAs with small amounts of polyA RNA material and without multiple rounds of hybridization. To obtain antigens overexpressed in non-Hodgkin's lymphomas, two subtractions were performed with a tester library prepared from a pool of three T cell non-Hodgkin's lymphoma mRNAs. The two libraries were independently subtracted with different pools of driver cDNAs. Driver #1 contained cDNA prepared from specific normal tissues (lymph node, bone marrow, T cells, heart and brain), and this subtraction generated the library TCS-D1 (T cell non-Hodgkin's lymphoma subtracted library with driver #1). Driver #2 contained non-specific normal tissues (colon, large intestine, lung, pancreas, spinal cord, skeletal muscle, liver, kidney, skin and brain), and this subtraction generated the library TCS-D2 (T cell non-Hodgkin's lymphoma subtraction library with driver #2). Two other subtractions were performed with a tester library prepared from a pool of three B cell non-Hodgkin's lymphoma mRNAs. The two libraries were independently subtracted with different pools of driver cDNAs. Driver #1 contained cDNA prepared from specific normal tissues (lymph node, bone marrow, B cells, heart and brain), and this subtraction generated the library BCNHL/D1 (B cell non-Hodgkin's lymphoma subtracted library with driver #1). Driver #2 contained non-specific normal tissues (brain, lung, pancreas, spinal cord, skeletal muscle, colon, spleen, large intestine and PBMC), and this subtraction generated the library BCNHL/D2 (B cell non-Hodgkin's lymphoma subtraction library with driver #2). PCR™-amplified pools were generated from the subtracted libraries and clones were sequenced. Hematological malignancy-related antigen sequences may be further characterized using any of a variety of well known techniques. For example, PCR™ amplified clones may be arrayed onto glass slides for microarray analysis. To determine tissue distribution, the arrayed clones may be used as targets to be hybridized with different first strand cDNA probes, including lymphoma probes, leukemia probes and probes from different normal tissues. Leukemia and lymphoma probes may be generated from cryopreserved samples obtained at the time of diagnosis from NHL, Hodgkin's disease, AML, CML, CLL, ALL, MDS and myeloma patients with poor outcome (patients who failed to achieve complete remission following conventional chemotherapy or relapsed) or good outcome (patients who achieved long term remission). To analyze gene expression during hematopoetic differentiation, probes may be generated from >95% pure fractions of CD34+, CD2+, CD14+, CD15+ and CD19+ cells derived from healthy individuals.

[0461] Polynucleotide variants may generally be prepared by any method known in the art, including chemical synthesis by, for example, solid phase phosphoramidite chemical synthesis. Modifications in a polynucleotide sequence may also be introduced using standard mutagenesis techniques, such as oligonucleotide-directed site-specific mutagenesis (see Adelman et al., DNA 2:183, 1983). Alternatively, RNA molecules may be generated by in vitro or in vivo transcription of DNA sequences, provided that the DNA is incorporated into a vector with a suitable RNA polymerase promoter (such as T7 or SP6). Certain portions may be used to prepare an encoded polypeptide, as described herein. In addition, or alternatively, a portion may be administered to a patient such that the encoded polypeptide is generated in vivo (e.g., by transfecting antigen-presenting cells, such as dendritic cells, with a cDNA construct encoding a hematological malignancy-related antigen, and administering the transfected cells to the patient).

[0462] A portion of a sequence complementary to a coding sequence (i.e., an antisense polynucleotide) may also be used as a probe or to modulate hematological malignancy-related antigen expression. cDNA constructs that can be transcribed into antisense RNA may also be introduced into cells or tissues to facilitate the production of antisense RNA. An antisense polynucleotide may be used, as described herein, to inhibit expression of a hematological malignancy-related antigen. Antisense technology can be used to control gene expression through triple-helix formation, which compromises the ability of the double helix to open sufficiently for the binding of polymerases, transcription factors or regulatory molecules (see Gee et al., In Huber and Carr, Molecular and Immunologic Approaches, Futura Publishing Co. (Mt. Kisco, N.Y.; 1994)). Alternatively, an antisense molecule may be designed to hybridize with a control region of a gene (e.g., promoter, enhancer or transcription initiation site), and block transcription of the gene; or to block translation by inhibiting binding of a transcript to ribosomes.

[0463] A portion of a coding sequence or of a complementary sequence may also be designed as a probe or primer to detect gene expression. Probes may be labeled with a variety of reporter groups, such as radionuclides and enzymes, and are preferably at least 10 nucleotides in length, more preferably at least 20 nucleotides in length and still more preferably at least 30 nucleotides in length. Primers, as noted above, are preferably 22-30 nucleotides in length.

[0464] Any polynucleotide may be further modified to increase stability in vivo. Possible modifications include, but are not limited to, the addition of flanking sequences at the 5′ and/or 3′ ends; the use of phosphorothioate or 2′ O-methyl rather than phosphodiesterase linkages in the backbone; and/or the inclusion of nontraditional bases such as inosine, queosine and wybutosine, as well as acetyl- methyl-, thio- and other modified forms of adenine, cytidine, guanine, thymine and uridine.

[0465] Hematological malignancy-related antigen polynucleotides may be joined to a variety of other nucleotide sequences using established recombinant DNA techniques. For example, a polynucleotide may be cloned into any of a variety of cloning vectors, including plasmids, phagemids, lambda phage derivatives and cosmids. Vectors of particular interest include expression vectors, replication vectors, probe generation vectors and sequencing vectors. In general, a vector will contain an origin of replication functional in at least one organism, convenient restriction endonuclease sites and one or more selectable markers. Other elements will depend upon the desired use, and will be apparent to those of ordinary skill in the art.

[0466] Within certain embodiments, polynucleotides may be formulated so as to permit entry into a cell of a mammal, and expression therein. Such formulations are particularly useful for therapeutic purposes, as described below. Those of ordinary skill in the art will appreciate that there are many ways to achieve expression of a polynucleotide in a target cell, and any suitable method may be employed. For example, a polynucleotide may be incorporated into a viral vector such as, but not limited to, adenovirus, adeno-associated virus, retrovirus, or vaccinia or other pox virus (e.g., avian pox virus). Techniques for incorporating DNA into such vectors are well known to those of ordinary skill in the art. A retroviral vector may additionally transfer or incorporate a gene for a selectable marker (to aid in the identification or selection of transduced cells) and/or a targeting moiety, such as a gene that encodes a ligand for a receptor on a specific target cell, to render the vector target specific. Targeting may also be accomplished using an antibody, by methods known to those of ordinary skill in the art.

[0467] Other formulations for therapeutic purposes include colloidal dispersion systems, such as macromolecule complexes, nanocapsules, microspheres, beads, and lipid-based systems including oil-in-water emulsions, micelles, mixed micelles, and liposomes. A preferred colloidal system for use as a delivery vehicle in vitro and in vivo is a liposome (i.e., an artificial membrane vesicle). The preparation and use of such systems is well known in the art.

[0468] 4.25 Therapeutic Methods

[0469] In further aspects of the present invention, the compositions described herein may be used for immunotherapy of hematological malignancies including adult and pediatric AML, CML, ALL, CLL, myelodysplastic syndromes (MDS), myeloproliferative syndromes (MPS), secondary leukemia, multiple myeloma, Hodgkin's lymphoma and Non-Hodgkin's lymphomas. In addition, compositions described herein may be used for therapy of diseases associated with an autoimmune response against hematopoetic precursor cells, such as severe aplastic anemia.

[0470] Immunotherapy may be performed using any of a variety of techniques, in which compounds or cells provided herein function to remove hematological malignancy-related antigen-expressing cells from a patient. Such removal may take place as a result of enhancing or inducing an immune response in a patient specific for hematological malignancy-related antigen or a cell expressing hematological malignancy-related antigen. Alternatively, hematological malignancy-related antigen-expressing cells may be removed ex vivo (e.g., by treatment of autologous bone marrow, peripheral blood or a fraction of bone marrow or peripheral blood). Fractions of bone marrow or peripheral blood may be obtained using any standard technique in the art.

[0471] Within such methods, pharmaceutical compositions and vaccines are typically administered to a patient. As used herein, a “patient” refers to any warm-blooded animal, preferably a human. A patient may or may not be afflicted with a hematological malignancy. Accordingly, the above pharmaceutical compositions and vaccines may be used to prevent the development of a malignancy or to treat a patient afflicted with a malignancy. A hematological malignancy may be diagnosed using criteria generally accepted in the art. Pharmaceutical compositions and vaccines may be administered either prior to or following surgical removal of primary tumors and/or treatment such as administration of radiotherapy or conventional chemotherapeutic drugs, or bone marrow transplantation (autologous, allogeneic or syngeneic).

[0472] Within certain embodiments, immunotherapy may be active immunotherapy, in which treatment relies on the in vivo stimulation of the endogenous host immune system to react against tumors with the administration of immune response-modifying agents (such as polypeptides and polynucleotides as provided herein).

[0473] Within other embodiments, immunotherapy may be passive immunotherapy, in which treatment involves the delivery of agents with established tumor-immune reactivity (such as effector cells or antibodies) that can directly or indirectly mediate antitumor effects and does not necessarily depend on an intact host immune system. Examples of effector cells include T cells as discussed above, T lymphocytes (such as CD8⁺ cytotoxic T lymphocytes and CD4⁺ T-helper tumor-infiltrating lymphocytes), killer cells (such as Natural Killer cells and lymphokine-activated killer cells), B cells and antigen-presenting cells (such as dendritic cells and macrophages) expressing a polypeptide provided herein. T cell receptors and antibody receptors specific for the polypeptides recited herein may be cloned, expressed and transferred into other vectors or effector cells for adoptive immunotherapy. The polypeptides provided herein may also be used to generate antibodies or anti-idiotypic antibodies (as described above and in U.S. Pat. No. 4,918,164) for passive immunotherapy.

[0474] Effector cells may generally be obtained in sufficient quantities for adoptive immunotherapy by growth in vitro, as described herein. Culture conditions for expanding single antigen-specific effector cells to several billion in number with retention of antigen recognition in vivo are well known in the art. Such in vitro culture conditions typically use intermittent stimulation with antigen, often in the presence of cytokines (such as IL-2) and non-dividing feeder cells. As noted above, immunoreactive polypeptides as provided herein may be used to rapidly expand antigen-specific T cell cultures in order to generate a sufficient number of cells for immunotherapy. In particular, antigen-presenting cells, such as dendritic, macrophage or B cells, may be pulsed with immunoreactive polypeptides or transfected with one or more polynucleotides using standard techniques well known in the art. For example, antigen-presenting cells can be transfected with a polynucleotide having a promoter appropriate for increasing expression in a recombinant virus or other expression system. Cultured effector cells for use in therapy must be able to grow and distribute widely, and to survive long term in vivo. Studies have shown that cultured effector cells can be induced to grow in vivo and to survive long term in substantial numbers by repeated stimulation with antigen supplemented with IL-2 (see, for example, Cheever et al., Immunological Reviews 157:177, 1997).

[0475] Alternatively, a vector expressing a polypeptide recited herein may be introduced into antigen presenting cells taken from a patient and clonally propagated ex vivo for transplant back into the same patient. Transfected cells may be reintroduced into the patient using any means known in the art, preferably in sterile form by intravenous, intracavitary, intraperitoneal or intratumor administration.

[0476] The compositions provided herein may be used alone or in combination with conventional therapeutic regimens such as surgery, irradiation, chemotherapy and/or bone marrow transplantation (autologous, syngeneic, allogeneic or unrelated). As discussed in greater detail below, binding agents and T cells as provided herein may be used for purging of autologous stem cells. Such purging may be beneficial prior to, for example, bone marrow transplantation or transfusion of blood or components thereof. Binding agents, T cells, antigen presenting cells (APC) and compositions provided herein may further be used for expanding and stimulating (or priming) autologous, allogeneic, syngeneic or unrelated hematological malignancy-related antigen-specific T-cells in vitro and/or in vivo. Such hematological malignancy-related antigen-specific T cells may be used, for example, within donor lymphocyte infusions.

[0477] Routes and frequency of administration of the therapeutic compositions described herein, as well as dosage, will vary from individual to individual, and may be readily established using standard techniques. In general, the pharmaceutical compositions and vaccines may be administered by injection (e.g., intracutaneous, intramuscular, intravenous or subcutaneous), intranasally (e.g., by aspiration) or orally. Preferably, between 1 and 10 doses may be administered over a 52 week period. Preferably, 6 doses are administered, at intervals of 1 month, and booster vaccinations may be given periodically thereafter. Alternate protocols may be appropriate for individual patients. A suitable dose is an amount of a compound that, when administered as described above, is capable of promoting an anti-tumor immune response, and is at least 10-50% above the basal (i.e., untreated) level. Such response can be monitored by measuring the anti-tumor antibodies in a patient or by vaccine-dependent generation of cytolytic effector cells capable of killing the patient's tumor cells in vitro. Such vaccines should also be capable of causing an immune response that leads to an improved clinical outcome (e.g., more frequent remissions, complete or partial or longer disease-free survival) in vaccinated patients as compared to non-vaccinated patients. In general, for pharmaceutical compositions and vaccines comprising one or more polypeptides, the amount of each polypeptide present in a dose ranges from about 100 μg to 5 mg per kg of host. Suitable dose sizes will vary with the size of the patient, but will typically range from about 0.1 mL to about 5 mL.

[0478] In general, an appropriate dosage and treatment regimen provides the active compound(s) in an amount sufficient to provide therapeutic and/or prophylactic benefit. Such a response can be monitored by establishing an improved clinical outcome (e.g., more frequent remissions, complete or partial, or longer disease-free survival) in treated patients as compared to non-treated patients. Increases in preexisting immune responses to a hematological malignancy-related antigen generally correlate with an improved clinical outcome. Such immune responses may generally be evaluated using standard proliferation, cytotoxicity or cytokine assays, which may be performed using samples obtained from a patient before and after treatment.

[0479] Within further aspects, methods for inhibiting the development of a malignant disease associated with hematological malignancy-related antigen expression involve the administration of autologous T cells that have been activated in response to a hematological malignancy-related antigen polypeptide or hematological malignancy-related antigen-expressing APC, as described above. Such T cells may be CD4⁺ and/or CD8⁺, and may be proliferated as described above. The T cells may be administered to the individual in an amount effective to inhibit the development of a malignant disease. Typically, about 1×10⁹ to 1×10¹¹ T cells/M² are administered intravenously, intracavitary or in the bed of a resected tumor. It will be evident to those skilled in the art that the number of cells and the frequency of administration will be dependent upon the response of the patient.

[0480] Within certain embodiments, T cells may be stimulated prior to an autologous bone marrow transplantation. Such stimulation may take place in vivo or in vitro. For in vitro stimulation, bone marrow and/or peripheral blood (or a fraction of bone marrow or peripheral blood) obtained from a patient may be contacted with a hematological malignancy-related antigen polypeptide, a polynucleotide encoding a hematological malignancy-related antigen polypeptide and/or an APC that expresses a hematological malignancy-related antigen polypeptide under conditions and for a time sufficient to permit the stimulation of T cells as described above. Bone marrow, peripheral blood stem cells and/or hematological malignancy-related antigen-specific T cells may then be administered to a patient using standard techniques.

[0481] Within related embodiments, T cells of a related or unrelated donor may be stimulated prior to a syngeneic or allogeneic (related or unrelated) bone marrow transplantation. Such stimulation may take place in vivo or in vitro. For in vitro stimulation, bone marrow and/or peripheral blood (or a fraction of bone marrow or peripheral blood) obtained from a related or unrelated donor may be contacted with a hematological malignancy-related antigen polypeptide, hematological malignancy-related antigen polynucleotide and/or APC that expresses a hematological malignancy-related antigen polypeptide under conditions and for a time sufficient to permit the stimulation of T cells as described above. Bone marrow, peripheral blood stem cells and/or hematological malignancy-related antigen-specific T cells may then be administered to a patient using standard techniques.

[0482] Within other embodiments, hematological malignancy-related antigen-specific T cells, antibodies or antigen-binding fragments thereof as described herein may be used to remove cells expressing hematological malignancy-related antigen from a biological sample, such as autologous bone marrow, peripheral blood or a fraction of bone marrow or peripheral blood (e.g., CD34⁺ enriched peripheral blood (PB) prior to administration to a patient). Such methods may be performed by contacting the biological sample with such T cells, antibodies or antibody fragments under conditions and for a time sufficient to permit the reduction of hematological malignancy-related antigen expressing cells to less than 10%, preferably less than 5% and more preferably less than 1%, of the total number of myeloid or lymphatic cells in the bone marrow or peripheral blood. Such contact may be achieved, for example, using a column to which antibodies are attached using standard techniques. Antigen-expressing cells are retained on the column. The extent to which such cells have been removed may be readily determined by standard methods such as, for example, qualitative and quantitative PCR analysis, morphology, immunohistochemistry and FACS analysis. Bone marrow or PB (or a fraction thereof) may then be administered to a patient using standard techniques.

[0483] 4.26 Diagnostic Methods

[0484] In general, a hematological malignancy may be detected in a patient based on the presence of hematological malignancy-related antigen and/or polynucleotide in a biological sample (such as blood, sera, urine and/or tumor biopsies) obtained from the patient. In other words, hematological malignancy-related antigens may be used as a marker to indicate the presence or absence of such a malignancy. The binding agents provided herein generally permit detection of the level of antigen that binds to the agent in the biological sample. Polynucleotide primers and probes may be used to detect the level of mRNA encoding hematological malignancy-related antigen, which is also indicative of the presence or absence of a hematological malignancy. In general, hematological malignancy-related antigen should be present at a level that is at least three fold higher in a sample obtained from a patient afflicted with a hematological malignancy than in the sample obtained from an individual not so afflicted.

[0485] There are a variety of assay formats known to those of ordinary skill in the art for using a binding agent to detect polypeptide markers in a sample. See, e.g., Harlow and Lane, Antibodies: A Laboratory Manual, Cold Spring Harbor Laboratory, 1988. In general, the presence or absence of a hematological malignancy in a patient may be determined by (a) contacting a biological sample obtained from a patient with a binding agent; (b) detecting in the sample a level of polypeptide that binds to the binding agent; and (c) comparing the level of polypeptide with a predetermined cut-off value.

[0486] In a preferred embodiment, the assay involves the use of binding agent immobilized on a solid support to bind to and remove the polypeptide from the remainder of the sample. The bound polypeptide may then be detected using a detection reagent that contains a reporter group and specifically binds to the binding agent/polypeptide complex. Such detection reagents may comprise, for example, a binding agent that specifically binds to the polypeptide or an antibody or other agent that specifically binds to the binding agent, such as an anti-immunoglobulin, protein G, protein A or a lectin. Alternatively, a competitive assay may be utilized, in which a polypeptide is labeled with a reporter group and allowed to bind to the immobilized binding agent after incubation of the binding agent with the sample. The extent to which components of the sample inhibit the binding of the labeled polypeptide to the binding agent is indicative of the reactivity of the sample with the immobilized binding agent. Suitable polypeptides for use within such assays include full length hematological malignancy-related antigens and portions thereof to which the binding agent binds, as described above.

[0487] The solid support may be any material known to those of ordinary skill in the art to which the hematological malignancy-related antigen polypeptide may be attached. For example, the solid support may be a test well in a microtiter plate or a nitrocellulose or other suitable membrane. Alternatively, the support may be a bead or disc, such as glass, fiberglass, latex or a plastic material such as polystyrene or polyvinylchloride. The support may also be a magnetic particle or a fiber optic sensor, such as those disclosed, for example, in U.S. Pat. No. 5,359,681. The binding agent may be immobilized on the solid support using a variety of techniques known to those of skill in the art, which are amply described in the patent and scientific literature. In the context of the present invention, the term “immobilization” refers to both noncovalent association, such as adsorption, and covalent attachment (which may be a direct linkage between the agent and functional groups on the support or may be a linkage by way of a cross-linking agent). Immobilization by adsorption to a well in a microtiter plate or to a membrane is preferred. In such cases, adsorption may be achieved by contacting the binding agent, in a suitable buffer, with the solid support for a suitable amount of time. The contact time varies with temperature, but is typically between about 1 hour and about 1 day. In general, contacting a well of a plastic microtiter plate (such as polystyrene or polyvinylchloride) with an amount of binding agent ranging from about 10 ng to about 10 μg, and preferably about 100 ng to about 1 μg, is sufficient to immobilize an adequate amount of binding agent.

[0488] Covalent attachment of binding agent to a solid support may generally be achieved by first reacting the support with a bifunctional reagent that will react with both the support and a functional group, such as a hydroxyl or amino group, on the binding agent. For example, the binding agent may be covalently attached to supports having an appropriate polymer coating using benzoquinone or by condensation of an aldehyde group on the support with an amine and an active hydrogen on the binding partner (see, e.g., Pierce Immunotechnology Catalog and Handbook, 1991, at A12-A13).

[0489] In certain embodiments, the assay is a two-antibody sandwich assay. This assay may be performed by first contacting an antibody that has been immobilized on a solid support, commonly the well of a microtiter plate, with the sample, such that polypeptides within the sample are allowed to bind to the immobilized antibody. Unbound sample is then removed from the immobilized polypeptide-antibody complexes and a detection reagent (preferably a second antibody capable of binding to a different site on the polypeptide) containing a reporter group is added. The amount of detection reagent that remains bound to the solid support is then determined using a method appropriate for the specific reporter group.

[0490] More specifically, once the antibody is immobilized on the support as described above, the remaining protein binding sites on the support are typically blocked. Any suitable blocking agent known to those of ordinary skill in the art, such as bovine serum albumin or Tween 20™ (Sigma Chemical Co., St. Louis, Mo.). The immobilized antibody is then incubated with the sample, and polypeptide is allowed to bind to the antibody. The sample may be diluted with a suitable diluent, such as phosphate-buffered saline (PBS) prior to incubation. In general, an appropriate contact time (i.e., incubation time) is a period of time that is sufficient to detect the presence of polypeptide within a sample obtained from an individual with a hematological malignancy. Preferably, the contact time is sufficient to achieve a level of binding that is at least about 95% of that achieved at equilibrium between bound and unbound polypeptide. Those of ordinary skill in the art will recognize that the time necessary to achieve equilibrium may be readily determined by assaying the level of binding that occurs over a period of time. At room temperature, an incubation time of about 30 minutes is generally sufficient.

[0491] Unbound sample may then be removed by washing the solid support with an appropriate buffer, such as PBS containing 0.1% Tween 20™. The second antibody, which contains a reporter group, may then be added to the solid support. Preferred reporter groups include those groups recited above.

[0492] The detection reagent is then incubated with the immobilized antibody-polypeptide complex for an amount of time sufficient to detect the bound polypeptide. An appropriate amount of time may generally be determined by assaying the level of binding that occurs over a period of time. Unbound detection reagent is then removed and bound detection reagent is detected using the reporter group. The method employed for detecting the reporter group depends upon the nature of the reporter group. For radioactive groups, scintillation counting or autoradiographic methods are generally appropriate. Spectroscopic methods may be used to detect dyes, luminescent groups and fluorescent groups. Biotin may be detected using avidin, coupled to a different reporter group (commonly a radioactive or fluorescent group or an enzyme). Enzyme reporter groups may generally be detected by the addition of substrate (generally for a specific period of time), followed by spectroscopic or other analysis of the reaction products.

[0493] To determine the presence or absence of a hematological malignancy, the signal detected from the reporter group that remains bound to the solid support is generally compared to a signal that corresponds to a predetermined cut-off value. In one preferred embodiment, the cut-off value for the detection of a hematological malignancy is the average mean signal obtained when the immobilized antibody is incubated with samples from patients without the malignancy. In general, a sample generating a signal that is three standard deviations above the predetermined cut-off value is considered positive for the malignancy. In an alternate preferred embodiment, the cut-off value is determined using a Receiver Operator Curve, according to the method of Sackett et al., Clinical Epidemiology: A Basic Science for Clinical Medicine, Little Brown and Co., 1985, p. 106-7. Briefly, in this embodiment, the cut-off value may be determined from a plot of pairs of true positive rates (i.e., sensitivity) and false positive rates (100%-specificity) that correspond to each possible cut-off value for the diagnostic test result. The cut-off value on the plot that is the closest to the upper left-hand corner (i.e., the value that encloses the largest area) is the most accurate cut-off value, and a sample generating a signal that is higher than the cut-off value determined by this method may be considered positive. Alternatively, the cut-off value may be shifted to the left along the plot, to minimize the false positive rate, or to the right, to minimize the false negative rate. In general, a sample generating a signal that is higher than the cut-off value determined by this method is considered positive for a malignancy.

[0494] In a related embodiment, the assay is performed in a flow-through or strip test format, wherein the binding agent is immobilized on a membrane, such as nitrocellulose. In the flow-through test, polypeptides within the sample bind to the immobilized binding agent as the sample passes through the membrane. A second, labeled binding agent then binds to the binding agent-polypeptide complex as a solution containing the second binding agent flows through the membrane. The detection of bound second binding agent may then be performed as described above. In the strip test format, one end of the membrane to which binding agent is bound is immersed in a solution containing the sample. The sample migrates along the membrane through a region containing second binding agent and to the area of immobilized binding agent. Concentration of second binding agent at the area of immobilized antibody indicates the presence of a hematological malignancy. Typically, the concentration of second binding agent at that site generates a pattern, such as a line, that can be read visually. The absence of such a pattern indicates a negative result. In general, the amount of binding agent immobilized on the membrane is selected to generate a visually discernible pattern when the biological sample contains a level of polypeptide that would be sufficient to generate a positive signal in the two-antibody sandwich assay, in the format discussed above. Preferred binding agents for use in such assays are antibodies and antigen-binding fragments thereof. Preferably, the amount of antibody immobilized on the membrane ranges from about 25 ng to about 1 μg, and more preferably from about 50 ng to about 500 ng. Such tests can typically be performed with a very small amount of biological sample.

[0495] Of course, numerous other assay protocols exist that are suitable for use with the hematological malignancy-related antigen sequences or binding agents of the present invention. The above descriptions are intended to be exemplary only. For example, it will be apparent to those of ordinary skill in the art that the above protocols may be readily modified to use hematological malignancy-related antigen polypeptides to detect antibodies that bind to such polypeptides in a biological sample. The detection of hematological malignancy-related antigen-specific antibodies may correlate with the presence of a hematological.

[0496] A malignancy may also, or alternatively, be detected based on the presence of T cells that specifically react with hematological malignancy-related antigen in a biological sample. Within certain methods, a biological sample comprising CD4⁺ and/or CD8⁺ T cells isolated from a patient is incubated with a hematological malignancy-related antigen polypeptide, a polynucleotide encoding such a polypeptide and/or an APC that expresses such a polypeptide, and the presence or absence of specific activation of the T cells is detected. Suitable biological samples include, but are not limited to, isolated T cells. For example, T cells may be isolated from a patient by routine techniques (such as by Ficoll/Hypaque density gradient centrifugation of peripheral blood lymphocytes). T cells may be incubated in vitro for 2-9 days (typically 4 days) at 37° C. with Mtb-81 or Mtb-67.2 polypeptide (e.g., 5-25 μg/ml). It may be desirable to incubate another aliquot of a T cell sample in the absence of hematological malignancy-related antigen polypeptide to serve as a control. For CD4⁺ T cells, activation is preferably detected by evaluating proliferation of the T cells. For CD8⁺ T cells, activation is preferably detected by evaluating cytolytic activity. A level of proliferation that is at least two fold greater and/or a level of cytolytic activity that is at least 20% greater than in disease-free patients indicates the presence of a hematological malignancy in the patient.

[0497] As noted above, a hematological malignancy may also, or alternatively, be detected based on the level of mRNA encoding hematological malignancy-related antigen in a biological sample. For example, at least two oligonucleotide primers may be employed in a polymerase chain reaction (PCR) based assay to amplify a portion of hematological malignancy-related antigen cDNA derived from a biological sample, wherein at least one of the oligonucleotide primers is specific for (i.e., hybridizes to) a polynucleotide encoding the hematological malignancy-related antigen protein. The amplified cDNA is then separated and detected using techniques well known in the art, such as gel electrophoresis. Similarly, oligonucleotide probes that specifically hybridize to a polynucleotide encoding hematological malignancy-related antigen may be used in a hybridization assay to detect the presence of polynucleotide encoding hematological malignancy-related antigen in a biological sample.

[0498] To permit hybridization under assay conditions, oligonucleotide primers and probes should comprise an oligonucleotide sequence that has at least about 60%, preferably at least about 75% and more preferably at least about 90%, identity to a portion of a polynucleotide encoding hematological malignancy-related antigen that is at least 10 nucleotides, and preferably at least 20 nucleotides, in length. Preferably, oligonucleotide primers and/or probes hybridize to a polynucleotide encoding a polypeptide described herein under moderately stringent conditions, as defined above. Oligonucleotide primers and/or probes which may be usefully employed in the diagnostic methods described herein preferably are at least 10-40 nucleotides in length. Techniques for both PCR based assays and hybridization assays are well known in the art (see, for example, Mullis et al., Cold Spring Harbor Symp. Quant. Biol., 51:263, 1987; Erlich ed., PCR Technology, Stockton Press, NY, 1989).

[0499] One preferred assay employs RT-PCR, in which PCR is applied in conjunction with reverse transcription. Typically, RNA is extracted from a biological sample such as a biopsy tissue and is reverse transcribed to produce cDNA molecules. PCR amplification using at least one specific primer generates a cDNA molecule, which may be separated and visualized using, for example, gel electrophoresis. Amplification may be performed on biological samples taken from a test patient and from an individual who is not afflicted with a hematological malignancy.

[0500] The amplification reaction may be performed on several dilutions of cDNA spanning two orders of magnitude. A two-fold or greater increase in expression in several dilutions of the test patient sample as compared to the same dilutions of the sample from a normal individual is typically considered positive.

[0501] In preferred embodiments, such assays may be performed using samples enriched for cells expressing the hematological malignancy-related antigen(s) of interest. Such enrichment may be achieved, for example, using a binding agent as provided herein to remove the cells from the remainder of the biological sample. The removed cells may then be assayed as described above for biological samples.

[0502] In further embodiments, hematological malignancy-related antigens may be used as markers for monitoring disease progression or the response to therapy of a hematological malignancy. In this embodiment, assays as described above for the diagnosis of a hematological malignancy may be performed over time, and the change in the level of reactive polypeptide(s) evaluated. For example, the assays may be performed every 24-72 hours for a period of 6 months to 1 year, and thereafter performed as needed. In general, a malignancy is progressing in those patients in whom the level of polypeptide detected by the binding agent increases over time. In contrast, the malignancy is not progressing when the level of reactive polypeptide either remains constant or decreases with time.

[0503] Certain in vivo diagnostic assays may be performed directly on a tumor. One such assay involves contacting tumor cells with a binding agent. The bound binding agent may then be detected directly or indirectly via a reporter group. Such binding agents may also be used in histological applications. Alternatively, polynucleotide probes may be used within such applications.

[0504] As noted above, to improve sensitivity, multiple markers may be assayed within a given sample. It will be apparent that binding agents specific for different proteins provided herein may be combined within a single assay. Further, multiple primers or probes may be used concurrently. The selection of markers may be based on routine experiments to determine combinations that results in optimal sensitivity.

[0505] Further diagnostic applications include the detection of extramedullary disease (e.g., cerebral infiltration of blasts in leukemias). Within such methods, a binding agent may be coupled to a tracer substance, and the diagnosis is performed in vivo using well known techniques. Coupled binding agent may be administered as described above, and extramedullary disease may be detected based on assaying the presence of tracer substance. Alternatively, a tracer substance may be associated with a T cell specific for hematological malignancy-related antigen, permitting detection of extramedullary disease based on assays to detect the location of the tracer substance.

[0506] 4.27 Exemplary Definitions

[0507] In accordance with the present invention, nucleic acid sequences include, but are not limited to, DNAs (including and not limited to genomic or extragenomic DNAs), genes, peptide nucleic acids (PNAs) RNAs (including, but not limited to, rRNAs, mRNAs and tRNAs), nucleosides, and suitable nucleic acid segments either obtained from native sources, chemically synthesized, modified, or otherwise prepared in whole or in part by the hand of man.

[0508] Unless defined otherwise, all technical and scientific terms used herein have the same meaning as commonly understood by one of ordinary skill in the art to which this invention belongs. Although any methods and compositions similar or equivalent to those described herein can be used in the practice or testing of the present invention, the preferred methods and compositions are described herein. For purposes of the present invention, the following terms are defined below:

[0509] A, an: In accordance with long standing patent law convention, the words “a” and “an” when used in this application, including the claims, denotes “one or more”.

[0510] Expression: The combination of intracellular processes, including transcription and translation undergone by a polynucleotide such as a structural gene to synthesize the encoded peptide or polypeptide.

[0511] Promoter: a term used to generally describe the region or regions of a nucleic acid sequence that regulates transcription.

[0512] Regulatory Element: a term used to generally describe the region or regions of a nucleic acid sequence that regulates transcription.

[0513] Structural gene: A gene or sequence region that is expressed to produce an encoded peptide or polypeptide.

[0514] Transformation: A process of introducing an exogenous polynucleotide sequence (e.g., a vector, a recombinant DNA or RNA molecule) into a host cell or protoplast in which that exogenous nucleic acid segment is incorporated into at least a first chromosome or is capable of autonomous replication within the transformed host cell. Transfection, electroporation, and naked nucleic acid uptake all represent examples of techniques used to transform a host cell with one or more polynucleotides.

[0515] Transformed cell: A host cell whose nucleic acid complement has been altered by the introduction of one or more exogenous polynucleotides into that cell.

[0516] Transgenic cell: Any cell derived or regenerated from a transformed cell or derived from a transgenic cell, or from the progeny or offspring of any generation of such a transformed host cell.

[0517] Transgenic animal: An animal or a progeny or an offspring of any generation thereof that is derived from a transformed animal cell, wherein the animal's DNA contains an introduced exogenous nucleic acid molecule not originally present in a native, wild type, non-transgenic animal of the same species. The terms “transgenic animal” and “transformed animal” have sometimes been used in the art as synonymous terms to define an animal, the genetic contents of which has been modified to contain one or more exogenous nucleic acid segments.

[0518] Vector: A nucleic acid molecule, typically comprised of DNA, capable of replication in a host cell and/or to which another nucleic acid segment can be operatively linked so as to bring about replication of the attached segment. A plasmid, cosmid, or a virus is an exemplary vector.

[0519] The terms “substantially corresponds to”, “substantially homologous”, or “substantial identity” as used herein denotes a characteristic of a nucleic acid or an amino acid sequence, wherein a selected nucleic acid or amino acid sequence has at least about 70 or about 75 percent sequence identity as compared to a selected reference nucleic acid or amino acid sequence. More typically, the selected sequence and the reference sequence will have at least about 76, 77, 78, 79, 80, 81, 82, 83, 84 or even 85 percent sequence identity, and more preferably at least about 86, 87, 88, 89, 90, 91, 92, 93, 94, or 95 percent sequence identity. More preferably still, highly homologous sequences often share greater than at least about 96, 97, 98, or 99 percent sequence identity between the selected sequence and the reference sequence to which it was compared. The percentage of sequence identity may be calculated over the entire length of the sequences to be compared, or may be calculated by excluding small deletions or additions which total less than about 25 percent or so of the chosen reference sequence. The reference sequence may be a subset of a larger sequence, such as a portion of a gene or flanking sequence, or a repetitive portion of a chromosome. However, in the case of sequence homology of two or more polynucleotide sequences, the reference sequence will typically comprise at least about 18-25 nucleotides, more typically at least about 26 to 35 nucleotides, and even more typically at least about 40, 50, 60, 70, 80, 90, or even 100 or so nucleotides. Desirably, which highly homologous fragments are desired, the extent of percent identity between the two sequences will be at least about 80%, preferably at least about 85%, and more preferably about 90% or 95% or higher, as readily determined by one or more of the sequence comparison algorithms well-known to those of skill in the art, such as e.g., the FASTA program analysis described by Pearson and Lipman (1988).

[0520] The term “naturally occurring” as used herein as applied to an object refers to the fact that an object can be found in nature. For example, a polypeptide or polynucleotide sequence that is present in an organism (including viruses) that can be isolated from a source in nature and which has not been intentionally modified by the hand of man in a laboratory is naturally-occurring. As used herein, laboratory strains of rodents that may have been selectively bred according to classical genetics are considered naturally occurring animals.

[0521] As used herein, a “heterologous” is defined in relation to a predetermined referenced gene sequence. For example, with respect to a structural gene sequence, a heterologous promoter is defined as a promoter which does not naturally occur adjacent to the referenced structural gene, but which is positioned by laboratory manipulation. Likewise, a heterologous gene or nucleic acid segment is defined as a gene or segment that does not naturally occur adjacent to the referenced promoter and/or enhancer elements.

[0522] “Transcriptional regulatory element” refers to a polynucleotide sequence that activates transcription alone or in combination with one or more other nucleic acid sequences. A transcriptional regulatory element can, for example, comprise one or more promoters, one or more response elements, one or more negative regulatory elements, and/or one or more enhancers.

[0523] As used herein, a “transcription factor recognition site” and a “transcription factor binding site” refer to a polynucleotide sequence(s) or sequence motif(s) which are identified as being sites for the sequence-specific interaction of one or more transcription factors, frequently taking the form of direct protein-DNA binding. Typically, transcription factor binding sites can be identified by DNA footprinting, gel mobility shift assays, and the like, and/or can be predicted on the basis of known consensus sequence motifs, or by other methods known to those of skill in the art.

[0524] As used herein, the term “operably linked” refers to a linkage of two or more polynucleotides or two or more nucleic acid sequences in a functional relationship. A nucleic acid is “operably linked” when it is placed into a functional relationship with another nucleic acid sequence. For instance, a promoter or enhancer is operably linked to a coding sequence if it affects the transcription of the coding sequence. Operably linked means that the DNA sequences being linked are typically contiguous and, where necessary to join two protein coding regions, contiguous and in reading frame. However, since enhancers generally function when separated from the promoter by several kilobases and intronic sequences may be of variable lengths, some polynucleotide elements may be operably linked but not contiguous.

[0525] “Transcriptional unit” refers to a polynucleotide sequence that comprises at least a first structural gene operably linked to at least a first cis-acting promoter sequence and optionally linked operably to one or more other cis-acting nucleic acid sequences necessary for efficient transcription of the structural gene sequences, and at least a first distal regulatory element as may be required for the appropriate tissue-specific and developmental transcription of the structural gene sequence operably positioned under the control of the promoter and/or enhancer elements, as well as any additional cis sequences that are necessary for efficient transcription and translation (e.g., polyadenylation site(s), mRNA stability controlling sequence(s), etc.

[0526] As noted above, the present invention is generally directed to compositions and methods for using the compositions, for example in the therapy and diagnosis of cancer, such as hematological malignancy. Certain illustrative compositions described herein include hematological malignancy-related tumor polypeptides, polynucleotides encoding such polypeptides, binding agents such as antibodies, antigen presenting cells (APCs) and/or immune system cells (e.g., T cells). A “hematological malignancy-related tumor protein,” as the term is used herein, refers generally to a protein that is expressed in hematological malignancy-related tumor cells at a level that is at least two fold, and preferably at least five fold, greater than the level of expression in a normal tissue, as determined using a representative assay provided herein. Certain hematological malignancy-related tumor proteins are tumor proteins that react detectably (within an immunoassay, such as an ELISA or Western blot) with antisera of a patient afflicted with hematological malignancy.

[0527] 4.28 Biological Functional Equivalents

[0528] Modification and changes may be made in the structure of the polynucleotides and peptides of the present invention and still obtain a functional molecule that encodes a peptide with desirable characteristics, or still obtain a genetic construct with the desirable expression specificity and/or properties. As it is often desirable to introduce one or more mutations into a specific polynucleotide sequence, various means of introducing mutations into a polynucleotide or peptide sequence known to those of skill in the art may be employed for the preparation of heterologous sequences that may be introduced into the selected cell or animal species. In certain circumstances, the resulting encoded peptide sequence is altered by this mutation, or in other cases, the sequence of the peptide is unchanged by one or more mutations in the encoding polynucleotide. In other circumstances, one or more changes are introduced into the promoter and/or enhancer regions of the polynucleotide constructs to alter the activity, or specificity of the expression elements and thus alter the expression of the heterologous therapeutic nucleic acid segment operably positioned under the control of the elements.

[0529] When it is desirable to alter the amino acid sequence of one or more of the heterologous peptides encoded by the expression construct to create an equivalent, or even an improved, second-generation molecules, the amino acid changes may be achieved by changing one or more of the codons of the encoding DNA sequence, according to Table 1.

[0530] For example, certain amino acids may be substituted for other amino acids in a protein structure without appreciable loss of interactive binding capacity with structures such as, for example, antigen-binding regions of antibodies or binding sites on substrate molecules. Since it is the interactive capacity and nature of a protein that defines that protein's biological functional activity, certain amino acid sequence substitutions can be made in a protein sequence, and, of course, its underlying DNA coding sequence, and nevertheless obtain a protein with like properties. It is thus contemplated by the inventors that various changes may be made in the peptide sequences of the disclosed compositions, or corresponding DNA sequences which encode said peptides without appreciable loss of their biological utility or activity.

TABLE 1

| | |
|---|---|
| Amino Acids | Codons |

| | | | |
|---|---|---|---|
| Alanine | Ala | A | GCA GCC GCG GCU |
| Cysteine | Cys | C | UGC UGU |
| Aspartic acid | Asp | D | GAC GAU |
| Glutamic acid | Glu | E | GAA GAG |
| Phenylalanine | Phe | F | UUC UUU |
| Glycine | Gly | G | GGA GGC GGG GGU |
| Histidine | His | H | CAC CAU |
| Isoleucine | Ile | I | AUA AUC AUU |
| Lysine | Lys | K | AAA AAG |
| Leucine | Leu | L | UUA UUG CUA CUC CUG CUU |
| Methionine | Met | M | AUG |
| Asparagine | Asn | N | AAC AAU |
| Proline | Pro | P | CCA CCC CCG CCU |
| Glutamine | Gln | Q | CAA CAG |
| Arginine | Arg | R | AGA AGG CGA CGC CGG CGU |
| Serine | Ser | S | AGC AGU UCA UCC UCG UCU |
| Threonine | Thr | T | ACA ACC ACG ACU |
| Valine | Val | V | GUA GUC GUG GUU |
| Tryptophan | Trp | W | UGG |
| Tyrosine | Tyr | Y | UAC UAU |

[0531] In making such changes, the hydropathic index of amino acids may be considered. The importance of the hydropathic amino acid index in conferring interactive biologic function on a protein is generally understood in the art (Kyte and Doolittle, 1982, incorporate herein by reference). It is accepted that the relative hydropathic character of the amino acid contributes to the secondary structure of the resultant protein, which in turn defines the interaction of the protein with other molecules, for example, enzymes, substrates, receptors, DNA, antibodies, antigens, and the like. Each amino acid has been assigned a hydropathic index on the basis of their hydrophobicity and charge characteristics (Kyte and Doolittle, 1982), these are: isoleucine (+4.5); valine (+4.2); leucine (+3.8); phenylalanine (+2.8); cysteine/cystine (+2.5); methionine (+1.9); alanine (+1.8); glycine (−0.4); threonine (−0.7); serine (−0.8); tryptophan (−0.9); tyrosine (−1.3); proline (−1.6); histidine (−3.2); glutamate (−3.5); glutamine (−3.5); aspartate (−3.5); asparagine (−3.5); lysine (−3.9); and arginine (−4.5).

[0532] It is known in the art that certain amino acids may be substituted by other amino acids having a similar hydropathic index or score and still result in a protein with similar biological activity, i.e. still obtain a biological functionally equivalent protein. In making such changes, the substitution of amino acids whose hydropathic indices are within ±2 is preferred, those that are within ±1 are particularly preferred, and those within ±0.5 are even more particularly preferred. It is also understood in the art that the substitution of like amino acids can be made effectively on the basis of hydrophilicity. U.S. Pat. No. 4,554,101, incorporated herein by reference, states that the greatest local average hydrophilicity of a protein, as governed by the hydrophilicity of its adjacent amino acids, correlates with a biological property of the protein.

[0533] As detailed in U.S. Pat. No. 4,554,101, the following hydrophilicity values have been assigned to amino acid residues: arginine (+3.0); lysine (+3.0); aspartate (+3.0±1); glutamate (+3.0±1); serine (+0.3); asparagine (+0.2); glutamine (+0.2); glycine (0); threonine (−0.4); proline (−0.5±1); alanine (−0.5); histidine (−0.5); cysteine (−1.0); methionine (−1.3); valine (−1.5); leucine (−1.8); isoleucine (−1.8); tyrosine (−2.3); phenylalanine (−2.5); tryptophan (−3.4). It is understood that an amino acid can be substituted for another having a similar hydrophilicity value and still obtain a biologically equivalent, and in particular, an immunologically equivalent protein. In such changes, the substitution of amino acids whose hydrophilicity values are within ±2 is preferred, those that are within ±1 are particularly preferred, and those within ±0.5 are even more particularly preferred.

[0534] As outlined above, amino acid substitutions are generally therefore based on the relative similarity of the amino acid side-chain substituents, for example, their hydrophobicity, hydrophilicity, charge, size, and the like. Exemplary substitutions which take several of the foregoing characteristics into consideration are well known to those of skill in the art and include: arginine and lysine; glutamate and aspartate; serine and threonine; glutamine and asparagine; and valine, leucine and isoleucine.

### 5. EXAMPLES

[0535] The following examples are included to demonstrate preferred embodiments of the invention. However, those of skill in the art should, in light of the present disclosure, appreciate that many changes can be made in the specific embodiments which are disclosed and still obtain a like or similar result without departing from the spirit and scope of the invention described in the appended claims.

### 5.1 Example 1

### Identification of Hematological Malignancy-Related Antigen Polynucleotides

[0536] This Example illustrates the identification of hematological malignancy-related antigen polynucleotides from non-Hodgkin's lymphomas.

[0537] Hematological malignancy-related antigen polynucleotides were isolated by PCR-based subtraction. PolyA mRNA was prepared from T cell non-Hodgkin's lymphomas, B cell non-Hodgkin's lymphomas and normal tissues. Six cDNA libraries were constructed, PCR-subtracted and analyzed. Two libraries were constructed using pools of three T cell non-Hodgkin's lymphoma mRNAs (referred to herein as TCS libraries). Two others were constructed using pools of three B cell non-Hodgkin's lymphoma mRNAs (referred to herein as BCNHL libraries). Two other libraries were constructed using a pool of 2 Hodgkin's lymphoma mRNAs (referred to herein as HLS libraries. cDNA synthesis, hybridization and PCR amplification were performed according to Clontech's user manual (PCR-Select cDNA Subtraction), with the following changes: 1) cDNA was restricted with a mixture of enzymes, including MscI, PvuII, StuI and DraI, instead of the single enzyme RsaI; and 2) the ratio of driver to tester cDNA was increased in the hybridization steps (to 76:1) to give a more stringent subtraction.

[0538] The two TCS libraries were independently subtracted with different pools of driver cDNAs. Driver #1 contained cDNA prepared from specific normal tissues (lymph node, bone marrow, T cells, heart and brain), and this subtraction generated the library TCS-D 1 (T cell non-Hodgkin's lymphoma subtracted library with driver #1). Driver #2 contained non-specific normal tissues (colon, large intestine, lung, pancreas, spinal cord, skeletal muscle, liver, kidney, skin and brain), and this subtraction generated the library TCS-D2 (T cell non-Hodgkin's lymphoma subtraction library with driver #2).

[0539] Similarly, the two BCNHL libraries were independently subtracted with different pools of driver cDNAs. Driver #1 contained cDNA prepared from specific normal tissues (lymph node, bone marrow, B cells, heart and brain), and this subtraction generated the library BCNHL/D1 (B cell non-Hodgkin's lymphoma subtracted library with driver #1). Driver #2 contained non-specific normal tissues (brain, lung, pancreas, spinal cord, skeletal muscle, colon, spleen, large intestine and PBMC), and this subtraction generated the library BCNHL/D2 (B cell non-Hodgkin's lymphoma subtraction library with driver #2).

[0540] The two HLS libraries were independently subtracted with different pools of driver cDNAs. Driver #1 contained cDNA prepared from specific normal tissues (lymph node, bone marrow, B cells and lung) and this subtraction generated HLS-D1 (Hodgkin's lymphoma subtraction library with driver #1). Driver #2 contained non-specific normal tissues (colon, large intestine, lung, pancreas, spinal cord, skeletal muscle, liver, kidney, skin and brain) and this generated the library HLS-D2 (Hodgkin's lymphoma subtraction library with driver #2).

[0541] To analyze the efficiency of the subtraction, actin (a housekeeping gene) was PCR amplified from dilutions of subtracted as well as unsubtracted PCR samples. Furthermore, the complexity and redundancy of each library was characterized by sequencing 96 clones from each of the PCR subtraction libraries (TCS-D1, TCS-D2, BCNHL/D1, BCNHL/D2, HLS-D1 and HLS-D2). These analyses indicated that the libraries are enriched for genes overexpressed in leukemia tissues and specifically T cell and B cell non-Hodgkin's lymphoma and M. Hodgkin's lymphoma samples.

[0542] Following PCR amplification, the cDNAs were cloned into the pCR2.1-TOPO plasmid vector (Invitrogen).

[0543] Sequences obtained from these analyses were searched against known sequences in the publicly available databases using the BLAST 2.0 release. The default BLAST parameters used were as follows: GAP PARAMETERS: Open Gap=0, Extended Gap=0; OUTPUT PARAMETERS: Expect=10.0, Threshold=0, Number of Alignments=250; For BLASTN, the search parameters were as follows: Mismatch=−3, Reward=1, Word size=0. The alignments were presented pair-wise, with a window percent identity=22. All available protein and nucleotide databases were searched, including, PIR, SwissPROT, GenBank, Mouse EST, Human EST, Other EST, Human repeat and high throughput sequences, and published patents and patent application database.

[0544] From these, a number of unique sequences were identified that represented novel polynucleotide sequences that had not previously been described in the GenBank and other sequence databases. A number of other sequences were identified that appeared to contain significant homology with one or more sequences previously identified in the databases, although they were described only as genomic or cDNA clones, and had no known function. The remaining sequences corresponded to known genes. The clones obtained from this analysis are summarized in Tables 2-6 in co-pending application U.S. Ser. No. 09/796,692.

### 5.2 Example 2

### Analysis of subtracted cDNA sequences by Microarray Analysis

[0545] Subtracted cDNA sequences were analyzed by microarray analysis to evaluate their expression in hematological malignancies and normal tissues. Using this approach, cDNA sequences were PCR amplified and their mRNA expression profiles in hematological malignancies and normal tissues are examined using cDNA microarray technology essentially as described (Shena et al., 1995).

[0546] In brief, the clones identified from the subtracted cDNA libraries analyses were immobilized and arrayed onto glass slides as multiple replicas on microarray slides and the slides were hybridized with two different sets of probes, with each location on the microarray slide corresponding to a unique cDNA clone (as many as 5500 clones can be arrayed on a single slide, or chip). Each chip is hybridized with a pair of cDNA probes that are fluorescence-labeled with Cy3 and Cy5, respectively. The set of probes derived from the hematological malignancies was labeled with cy3 while the other set of probes derived from a pool of normal tissues was labeled with cy5. Typically, 1 μg of polyA⁺ RNA was used to generate each cDNA probe. After hybridization, the chips were scanned and the fluorescence intensity recorded for both Cy3 and Cy5 channels. The difference in intensities (i.e., cy3/cy5 ratios) following hybridization with both probe sets provided the information on the relative expression level of each cDNA sequences immobilized on the slide in tumor versus normal tissues. There are multiple built-in quality control steps. First, the probe quality is monitored using a panel of ubiquitously expressed genes. Secondly, the control plate also can include yeast DNA fragments of which complementary RNA may be spiked into the probe synthesis for measuring the quality of the probe and the sensitivity of the analysis. This methodology provides a sensitivity of 1 in 100,000 copies of mRNA, and the reproducibility of the technology may be ensured by including duplicated control cDNA elements at different locations.

[0547] Analysis of hematological malignancy subtracted clones by microarray analyses on a variety of microarray chips identified the sequences set forth in SEQ ID NO:1 through SEQ ID NO:668 of co-pending application U.S. Ser. No. 09/796,692 as being at least two-fold overexpressed in hematological malignancies versus normal tissues.

### 5.3 Example 3

### Polynucleotide and Polypeptide Compositions: Brief Description of the cDNA Clones and Open Reading Frames Identified by Subtractive Hybridization and Microarray Analysis

[0548] Table 7 in co-pending application U.S. Ser. No. 09/796,692 lists the sequences of the polynucleotides obtained during the analyses of the present invention. Shown are the 668 polynucleotide sequences, along with their clone name identifiers, as well as the serial number and filing date of the priority provisional patent application in which the clone was first identified.

[0549] Table 8 in co-pending application U.S. Ser. No. 09/796,692 identifies the putative open reading frames obtained from analyses of the cDNA sequences obtained in SEQ ID NO:1-SEQ ID NO:668 in the co-pending application. Shown are the sequence identifiers, the clone name and translation frame, and the start and stop nucleotides in the corresponding DNA sequence used to generate the polypeptide sequence of the open reading frame.

[0550] Table 9 in co-pending application U.S. Ser. No. 09/796,692 identifies an additional set of particular hematological malignancy-related cDNA sequences that were obtained using the subtractive library and microarray methods as described above. These sequences, designated SEQ ID NO:2533-SEQ ID NO:9597 in the co-pending application, are shown in the Table along with the original clone name, and the serial number and filing date of the priority provisional application in which the clone was first described.

### 5.4 Example 4

### Additional Analysis of cDNA Clones and ORFS Identified by Subtractive Hybridization and Microarray Analysis

[0551] This example describes microarray analysis of previously patent-filed leukemia tumor- and tissue-specific cDNAs (SEQ ID NOs: 1-9597). Since some of the sequences described in the example are full-length versions or fragments of the previously disclosed sequences, they have been provided with new SEQ ID NOs.

[0552] Microarray analysis identifies many potential genes that are overexpressed in specific tissues/tumors. However, these genes often represent known genes or genes that subsequently are found by RealTime PCR analysis to have a broader expression profile. This disclosure describes analyses which combine microarray analysis (CorixArray) and comparisons to public databases to identify and prioritize candidate sequences for RealTime analysis, thus allowing the identification of sequences with favorable expression profiles in a more efficient manner.

[0553] Clones were tested for overexpression in lymphoma tumor samples as compared to normal tissues using Corixa Leukemia/Lymphoma Chip#3 (LyC3). The analyzed clones were originally randomly picked from lymphoma PCR subtracted libraries: B-cell non-Hodgkin's lymphoma libraries (BCNHL/D1 and BCNHL/D2; CID000153); T-cell non-Hodgkin's lymphoma libraries (TCS-D1 and TCS-D2; CID000166); Hodgkin's lymphoma libraries (HLS-D1 and HLS-D2; CID000204 and CID000275) and a Clontech-generated T8 leukemia PCR subtracted library. A total of 5184 clones were arrayed: 2304 from BCNHL libraries, 288 from TCS libraries, 1344 from HLS libraries, and 960 from a Clontech-T8 library. In addition, a selection of 288 clones from the above libraries that had been identified from prior leukemia/lymphoma chips were re-analyzed on LyC3.

[0554] cDNA inserts for arraying were amplified by PCR using vector-specific primers. The arrays were probed with 43 probe pairs. Analysis was performed using CorixArray computational analysis. Analysis consisted of determining the ratio of the mean or median hybridization signal for a particular element (cDNA) using two sets of probes. The ratio is a reflection of the over- or under-expression of the element (cDNA) within the probe population. Probe groups were set up to identify elements (cDNAs) with high differential expression in probe group #1. Probe group #1 consisted of 20 tumor RNAs, each probe representing a subset of lymphoma (e.g., B-cell non-Hodgkin's lymphoma, T-cell non-Hodgkin's lymphoma and Hodgkin's lymphoma). Probes in group #2 included 16 essential and non-essential normal tissues (see, FIG. 4). A threshold (fold-overexpression in probe group #1) was set at 3.0. This threshold was set to identify elements with overexpression that could be reproducibly detected based on the quality of the chip. The sequences in this disclosure were sorted initially based on their CorixArray analysis, specifically on the basis of their mean signal 2 values.

[0555] Of the surveyed sequences, 95 were identified as highly expressed in lymphoma cells. Members of Group#1 (SEQ ID NOs:10,516; 10,505; 10,532; 10,487; 10,534; 10,500; 10,495; 10,535; 10,504; 10,488; 10,492; 10,507; 10,499; 10,498; 10,493; 10,508 (FIG. 5); SEQ ID NOs:10,548; 10,552; 10,574; 10,555; 10,547; 10,561; 10,572; 10,553; 10,541; 10,562; 10,569; 10,551 (FIG. 6)) have a mean signal 2<0.1 and can be considered as sequences with low/no expression in normal tissues. Members of Group#2 (SEQ ID NOs:10,525; 10,523; 10,528; 10,517; 10,526; 10,497; 10,513; 10,524; 10,522; 10,527; 10,533; 10,530; 10,496; 10,520; 10,509; 10,519; 10,491; 10,489; 10,494; 10,486; 10,503; 10,521; 10,490; 10,511 (FIG. 5); SEQ ID NOs:10,576; 10,567; 10,565; 10,580; 10,545; 10,540; 10,560; 10,577; 10,556; 10,550; 10,543; 10,557; 10,544; 10,579; 10,563; 10,549; 10,559; 10,554; 10,538; 10,539; 10,566; 10,537 (FIG. 6)) have a mean signal 2 between 0.1 and 0.2 and can be considered as clones with a potential for some expression in normal tissues. Members of Group#3 (SEQ ID NOs:10,518; 10,515; 10,501; 10,529; 10,531; 10,512; 10,536; 10,510; 10,506; 10,514; 10,502 (FIG. 5); SEQ ID NOs:10,568; 10,546; 10,564; 10,570; 10,578; 10,573; 10,542; 10,558; 10,575; 10,571(FIG. 6)) have a mean signal 2>0.2 and can be considered as clones that have the potential to have expression in some normal tissues.

### 5.5 Example 5

### Identification of Candidate Genes With the Same Tissue Expression Profile as CD20 and CD52

[0556] This example identifies leukemia tumor and tissue-specific genes that have similar tissue expression profiles as CD20 and CD52 (FIG. 7). Antibodies against these two markers have been used for the therapy of hematological malignancies and other diseases associated with expression of these markers, i.e., FDA-approved Rituximab (anti-CD20 Ab) and Campath (anti-CD52 Ab). The similarity in gene expression between our candidate genes and CD20 and CD52 suggests that the described genes will also be useful as compounds for the diagnosis and therapy of hematological malignancies and other cancerous and non-cancerous diseases associated with expression of one or more of the described antigens.

[0557] RealTime PCR was used to compare the expression profiles of the candidate genes with the expression profiles of CD20 and CD52. FIG. 8 illustrates the expression of the candidate genes in hematopoietic subsets and hematological malignancies. Data summarized in this sheets shows that using a combination of the PCR subtracted cDNA libraries, microarray analyses, and RealTime PCR, it is possible to identify genes differentially expressed in normal B-cells, lymphomas, myeloma, chronic lymphocytic leukemia, and acute myeloid leukemia. FIG. 9 shows the sequences of the candidate genes (SEQ ID NOs:10,581-10,596).

[0558] The following Examples 6-9 illustrate procedures used for further analysis of candidate genes identified through PCR subtractive hybridization, microarray analyses, and RealTime PCR.

### 5.6 Example 6

### Analysis of Ly1464, One of the Genes With a Similar Expression Profile as CD20 and CD52

[0559] This example illustrates the typical procedure used to identify antigens for use as therapeutics, diagnostics, etc. and preferred methods for developing therapeutics and diagnostics for leukemia/lymphoma diseases. First, candidate genes highly enriched in leukemia/lymphoma cells are identified using PCR subtraction library cloning. Next, subtracted cDNA sequences are analyzed by microarray analysis to evaluate their expression in hematological malignancies and normal tissues. Since microarray analysis often identifies genes that represent known genes or genes that subsequently are found by RealTime analysis to have broader expression profiles, the microarray analysis is combined with comparisons to public databases to identify and prioritize candidate sequences for analysis. Next, RealTime PCR is used to analyze the expression profiles in various hematological subsets. In some cases, further analysis is focused on antigens with expression profiles similar to known therapeutics. For these genes, structural prediction programs are used to identify transmembrane domains, antigen-specific CTL are generated using human in vitro priming, and humanized monoclonal and polyclonal antibodies are generated as reagents for the diagnosis and therapy of malignancies and autoimmune disorders associated with antigen expression.

[0560] As an example, the analysis of Ly1464P (FIG. 10; nucleotide sequence—SEQ ID NO:10,597; protein sequence—SEQ ID NO:10,598) is summarized below.

[0561] Expression Analysis

[0562] Overexpression of Ly1464 was documented by microarray analyses and RealTime PCR. Ly1464P is overexpressed in lymphomas, in lymphoblastic leukemia and in multiple myeloma specimens, while expression in normal tissues is restricted to normal B-cells.

[0563] Sequence Analysis

[0564] Ly1464P PCR subtraction library clone sequences matched the Genbank clone MGC:4595 (ACCESSION XM_{—}033969). Ly1464P was mapped to human chromosome 1 and appears to have some sequence homology to a murine Ig-like extracellular domain protein. TMpred analysis of Ly1464P indicates that this protein contains a transmembrane domain (FIG. 11).

[0565] Development of Therapeutics

[0566] Several MHC class I binding peptides of Ly1464P were identified (FIG. 12: SEQ ID NOs:10,599-10,819). These peptides are human CTL epitopes of Ly1464. Using human in vitro priming, Ly1464-specific CTL are being generated and cloned. The T-cell receptor of the Ly1464-specific T cells are cloned and used to generate genetically engineered T-cells specific for Ly1464. These T cells can be adoptively transferred into patients suffering from Ly1464-associated malignancies, such as but not restricted to lymphoma, plasma cell disorders as well as autoimmune diseases, such as but not restricted to, rheumatoid arthritis, Lupus erythematodes, Sjogrens disease, severe aplastic anemia, idiopathic thrombocytopnic purpura.

[0567] Using the TSITES program, T-helper epitopes were identified (FIG. 13). Polypeptides have been synthesized (FIG. 14; SEQ ID NOs:10,820-10,842) and are being used to generate antibodies that are specific for Ly1464P. These humanized monoclonal antibodies may be used (conjugated or unconjugated) for the diagnosis and therapy of malignancies and autoimmune disorders associated with Ly1464 expression.

### 5.7 Example 7

### Recombinant Expression of Ly1464

[0568] The full-length sequence of the Ly1464 antigen was cloned through PCR amplification of normal tissue cDNA known to express the gene. The gene was cloned directly into the pCRX2 vector as an N-terminal Ra12 fusion, Ra12-Ly1464 (FIGS. 15 & 16; SEQ ID NO:10,467 (nucleotide); SEQ ID NO:10,468 (protein)), using restriction enzymes NcoI and XhoI and the sequence was subsequently confirmed. The optimal protein expression conditions in E. coli were determined by mini-induction screening. The recombinant protein can be used for clinical treatment, diagnosis, or a vaccine antigen. 5.8 Example 8

### Analysis of Ly1484 (SEQ ID NO:10,846), One of the Genes With a Similar Expression Profile as CD20 And CD52

[0569] Ly1484P PCR subtraction library clone sequences matched the Genbank clone KIAA1607 (acc. no. XM033378, XM033379 and AB046827) and FJL00111 (acc. no. AK024502). Overexpression of Ly1484 was documented by microarray analyses and RealTime PCR. Ly1484P is overexpressed in B cell neoplasms, while expression in normal tissues is restricted to normal B-cells.

[0570] A full length sequence of candidate Ly1484P (FIG. 17) was obtained using the Genbank database. Ly1484P was mapped to human chromosome 10. There is both a long and short version of Ly1484P (FIG. 17; long version—SEQ ID NO:10,847; short version—SEQ ID NO:10,848). TMpred analysis of Ly1484P indicates that this protein contains a transmembrane domain (FIG. 18). Several MHC class I binding peptides of Ly1464P have been identified (FIGS. 19 & 20; SEQ ID NOs:10,849-10,908) and are being used to generate antigen-specific CTLs. Using the TSITES program, T-helper epitopes have also been identified (FIGS. 21 & 22). Polypeptides have been generated and are being used to generate antibodies that are specific for Ly1484P. 5.9 Example 9

### Expression and Bioinformatic Analyses of Ly1456

[0571] This example describes the characterization of one of the candidate genes, Ly1456P, identified by subtractive hybridization. Sequences representing Ly1456P (SEQ ID NOs:10,971 and 10,972) are contained in previous filings. SEQ ID NO:10,973 corresponds to the initial sequence derived from a lymphoma PCR subtraction library clone and identified as being overexpressed in lymphomas by microarray analysis. RealTime PCR demonstrates that this gene is overexpressed in B-cell derived hematological malignancies, including lymphomas (Non-Hodgkin's and Hodgkin's), chronic lymphocytic leukemia and multiple myeloma.

[0572] The sequence was used to query public databases, including GenBank, EST human, GenSeq, and htgs. No match (<le-25) was found to sequences contained within the GenBank nucleotide database. A BLASTX search of the GenBank protein data base indicated that Ly1456P contains an open reading frame that encodes a polypeptide that has 46% identity (over a 20 amino acid stretch) with the TNF-receptor. No match was found in the GenSeq nucleotide database and the only match (BLASTX) to the GenSeq protein database was to TNR-R at 46% identity. EST sequences were identified that had homology to this initial Ly1456P sequence.

[0573] A BLASTM search of the LifeSeq Gold database (Incyte) identified a 1442 bp Incyte unique template (LS_{—}238330.1; SEQ ID NO:10,469) that was homologous to Ly1456P. This template sequence is the only template in LifeSeq bin #238330 and contains sequence from 78 different clones, of which 33 (˜42%) were derived from libraries derived from hematologic and immune tissue (see, FIG. 23 for summary of library attributes). Four open reading frames that have an ATG translational start site and encode a polypeptide with greater than 50 amino acids were identified in LS_{—}238330.1. None of these polypeptide sequences were predicted to have a trans-membrane region using TMpred, a Corixa in-house algorithm that identifies hydrophobic regions within polypeptides. Many open reading frames were identified that did not contain an ATG translational start site. A BLASTX search of GenBank and GenSeq protein data bases did not identify any potential polypeptides within LS_{—}238330.1 that have reasonable homology to any known proteins. The homology to TNF-R is lost as a result of single nucleotide deletion in LS_{—}238330.1 with respect to the Ly1456P PCR subtraction library fragment.

[0574] The Ly1456P PCR subtraction library fragment is contained within the extended 1442 bp sequence for Ly1456P (SEQ ID NO:10,469) sequence for Ly1456P, derived from LS_{—}238330.1, and both map to chromosome 17. Moreover, the 1442 bp sequence of LS_{—}238330.1 is a contiguous sequence with respect to the available sequence from chromosome 17 indicating that this sequence represents a single exon. SEQ ID NO:10,972 extends beyond the 5′-end of LS_{—}238330.1 with no evidence of an additional exon (i.e. still a single contiguous exon sequence mapping to chromosome 17). The resulting sequence (1637 bp) is the most extensive sequence obtained for Ly1456P and includes an Alu-like repeat element at its 5′-end (Ly1456P_FL_contig; SEQ ID NO:10,470). Repeated Blast searches using this extended sequence for Ly1456P and flanking genomic sequence from chromosome 17 fails to reveal additional sequence. Polypeptide sequence for the four identified open reading frames that have an ATG start of translation and which are >50 amino acids in length are included in this disclosure (SEQ ID NOs:10,471-10,474). These polypeptides were identical for both LS_{—}238330.1 and the extended Ly1456P_FL_contig sequence. 5.10 Example 10

### Sequence Analyses, Expression Analyses, and Structure Analyses of Other Antigens With Similar Expression Profiles as CD20 & CD52

[0575] Summary of Results

| | | | Number of | |
|---|---|---|---|---|
| | | | Predicted | |
| | | | Trans- | |
| | | Expression Analysis by | membrane | |
| Antigen | Sequence Analysis | Realtime PCR | Domains | Other |
| Ly1485 | Matched with homo sapiens | Overexpressed in B cell | unknown | |
| | Genbank clone on | neoplasms, such as B cell | | |
| | chromosome 15q21 clone | lymphomas, CLL and multiple | | |
| | b2265b18 (acc. no. | myelomas, and acute myelogenous | | |
| | AC008131), human secreted | leukemia. | | |
| | protein-encoding gene 9 | Expression in normal tissues is | | |
| | cDNA clone HTOHB55 | restricted to normal B cells. | | |
| | (accession number | | | |
| | AAH19210), and secreted | | | |
| | protein-encoding gene 9 | | | |
| | cDNA clone HTOHB55 | | | |
| | (acc. no. AAH19178) | | | |
| | located on chromosome | | | |
| | 15q21. | | | |
| | (see, FIGS. 24-26; SEQ ID | | | |
| | NOs: 10,475-10,477) | | | |
| Ly1488 | Matched with Genbank | Overexpressed in lymphomas and | one | |
| (see, | clone Rp3-329A5 (acc. no. | B cell neoplasms. | (see, FIG. | |
| FIG. 27; | Z97832). | | 28) | |
| SEQ ID | Mapped to human | | | |
| NOs: | chromosome 6. | | | |
| 10,969 & | | | | |
| 10,970) | | | | |
| Ly1449 | Matched via Genbank | Overexpressed in B- cell | unknown | |
| and | analysis with lung cancer | neoplasms, such as such as B cell | | |
| Ly1480 | associated polynucleotide | lymphomas, CLL and multiple | | |
| | sequence SQID 265 | myelomas, and acute myelogenous | | |
| | (GenSeq acc. no. | leukemia. | | |
| | AAF18246) and homo | | | |
| | sapiens Genbank clone on | | | |
| | chromosome 17 clone RP11- | | | |
| | 956N15 (acc. no. | | | |
| | AC021581). | | | |
| | (see, FIGS. 29 and 30; | | | |
| | SEQ ID NOs: 10,478 and | | | |
| | 10,479) | | | |
| Ly1454 | Matched via Genbank with | Overexpressed in B- cell | unknown | |
| | Genbank clone on | neoplasms, such as B cell | | |
| | chromosome 3 clone RP11- | lymphomas, CLL and multiple | | |
| | 457E6 (acc. no. ACO48348) | myelomas, and acute myclogenous | | |
| | | leukemia. | | |
| Ly1482 | Matched via Genbank with | Overexpressed in B cell | unknown | |
| | homo sapiens Genbank | neoplasms, such as B cell | | |
| | clone on chromosome 6q25 | lymphomas, CLL and multiple | | |
| | clone RPI-111C20 (acc. no. | myelomas, and acute myelogenous | | |
| | AL035530) | leukemia. | | |

### 5.11 Example 11

### Sequence Analysis of Ly1451

[0576] The Ly1451 (SEQ ID NO:10,979) sequence derived from a lymphoma PCR subtraction library clone was used to query several public databases, including GenBank and GenSeq. No matches (>90 identity) were detected for the 5′-proximal 51 bp suggesting that this sequence may contain a repeat element. A BLASTN search of the LifeSeq database (Incyte) identified a 980 bp template (template #1076101.8; SEQ ID NO:10,480 that contained all 240 bp of Ly1451. This template consisted of sequences from 6 clones, of which 2 (33%) were derived from hematologic/immune tissue libraries. Template #1076101.8 was part of a bin containing 11 templates derived from a total of 104 clones, of which 12 (9%) were derived from hematologic/immune tissue libraries.

[0577] This sequence (SEQ ID NO:10,480) was used to search further public databases but no additional sequences were obtained. However, these searches indicate this sequence is a human endogenous retroviral sequence (HERV) encoding polypeptides corresponding to portions of the integrase and envelope genes. A single ORF with an ATG translational start site is contained in the forward read of LS1076101.8

[0578] The polypeptide encoded by this ORF (SEQ ID NO:10,481) is not predicted to have a transmembrane domain. 5.12 Example 12

### Identification of a Specific Gene, Ly1448P, Associated With B Cell Leukemias, Lymphomas and Multiple Myelomas

[0579] SEQ ID NO:9599 in co-pending application U.S. Ser. No. 10/040,862, also termed “Ly1448P,” a portion of which was disclosed earlier in co-pending application U.S. Ser. No. 09/796,692 as SEQ ID NO:636 was identified in a series of MicroArray analyses as described in Examples 1-3 in sections 5.1-5.3 of co-pending application U.S. Ser. No. 09/796,692. Oligonucleotides directed against a portion of SEQ ID NO:9599 were used in a series of RealTime PCR experiments using RNAs isolated from normal cells and hematologically malignant cells. SEQ ID NO:9599 appeared to be expressed in normal B cell lines, CD 19⁺ cell lines, and highly expressed in a subset of Non-Hodgkin's B-cell lymphoma cell lines, Hodgkin's lymphoma cell lines, follicular lymphoma cell lines, and Chronic Lymphocytic Leukemia cell lines.

[0580] SEQ ID NO:9599, which is a 523 base pair cDNA fragment, was used to screen the LIFESEQ® Gold database and two additional clones were identified, SEQ ID NO:9598, also termed “LS 1384258.1”, which is a 622 base pair cDNA fragment, and SEQ ID NO:9600, also termed “LS 368109.1”, which is a 1,908 base pair cDNA.

[0581] The BLAST analysis determined that the open reading frame (ORF) of SEQ ID NO: 9600 begins at nucleotide 777, ends at nucleotide 1562 and encodes a 261 amino acid protein as identified in SEQ ID NO:9611, termed Ly1448P protein. Further analysis of SEQ ID NO:9600 using both TMpred and PSORTII indicated that SEQ ID NO:9611 is a type-1b membrane protein, containing a predicted transmembrane domain beginning at amino acid 156 and ending at amino acid 177. The extracellular portion of SEQ ID NO:9611 has homology with immunoglobulins and contains a predicted Ig-like domain. The intracellular portion of SEQ ID NO:9611 contains Src Homology-2 (SH2) binding domains an Immune Receptor Tyrosine-Based Inhibition Motif (ITIM) an an Immune Receptor Tyrosine-based Activation Motif (ITAM). As such, Ly1448P protein may play a specific role in bematopoetic cell signaling. Further structural and homology analysis of these cDNA fragments is described in the co-pending application U.S. Ser. No. 10/040,862.

[0582] Overlapping immunogenic peptides derived from Ly1448P protein sequence (SEQ ID NO:9611) were generated and used to make antibodies immunoreactive to epitopes of the peptide for diagnostic and therapeutic purposes. Detailed description of the generation of immunogenic peptides is in Examples 4 and 5 of co-pending application U.S. Ser. No. 10/040,862. 5.13 Example 13

### Detection of Ly1448P-Specific and TCL-1-Specific Antibodies in Patients With Hematological Malignancies

[0583] This example illustrates that Ly1448P-specific and TCL-1-specific antibodies are present in the sera of patients with hematological malignancies, such as, but not restricted to, lymphoma. Detection of these specific antibodies provides a tool for early diagnosis of hematological malignancies; specifically for the screening of healthy individuals or individuals at risk for developing lymphomas, such as transplant recipients and immunocompromised patients (i.e., AIDS patients) for the presence of hematological malignancies or a marker for monitoring minimal residual disease. Furthermore, these data demonstrate that Ly1448P and TCL-1 are immunogenic in patients.

[0584] The specific antibodies derived from these patients can be used to identify epitopes which can be used for the therapy of hematological malignancies. FIG. 31 shows the Ly1448P specific Ab data (black and white). FIG. 32 shows the TCL-1 specific Ab data.

[0585] 48 control sera were screened by ELISA assay using recombinant Ly1448P protein or TCL-1 protein. The mean OD reading of all 48 normal sera+2.5×standard deviations was determined as a cut off level and shown in the figures as a black line. All sera demonstrating higher values were defined as positive. 5.14 Example 14

### Expression of TCL-1 and Ly1452 Lymphoma Antigens

[0586] Recombinantly expressed TCL-1 and Ly1452 antigens were constructed to allow for quick and easy purification of the protein.

[0587] The open reading frames for TCL-1 and Ly1452 were PCR amplified and subcloned into a modified pET28 vector with a His tag in-frame and recombinantly expressed in E. coli (His-Ly1452: SEQ ID NO:10,482 (nt), SEQ ID NO:10,483 (protein); His-TCL-1: SEQ ID NO:10,484 (nt), SEQ ID NO:10,485 (protein)).

[0588] Ly1452P Expression in E. coli

[0589] The open reading frame of the LS coding region was PCR amplified with the following primers:

| | | | |
|---|---|---|---|
| PDM-797 | 5′ gtgtcacaatctacagtcaggcaggattctcc 3′ | Tin 64° C. | (SEQ ID NO:10,975) |
| PDM-799 | 5′ gttatgtagcggccgcttatcatgttgctgcagag 3′ | Tm 67° C. | (SEQ ID NO:10,976) |

[0590] Using the following conditions:

[0591] 10 μl 10X Herculase buffer

[0592] 1 μl 10 mM dNTPs

[0593] 2 μl 10 μM each oligo

[0594] 83 μl sterile water

[0595] 1.0 μl Herculase DNA polymerase (Stratagene, La Jolla, Calif.)

[0596] 50 ng DNA

| | | |
|---|---|---|
| 98° C. 3 minutes | | |
| 98° C. 40 seconds | 60° C. 30 seconds | 72° C. 2 minute × 10 cycles |
| 98° C. 40 seconds | 60° C. 30 seconds | 72° C. 2 minutes 30 seconds × |
| | | 10 cycles |
| 98° C. 40 seconds | 60° C. 30 seconds | 72° C. 3 minutes × 10 cycles |
| 98° C. 40 seconds | 60° C. 30 seconds | 72° C. 3 minutes 30 seconds × |
| 72° C. 4 minutess | | 10 cycles |

[0597] The PCR product was digested with Xho I and cloned into pPDM His (a modified pET28 vector with a His tag in frame on the 5′ end) that had been digested with Eco72I and XhoI. Construct was confirmed through sequence analysis and transformed into BLR (DE3) pLysS and HMS 174 pLys S cells.

[0598] TCL1 Expression in E. coli

[0599] The full length open reading frame was PCR amplified with the following primers:

| | | | |
|---|---|---|---|
| PDM-842 | 5′ gccgagtgcccgacactcgggg 3′ | Tm 66° C. | (SEQ ID NO:10,977) |
| PDM-843 | 5′ catttgaattcatcagtcatctggcagcagc 3′ | Tin 62° C. | (SEQ ID NO:10,978) |

[0600] Using the following conditions:

[0601] 110 μl 10X Pfu buffer

[0602] 1 μl 10 mM dNTPs

[0603] 2 μl 10 μM each oligo

[0604] 831 μl sterile water

[0605] 1.51 Pfu DNA polymerase (Stratagene, La Jolla, Calif.)

[0606] 50 ng DNA

| | | |
|---|---|---|
| 96° C. 2 minutes | | |
| 96° C. 20 seconds | 63° C. 15 seconds | 72° C. 1 minute × 40 cycles |
| 72° C. 4 minutes | | |

[0607] The PCR product was digested with EcoRI and cloned into pPDM His (a modified pET28 vector with a His tag inframe on the 5′ end) that had been digested with Eco72I and EcoRI. Construct was confirmed through sequence analysis and transformed into BLR (DE3) pLysS and HMS 174 (DE3) pLys S cells

[0608] Recombinant proteins are also expressed without a histidine tag or with other lymphoma antigens. They are also expressed in other vectors, including other E. coli constructs, Baculovirus, yeast, and mammalian expression vectors. This recombinant antigen can be used to make polyclonal and monoclonal antibodies or used in immunological assays. 5.15 Example 15

### Ly1448P Splice Variants Associated With B Cell Leukemias, Lymphomas and Multiple Myelomas

[0609] This example illustrates the identification of all of the exons and the various spliced forms of the Ly1448P gene and its encoded protein that are associated with B cell leukemias, lymphomas and multiple myelomas.

[0610] Co-pending application U.S. Ser. No. 10/040,862 describes that the nucleic acid sequence encoding Ly1448P (SEQ ID NO:9600) was used to screen the publicly available human genome database, Genbank and private databases. Additional Ly1448P sequences are presented here in SEQ ID NO:11,016. Homologous sequences were identified in the databases and on human chromosome 1. A BLAST search of GenBank determined that Ly1448P protein shared homology with two recently identified proteins, SH2 domain-containing phosphatase anchor proteins 1a (SPAP1a) and 1b (SPAP1b), Xu et al., Biochem. Biophys. Res. Commun. 280: 768-775 (2001). These two proteins appear to be alternatively spliced forms of Ly1448P. The nucleic acid sequence encoding SPAP1a, an alternatively spliced variant of Ly1448P, is 765 nucleotides long (SEQ ID. NO:11,036) and encodes a protein 255 amino acids long (SEQ ID NOs:9612 and 11,057). Additional SPAP1a nucleotide sequences may be found in SEQ ID NOs:9601, 11,035 and Genbank Accession No. AF319438. SPAP1b is an alternatively spliced variant of both Ly1448P and SPAP1a. The nucleic acid sequence encoding SPAP1b is 576 bp (SEQ ID NO:11,038) and encodes a protein 192 amino acids long (SEQ ID NO:11,058). Additional SPAP1b nucleotide sequences may be found in SEQ ID NO:11,037 and Genbank Accession No. AF319439.

[0611] A BLASTX search of both the GenBank and GenSeq databases indicated that Ly1448P and SPAP1a and SPAP1b also share homology with the Immunoglobulin Receptor Translocation Associated Protein 4 (“IRTA4”). IRTA4 also appears to be an alternatively spliced variant of Ly1448P and SPAP1a and SPAP1b. The nucleotide sequence encoding IRTA4 is 1524 nucleotides long (SEQ ID NO:11,001), and encodes a protein 508 amino acids long (SEQ ID NOs:10,464 and 11,039). Additional IRTA4 nucleotide sequences may be found in SEQ ID NOs:9609, 11,000 and Genbank Accession No. AF459633. Recently IRTA4 was also identified as a member of a family of Fe receptor homologs, specifically FcRH2 (Davis et al., Proc. Nat. Acad. Sci. USA 98:9772-9777 (2001) and Genbank Accession No. AY043465). Family members exhibit preferential B cell expression.

[0612] PCR primers comprising nucleotide sequences 5′CTGCTGTGGTCATTGCTGGTC3′ (sense) (SEQ ID NO:11,059) and 5′GACACTGGAATTCTCACAGGGATATTC3′ (antisense) (SEQ ID NO:11,060) were used to amplify IRTA4 and IRTA4 like sequences from a B cell cDNA library comprising cDNAs prepared from three B cell non-Hodgkin's lymphoma samples. One clone, isolated and characterized, appeared to be another alternatively spliced version of Ly1448P and IRTA4 and is termed Patti PCR clone or FL PCR ORF Clone (SEQ ID NO:11,032). SEQ ID NO:11,032 is 2392 nucleotides in length and contains two open reading frames. Open reading frame 1 (“ORF1”) (SEQ ID NO:11,033) is 420 nucleotides long and encodes a 140 amino acid protein (SEQ ID NO:11,055). Open reading frame 2 (“ORF2”) (SEQ ID NO:11,034) is 783 nucleotides long and encodes a 261 amino acid protein (SEQ ID NO:11,056).

[0613] Exons and introns were identified by comparing the publicly available chromosome 1 genomic sequence data to nucleotides encoding a Ly1448P fragment, IRTA4, LY1448P, Patti PCR Clone, SPAP1a, and SPAP1b, (SEQ ID NOs:9598, 11,000, 11,016, 11,032, 11,035, and 11,037 respectively) and are shown diagrammatically in FIG. 33. Open reading frames were identified using the DNASTAR™ MapDraw program (DNASTAR Inc.). This comparison identified 18 exons in this region of chromosome 1. This comparison further identified alternatively used exons and exons containing alternatively used splice donors or splice acceptors. Sequences for each of these exons and exons containing alternatively used splice donors or acceptors are found in SEQ ID NOs:10,979-10,999 as shown in Table 2.

TABLE 2

| EXON NUMBER | SEQ ID NO: |
|---|---|
| Exon 1 | SEQ ID NO:10,979 |
| Exon 2 | SEQ ID NO:10,980 |
| Exon 3 | SEQ ID NO:10,981 |
| Exon 4 | SEQ ID NO:10,982 |
| Exon 5 | SEQ ID NO:10,983 |
| Exon 6 | SEQ ID NO:10,984 |
| Exon 7 | SEQ ID NO:10,985 |
| Exon 8 | SEQ ID NO:10,986 |
| Exon 9 | SEQ ID NO:10,987 |
| Exon 10 | SEQ ID NO:10,988 |
| Exon 10GT | SEQ ID NO:10,989 |
| Exon AG11 | SEQ ID NO:10,990 |
| Exon 12 | SEQ ID NO:10,991 |
| Exon AG12 | SEQ ID NO:10,992 |
| Exon 13 | SEQ ID NO:10,993 |
| Exon 13GT | SEQ ID NO:10,994 |
| Exon 14 | SEQ ID NO:10,995 |
| Exon 15 | SEQ ID NO:10,996 |
| Exon 16 | SEQ ID NO:10,997 |
| Exon 17 | SEQ ID NO:10,998 |
| Exon 18 | SEQ ID NO:10,999 |

[0614] Exons 10 and 13 contain alternatively used splice donors and exons 11 and 12 contain alternatively used splice acceptors. Full length exon 11 is used in the Ly1448P fragment (SEQ ID NO:9598). All other transcripts use the alternative splice acceptor form of exon 11. Full length exon 12 contains a translation start site and is used in SPAP1 transcripts (splice forms r and s) (SEQ ID NOs:11,035-11,038). Full length exon 13 is used in SPAP1b transcripts (splice form s) (SEQ ID NO:11,037-11,038) and contains a transcription stop codon and polyadenylation signals. Exon 7 contains a translational start site and is used in IRTA4 transcripts (splice forms a-h and q) (SEQ ID NOs:11,000-11,015 and 11,032-11,033). Exons 1-6 are used in Ly1448P transcripts (splice forms i-p) (SEQ ID NOs:11,016-11,31). Exon 9 contains a translation start site for splice forms i-p. Exon 10 using the alternative splice donor is found in the Patti PCR Clone (splice form q1) (SEQ ID NOs:11,032-11,034. Exons 13 and 13GT contain the transmembrane domain. Exon 12 contains the translation start sight for splice forms r and s. These results are also shown diagrammatically in FIGS. 34 and 35. Sequences encoding each of the potential combinations may be found in Table 3.

[0615] The multiple alternate splice forms for genes and their encoded proteins include both predicted membrane (receptor) and non-membrane molecules. For example, Patti PCR Clone ORF1 encodes a secreted non-membrane bound molecule (SEQ ID NOs:11,032-11,033 and 11,055). Patti PCR Clone ORF1 contains the extracellular domains found in exons 7-9 and 10GT and novel amino acids encoded by exon AG11 (see FIG. 35, splice form q1). All of the alternatively spliced molecules identified in FIG. 34 and Table 3 and shown diagrammatically in FIG. 35 have different biological activity. By way of example, different membrane (receptor) Ly1448P molecules can have different signal transduction properties dependent on the composition of their intracellular polypeptide sequence (the “signaling” portion of the molecule) and their extracellular polypeptide sequence (the “ligand-binding” portion of the molecule). The linking of different extracellular domains to different intracellular sequences provides for receptors that yield different functional signals (e.g. proliferation, differentiation, apoptosis) in response to the same or a different ligand. Non-membrane Ly1448P molecules act to modulate signal from the membrane receptor Ly1448P molecules by acting as competitors by binding to ligand, or by binding to intracellular proteins responsible for transducing the signal from the receptor. Such examples result in both positive (e.g. proliferation/differentiation) and negative (e.g. apoptosis) affects on cells expressing these proteins. Antibodies directed to the various forms of Ly1448P, which in turn contain different epitopes, modulate the biological effect of Ly1448P in a similar manner. Probes (e.g. antibodies or oligonucleotides) directed to alternatively spliced forms of the proteins or nucleic acids are useful as diagnostics to determine which Ly1448P variant is being expressed. These probes are useful as therapeutics to antagonize the specific forms of the Ly1448P gene or protein.

TABLE 3

| | Nucleotide | Polypeptide |
|---|---|---|
| Splice Form | SEQ ID NO: | SEQ ID NO: |
| Ly1448P_a | SEQ ID NO:11,000-11,001 | SEQ ID NO:11,039 |
| Ly1448P_b | SEQ ID NO:11,002-11,003 | SEQ ID NO:11,040 |
| Ly1448P_c | SEQ ID NO:11,004-11,005 | SEQ ID NO:11,041 |
| Ly1448P_d | SEQ ID NO:11,006-11,007 | SEQ ID NO:11,042 |
| Ly1448P_e | SEQ ID NO:11,008-11,009 | SEQ ID NO:11,043 |
| Ly1448P_f | SEQ ID NO:11,010-11,011 | SEQ ID NO:11,044 |
| Ly1448P_g | SEQ ID NO:11,012-11,013 | SEQ ID NO:11,045 |
| Ly144SP_h | SEQ ID NO:11,014-11,015 | SEQ ID NO:11,046 |
| Ly1448P_i | SEQ ID NO:11,016-11,017 | SEQ ID NO:11,047 |
| Ly1448P_j | SEQ ID NO:11,018-11,019 | SEQ ID NO:11,048 |
| Ly1448P_k | SEQ ID NO:11,020-11,021 | SEQ ID NO:11,049 |
| Ly1448P_l | SEQ ID NO:11,022-11,023 | SEQ ID NO:11,050 |
| Ly1448P_m | SEQ ID NO:11,024-11,025 | SEQ ID NO:11,051 |
| Ly1448P_n | SEQ ID NO:11,026-11,027 | SEQ ID NO:11,052 |
| Ly1448P_o | SEQ ID NO:11,028-11,029 | SEQ ID NO:11,053 |
| Ly1448P_p | SEQ ID NO:11,030-11,031 | SEQ ID NO:11,054 |
| Ly1448P_qORF1 | SEQ ID NO:11,032-11,033 | SEQ ID NO:11,055 |
| Ly1448P_qORF2 | SEQ ID NO:11,032&11,034 | SEQ ID NO:11,056 |
| Ly1448P_r | SEQ ID NO:11,035-11,036 | SEQ ID NO:11,057 |
| Ly1448P_s | SEQ ID NO:11,037-11,038 | SEQ ID NO:11,058 |

### 5.16 Example 16

### Ly1448P Specific Antibodies

[0616] This example illustrates the production of recombinant Ly1448P protein in E. coli. This example further illustrates the production of polyclonal and mono-clonal anti-sera against that recombinant protein. These anti-sera are useful as diagnostics to identify tumors expressing the Ly1448P antigen. These anti-sera are useful as therapeutics for treating tumors expressing the Ly1448P antigen.

[0617] The nucleotide sequence encoding Ly1448P (nucleotides 780-1573 of SEQ ID NO:9600) were cloned into the E. coli expression vector pET 28 which had been modified to include nucleotides encoding an initiation methionine residue, a glutamine residue and a six amino acid histidine tag adjacent to transcription initiation sequences of the vector. PCR primers comprising nucleotide sequences 780-801 (sense) and 1559-1573 (antisense) of SEQ ID NO:9600 were used to amplify a nucleotide sequence encoding amino acids 2-261 of SEQ ID NO:9611 using standard techniques (Sambrook et al., supra and Ausubel et al., supra). The antisense primer also contained a XhoI restriction enzyme site to facilitate cloning. The resulting PCR product was digested with XhoI and ligated into the modified pET 28 which had been digested with Eco 721 and XhoI. The recombinant clone was used to transform BLR (DE3) pLys S and HMS 174 pLys S bacteria. Ly1448P protein was purified from recombinant bacterial cultures. Ly1448P protein was purified from cell lysates by Ni column chromatography (Qiagen), followed by anion exchange chromatography and anti-his affinity chromatography steps.

[0618] The resulting purified recombinant Ly1448P protein was injected into rabbits using the following scheme: day 0: 0.15 mg/rabbit, in CFA, (complete Freund's adjuvant) s.c., day 21:0.15 mg/rabbit, in IFA, (incomplete Freund's adjuvant) s.c., day 35:0.15 mg/rabbit, in IFA, s.c., day 42:production bleed (˜20 mL).

[0619] For ELISA analysis of antigen specificity, rabbit sera were titered against Ly1448P-coated (0.1 mg/well) 96-well microtiter plates. Samples were diluted initially at 1:100, and then serially diluted 3 fold and added to the plates in duplicate. Antigen specific binding of rabbit IgG to the plate was revealed by goat anti-rabbit IgG (H+L)-HRP conjugate, and the plates were developed with TMB substrate and read at OD450 nm on a microplate reader.

[0620] The results of the ELISA assays show that anti-Ly1448P antisera raised were able to bind strongly to immobilized recombinant Ly1448P. These results indicate that the anti-Ly1448P polyclonal antisera would be useful for both therapeutic and diagnostic purposes.

[0621] The nucleotide sequence encoding Ly1448P was also sub-cloned in to the mammalian expression vector pCEP4 (Invitrogen) as follows. The portion of SEQ ID NO:9600 encoding a portion of the Ly1448P protein was PCR amplified using a sense amplimer comprising nucleotides 777-800 of SEQ ID NO:9600 and additional nucleotides on the 5′ end which contained a HindIII restriction enzyme site and an anti-sense primer comprising nucleotides 1544-1570 of SEQ ID NO:9600 and additional nucleotides on the 3′end which contained a NotI restriction enzyme site. The PCR product was cloned into the pCR-Blunt vector (Invitrogen), and sequenced. DNA from a pCR-Blunt clone with the correct sequence was digested with HindIII and NotI to release the Ly1448P cDNA insert and subcloned into the mammalian expression vector pCEP4 (Invitrogen) which had been previously modified to contain a c-terminal FLAG epitope tag (Sigma; amino acid sequence DYKDDDDK). The resulting recombinant vector Ly1448P-FLAG/pCEP encoded a Ly1448P-FLAG fusion protein.

[0622] To determine if the recombinant expression vector Ly1448P-FLAG/pCEP would express protein, the recombinant vector was transiently transfected into HEK293 cells using Lipofectamine 2000 according to manufacturers instructions (GibcoBRL). Separately, HEK293 cells were also transfected with a control vector containing a recombinant FLAG construct and non-recombinant pCEP4 vector. Transfected cells were cultured for 48 hours and then whole cell lysates were prepared. Lysates were run on a polyacrylamide gel, and the gel was electroblotted onto nitrocellulose membrane using standard techniques (Ausubel et al.,). The electroblot was probed with a mouse anti-FLAG monoclonal antibody and binding of the mouse mAb was detected with a biotinylated rabbit anti-mouse IgG and developed with avidin-HRP and ECL reagent. Anti-FLAG antibodies recognized a Ly1448P-FLAG fusion protein of the expected molecular weight.

[0623] To determine if recombinant Ly1448P protein was present on the cell surface, HEK293 cells transiently transfected with Ly1448P-FLAG/pCEP4 were biotinylated with Biotin-7-NHS, cells were washed and whole cell lysates were generated in TRITON X-100 lysis buffer. Lysates were immunoprecipitated with anti-FLAG Sepharose and the resulting immunoprecipitated material was run on a polyacrylamide gel. The gel was electroblotted onto nitrocellulose membrane and the blot was developed with avidin-HRP and ECL reagent. The data show that a protein precipitable with anti-FLAG sepharose of the expected molecular weight for a Ly1448P-FLAG fusion protein was biotinylated in a whole cell assay indicating that Ly1448P is found on the cell surface.

[0624] Murine monoclonal antibodies specific for recombinant Ly1448P were also generated. The monoclonal antibodies were raised by immunization of mice with bacterially-expressed recombinant protein Ly1448P. Conventional antibody-secreting murine hybridomas were made by fusion of the immune spleen cells with murine myeloma cells. Ly1448P specific mAbs were identified in the supernatants of the hybridomas by ELISA using recombinant Ly1448P protein and Ly1448P-FLAG/pCEP4/HEK293 transfectants. The hybridomas were cloned and antibody secretion was stabilized. Specificity of the antibodies was confirmed by Western blot with recombinant protein and immunohistochemistry with Ly1448P/HEK transfectants. Epitope specificity was determined by ELISA with synthetic peptides deduced from the sequence of Ly1448P. These monoclonal antibodies are used therapeutically or as diagnostic reagents in hematologic malignancies.

[0625] Female Balb/c mice were immunized intraperitoneally with 10-25 micrograms of bacterially produced recombinant Ly1448P protein in adjuvant at intervals of 9 to 60 days. After five immunizations in adjuvant, 3 micrograms of recombinant protein were administered intravenously in the absence of adjuvant. Two days later immune spleen cells were harvested and hybridomas were made using conventional PEG-mediated fusion and cells were distributed among several hundred microtiter wells and cultured under HAT selection. In approximately 2 weeks a majority of wells showed growth and supernatants were harvested and assayed by ELISA for the presence of antibody reactive to recombinant Ly1448P protein. The ELISA method was performed as follows:

[0626] Nunc MaxiSorp 96-well plates (Sigma) were coated overnight at 4° C. with peptides at 10 μg/ml in sodium carbonate buffer (pH 9.6), using 100 μl/well. Ly1448P recombinant protein and an irrelevant peptide were coated at 1 μg/ml as positive and negative controls, respectively. Plates were washed with phosphate buffered saline(PBS)/Tween (Sigma) and blocked with Super Block (250 μl/well) for 1 hour at room temperature. Plates were washed after blocking, mAbs and control muring IgG were diluted in Super Block to 1 μg/ml and added to each infividual peptide/protein-coated well, 100 μl/well. Incubation time is 1 hour at room temperature. Plates were washed at the end of the incubation period with PBS/Tween. Bound antibodies were detected by adding horse radish peroxidase (HRP) conjugated goat anti-mouse IgG Fcγ (Jackson Labs, 1:5000 dilution in PBS/Tween), 150 μl/well, and incubated for 1 hour at room temperature. o-phenylenediamine (OPD) peroxidase substrate (Sigma) was made and added to the washed plates, 150 μl/well and incubated for twenty minutes at room temperature. The reaction was stopped by adding 2N HCl, 50 μl/well. Absorbances at 490 nm were measured by a plate reader from Molecular Devices.

[0627] Cells from wells identified as positive by this method were subcloned by limiting dilution two times. For each subcloning, mAb-secreting clones were identified using the recombinant Ly1448P protein ELISA assay. 4 Cloned mABs were isolated and isotyped:7A9, IgG1; 11E1, IgG1; 18B9, IgG2a;18H10, IgG1. The specific epitope recognized by these mAbs was determined using synthetic peptides encoding different segments of the Ly1448P protein. This ELISA was performed as described above except that the different peptides were used to coat the microtiter wells and each mAb was tested against each peptide separately in order to determine the location of the epitope. Three of the mAbs, 7A9, 11E1, and 18B9 bound to a peptide spaning the C-terminal 25 amino acid segment of Ly1448P as represented by amino acids 343-367 of SEQ ID NO:11,050. The 18H10 mAb bound to a 25 amino acid segment of Ly1448P which begins 31 amino acids N-terminal to the start of the C-terminal peptide and is represented by amino acids 313-336 of SEQ ID NO:11,050. Thus all mAbs were mapped to within the C-terminal 55 amino acid segment of Ly1448P.

### 5.17 Example 17

### Ly1448P is Expressed on the Cell Surface of B Cell Leukemias

[0628] This example illustrates that Ly1448P protein is detected on the surface of an acute lymphoblastic leukemia cell line SUP-B15 (ATCC Cat # CRL-1929) using polyclonal antibodies described in Example 16.

[0629] SUP-B 15 cells were cultured according to the suppliers recommendation. For FACS analysis, SUP-B 15 and human fibroblasts were collected and washed with ice cold staining buffer (PBS+1%BSA+Sodium Azide). Next, the cells were resuspended in 50 ul staining buffer and incubated for 30 minutes on ice with 75 ul of rabbit anti-Ly1448P recombinant sera diluted 1:500 (see Example 16). Pre-bleed sera was used at the same concentration as a negative control. The cells were washed 3 times with staining buffer and then incubated with a 1:100 dilution of a goat anti-rabbit Ig(H+L)-FITC reagent (Southern Biotechnology) for 30 minutes on ice. Following 3 washes, the cells were resuspended in staining buffer containing Propidium Iodide (PI), a vital stain that allows for identification of permeable cells, and analyzed by FACS.

[0630] The results of the FACS analysis show that the anti-Ly1448P polyclonal antisera was able to recognize and bind to native Ly1448P normally expressed on the surface of SUP-B15 cells. Pre-immunization (pre-bleed) antisera obtained from each rabbit used to produce anti-Ly1448P antisera did not bind to the SUP-B15 cells. Similarly, anti-Ly1448P antisera did not bind to control human fibroblast cells. These results show that the polyclonal antisera generated against Ly1448P recombinant protein binds to Ly1448P naturally expressed on tumor cells such as SUP-B 15 and these antibodies can be used for diagnosis and treatment of B-cell malignancies such as lymphomas, myelomas and B-cell leukemias such as CLL and ALL.

### 5.18 Example 18

### Novel Splice Junctions Associated With Ly1448p Splice Variants

[0631] This example illustrates the identification of 11 novel nucleotide sequences and 11 novel polypeptide sequences useful for differentiating among the multiple splice variants of Ly1448P identified in Example 15. The novel polypeptide junctions contain epitopes that are unique. Antibodies specific for each epitope are useful for determining which splice form is expressed in a tumor or tissue sample of interest. The nucleotide sequences disclosed are useful as probes for determining which splice variant is being expressed in a tumor or tissue sample of interest.

[0632] Novel junction #1 is identified in splice forms Ly1448P b, d, f, h, i, k, m, and o and shown diagramatically in FIG. 35. Novel junction #1 is generated from a splice donor in exon 9 and a splice acceptor in exon (ag) 1. Exon 10 is eliminated in this splice variant of Ly1448P. Ly1448P novel junction#140mer is a polypeptide (SEQ ID NO:11,186) containing the 20 amino acids either side of the novel protein junction and contains a novel linear epitope that is recognized by an antibody that is specific to this polypeptide junction and splice forms that encode it. Ly1448P novel junction#l 30 mer is a shorter polypeptide (SEQ ID NO:11,187) containing the 15 amino acids either side of the same novel protein junction and contains a more defined novel linear epitope that is recognized by an antibody that is specific to this junction and splice forms that encode it. The nucleotide sequence encoding these two polypeptides are identified in SEQ ID NOs: 11,178 and 11,179 respectively.

[0633] Novel junction #2 is identified in splice forms Ly1448P c, d, g, h, k, l, o, and p shown diagramatically in FIG. 35. Novel junction #2 is generated from a splice donor at the end of exon 11 and a splice acceptor in exon 13. Exon 12 is eliminated in this splice variant of Ly1448P. Ly1448P novel junction#240 mer is a polypeptide (SEQ ID NO:11,188) containing the 20 amino acids on either side of the novel protein junction and contains a novel linear epitope that is recognized by an antibody that is specific to this polypeptide junction and splice forms that encode it. Ly1448P novel junction#230 mer is a shorter polypeptide (SEQ ID NO:11,189) containing the 15 amino acids either side of the same novel protein junction and contains a more defined novel linear epitope that is recognized by an antibody that is specific to this junction and splice forms that encode it. The nucleotide sequence encoding these two polypeptides are identified in SEQ ID NOs: 11,180 and 11,181 respectively.

[0634] Novel junction #3 is identified in splice forms Ly1448P e, f, g, h, m, n, o, p, and s, shown diagramatically in FIG. 35. Novel junction #3 is generated by a failure to utilize a splice doner present in exon 13 resulting in a read through of the splice donor adjacent to the transmembrane domain and the synthesis of novel peptides encoded by the remainder of exon 13. Ly1448P novel junction#338 mer is a polypeptide (SEQ ID NO:11,190) containing the 20 amino acids to the amino side of the exon 13 splice donor and the 18 amino acids to the carboxy side of the exon 13 splice donor. This polypeptide contains a novel linear epitope that is recognized by an antibody that is specific to this polypeptide junction and splice forms that encode it. Ly1448P novel junction#330 mer is a shorter polypeptide (SEQ ID NO: 11,191) containing the 15 amino acids on either side of the same exon 13 splice donor and contains a more defined novel linear epitope that is recognized by an antibody that is specific to this junction and splice forms that encode it. The nucleotide sequence encoding these two polypeptides are identified as SEQ ID NOs: 11,182 and 11,183 respectively.

[0635] Novel junction #4 is identified in splice form Ly1448P q1 and shown diagramatically in FIG. 35. Novel junction #4 is generated from a novel splice doner in exon 10(gt) and a splice acceptor in exon (ag)11. A portion of exon 10 is eliminated and 4 novel amino acids encoded by exon (ag)11 are incorporated in this splice variant. The novel amino acids result from the use of a different reading frame for that portion exon (ag)11 contained in this splice variant. Ly1448P novel junction#424 mer is a polypeptide (SEQ ID NO:11,192) containing the 20 amino acids to the amino side of the novel protein junction and the 4 amino acids to the carboxy side of the novel protein junction. This polypeptide contains a novel linear epitope that is recognized by an antibody that is specific to this polypeptide junction and splice forms that encode it. Ly1448P novel junction#419 mer is a shorter polypeptide (SEQ ID NO: 11,193) containing the 15 amino acids to the amino side of of the novel protein junction and the 4 amino acids to the carboxy side of the novel protein junction. This polypeptide contains a novel linear epitope that is recognized by an antibody that is specific to this polypeptide junction and splice forms that encode it. The nucleotide sequence encoding these two polypeptides is disclosed in SEQ ID NOs: 11,184 and 11,185 respectively.

[0636] Novel junction #5 is identified in splice forms Ly1448P r and s shown diagramatically in FIG. 35. Novel junction #5 is generated by a transcript containing all of exon 12. Translation of the entire exon 12 generates a peptide containing 42 amino acids that are not contained in other Ly1448P variants. The nucleotide sequence encoding the polypeptide sequence unique to Ly1448P splice variants r and s and the encoded peptide are disclosed in SEQ ID NOs:11,206 and 11,209 respectively. Ly1448P #5 plus20 mer is a polypeptide (SEQ ID NO: 11,211) containing the unique Ly1448P variants r and s polypeptide and the 20 amino acids adjacent to the novel peptide encoded by exon 13. This polypeptide contains novel linear epitopes that are recognized by antibodies that are specific to this polypeptide and the unique junction encoded by Ly1448P splice forms r and s. Ly1448P #5 plus15 mer is a shorter polypeptide (SEQ ID NO: 11,210) containing the unique Ly1448P variants r and s polypeptide and the 15 amino acids adjacent to the novel peptide encoded by exon 13. This polypeptide contains more defined novel linear epitopes that are recognized by antibodies that are specific to Ly1448P variants r and s and this junction encoded by exon 13. The nucleotide sequence encoding these two polypeptides is included as SEQ ID NOs:11,208 and 11,207 respectively. Antibodies raised against the unique Ly1448P variants r and s polypeptides described Ly1448P #5 plus15 mer and Ly1448P #5 plus20 mer are specific to Ly1448P variants r and s. These antibodies are used in the diagnosis, monitoring and therapeutic treatment of hematologic malignancies in general and CLL specifically.

[0637] Antibodies that recognize these epitopes described above specifically recognize splice variants of Ly1448P that encode these epitopes and differentiate from splice variants that do not contain them. Moreover, inclusion of different and novel polypeptide junctions, as a result of differential splicing result in different secondary, tertiary structures of the molecules that contain them. Antibodies directed toward the Ly1448P molecules that occur as a result of differential splicing recognize these novel splice forms based on their unique and different secondary and tertiary structures. Antibodies that recognize the different Ly1448P molecules, based on differences in secondary and tertiary structure that result from the differential splicing, identify specific different splice variants of Ly1448P and differentiate between them. Antibodies (naked and conjugated) directed to the specific splice forms can be used to identify and target these splice forms that may be differentially expressed between different hematologic malignancies (including, but not necessarily limited to, different classes of B-cell non-Hodgkins lymphoma and CLL). Therefore, antibodies directed to one or more of the Ly1448P splice forms provide for a better diagnostic or therapeutic antibody in one clinical indication verses another.

[0638] The Ly1448P variants r and s polypeptides described contain T-cell epitopes that can be utilized as a T-cell therapeutic vaccine for the treatment of hematologic malignancies in general and CLL specifically. Polypeptide sequences (9 mers) contained within polypeptide sequence Ly1448P #5 plus20 mer that are predicted to be bound by different HLA class I subtypes by the EpiSeek HLA class I binding prediction program (Parker et al., J. Immunol. 152:163-175 (1994)) are disclosed in SEQ ID NOs:11,212-11,287.

### 5.19 Example 19

### Immunogenic Peptides Derived from the IRTA Proteins

[0639] This example illustrates the identification of peptides useful for generating cytotoxic T cell or helper T cell responses.

[0640] The amino acid sequences of each of the IRTA proteins, IRTA 1, 2a, 2b, 2c, 3, 4, and 5, were analysed using the program TSITES. This program identifies epitopes suitable for binding to T Helper cells. Peptides corresponding to each of the T Helper epitopes for each protein were identified. SEQ ID NOs corresponding to each of the peptides are presented in Table 4.

TABLE 4
IRTA T Helper Epitopes

| IRTA Protein | Peptides Identified |
|---|---|
| IRTA1 | SEQ ID NOs:11,061-11,080 |
| IRTA2a | SEQ ID NOs:11,081-11,098 |
| IRTA2b | SEQ ID NOs:11,099-11,115 |
| IRTA2c | SEQ ID NOs:11,116-11,130 |
| IRTA3 | SEQ ID NOs:11,131-11,147 |
| IRTA4 | SEQ ID NOs:11,148-11,165 |
| IRTA5 | SEQ ID NOs:11,166-11,177 |

### 5.20 Example 20

### Identification of IRTA 1, 2A, 2B, 5 and Ly1448P Splice Variants in B-Cell Neoplasias

[0641] This example illustrates that the cell surface proteins IRTA 1, 2a, 2b, 5 and Ly1448P splice variants are expressed in B-Cell neoplasias. Diagnostic and therapeutic antibodies and compounds directed at these molecules are useful for treating the neoplasias expressing these proteins.

[0642] Real Time PCR analysis was performed on a panel of cDNAs derived from CLL patient samples, lymphoma patient samples, normal hematologic cells and normal tissues. Primers were designed that were specific for each of the IRTA or Ly1448P family members. Forward and reverse IRTA1 primers are disclosed in SEQ ID NOs:11,194 and 11,195 respectively. Forward and reverse IRTA 2a primers are disclosed in SEQ ID NOs:11,196 and 11,197 respectively. Forward and reverse IRTA 2b primers are disclosed in SEQ ID NOs:11,198 and 11,199 respectively. Forward and reverse primers amplifying a portion of exon 11 contained in Ly1448P splice variants a-p and q2 are disclosed in SEQ ID NOs:11,200 and 11,201 respectively. Forward and reverse primers amplifying a portion of exon 12 contained in Ly1448P splice variants r and s are disclosed in SEQ ID NOs:11,202 and 11,203 respectively. Forward and reverse IRTA5 primers are disclosed in SEQ ID NOs:11,204 and 11,205 respectively. Forward and reverse CD20 primers are disclosed in SEQ ID NOs: 11,288 and 11,289 respectively.

[0643] Real Time PCR was performed as described by Gibson et al., Genome Research 6:995-1001 (1996) and Heid et al., Genome Research 6:986-994 (1996) using a Perkin Elmer/Applied Biosystems 7700 Prism instrument. Matching primers and fluorescent probes are designed for genes of interest, for example, by using the primer express program provided by Perkin Elmer/Applied Biosystems. Optimal concentrations of primers and probes are determined by routine experimentation, and control (e.g. β-actin) primers and probes are obtained commercially from, for example, Perkin Elmer/Applied Biosystems. Standard curves are generated using the Ct values determined in the Real Time PCR, which are related to the initial cDNA concentration used in the assay. Standard dilutions ranging from 10-10⁶ copies of the gene of interest are generally sufficient. In addition, a standard curve is generated for the control sequence. This permits the standardization of initial RNA content of a tissue sample to the amount of control for comparison purposes.

[0644] Real Time results were expressed as deltaCT (each sample normalized to actin but a gene of interest standard curve was not run to determine copy# of actin message/pg of RNA) and are therefore values are only relative to each other within a specific experiment/run. Absolute values were approximated between experiments by comparing the mean cycles taken for half maximal amplification. For all experiments/runs actin required 20-23 cycles to be amplified. By comparison the CD20 gene, a highly expressed B-cell marker, required 21 cycles to be amplified from CD19+ sorted cells (B cells), exon 12 containing Ly1448P splice variants required 26 cycles to be amplified from the same population of cells and exon 11 containing Ly1448P splice variants required 33 cycles.

[0645] The results indicate that Ly1448P splice variants r/s containing full length exon 12 were overexpressed in 59% (10/17) of CLL samples and had no detectable expression (0/5) in B-cell Non-Hodgkinslymphoma/Hodgkins samples at a level comparable or greater than that seen in CD19+ cells. Ly1448P splice variants a-p and q2 containing a portion of exon 11 were only expressed in 6% (1/17) of CLL samples but was seen in 100% (5/5) of B-cell Non-Hodgkins lymphoma/Hodgkins samples at a level comparable or greater than that seen in CD19+ cells. Thus, over-expression of exon 11 containing Ly1448P splice variants is specific to CD19+ cells and B-cell non-Hodgkins lymphomas/Hodgkins lymphoma samples, whereas overexpression of full length exon 12 containing Ly1448P splice variants is specific to CD19+ cells and a majority of CLL samples. Both types of splice variants are expressed in the single follicular lymphoma sample analysed. However, expression of exon 12 containing Ly1448P splice variants is considerably higher than the expression of exon 11 containing Ly1448P splice variant, requiring only 23-25 cycles to be amplified as compared to 29-31 cycles.

[0646] Similarly, IRTA2a/b and IRTA5 also show overexpression in CLL samples at a level comparable to that seen with exon 12 containing Ly1448P splice variants. IRTA1, in contrast, is overexpressed in lymphoma at lower levels similar to those observed for exon 11 containing Ly1448P splice variants. These RNA expression data indicate that exon 12 containing Ly1448P splice variants, IRTA2a/b and IRTA5 are overexpressed specifically in CLL at levels that are lower than seen for CD20 but at levels that result in significant protein production. Exon 12 containing Ly1448P splice variants, IRTA2a/b and IRTA5 constitute a CLL-specific diagnostic and therapeutic target. Exon 11 containing Ly1448P splice variants and IRTA1 are not expressed significantly in CLL but are overexpressed in lymphoma. Exon 11 containing Ly1448P splice variants and IRTA1 constitute a lymphoma specific diagnostic and therapeutic target.

### 6. REFERENCES

[0647] The following references, to the extent that they provide exemplary procedural or other details supplementary to those set forth herein, are specifically incorporated herein by reference.

[0648] U.S. Pat. No. 3,817,827.

[0649] U.S. Pat. No. 3,850,752.

[0650] U.S. Pat. No. 3,901,654.

[0651] U.S. Pat. No. 3,935,074.

[0652] U.S. Pat. No. 3,984,533.

[0653] U.S. Pat. No. 3,996,345.

[0654] U.S. Pat. No. 4,034,074.

[0655] U.S. Pat. No. 4,098,876.

[0656] U.S. Pat. No. 4,235,877.

[0657] U.S. Pat. No. 4,376,110.

[0658] U.S. Pat. No. 4,429,008.

[0659] U.S. Pat. No. 4,436,727.

[0660] U.S. Pat. No. 4,452,901.

[0661] U.S. Pat. No. 4,489,710.

[0662] U.S. Pat. No. 4,507,234.

[0663] U.S. Pat. No. 4,554,101.

[0664] U.S. Pat. No. 4,569,789.

[0665] U.S. Pat. No. 4,603,112.

[0666] U.S. Pat. No. 4,625,014.

[0667] U.S. Pat. No. 4,638,045.

[0668] U.S. Pat. No. 4,671,958.

[0669] U.S. Pat. No. 4,673,562.

[0670] U.S. Pat. No. 4,683,195.

[0671] U.S. Pat. No. 4,699,784.

[0672] U.S. Pat. No. 4,735,792.

[0673] U.S. Pat. No. 4,751,180.

[0674] U.S. Pat. No. 4,769,330.

[0675] U.S. Pat. No. 4,777,127.

[0676] U.S. Pat. No. 4,866,034.

[0677] U.S. Pat. No. 4,873,088.

[0678] U.S. Pat. No. 4,877,611.

[0679] U.S. Pat. No. 4,897,268.

[0680] U.S. Pat. No. 4,912,094.

[0681] U.S. Pat. No. 4,935,233.

[0682] U.S. Pat. No. 5,017,487.

[0683] U.S. Pat. No. 5,075,109.

[0684] U.S. Pat. No. 5,145,684.

[0685] U.S. Pat. No. 5,151,254.

[0686] U.S. Pat. No. 5,215,926.

[0687] U.S. Pat. No. 5,240,856.

[0688] U.S. Pat. No. 5,350,840.

[0689] U.S. Pat. No. 5,359,681.

[0690] U.S. Pat. No. 5,399,346.

[0691] U.S. Pat. No. 5,399,363.

[0692] U.S. Pat. No. 5,466,468.

[0693] U.S. Pat. No. 5,472,869.

[0694] U.S. Pat. No. 5,543,158.

[0695] U.S. Pat. No. 5,552,157.

[0696] U.S. Pat. No. 5,565,213.

[0697] U.S. Pat. No. 5,567,434.

[0698] U.S. Pat. No. 5,633,234.

[0699] U.S. Pat. No. 5,641,515.

[0700] U.S. Pat. No. 5,738,868.

[0701] U.S. Pat. No. 5,741,516.

[0702] U.S. Pat. No. 5,795,587.

[0703] U.S. Pat. No. 5,811,128.

[0704] U.S. Pat. No. 5,814,344.

[0705] U.S. Pat. No. 5,820,883.

[0706] U.S. Pat. No. 5,853,763.

[0707] U.S. Pat. No. 5,874,265.

[0708] U.S. Pat. No. 5,928,647.

[0709] U.S. Pat. No. 5,942,252.

[0710] U.S. Pat. No. 6,110,702.

[0711] European Patent No. EP 0,345,242.

[0712] Great Britain Patent No. GB 2,200,651.

[0713] Intl. Pat. Appl. Publ. No. WO 89/01973.

[0714] Intl. Pat. Appl. Publ. No. WO 89/06280.

[0715] Intl. Pat. Appl. Publ. No. WO 91/02805.

[0716] Intl. Pat. Appl. Publ. No. WO 91/16116.

[0717] Intl. Pat. Appl. Publ. No. WO 92/07243.

[0718] Intl. Pat. Appl. Publ. No. WO 94/00153.

[0719] Intl. Pat. Appl. Publ. No. WO 94/20078.

[0720] Intl. Pat. Appl. Publ. No. WO/94/23701.

[0721] Intl. Pat. Appl. Publ. No. WO 95/17210.

[0722] Intl. Pat. Appl. Publ. No. WO 96/02555.

[0723] Intl. Pat. Appl. Publ. No. WO 96/06638.

[0724] Intl. Pat. Appl. Publ. No. WO 96/30516.

[0725] Intl. Pat. Appl. Publ. No. WO 96/33739.

[0726] Intl. Pat. Appl. Publ. No. WO 97/24447.

[0727] Intl. Pat. Appl. Publ. No. WO 99/33488.

[0728] Aaroston and Todaro, J. Cell. Physiol., 72:141-48, 1968.

[0729] Adelman et al., DNA, 2:183, 1983.

[0730] Amin et al., Am. J. Pathol., 146:344-56, 1995.

[0731] Akaza et al, “Expression of antitumor response. Role of attachment and viability of bacillus Calmette-Guerin to bladder cancer cells,” Cancer, 72:558-63, 1993.

[0732] American Type Culture Collection, Catalogue of Cell Lines and Hybridomas, 7th ed., 1992.

[0733] Avrameas, “Natural autoantibodies: Self-recognition and physiological autoimmunity,” In: Natural autoantibodies: Their Physiological Role and Regulatory Significance, Shoenfeld and Isenberg (eds.), CRC Press, Boca Raton, Fla., pp. 1-14, 1993.

[0734] Azuma et al., “Correlation Between Augmented Resistance to Influenza Virus Infection and Histological Changes in Lung of Mice Treated with Trehalose-6,6′-dimycolate,” Journal of Biological Response Modifiers, 7:473-82, 1988.

[0735] Bajorin et al., Proc. Annu. Meet. Am. Soc. Clin. Oncol., 7:A967, 1988.

[0736] Baker et al., “Ability of Monophosphoryl Lipid A To Augment the Antibody Response of Young Mice,” Infection and Immunity; 56:3064-66, 1988a.

[0737] Baker et al., “Enrichment of Suppressor T Cells by Means of Binding to Monophosphoryl Lipid A,” Infection and Immunity, 58:726-31, 1990.

[0738] Baker et al., “Inactivation of Suppressor T-Cell Activity by Nontoxic Monophosphoryl Lipid A,” Infection and Immunity, 56:1076-83, 1988b.

[0739] Baker et al, “Molecular structures that influence the immunomodulatory properties of the lipid A and inner core region oligosaccharides of bacterial lipopolysaccharides,” Infection Immunity, 62:2257-69, 1994.

[0740] Baker et al., “Structural Features That Influence the Ability of Lipid A and Its Analogs To Abolish Expression of Suppressor T Cell Activity,” Infection and Immunity, 60:2694-701, 1992.

[0741] Bakker et al., “Melanocyte lineage-specific antigen gp100 is recognized by melanoma-derived tumor-infiltrating lymphocytes,” J. Exp. Med., 179:1005, 1994.

[0742] Banchereau and Steinman, Nature, 392:245-51, 1998.

[0743] Banerji et al., “Membrane lipid composition modulates the binding specificity of a monoclonal antibody against liposomes,” Biochim. Biophys. Acta., 689:319-26, 1982.

[0744] Barnd et al., “Specific tumor histocompatibility complex-unrestricted recognition of tumor-associated mucins by human cytotoxic T cells,” Proc. Natl. Acad. Sci. USA, 86:7159, 1989.

[0745] Barnoud et al, Am. J. Surg. Pathol., 24:830-36, 2000).

[0746] Bartlett and Zbar, J. Natl. Cancer Inst., 48:1709, 1972.

[0747] Bast et al., “BCG and Cancer,” N. Engl. J. Med., 290:1413-20, 1974.

[0748] Bennett et al., “Endogenous Production of Cytotoxic Factors in Serum of BCG-Primed Mice by Monophosphoryl Lipid A, a Detoxified Form of Endotoxin,” Journal of Biological Response Modifiers, 7:65-76, 1988

[0749] Berkner, Biotechniques, 6:616-27, 1988.

[0750] Berra et al., Int. J. Cancer, 36:363-66, 1985.

[0751] Berra et al., J. Neurochem., 40:777-82, 1983.

[0752] Bogoch, “Demonstration of serum precipitin to brain gangliosides,” Nature, 183:392-93, 1960.

[0753] Bouchon et al., Biochem. Internatl., 10:531-38, 1985.

[0754] Bowen-Pope et al., Proc. Nat'l Acad. Sci. USA, 81:2396-400, 1984.

[0755] Bowness et al., “Clostridium perfringens enterotoxin is a superantigen reactive with human T cell receptors V beta 6.9 and V beta 22,” J. Exp. Med., 176:893-96, 1992.

[0756] Brade et al., “An Artificial Glycoconjugate Containing the Bisphosphorylated Glucosamine Disaccharide Backbone of Lipid A Binds Lipid A Monoclonal Antibodies,” Infection and Immunity, 61:4514-17, 1993.

[0757] Brichard et al., “The tyrosinase gene codes for an antigen recognized by autologous cytolytic T lymphocytes on HLA-A2 melanomas,” J. Exp. Med., 178:489, 1993.

[0758] Brodin et al., “Mouse monoclonal antibodies with specificity for the melanoma-associated ganglioside disialyllactosyl ceramide (GD3) also react with the structural analogue disialylparagloboside,” Biochim. Biophys. Acta., 837:349-53, 1985.

[0759] Brooks et al., Clin. Exp. Immunol., 39: 477, 1980.

[0760] Brown et al., J. Biol. Chem., 255:4980-83, 1980.

[0761] Burchell et al., J. Immunol., 131:508-13, 1983.

[0762] Bystryn et al., Cancer, 61:1065, 1988.

[0763] Cahan et al., “Identification of a human neuroectodermal tumor antigen (OFA-1-2) as ganglioside GD2,” Proc. Natl. Acad. Sci. USA, 79:7629-33, 1982.

[0764] Campbell et al., “Intercellular adhesion molecule-1 expression by bladder cancer cells: functional effects,” J. Urol, 151:1385-90, 1994.

[0765] Campbell, in Monoclonal Antibody Technology, Laboratory Techniques in Biochemistry and Molecular Biology, Vol. 13, Burden and Von Knippenberg (eds.), Amsterdam, Elseview, pp. 75-83, 1984.

[0766] Campbell et al., Int. J. Cancer, 78:182-88, 1998.

[0767] Carr and Morrison, “A two-step mechanism for the interaction of Re lipopolysaccharide with erythrocyte membranes,” Rev. Infect. Dis. 6:497-508, 1984.

[0768] Carubia et al., Biochem. Biophys. Res. Commun., 120:500-04, 1984.

[0769] Chang et al., Crit. Rev. Oncol. Hematol., 22:213, 1996.

[0770] Chase et al., “Effect of Monophosphoryl Lipid A on Host Resistance to Bacterial Infection,” Infection and Immunity, 53(3):711-12, 1986.

[0771] Chen et al., “Activation of Macrophages From Aging Mice by Detoxified Lipid A,” Journal of Leukocyte Biology, 49:416-22, 1991.

[0772] Chen et al., Cancer Res., 54:1065-70, 1994.

[0773] Cheng et al., “Bacillus Calmette-Gerin interacts with the carboxyl-terminal heparin bindings domain of fibronectin: implications for BCG-mediated antitumor activity,” J. Urol., 152:1275-80, 1994.

[0774] Cheresh and Klier, “Disialoganglioside GD3 distributes preferentially into substrate associated microprocesses on human melanoma cells during their attachment to fibronectin,” J. Cell. Biol., 102:1887-97, 1986.

[0775] Cheresh et al., “A monoclonal antibody recognizes an O-acetyl sialic acid in a human melanoma-associated ganglioside,” J. Biol. Chem., 259:7453-59, 1984.

[0776] Cheresh et al., “Disialoganglioside GD3 on human melanoma serves as a relevant target antigen for monoclonal antibody-mediated tumor cytolysis,” Proc. Natl. Acad. Sci. USA, 82:5155-59, 1985.

[0777] Cheresh et al., “Disialogangliosides GD2 and GD3 are involved in the attachment of human melanoma and neuroblastoma cells to extracellular matrix proteins,” J. Cell. Biol., 102:688-96,1986.

[0778] Cheresh et al., “Localization of gangliosides GD2 and GD3 in adhesion plaques and on the surface of human melanoma cells,” Proc. Natl. Acad. Sci. USA, 81:5767-71, 1984.

[0779] Cheung et al., “Detection of neuroblastoma cells in bone marrow using GD2 specific monoclonal antibodies,” J. Clin. Oncol., 4:363-69, 1986.

[0780] Chu and Sharom, “Gangliosides inhibit T-lymphocyte proliferation by preventing the interaction of interleukin-2 with its cell surface receptors,” Immunology, 79:10-16, 1993.

[0781] Cohen, Science, 259:1691-92, 1993.

[0782] Colcher et al., Proc. Natl. Acad. Sci. USA, 78:3199, 1987.

[0783] Coligan et al., in Current Protocols in Immunology, Vol. 1, Wiley Interscience. Greene (ed.), 1998.

[0784] Coombes et al., Vaccine, 14:1429-38, 1996.

[0785] Coulie et al., “A new gene coding for a differentiation antigen recognized by autologous cytologic T lymphocytes on HLA-A2 melanomas,” J. Exp. Med., 180:35, 1994.

[0786] Deavin et al., Mol. Immunol., 33:145-55, 1996.

[0787] DeBruijn et al., Eur. J. Immunol., 21:2963-70, 1991.

[0788] Dippold et al., “Immunohistochemical localization of ganglioside GD3 in human malignant melanoma, epithelial tumors and normal tissues,” Cancer Res., 45:3699-705, 1985.

[0789] Dippold et al., “Inflammatory response at the tumor site after systemic application of monoclonal anti-GD3-ganglioside antibody to patients with malignant melanoma,” Am. Assoc. Cancer Res., 978:247, 1984.

[0790] Dippold et al., Proc. Natl. Acad. Sci. USA, 77:6115, 1980.

[0791] Dresser and Phillips, in Immunopotentiation, CIBA Foundation Symposium 18, Elsevier, Amsterdam, p.3, 1973.

[0792] Dwivedi et al., “Plasma lipid-bound sialic acid alterations in neoplastic diseases,” Experientia, 46:91-94, 1990.

[0793] Elder, “Skin Cancer,” Cancer, 75:245-56, 1995.

[0794] Elliott et al., “The D-Galactosamine Loaded Mouse and Its Enhanced Sensitivity to Lipopolysaccharide and Monophosphoryl Lipid A: A Role for Superoxide,” J. Immunol., 10:69-74, 1991.

[0795] Euhus et al., Cancer Immunol Immunother., 29:247-54, 1989.

[0796] Fawwaz et al., Statutory Invention Registration Patent No. H819, application no. 6-6-5,439, 1990.

[0797] Fischer, Handb. Lipid Res., 6:123-234, 1990.

[0798] Fisher-Hoch et al., Proc. Nat'l Acad. Sci. USA, 86:317-21, 1989.

[0799] Fitzgerald, “Syphilis vaccine: up-regulation of immunogenicity by cyclophosphamide, Ribi adjuvant, and indomethacin confers significant protection against challenge infection in rabbits,” Vaccine, 9:265-72, 1991.

[0800] Fleischmann, Park and Hassan, “Fibronectin expression on surgical specimens correlated with the response to intravesical bacillus Calmette-Guerin therapy,” J. Urol., 149:268-71, 1993.

[0801] Flexner et al., Ann. N.Y. Acad. Sci., 569:86-103, 1989.

[0802] Flexner et al., Vaccine, 8:17-21, 1990.

[0803] Foster et al., Cancer Res., 57:3325-30, 1997.

[0804] Fraizer et al., Blood, 86:4704-06, 1995.

[0805] Fredman et al., Neurol. Res., 8:123-26, 1986.

[0806] Freimer et al., “Gangliosides elicit a T-cell independent antibody response,” J Autoimmun., 6:281-89, 1993.

[0807] Freudenberg et al., “ELISA for antibodies to Lipid A, Lipopolyasscharides and other hydrophobic antigens,” Infection, 17:322-24, 1989.

[0808] Gaiger et al., Blood, 96:1334, 2000

[0809] Garg and Subbarao, “Immune Responses of Systemic and Mucosal Lymphoid Organs to Pnu-Immune Vaccine as a Function of Age and the Efficacy of Monophosphoryl Lipid A as an Adjuvant,” Infection and Immunity, 60:2329-36, 1992.

[0810] Gaugler et al., “Human gene MAGE-3 codes for an antigen recognized on a human melanoma by autologous cytolytic T lymphocytes,” J. Exp. Med., 179:921, 1994.

[0811] Gefter et al., Somatic Cell Genet., 3:231-36, 1977.

[0812] Gennaro et al., Am. J. Ind. Med., 37:275-82, 2000.

[0813] Gillard et al., “Antibodies against ganglioside GT₃ in the sera of patients with type I Diabetes mellitus,” J. Immunol., 142:3826-32, 1989.

[0814] Gillis, Nature, 268:154-56, 1977.

[0815] Glynn, McCoy and Fefer, Cancer Res., 28:434-39, 1968.

[0816] Goding, in Monoclonal Antibodies: Principles and Practice, 2d ed., Orlando, Fla., Academic Press, pp. 60-61, 65-66, 71-74, 1986.

[0817] Goff et al., Eur. J. Biochem., 130:553-57, 1983.

[0818] Grabarek et al., “Endotoxic Lipid A Interaction with Human Platelets,” The Journal of Biological Chemistry, 265:8117-21, 1990.

[0819] Graus et al., “Distribution of the ganglioside GD3 in the human nervous system detected by R24 mouse monoclonal antibody,” Brain Res., 324:190-94, 1984.

[0820] Guzman et al., Circulation, 88:2838-48, 1993a.

[0821] Guzman et al., Cir. Res., 73:1202-07, 1993b.

[0822] Hachida et al., Transplant Proc., 22:1663-70, 1990.

[0823] Hachida et al., Transplantation, 56:479-82, 1993.

[0824] Harada et al., Mol. Urol., 3:357-364, 1999.

[0825] Hardings et al., “Effects of pH and polysaccharides on peptide binding to class II major histocompatibility complex molecules,” Proc. Natl. Acad. Sci. USA, 88:2740-44, 1991.

[0826] Harel et al., Cancer Res., 50:6311, 1990.

[0827] Harlow and Lane, Antibodies: A Laboratory Manual, Cold Spring Harbor Laboratory, 1988.

[0828] Helling et al., “Construction of Immunogenic GD₃-conjugate vaccines,” Ann. N. Y Acad. Sci., 690:396-97, 1993.

[0829] Hellstrom et al., “Strong anti-tumor activities of IgG 3 antibodies to a human melanoma-associated ganglioside,” Proc. Natl. Acad. Sci. USA, 82:1499-1502, 1985.

[0830] Hirabayashi et al., “Syngeneic monoclonal antibody against melanoma antigen with interspecies cross-reactivity recognize GM₃, a prominent ganglioside of B 16 melanoma,” Biol. Chem., 260:13328-33, 1985.

[0831] Hirabayashi et al., “Reactivity of mouse monoclonal antibody M2590 against B16 melanoma cells with chemically synthesized GM3 ganglioside,” Biochim. Biophys. Acta, 875:126-28, 1986.

[0832] Hirabayashi et al., Jpn. J Cancer Res., 78:614-20, 1987.

[0833] Hoon et al., “Gangliosides from melanoma immunomodulate response of T-cells to interleukin-2,” Cell Immunol., 4:1111-19, 1988.

[0834] Horibata and Harris, Exp. Cell. Res., 60:61, 1970.

[0835] Horgan, “Total and lipid-bound sialic acid levels in sera from patients with Cancer,” Clin. Chim. Acta., 118:327-31, 1982.

[0836] Houghten et al., “Mouse monoclonal IgG3 antibody detecting GD3 ganglioside: A phase I trial in patients with malignant melanoma,” Proc. Natl. Acad. Sci. USA, 82:1242-46, 1985.

[0837] Houghton, “Cancer Antigens: Immune Recognition of Self and Altered Self,” J. Exp. Med., 180:1-4, 1994.

[0838] Hraba et al., “The Influence of Monophosphoryl Lipid A (MPL™) on Erythrocyte Autoantibody Formation,” Immunobiol., 189:448-56, 1993.

[0839] Hunter et al., Vaccine, 9:250: 1991.

[0840] Inoue et al., Blood, 88:2267-78, 1996.

[0841] Irie and Morton, “Regression of cutaneous metastatic melanoma by intralesional injection with human monoclonal antibody to ganglioside GD2,” Proc. Natl. Acad. Sci. USA, 83:8694-98, 1986.

[0842] Irie and Ravindranath, “Gangliosides as targets for monoclonal antibody therapy of cancer,” in Therapeutic monoclonal antibodies, Borrebaeck and Larrick (eds.), Stockton Press, New York, p. 75-94, 1990.

[0843] Irie et al., “Human antibody to OFA-I, a tumor antigen, produced in vitro by Epstein-Barr virus transformed human B-lymphoid cell lines,” Proc. Natl. Acad. Sci. USA, 79:5666-70, 1982.

[0844] Irie et al., “Melanoma gangliosides and human monoclonal antibody,” in Human Tumor Antigens and Specific Tumor Therapy, Metzgar and Mitchell (eds.), Alan R. Liss, Inc., New York, pp. 115-126, 1989.

[0845] Ishioka et al., “MHC interaction and T cell recognition of carbohydrates and glycopeptides,” J. Immunol., 148:2446-51, 1992.

[0846] Jackson et al., “Induction of ICAM 1 expression on bladder tumours by BCG immunotherapy,” J. Clin. Pathol., 47:309-12, 1994.

[0847] Johnson and Tomai, “A Study of the Cellular and Molecular Mediators of the Adjuvant Action of a Nontoxic Monophosphoryl Lipid A,” Adv. Exp. Med. Biol., 133:567-79, 1988.

[0848] Johnson et al., “Characterization of a nontoxic monophosphoryl lipid A,” Rev. Infect. Dis., 9:512-16, 1987.

[0849] Johnson et al., “Structural Characterization of Monophosphoryl Lipid A Homologs Obtained from Salmonella minnesota Re595 Lipopolysaccharide,” J. Biol. Chem., 265:8108-16, 1990.

[0850] Johnston and Bystryn, “Effect of Cell Wall Skeleton and Monophosphoryl Lipid A Adjuvant on the Immunogenicity of a Murine B16 Melanoma Vaccine,” Journal of the National Cancer Institute, 83:1240-45, 1991.

[0851] Jones et al., J Natl Cancer Inst, 66:249-54, 1981.

[0852] Kabat et al., “Sequences of Proteins of Immunological Interest,” 5th ed., Public Health Service, National Institutes of Health, Bethesda, Md., pp 647-669, 1991.

[0853] Kass-Eisler et al., Proc. Nat'l Acad. Sci. USA, 90:11498-502, 1993.

[0854] Katopodis et al., “Lipid-associated sialic acid test for the detection of human cancer,” Cancer Res., 42:5270-75, 1982.

[0855] Kawaguchi et al., “Characteristic mode of action of gangliosides in selective modulation of CD4 on human T lymphocytes,” Biochem. Biophys. Res. Commun., 158:1050-55, 1989.

[0856] Kawakami et al., “Cloning of the gene coding for a shared human melanoma antigen recognized by autologous T cells infiltrating into tumor,” Proc. Natl. Acad. Sci. USA, 91:3515, 1994.

[0857] Kawakami, Eliyahu, Sakaguchi, Robbins, Rivoltini, Yannelli, Appella and Rosenberg, “Identification of the immunodominant peptides of the Mart-i human melanoma antigen recognized by the majority of HLA-A2 restricted tumor infiltrating lymphocytes,” J. Exp. Med., 180:347-52, 1994.

[0858] Kensil et al., J. Am. Vet. Med. Assoc., 199:1423, 1991.

[0859] Kloppel et al., “Glycolipid-bound sialic acid in serum: Increased levels in mice and humans bearing mammary carcinomas,” Proc. Natl. Acad. Sci. USA, 74:3011-13, 1977.

[0860] Kohler and Milstein, Nature, 256:495-97, 1975.

[0861] Kohler and Milstein, Eur. J. Immunol., 6:511-19, 1976.

[0862] Kolls et al., Proc. Nat'l Acad. Sci. USA, 91:215-19, 1994.

[0863] Koscielak et al., “Glycolipid antigen and its antibody,” Immunochemistry, 5:441-55, 1968.

[0864] Kovach et al., “Lipid IV_{A} Inhibits Synthesis and Release of Tumor Necrosis Factor Induced by Lipopolysaccharide in Human Whole Blood Ex Vivo,” J. Exp. Med., 172:77-84, 1990.

[0865] Kwok and Higuchi, Nature, 339:237-38, 1989.

[0866] Kyogashima et al., Jpn. J Cancer Res., 78:1229-32, 1987.

[0867] Ladisch et al., “Shedding of GD2 ganglioside by human neuroblastoma,” Int. J. Cancer, 39:73-76, 1987.

[0868] Lamm et al., “A randomized trial of intravesical doxorubicin and immunotherapy with bacille Calmette-Guerin for transitional-cell carcinoma of the bladder,” N. Engl. J. Med., 325:1205, 1991.

[0869] Lengle et al., “Inhibition of the lectin-induced mitogenic response of thymocytes by glycolipids,” Cancer Res., 39:817-922, 1979.

[0870] Liepkalns et al., J. Neurochem., 36:1959-65, 1981.

[0871] Livingston et al., “The Serologic Response to Meth A Sarcoma Vaccines After Cyclophosphamide Treatment is Additionally Increased by Various Adjuvants,” The Journal of Immunology, 135(2): 1505-09, 1985.

[0872] Livingston et al., “Approaches to augmenting immunogenicity of the ganglioside GM₂ in mice: purified GM₂ is superior to whole cells,” J. Immunol., 138:1524-29, 1987a.

[0873] Livingston et al, “Vaccines containing purified GM₂ gangliosides elicit GM₂ antibodies in melanoma patients,” Proc. Natl. Acad. Sci. USA, 84:2911-15, 1987b.

[0874] Ljunggren et al., Nature, 346:476-80, 1990.

[0875] Lozzio and Lozzio, Blood, 45:321-34, 1975.

[0876] Madonna and Vogel, “Induction of Early-Phase Endotoxin Tolerance in Athymic (Nude) Mice, B-Cell-Deficient (xid) Mice, and Splenectomized Mice,” Infection and Immunity, 53:707-10, 1986.

[0877] Mahvi et al., Immunology and cell Biology, 75:456-60, 1997.

[0878] Maratea et al., Gene, 40:39-46, 1985.

[0879] Masihi et al., “Effects of Nontoxic Lipid A and Endotoxin on Resistance of Mice to Toxoplasma gondii,” Journal of Biological Response Modifiers, 7:535-39, 1988

[0880] Melling et al., J. Immunol., 117:1267-74, 1976.

[0881] Menssen et al., J Cancer Res. Clin. Oncol., 126:226-32, 2000.

[0882] Merrifield, J. Am. Chem. Soc., 85:2149-46, 1963.

[0883] Miller and Esselman, “Modulation of immune response by antigen reactive lymphocytes after cultivation with gangliosides,” J. Immunol., 115:839-43, 1975.

[0884] Minden, “Shared Antigens Between Animal and Human Tumors and Microorganisms,” in BCG in Cancer Immunotherapy, Lamoureux, Turcotte and Portelance (eds.); pp. 73-81, 1976.

[0885] Miotti et al., Cancer Res., 65:826, 1985.

[0886] Mitchell et al., “Active specific Immunotherapy of melanoma with allogeneic cell lysates: Rationale, results and possible mechanisms of action,” Ann. N.Y. Acad. Sci., 690:153-66, 1993.

[0887] Mitchell et al., “Active specific immunotherapy of melanoma: Phase I trial of allogeneic lysates and a novel adjuvant,” Cancer Res., 48:5883-93, 1988.

[0888] Mitchell et al., “Active-Specific Immunotherapy for Melanoma,” Journal of Clinical Oncology, 8:856-59, 1990.

[0889] Miyake et al., Cancer Res., 48:6154-60, 1988.

[0890] Mooney et al., “Bacterial superantigen signaling via HLA class II on human B lymphocytes,” Mol. Immunol., 31:675-81, 1994.

[0891] Morrison et al., “Specific ganglioside binding to receptor sites on T lymphocytes that couple to ganglioside-induced decrease of CD4 expression,” Life Sci., 45:1219-24, 1989.

[0892] Morton and Ravindranath, in Cancer Medicine, 3rd ed., Holland et al. (eds.), Lea and Febiger, Philadelphia, p.967, 1993.

[0893] Morton et al., “Polyvalent Melanoma Vaccine Improves Survival of Patients with Metastatic Melanoma,” John Wayne Cancer Institute at Saint John's Hospital and Health Center, Santa Monica, Calif., reprinted from Specific Immunotherapy of Cancer with Vaccines, Volume 690 of the Annals of the New York Academy of Sciences, 1993.

[0894] Morton et al., Ann. Surg., 216:463, 1992.

[0895] Morton et al., in Biological Function of Gangliosides, Progress in Brain Research, Vol. 101, pp 251-275, 1994.

[0896] Mosmann and Coffinan, Ann. Rev. Immunol., 7:145-73, 1989.

[0897] Munjal et al., “Combined measurement and significance of lipid-bound sialic acid and carcinoembryonic antigen in detection of human cancer,” Diagn. Immunol., 2:36-43, 1984.

[0898] Murphy et al., Proc. Natl. Acad.-Sci. USA, 83:8258-62, 1986.

[0899] Myers et al., “Monophosphoryl Lipid A Behaves as a T-Cell-Independent Type 1 Carrier for Hapten-Specific Antibody Responses in Mice,” Infection and Immunity, 63:168-74, 1995.

[0900] Naiki et al., “Properties of antisera to ganglioside GM₁, and Asialo GM₁”, J. Immunol., 113:84-93, 1974.

[0901] Nair et al., Nature Biotechnol., 16:364-69, 1998.

[0902] Natoli et al., “A murine monoclonal antibody detecting the ganglioside GM2: Characterization of cell surface reactivity,” Cancer Res., 46:4116-20, 1986.

[0903] Nonomura et al., Hinyokika Kiyo, 45:593-97, 1999.

[0904] Nudelman et al., “Characterization of a human melanoma-associated ganglioside antigen defined by a monoclonal antibody 4.2,” J. Biol. Chem., 257:12752-56, 1982.

[0905] Odean et al., “Involvement of Gamma Interferon in Antibody Enhancement by Adjuvants,” Infection and Immunity, 58:427-32, 1990.

[0906] Oji et al., Jpn. J Cancer Res., 90:194-204, 1999.

[0907] Old et al., Ann. N. Y. Acad. Sci., 101:80-106, 1962.

[0908] Pan et al., Leukemia, 14:1634, 2000.

[0909] Parker et al., J. Immunol., 152:163, 1994.

[0910] Pascal et al., “Immunochemical studies on normal and Tay-Sachs' brain gangliosides,” Proc. Soc. Exp. Biol. Med., 121:739-43, 1966.

[0911] Patek, Collins and Cohn, “Transformed cell lines susceptible or resistant to in vivo surveillance against tumorigenesis,” Nature, 276:510-11, 1978.

[0912] Patmasiriwat et al., Leukemia, 13:891-900, 1999.

[0913] Paul, Fundamental Immunology, 3rd ed., Raven Press, pp. 243-47, 1993.

[0914] Portoukalian et al., “Humoral immune response in disease-free advanced melanoma patients after vaccination with melanoma-associated gangliosides,” Int. J. Cancer, 49:893-99, 1991.

[0915] Portoukalian, “Alteration of gangliosides in plasma and red cells of human bearing melanoma tumors,” Biochem. Biophys. Res. Commun., 85:916-20, 1978.

[0916] Portoukalian, “Immunoregulatory activity of gangliosides shed by melanoma tumors,” in Gangliosides and Cancer, Oettgen (ed.), New York, VCH Publishers, pp. 207-16, 1989.

[0917] Powell and Newman (eds.), “Vaccine Design (the subunit and adjuvant approach),” Plenum Press, NY, 1995.

[0918] Prokazova et al., “Sialylated lactosylceramides. Possible inducers of non-specific immunosuppression and atherosclerotic lesions,” Eur. J. Biochem., 171:1-10, 1988.

[0919] Pukel et al., “GD3, a prominent ganglioside of human melanoma: Detection and characterization of mouse monoclonal antibody,” J. Exp. Med., 155:1133-47, 1982.

[0920] Qureshi et al., “Purification and structural determination of nontoxic lipid A obtained from the Lipopolysaccharide of Salmonella typhimurium,” J. Biol. Chem., 257:11808-15, 1985.

[0921] Rabinovich et al., “Vaccine Technologies: View to the Future,” Science, 265:1401-02, 1994.

[0922] Raines and Ross, J. Biol. Chem., 257:5154-60, 1982.

[0923] Rapport and Graf, “Immunochemical Reactions of Lipids,” Prog. Allergy, 13:273-331, 1969.

[0924] Ravindranath and Irie, in Malignant Melanoma: Biology, Diagnosis, and Therapy, Nathanson (ed.), Kluwer Acad., Boston, p. 17, 1988.

[0925] Ravindranath and Morton, “Role of gangliosides in active immunotherapy with melanoma vaccine,” Int. Rev. Immunol., 7:303, 1991.

[0926] Ravindranath et al., “Human melanoma antigen O-acetylated Ganglioside GD₃ is recognized by Cancer antennarius lectin,” J. Biol. Chem., 263:2079-86, 1988.

[0927] Ravindranath et al., “An epitope common to gangliosides O-acetyl GD3 and GD3 recognized by antibodies in melanoma patients after active specific immunotherapy,” Cancer Res., 49:3891-97, 1989.

[0928] Ravindranath et al., “Ganglioside GM₃:GD₃ Ratio as an Index for the Management of Melanoma,” Cancer, 67:3029-35, 1991.

[0929] Ravindranath et al., “Efficacy of tumor cell vaccine after incorporating monophosphoryl lipid A (MPL) in tumor cell membranes containing tumor-associated ganglioside,” Experientia, 50:648-653, 1994a.

[0930] Ravindranath et al., “Attachment of Monophosphoryl Lipid A (MPL) to Cells and Liposomes Augments Antibody Response to membrane-bound Gangliosides,” Journal of Autoimmunity, 7:803-16, 1994b.

[0931] Ravindranath et al., “Factors affecting the fine specificity and sensitivity of serum antiganglioside antibodies in ELISA,” J. Immunol. Methods, 169:257-72, 1994c.

[0932] Real et al., “Class I (unique) tumor antigens of human melanoma. Identification of a 90,000 dalton cell surface glycoprotein by autologous antibody,” J. Exp. Med., 160:1219, 1984.

[0933] Reeves et al., Cancer Res., 56:5672-77, 1996.

[0934] Reisfeld et al., Melanoma Antigens and Antibodies, p. 317, 1982.

[0935] Ribi, “Beneficial modification of the endotoxin molecule,” J. Biol. Resp. Mod., 3:1-9, 1984.

[0936] Ribi et al., “Lipid A and immunotherapy,” Rev. Infect. Dis., 6:567-72, 1984.

[0937] Ribi et al., “Modulation of humoral and cell mediated immune responses by a structurally established nontoxic lipid A,” in Immunobiology and Immunopharmacology of Bacterial Endotoxins, Szentivanji and Friedman (eds.), Plenum Press, New York, pp. 407-420, 1986.

[0938] Rickman et al., Lancet 337:998, 1991.

[0939] Rolland, Crit. Rev. Therap. Drug Carrier Systems, 15:143-98, 1998.

[0940] Rosenberg et al., Ann. Surg., 210:474, 1989.

[0941] Rosenberg et al, N. Engl. J. Med., 319:1676, 1988.

[0942] Rosenfeld et al., Science, 252:431-34, 1991.

[0943] Rothbard and Taylor, EMBO J, 7:93-100, 1988.

[0944] Rott et al., “Protection from experimental allergic encephalomyelitis by application of a bacterial superantigen,” Int. Immunol., 4:347-53, 1992.

[0945] Sato et al., “Cytoplasmic membrane-associated protein (CAP) isolated from Streptococcus pyrogenes: as a new bacterial superantigen,” Microbiol. Immunol., 38:139-47, 1994.

[0946] Sato et al., Science, 273:352, 1996.

[0947] Satoh et al., Pathol. Int., 50:458-71, 2000.

[0948] Schuster et al., “Production of antibodies against phosphocholine, phosphatidylcholine, sphingomyelin, and lipid A by injection of liposomes containing lipid A,” J. Immunol., 122:900-05, 1979.

[0949] Schwab et al., “Superantigen can reactivate bacterial cell wall-induced arthritis,” J. Immunol., 150:4151-59, 1993.

[0950] Shafer and Spitznagel, “Sensitivity of Salmonella typhimurium to polymorphonuclear granulocyte extracts: Role of lipid A,” Rev. Infect. Dis., 6:577-81, 1984.

[0951] Shepard et al., J. Clin. Immunol., 11:117-27, 1991.

[0952] Sherwin et al., “The production of antisera to gangliosides from human nervous tissue,” Canad. J. Biochem., 42:1640-48, 1964.

[0953] Shimizu et al., Int. J. Gynecol. Pathol., 19:158-63, 2000.

[0954] Shy et al., “Antibodies to GM₁ and GD_{1b} in patients with motor neuron disease with plasma cell dyscrasia,” Ann. Neurol., 25:511-18, 1989.

[0955] Siddiqui et al., Cancer Res., 44:5262-65, 1984.

[0956] Sidell et al., Cancer Immunol Immunother, 7:151-55, 1979.

[0957] Sigma Cell Culture, Volume 9, Number 2, 1993.

[0958] Skeiky et al., Infection and Immun., 67:3998-4007, 1999.

[0959] Slavin and Strober, Nature, 272:624-26, 1977.

[0960] Spinsanti et al., Leuk. Lymphoma, 38:611-19, 2000.

[0961] Stiess and Krüiger, “Mammalian Cell Culture Media—Overview and Applications,” The Source (Sigma Cell Culture Technical and Product News), 9:1-8, 1993.

[0962] Stoute et al. New Engl. J. Med., 336:86-91, 1997.

[0963] Svennerholm et al., “Tumor gangliosides as targets for active specific immunotherapy of melanoma in man,” in Biological Function of Gangliosides, Progress in Brain Research, Vol. 101, 1994.

[0964] Tai et al., “Ganglioside GM2 as a human tumor antigen (OFA-1-1),” Proc. Natl. Acad. Sci., 80:5392-96, 1983.

[0965] Takada et al., “Molecular and Structural Requirements of a Lipoteichoic Acid from Enterococcus hirae ATCC 9790 for Cytokine-Inducing, Antitumor, and Antigenic Activities,” Infection and Immunity, 63:57-65, 1995.

[0966] Takahashi et al., J. Immunol., 140:3244, 1988.

[0967] Tamaki et al., Leukemia, 13:393-99, 1999.

[0968] Tamauchi et al., Immunology, 50:605, 1983.

[0969] Tanamoto, “Dissociation of Endotoxic Activities in a Chemically Synthesized Lipid A Precursor after Acetylation,” Infection and Immunity, 63:690-92, 1995.

[0970] Tanamoto, “Free Hydroxyl Groups Are Not Required for Endotoxic Activity of Lipid A,” Infection and Immunity, 62:1705-09, 1994a.

[0971] Tanamoto, FEBS Lett., 351:325-29, 1994b.

[0972] Tautu et al., “Improved procedure for determination of serum lipid-associated sialic acid: Application for early diagnosis of colorectal cancer,” J. Natl. Cancer Inst., 80:1333-37, 1988.

[0973] Thor et al., Cancer Res., 46:3118, 1986.

[0974] Thurin et al., “Proton NMR and fast-atom bombardment mass spectrometry analysis of the melanoma-associated ganglioside 9-O-acetyl GD3,” J. Biol. Chem., 260:14556-563, 1985.

[0975] Timmerman and Levy, Ann. Rev. Med., 50:507-29, 1999.

[0976] Tomai and Johnson, “T Cell and Interferon-y Involvement in the Adjuvant Action of a Detoxified Endotoxin,” Journal of Biological Response Modifiers, 8:625-43, 1989.

[0977] Tomai et al., “The Adjuvant Properties of a Nontoxic Monophosphoryl Lipid A in Hyporesponsive and Aging Mice,” Journal of Biological Response Modifiers, 6:99-107, 1987.

[0978] Tsuchida et al., J. Dermatol., 11:129-38, 1984.

[0979] Tsuchida et al., “Gangliosides of Human Melanoma: Altered Expression in Vivo and in Vitro,” Cancer Research, 47:1278-81, 1987. Tsuchida et al., “Gangliosides as tumor markers of human melanoma: bio-chemical and immunologic assays,” in New Horizons of Tumor Immunotherapy, Torisu and Yoshida (eds.), pp. 315-325, 1989.

[0980] Tuting et al., J. Immunol., 160:1139-47, 1998.

[0981] Ulmer et al., Science, 259:1745-49, 1993.

[0982] Vadhan-Raj et al., J. Clin. Oncol., 6:1636, 1988.

[0983] van der Bruggen et al., “A gene encoding an antigen recognized by cytolytic T lymphocytes on a human melanoma,” Science, 264:716, 1991.

[0984] Verma et al., “Adjuvant Effects of Liposomes Containing Lipid A: Enhancement of Liposomal Antigen Presentation and Recruitment of Macrophages,” Infection and Immunity, 60:2438-44, 1992.

[0985] Vijayasaradhi et al., “The melanoma antigen gp75 is the human homologue of the mouse b (brown) locus gene product,” J. Exp. Med., 171:1375, 1990.

[0986] Von Bultzingslowen, Pneumologie, 53:266-75, 1999.

[0987] Vosika et al., Cancer Immunol. Immunother., 18:107, 1984.

[0988] Watson, Ralph, Sarkar and Cohn, “Leukemia viruses associated with mouse myeloma cells,” Proc. Natl. Acad. Sci. USA, 66:344, 1970.

[0989] Westrick et al., Biochim. Biophys. Acta, 750:141-48, 1983a

[0990] Westrick et al., Cancer Res., 43:5890-94, 1983b

[0991] Whisler and Yates, “Regulation of lymphocyte responses by human gangliosides. I. Characteristics of inhibitory effects and the induction of impaired activation,” J. Immuunol., 125:2106-12, 1980.

[0992] Wide et al., in Radioimmunoassay Methods, Kirkham and Hunter (eds.), E. and S. Livingstone, Edinburgh, 1970.

[0993] Wilschut, “Preparation and properties of phospholipid vesicles,” in Methodologie des liposomes appliquee a 1a pharmacologie et a 1a biologies cellulaire, Leserman and Barbet (eds.), INSERM, Paris, pp. 1-10, 1982.

[0994] Yamaguchi et al., “Cell-surface antigens of melanoma recognized by human monoclonal antibodies,” Proc. Natl. Acad. Sci. USA, 84:2416-20, 1987.

[0995] Yamamoto et al., “In vitro Augmentation of Natural Killer Cell Activity and Production of Interferon-α/β and -γ with Deoxyribonucleic Acid Fraction from Mycobacterium bovis BCG,” Jpn. J Cancer Res., 79:866-73, 1988.

[0996] Yeh et al., “A cell-surface antigen which is present in the ganglioside fraction and shared by human melanomas,” Int. J. Cancer, 29:269-75, 1982.

[0997] Yin et al., “Effect of Various Adjuvants on the Antibody Response of Mice to Pneumococcal Polysaccharides,” J. Biol. Resp. Modifiers, 8:190-205, 1989.

[0998] Yokoyama et al., “Immunochemical studies with gangliosides,” J. Immunol., 90:372-80, 1963.

[0999] Zapata et al., Protein Eng., 8:1057-62, 1995.

[1000] Zitvogel et al., Nat. Med., 4:594-600, 1998.

[1001] All of the compositions and methods disclosed and claimed herein can be made and executed without undue experimentation in light of the present disclosure. While the compositions and methods of this invention have been described in terms of preferred embodiments, it will be apparent to those of skill in the art that variations may be applied to the composition, methods and in the steps or in the sequence of steps of the method described herein without departing from the concept, spirit and scope of the invention. More specifically, it will be apparent that certain agents which are both chemically and physiologically related may be substituted for the agents described herein while the same or similar results would be achieved. All such similar substitutes and modifications apparent to those skilled in the art are deemed to be within the spirit, scope and concept of the invention as defined by the appended claims. All publications, patents, and patent applications cited herein are hereby incorporated by reference in their entirety for all purposes. Accordingly, the exclusive rights sought to be patented are as described in the claims below:

What is claimed is:

1. An isolated polynucleotide encoding a protein less than about 550 amino acids, the nucleotides comprising a sequence selected from the group consisting of:
(a) sequences provided in SEQ ID NOs:11,002-11,034;
(b) sequences having at least 90% identity to the sequences of SEQ ID NOs: 11,002-11,034.

2. An isolated polypeptide comprising an amino acid sequence selected from the group consisting of:
(a) sequences encoded by a polynucleotide of claim 1; and
(b) sequences having at least 90% identity to a sequence encoded by a polynucleotide of claim 1; and
(c) sequences provided in SEQ ID NOs:11,040-11,056, 11,061-11,177, 11,186-11,189, 11,192, 11,193 and 11,214-11,287.

3. An expression vector comprising a polynucleotide of claim 1 operably linked to an expression control sequence.

4. A host cell transformed or transfected with an expression vector according to claim 3.

5. An isolated antibody, or antigen-binding fragment thereof, that specifically binds to a polypeptide of claim 2.

6. A method for detecting the presence of a cancer in a patient, comprising the steps of:
(a) contacting a biological sample from the patient with a binding agent that binds to a polypeptide of claim 2;
(b) detecting in the sample an amount of polypeptide that binds to the binding agent; and
(c) comparing the amount of polypeptide to a predetermined cut-off value and therefrom determining the presence of a cancer in the patient.

7. A fusion protein comprising at least one polypeptide according to claim 2.

8. An oligonucleotide that hybridizes to nucleotides 1-349 of the sequence recited in SEQ ID NO:11,016 under moderately stringent conditions.

9. A method for stimulating and/or expanding T cells specific for a tumor protein, comprising contacting T cells with at least one component selected from the group consisting of:
(a) polypeptides provided in SEQ ID NOs:11,040-11,056, 11,061-11,177, 11,186-11,189, 11,192, 11,193 and 11,214-11,287;
(b) antigen-presenting cells that express a polypeptide according to claim 2,
under conditions and for a time sufficient to permit the stimulation and/or expansion of T cells.

10. An isolated T cell population, comprising T cells prepared according to the method of claim 9.

11. A composition comprising a first component selected from the group consisting of physiologically acceptable carriers and immunostimulants, and a second component selected from the group consisting of:
(a) polypeptides according to claim 2;
(b) polynucleotides according to claim 1;
(c) antibodies according to claim 5;
(d) fusion proteins according to claim 7;
(e) T cell populations according to claim 10; and
antigen presenting cells that express a polypeptide according to claim 2.

12. A method for stimulating an immune response in a patient, comprising administering to the patient a composition of claim 11.

13. A method for the treatment of a cancer in a patient, comprising administering to the patient a composition of claim 11.

14. A method for determining the presence of a cancer in a patient, comprising the steps of:
(a) contacting a biological sample from the patient with an oligonucleotide according to claim 8;
(b) detecting in the sample an amount of a polynucleotide that hybridizes to the oligonucleotide; and
(c) comparing the amount of polynucleotide that hybridizes to the oligonucleotide to a predetermined cut-off value, and therefrom determining the presence of the cancer in the patient.

15. A diagnostic kit comprising at least one oligonucleotide according to claim 8.

16. A diagnostic kit comprising at least one antibody according to claim 5 and a detection reagent, wherein the detection reagent comprises a reporter group.

17. A method for inhibiting the development of a cancer in a patient, comprising the steps of:
(a) incubating CD4⁺ and/or CD8⁺ T cells isolated from a patient with at least one component selected from the group consisting of: (i) polypeptides according to claim 2; (ii) polynucleotides according to claim 1; and (iii) antigen presenting cells that express a polypeptide of claim 2, such that T cell proliferate;
(b) administering to the patient an effective amount of the proliferated T cells,
and thereby inhibiting the development of a cancer in the patient.

The application's sequence listing, which the Patent Office published only in electronic form, follows.

SEQUENCE LISTING (11290 sequences)

SEQ ID NO: 1 - DNA, 406 bp, Homo sapiens
ggaaaacaccctgacccctctgcctggcatagaccttcagacacagagcccctgaacaagggcaccccaacacctcatcatatactgaggtcaggggctccccaggtggacaccaggactctgaccccctgcccctcatccaccccgcaggtcagcccaaggctgccccctcggtcactctgttcccgccctcctctgaggagcttcaagccaacaaggccacactggtgtgtctcataagtgacttctacccgggagccgtgacagtggcctggaaggcagatagcagccccgtcaaggcgggagtggagaccaccacaccctccaaacaaagcaacaacaagtacgcggccagcagctacctgagcctgacgcctgagcagtggaagtcccacaaaagctacag

SEQ ID NO: 2 - DNA, 330 bp, Homo sapiens
ccacacagcccctgtgctagacatcgcctggtgcccgcacaatgacaacgtcattgccagtggctccgaggactgcacagtcatggtgtgggagatcccggatgggggcctgatgctgcccctgcgggagcccgtcgtcaccctggagggccacaccaagcgtgtgggcattgtggcctggcacaccacagcccagaacgtgctgctcagtgcaggttgtgacaacgtgatcatggtgtgggacgtgggcactggggcggccatgctgacactgggcccagaggtgcacccagacacgatctacagtgtggactggagccgagatggagg

SEQ ID NO: 3 - DNA, 113 bp, Homo sapiens
  misc_feature (1)...(113): n = g, a, c or t
ggncgaggtctgtggctgctgtgggacttccactgctcaggcgtcaggctcanatagctgctggccgnntacttgttgttgctttgtttggagggtgtggtggtctccactcc

SEQ ID NO: 4 - DNA, 269 bp, Homo sapiens
ccacaggcttctaccccgaccacgtggagctgagctggtgggtgaatgggaaggaggtgcacagtggggtcagcacagacccgcagcccctcaaggagcagcccgccctcaatgactccagatactgcctgagcagccgcctgagggtctcggccaccttctggcagaacccccgcaaccacttccgctgtcaagtccagttctacgggctctcggagaatgacgagtggacccaggatagggccaaacctgtcacccagatcgtcagc

SEQ ID NO: 5 - DNA, 372 bp, Homo sapiens
  misc_feature (1)...(372): n = g, a, c or t
ccacgntgnccatcaacagggncgaagccggcgatgaggccgactattactgtcaagtgtgggatcgtaataatgaccatgtcgtcttcggcggagggaccaaactggccgtcctaggtcagcccaaggctgccccctcggtcactctgttcccgccctcctctgaggagcttcaagccaacaaggccacactggtgtgtctcataagtgacttctacccgggagccgtgacagtggcctggaaggcanatagcagccccgtcaaggcgggagtggagaccaccacaccctccaaacaaagcaacaacaagtacgcggccagcagctatctgagcctgacgcctgagcagtggaagtcccacanaactacag

SEQ ID NO: 6 - DNA, 373 bp, Homo sapiens
ctgtagcttctgtgggacttccactgctcaggcgtcaggctcagatagctgctggccgcgtacttgttgttgctttgtttggagggtgtggtggtctccactcccgccttgacggggctgctatctgccttccaggccactgtcacggctcccgggtagaagtcacttatgagacacaccagtgtggccttgttggcttgaagctcctcagaggagggcgggaacagagtgaccgagggggcagccttgggctgacctaggacggccagtttggtccctccgccgaagacgacatggtcattattacgatcccacacttgacagtaatagtcggcctcatcgccggcttcgaccctgttgatggtcagggtgg

SEQ ID NO: 7 - DNA, 484 bp, Homo sapiens
  misc_feature (1)...(484): n = g, a, c or t
ccttgcctcagatccaaggtcactcggaagaggccatgtctaccctcaatgacactcatggaggaaatgctgagagaagcattcagatgcatgacacaagagccaatgaaaggccctattgctatgcaatctggtccaaaaccactcttcaggaggatgtcttcactggtgggccccacgcaaagcttcttcatgagggaatctaagactttgggggctgtccagattatgaatgggctcttccacattgccctggggggtcttctgatgatcccagcagggatctatgcacccatctgtgtgactggggtggtaccctctctggggaggcattatgtatattatttccggatcactcctggcagcaaccggaaaaaaaactccaggaagtgtttggtcaaaggaaaaaatgataatgaattcattggnccctctttgcttgccttttctggaaagaattcttttcaaatcatgggaccatact

SEQ ID NO: 8 - DNA, 457 bp, Homo sapiens
  misc_feature (1)...(457): n = g, a, c or t
cctgggggtcagcacggaggggactggagctggagagtgactgtagagcctcaggactcaggtacttctgccctccctttggtctccctgttcttctatgtggtgacagatggcaaggaagtcctactaccagaggttggggccaaggggcagttgaagtttatcagtgggcacaccagtgaacttggtaacttccgctttacacttttgccaccaaccagtccaggggatacagcccccaagtatggcagctacaatgtcttctggacctccaacccaggactgcccctgctgacagagatggtaaagagtcgcctaaatagctggtttcagcatcggcccccaggggcctcccctgaacgctacctcggcttgccaggatccctgaagtgggaggacagangtccaagtgggcaagggcanggggcagttcttgatacagcaggtgacccttgaa

SEQ ID NO: 9 - DNA, 364 bp, Homo sapiens
  misc_feature (1)...(364): n = g, a, c or t
ggcatcatactcctatngtnatgagaagccctctgccatccagcagcgagccattctaccttgtatcaagggttatgatgtgattgctcaagcccaatctgggactgggaaaacggccacatttgccatatcgattctgcancagattgaattagatctaaaagccacccaggccttggtcctagcacccactcgagaattggctcagcagatacagaaggtggtcatggcactaggagactacatgggcgcctcctgtcacgcctgtatccggggcaccaacgtgcngtgctgacgtgcataaactgcanatggaactccccacatcatcgtgggtacccctggccgngtgtnttgaaatgcn

SEQ ID NO: 10 - DNA, 382 bp, Homo sapiens
  misc_feature (1)...(382): n = g, a, c or t
tcaggacacagcatggacatgagggtccccgctcagctcctggggctcctgctgctctggctcccaggtgccaaatgtgacatccagatgacccaatctccttccaccctgtctgcatctgtcggagatacaagttacaataagttgtcgggcctctcagaatatagatcggtggttggcctggcatcaacagaaaccaggcaaagcccctaatgtcctaatttatgcgacttccagtttagaagaaggggtctcattaagatttactggcagtggatctgggacacaattcaatttaaccatcaccagtctgcagcctgacgattcagcaacttattattgncaacattattctgcatctcttcgcagtttttggacctcg

SEQ ID NO: 11 - DNA, 292 bp, Homo sapiens
  misc_feature (1)...(292): n = g, a, c or t
ctgtggctgctgtgggacttccactgctcaggcgtcaggctcagatagctgctggccgcgtacttgttgttgctttgtttggagggtgtggtggnctccactcccgccttgacggggcttgctatctgccttccaggccactgtcacngctcccgggtagaagtcacttatgagacacaccagngtggccttgttggcttgaagctcctcanaggagggcgggaaacagaatgaccgagggggcagncttgggctgacctangacggccagtttgggtccctcccccaagac

SEQ ID NO: 12 - DNA, 465 bp, Homo sapiens
  misc_feature (1)...(465): n = g, a, c or t
ccaccctgaccatcaacagggtcgaagccggcgatgaggccgactattactgtcaagtgtgggatcgtaataatgaccatgtcgtcttcggcggagggaccaaactggccgtcctaggtcagcccaaggctgccccctcggtcactctgttcccgccctcctctgaggagcttcaagccaacaaggccacactggtgtgtctcataagtgacttctacccgggagccgtgacagtggcctggaaggcagatagcagccccgtcaaggcgggagtggagaccaccacaccctccaaacaaagcaacaacaagtacgcggccagcagctatctgagcctgacgcctgagcagtggaagtcccacagaagctacagacctgcccgggcggccaagggcgaattccagcacacttggcgccgttactatggatccnactcggtaccaacttggcgtaatcatggncata

SEQ ID NO: 13 - DNA, 206 bp, Homo sapiens
ccatggatatggctaggttaggtattcatatccaaatatctgaactctaacctaatgtggatatgattctgtagcattatattaaaagctatgatgatgcaatgcaggaaataacctttcattctcccccctagaggatcacgacaggtgcttcaatgcctgccttatctatgggacagtagtgtgattctcagtgagagtgaagg

SEQ ID NO: 14 - DNA, 378 bp, Homo sapiens
  misc_feature (1)...(378): n = g, a, c or t
ccaccctgaccatcaacagggtcgaagccggcgatgaggccgactattactgtcaagtgtgggatcgtaataatgaccatgtcgtcttcggcggagggaccaaactggccgtcctaggtcagcccaaggctgccccctcggtcactctgttcccgccctcctctgaggagcttcaagccaacaaggccacactggtgtgtctcataagtgacttctacccgggagccgtgacagtggcctggaaggcagatagcagccccgtcaaggcgggagtggagaccaccacaccctccaaacaaagcaacaacaagtacgcggcncagcagctatctgaagccttgacccctgagcaggtggaaagtcccacagaagctacag

SEQ ID NO: 15 - DNA, 170 bp, Homo sapiens
ccgccgcgggtccgtgcgcccagcgtcccagggcccaggccgagcagacaaagatcattccactcagcctgggacgatggggaggaaaaaaatccagatctcccgcatcctggaccaaaggaatcggcaggtgacgttcaccaagcggaagttcgggctgatgaagaagg

SEQ ID NO: 16 - DNA, 462 bp, Homo sapiens
  misc_feature (1)...(462): n = g, a, c or t
ccagtacacccatgaatttgatggagatgagcagttctacgtggacctggggaggaaggagactgtctggtgtttgcctgttctcagacaatttagatttgacccgcaatttgcactgacaaatatcgctgcctaaaacataacttgaacagtctgattaaacgctccaactctaccgctgctaccaatgaggntcctgaggtcacagtgttttccaagtctcccgtgacactgggtcagcccaacatcctcatctgtcttgtggacaacatctttcctcctgtggncaacatcacatggctgagcaatgggcactcagtcacagaangtgtttctgagaccagcttcctctccaagagtgatcattccttcttcaagatcagtacctcaccctcctcccttctggntgaggagagttatgactgcaaggnggancactggggactgggacaagcctcttct

SEQ ID NO: 17 - DNA, 207 bp, Homo sapiens
  misc_feature (1)...(207): n = g, a, c or t
ggcaagtcctgggctggcttacctgggcaccgtgggcatgggggaggtgtgtcacaagatttgggctctgcagagagaagattgggagttacggggatctgggatggaggtggatgcgtcagcaccctgctggggcctgtccctggactcgggccactctagggctcttgtcccgccttgagctggagggcgaggacctcngccgcn

SEQ ID NO: 18 - DNA, 294 bp, Homo sapiens
ccatgtccccagaattgaagccagagaatcgctcagatatccctgagggccggtcgttatcaaaagagatgattaggacaggggcctggcctggcttctggtaataccagtgtacattgttactcccaatattgtttcccccacaggtaatcttggccgtctttcctggggccactgacactgagggtgtctgagtcaacacataggaggtcacagagtctgtgcagtgagagaggaggccgaggaggagaacggtccaggccatggctgaggcaccaccagtgctgcttcctt

SEQ ID NO: 19 - DNA, 197 bp, Homo sapiens
  misc_feature (1)...(197): n = g, a, c or t
caagccngcgatgaggccgactattactgtcaagngtgggatcgtaataatgaccatgtcgtcttcggcggagggaccaaactggccntcctangtcancccaacgctgccccctcagncactctgttcccgccctcctctgaggagcttcaagccaacaangccacactngtgtgtctcataantgacttctaccc

SEQ ID NO: 20 - DNA, 387 bp, Homo sapiens
aaatttctcaaataactaagtcttcactaaggcagcagttcaaaactgttccaggaattaaaatatattcccatttgaggagtcttccttcacaccttcacctcctcagccttaagtatatacacacacacccaacaccctcaatacttgactagcaacaggctttaccatctttacctgacaatgaccccagggcggagatcgaaattcttcttcacaatctctaatagctctctctcactcttctgagaggtaccataatggaaaatggagatagataatggatgagaaactccaatagcataagagacctgaacaagaaccctccggcacagacctcctttaacaagggattttgccacccaacgagcagcataagcagacctg

SEQ ID NO: 21 - DNA, 290 bp, Homo sapiens
  misc_feature (1)...(290): n = g, a, c or t
aagcagcactggtggtgcctcagccatggcctggaccgttctcctcctcggcctcctctctcactgcacagactctgtgacctcctatgtgttgactcagacaccctcagtgtcagtggccccangaaagacggccaagattacctgtgggggaaacaatattgggagttacagtgtacactggtattaccaaaagccaggccaggcccctgtcctaatcatctcttttgatgacnaccggccctcanggatatctgagcgattctctgggcttcaattctgggggacat

SEQ ID NO: 22 - DNA, 148 bp, Homo sapiens
  misc_feature (1)...(148): n = g, a, c or t
ctgtagcttctgtgggacttccactgctcaggcgtcaggctcaganagctgctggccgcgtacttgttgttgctttgtttggagggtgtggtggtctccactcccgccttgacggggctgctatctgccttncangccactgtcacgg

SEQ ID NO: 23 - DNA, 265 bp, Homo sapiens
  misc_feature (1)...(265): n = g, a, c or t
ctgtagcttctgtgggacttccactgctcaggcgtcaggctcagatagctgctggccgcgtacttgttgttgctttgtttggagggtgtggnggtctccactcccgccttgacggggctgctatctgccttccaggccactgtcacggctcccgggtagaagtcacttatgagacacaccagtgtggccttgttggcttgaagctcctcacaggagggcgggaacagagtgaccgagggggcagccttgggctgacctaggacgg

SEQ ID NO: 24 - DNA, 377 bp, Homo sapiens
aggtccaccctgaccatcaacagggtcgaagccggcgatgaggccgactattactgtcaagtgtgggatcgtaataatgaccatgtcgtcttcggcggagggaccaaactggccgtcctaagtcagcccaaggctgccccctcggtcactctgttcccgccctcctctgaggagcttcaagccaacaaggccacactggtgtgtctcataagtgacttctacccgggagccgtgacagtggcctggaaggcagatagcagccccgtcaaggcgggagtggagaccaccacaccctccaaacaaagcaacaacaagtacgcggccagcagctatctgagcctgacccctgagcattggaagtcccacaaaagctacag

SEQ ID NO: 25 - DNA, 323 bp, Homo sapiens
cctgggaggaacctgctcagtctgggcctaaggaagcagcactggtggtgcctcagccatggcctggaccgttctcctcctcggcctcctctctcactgcacagactctgtgacctcctatgtgttgactcagacaccctcagtgtcagtggccccaggaaagacggccaagattacctgtgggggaaacaatattgggagtaacaatgtacactggtattaccagaagccaggccaggcccctgtcctaatcatctcttttgataacgaccggccctcagggatatctgagcgattctctggcttcaattctggggacatgg

SEQ ID NO: 26 - DNA, 433 bp, Homo sapiens
  misc_feature (1)...(433): n = g, a, c or t
ccaccctgaccatcaacagggtcgaagccggcgatgaggccgactattactgtcaagtgtgggatcgtaataatgaccatgtcgtcttcggcggagggaccaaactggccgtcctaggtcagcccaaggctgccccctcggtcactctgttcccgccctcctctgaggagcttcaagccaacaaggccacactggtgtgtctcataagtgacttctacccgggagccgtgacagtggcctggaaggcagatagcagccccgtcaaggcgggagtggagaccaccacaccctccaaacaaagcaacaacaagtacgcggccagcagctatctgannctgacgcctgagcagtggaagtcccacagaagctacagcctgggcttggcttaccttgggcacccgtggggcaatgggggaangtgtgtcacaaaaat

SEQ ID NO: 27 - DNA, 419 bp, Homo sapiens
  misc_feature (1)...(419): n = g, a, c or t
ngcggccnaggtccagaacacacatttggctggaacagcctgagggaccaaaaggccccagtatcccacagagctgaggagccaggccagaaaagtaaccccagagttcgctgtgcaggggagacacagagctctctttatctgtcaggatggcaggaggggacagggtcagggcgctgagggtcanatgtcggtgttgggggccaaggccccgagagatctcaggacaggtggtcaggtgtctaaggtaaaacagctccccgtgcagatcagggcatagtggaaaacaccctgacccctctgcctggcatagaccttcagacacagagcccctgaacaanggcaccccaacacctcatcatatactgagggcaggggctccccaggtggacaccaggactctgacccccttgcccctc

SEQ ID NO: 28 - DNA, 201 bp, Homo sapiens
  misc_feature (1)...(201): n = g, a, c or t
gctgccccctcggtcactctgttcccgccctcctctgaggagcttcaagccaacaaggccacactggtgtgtctcataagtgacttctacccgggagccgtgacagtggcctggaangcagatagcacccccntcaaggcgggagtggagaccaccacaccctncaaacaaagcaacaacaagtacccggccagcagctat

SEQ ID NO: 29 - DNA, 292 bp, Homo sapiens
ccatgtccccagaattgaagccagagaatcgctcagatatccctgagggccggtcgttatcaaaagagatgattaggacaggggcctggcctggcttctggtaataccagtgtacattgttactcccaatattgtttcccccacaggtaatcttggccgtctttcctggggccactgacactgagggtgtctgagtcaacacataggaggtcacagagtctgtgcagtgagagaggaggccgaggaggagaacggtccaggccatggctgaggcaccaccagtgctgcttcc

SEQ ID NO: 30 - DNA, 417 bp, Homo sapiens
  misc_feature (1)...(417): n = g, a, c or t
ngtccttgnctnagatccaaggtcactcggaagaggccatgtctaccctcaatgacactcatggaggaaatgctgagagaagcattcagatgcatgacacaaggtaagactgccaaaaaatcttgttcttgctctcctcattttgttatttgttttatttttangagttttgagagcaaaatgacaacacccagaaattcagtaaatgggactttcccggcagagccaatgaaaggncctattgctatgcaatctggtccaaaaccactcttcaggaggatgtcttcactggtgggccccacgcaaagcttcttcatgagggaatctaagactttgggggctgtccagattatgaatgggctcttccacattgccctggggggncttctgatgatcccancagggatntatgccccc

SEQ ID NO: 31 - DNA, 454 bp, Homo sapiens
  misc_feature (1)...(454): n = g, a, c or t
ctgtagcttttgtgggacttccactgctcaggcgtcaggctcaggtagctgctggccgcgtacttgttgttgctttgtttggagggtgtggtggtctccactcccgccttgacggggctgctatctgccttccaggccactgtcacggctcccgggtagaagtcacttatgagacacaccagtgtggccttgttggcttgaagctcctcanaggagggcgggaacagagtgaccgagggggcagccttgggctgacctgcggggtggatgaggggcagggggtcaaagtcctggtgtccacctggggagcccctgacctcagtatatgatgaggtgttggggtgcccttgttcaggggctctgtgtctgaaggtctatgccaggcagaggggtnanggtgttttcactatgccctgatttgcccgggagctgcttaccttagaccctgacancn

SEQ ID NO: 32 - DNA, 482 bp, Homo sapiens
aaatcacagcttttacctatttgttaggctatagtgttttgtaaacttctgtttctattcacatcttctccacttgagagagacaccaaaatccagtcagtatctaatctggcttttgttaacttccctcaggagcagacattcatataggtgatactgtatttcagtcctttcttttgaccccagaagccctagactgagaagataaaatggtcaggttgttggggaaaaaaaagtgccaggctctctagagaaaaatgtgaagagatgctccaggccaatgagaagaattagacaagaaatacacagatgtgccagacttctgagaagcacctgccagcaacagcttccttctttgagcttaggtgagcaggattctggggtttgggatttctagtgatgggctatggaaagggtgactgtgcctggggacaaagcgaggtcccaaggggacagcctgaactccctgctcatagtagtgg

SEQ ID NO: 33 - DNA, 383 bp, Homo sapiens
  misc_feature (1)...(383): n = g, a, c or t
ngtccaccctgaccatcaacagggncgaagccggcgatgaggccgactattactgtcaagtgtgggatcgtaataatgaccatgtcgtcttcggcggagggaccaaactggccgtcctaggtcagccccaaggctgccccctcggtcactctgttcccgccctcctctgaggagcttcaagccaacaaggccacactggtgtgtctcataagtgacttctacccgggagccgtgacagtggcctggaaggcagatagcagccccgtcaaggcgggagtggagaccaccacaccctccaaacaaancaacaacaagtacncggccagcagctatctgagcctgacgcctgagcagtggaagtnccacataagctacanacctcn

SEQ ID NO: 34 - DNA, 246 bp, Homo sapiens
aaatctttagagataccataaatcaacatttaatctttgtaacacatctgaaggaatattcttgaaatagcgtgatgatggtctttaaggattctagaaagggagtgatgagtcagaatttgccagaatgtcccagcatagtcaggagaaagagaacctctctggtcgatgtacatgttctaatcccatggagattagggcaccagactatgagatttggtaacatttgctatcaagatgaaccag

SEQ ID NO: 35 - DNA, 309 bp, Homo sapiens
  misc_feature (1)...(309): n = g, a, c or t
gcgcggtcgangtggctctccgatccccccaggcccttgccccatacacgggctccagaacacacatttggctggaacagcctgagggaccaaaaggccccagtatcccacagagctgaggagccaggccagaaaagtaaccccagagttcgctgtgcaggagagacacagagctctctttatctgtcaggatggcaggaggggacagggtcagggcactgagggtcanatgtcggtgtggggggccaaggccccgagagatctcaggacangtggncatgtgtctaangtaaaanagcttccccgtgc

SEQ ID NO: 36 - DNA, 363 bp, Homo sapiens
  misc_feature (1)...(363): n = g, a, c or t
atggacatgagggtccccgctcagctcctggggctcctgctgctctggctcccaggtgccaaatgtgacatccagatgacccaatctccttccaccctgtctgcatctgtcggagatacagttacaataagttgtcgggcctctcagaatatagatcggtggttggcctggcatcaacagaaaccaggcaaagcccctaatgtcctaatttatgcgacttccagtttagaagaaggggtctcattaagatttactggcagtggatctgggacacaattcaatttaaccatnaccaggtctgcagcctgacgattcancaacttattattgtnaacattattctgcatctnttnncagttttgg

SEQ ID NO: 37 - DNA, 416 bp, Homo sapiens
  misc_feature (1)...(416): n = g, a, c or t
ccagtacacccatgaatttgatggagatgagcagttctacgtggacctggggaggaaggagactgcctggtgtttgcctgttctcagacaatttagatttgacccgcaatttgcactgacaaacatcgctgtcctaaaacataacttgaacagtctgattaaacgctccaactctaccgctgctaccaatgaggttcctgaggtcacagtgttttccaagtctcccgtgacactgggtcagcccaacatcctcatctgtcttgtggacaacatctttcctcctgtggncaacatcacatggctgagcaatgggcactcagtcacanaangtgtttctgagaccagcttcctctccaagagtgatcattncttcttcaanatcagntaccccaccctcctcccttcttctgaggaga

SEQ ID NO: 38 - DNA, 253 bp, Homo sapiens
  misc_feature (1)...(253): n = g, a, c or t
gtctgtagcttctgtgggacttccactgctcaggcgtcaggctcagatagctgctggccgcgtacttgttgttgctttgtttggagggtgtggtggnctccactcccgccttgacggggntgctatctgncttccaggccactgtcacggctcccgggtagaagtcacttatgagacacaccagtgtggccttgttggcttgaanctcctcatangagggcgggaacagagtgaccganggggcagccttggg

SEQ ID NO: 39 - DNA, 178 bp, Homo sapiens
  misc_feature (1)...(178): n = g, a, c or t
gcccnggnaggtccaaatgtctgagacaccttcaaatgggcccagtgccagccaactgggctcctcactggcaccacgtcccagatgcccttctctgcccacaccctgcaggctgaggccagaggaggncacccctccggagatggggnatgtgngtgtgtgtgngtatgttctgcgn

SEQ ID NO: 40 - DNA, 156 bp, Homo sapiens
  misc_feature (1)...(156): n = g, a, c or t
ccaaaagaagtaagacagcttgctgaagatttcctgaaagactatattcatataaacattggtgcacttgaactgantgcaaaccacaacattcttcanantgtggatgtgtgtcatgacntanaaaaggatgaaaaacttattcgtctaatggaa

SEQ ID NO: 41 - DNA, 287 bp, Homo sapiens
  misc_feature (1)...(287): n = g, a, c or t
ccatgtccccagaattgaagccagagaatcgctcagatatccctgagggccggtcgttatcaaaagagatgattaggacaggggcctggcctggcttctggtaataccagngtacattgttactcccaatattgtttcccccacaggtaatcttggccgcctttcctggggccactgacactgagggtgtctgagtcaacacataggaggncacagagtntgtgcagtgagagaggaggccgaagaggagaacggcccangccatggctgangcnccaccagtgctg

SEQ ID NO: 42 - DNA, 272 bp, Homo sapiens
gtgctcacagtcatcaattatagaccccacaacatgcgccctgaagacagaatgttccatatcagagctgtgatcttgagagccctctccttggctttcctgctgagtctccgaggagctggggccatcaaggcggaccatgtgtcaacttatgccgcgtttgtacagacgcatagaccaacaggggagtttatgtttgaatttgatgaagatgagatgttctatgtggatctggacaagaaggagaccgtctggcatctggaggagtttgg

SEQ ID NO: 43 - DNA, 533 bp, Homo sapiens
  misc_feature (1)...(533): n = g, a, c or t
cttgcctgctgctctggcccctggtcctgtcctgttctccagcatggtgtgtctgaggctccctggaggctcctgcatggcagttctgacagtgacactgatggtgctgagctccccactggctttggctggggacaccagaccacgtttcttggagtactctacgtctgagtgtcatttcttcaatgggacggagcgggtgcggttcctggacagatacttctataaccaagaggagtacgtgcgcttcgacagcgacgtgggggagttccgggcggtgacggagctggggcggcctgatgaggagtactggaacagccagaaggacttcctggaagacaggcgggccgcggtggacacctactgcagacacaactacggggttggtgagagcttcacagtgcagcggcgagtccatcctaaggtgactgtgtatccttcaaagacccacccctgcagcaccacaacctcctggtctgttctgngagtggtttctatccaggcagcattgaatcangtggttccggaatggn

SEQ ID NO: 44 - DNA, 332 bp, Homo sapiens
tcgccctgaacgaggacctgcgctcttggaccgcggcggacatggcggctcagatcaccaagcgcaagtgggaggcggcccatgaggcggagcagttgagagcctacctggatggcacgtgcgtggagtggctccgcagatacctggagaacgggaaggagacgctgcagcgcacggacccccccaagacacatatgacccaccaccccatctctgaccatgaggccaccctgaggtgctgggccctgggcttctaccctgcggagatcacactgacctggcagcgggatggggaggaccagacccaggacacggagctcgtggagaccagg

SEQ ID NO: 45 - DNA, 391 bp, Homo sapiens
  misc_feature (1)...(391): n = g, a, c or t
ctgtngctnctgtgggacttccactgctcaggcgtcaggctcanatagctgctggccgcgtacttgttgttgctttgtttggagggtgtggtggtctccactcccgccttgacggggctgctatctgccttccaggccactgtcacggctcccgggtagaagtcacttatgagacacaccagtgtggccttgttggcttgaagctcctcagaggagggcgggaacagagtgaccgagggggcagncttgggctgacttaggacggccagtatggtccctccgccgaagacgacatggttattattacnatcccncacttgacagtaatagtcngccttcatcgccggcttctgacccttttgatggtncagggngggacctttggcccgcn

SEQ ID NO: 46 - DNA, 478 bp, Homo sapiens
  misc_feature (1)...(478): n = g, a, c or t
ccaccctgaccatcaacagggtcgaagccggcgatgaggccgactattactgtcaagtgtgggatcttaataatgaccatgtcgtcttcggcggaggaaccaaactggccgtcctaggtcagcccaaggctgccccctcggtcactctgttcccgccctcctctgaggagcttcaagccaacaaggccacactggtgtgtctcataagtgacttctacccgggagccgtgacagtggcctggaaggcagatagcagccccgtcaaggngggagtggagaccaccacaccctncaaacaaagcaacaacaagtacgcggccagcagctatctnagcctgacgcctgagcagtggaagtcccacagaanctacagacctgcccgggcggncaanggcgaattccagcacactggggggcgttactagtggatncgagctcggtaccaagcttggcgnaatcatggncatagctggtttcc

SEQ ID NO: 47 - DNA, 244 bp, Homo sapiens
  misc_feature (1)...(244): n = g, a, c or t
ccacggtnnccntcaacaggggcgaagccggcgatgaggccgactattactgtcaagtgtgggatcttaataatgaccatgtcgtcttcggcggagggaccaaactggncgtcctaggtcagcccaaggctgccccctcggtcactctgttcccgccctcctctgaggagcttcaagccaacaaggccacactggtgtgtctcataagtgacttntacccgngagccgtgacagtggcctggaa

SEQ ID NO: 48 - DNA, 343 bp, Homo sapiens
  misc_feature (1)...(343): n = g, a, c or t
cccggcaggnaaatgccactgctgnggacaaaaaactgaatgaantctattagaagcttctgaaaaatgttaaatgttaaatcctgctatggtctgatnagaanaactcaagacttagaattagatattttcttccttcgaattatgtattagattatctccctacatattttctcccagccataagtaactgagttatgctggaaaaaaaaacacanaaatcttaagatctctttttctactggtgaaattgggggtttgataataatttttagagaaaaatctanaattctctgtgtatagctggtcaacncataaaccangtaaattttgattttcttgg

SEQ ID NO: 49 - DNA, 373 bp, Homo sapiens
  misc_feature (1)...(373): n = g, a, c or t
ccaccctgaccatcaacagggtcgaagccggcgatgaggccgactattactgtcaagtgtgggatcgtaataatgaccatgtcgtcttcggcggagggaccaaactggccgtcctaggtcagcccaaggctgccccctcggtcactctgttcccgccctcctctgaggagcttcaagccaacaaggccacactggtgtgtctcataagtgacttntacccgggagccgtgacagtggcctggaaggcagatagcagccccgtcaaggcgggagtggagaccaccacaccctccaaacaaagcaacaacaagtacgcggccagcagctatctgagcctgacgcctgagcagtggaagtcccacagaagctacag

SEQ ID NO: 50 - DNA, 375 bp, Homo sapiens
ccaaaactgcgaagagatgcagaataatgttgacaataataagttgctgaatcgtcaggctgcagactggtgatggttaaattgaattgtgtcccagatccactgccagtaaatcttaatgagaccccttcttctaaactggaagtcgcataaattaggacattaggggctttgcctggtttctgttgatgccaggccaaccaccgatctatattctgagaggcccgacaacttattgtaactgtatctccgacagatgcagacagggtggaaggagattgggtcatctggatgtcacatttggcacctgggagccagagcagcaggagccccaggagctgagcggggaccctcatgtccatgctgtgtcctgac

SEQ ID NO: 51 - DNA, 347 bp, Homo sapiens
  misc_feature (1)...(347): n = g, a, c or t
ccaccctgaccatcaatagggtcgaagccggcgatgaggccgactattactgtcaagtgtgggatcgtaataatgaccatgtcgtcttcggcggagggaccaaactggccgtcctaggtcagcccaaggctgccccctcggtcactctgttcccgccctcctctgaggagcttcaagccaacaaggccacactggtgtgtctcataagtgacttctacccgggagccgtgacagtggcctggaaggnagatagcagccccgtcaaggcgggagtggagaccaccacaccctccaaacaaagcaacaacaagtaccgcgggcagcagctatctgagcctgacgcctga

SEQ ID NO: 52 - DNA, 449 bp, Homo sapiens
  misc_feature (1)...(449): n = g, a, c or t
aaaattgatcacaacnagggaaaacaaaataaaattagggggcaaagggtaggagtatggggggaggggagagcaaacctatcgaatatatcttagaattttgctcagaaatcactgctgcctctcaagtgttgcattgtccctgcctaaaccaagaaggctaaacaaagcccctcctgtttgaattcttaaggtaagaaatttctaagctaagaaaacactattgcctaaaaccaatgatagtggagctcatttacaaataggcatgcctcacacacacagtccaaaggcaagacactggctttgaaattaggctcatgatgtgattcctattatatgtacctgatttttttaggccccaggtatgtggaccagagttaatgtcatgactcttcaaagatatgatgaaaagttgccctagaaatctagagatgcatgtttatttaatt

SEQ ID NO: 53 - DNA, 199 bp, Homo sapiens
  misc_feature (1)...(199): n = g, a, c or t
ccaccctgaccatcaacagggtcgaagccggcgatggggccgactattattgtcaagtgtgggatcgtaataatgaccatgtcgtcttcggcggagggaccaaactggccgtcctaagtcagcccaaggctgccccctcggncactctgttcccgccctnctctgangagcttnaagccaacaaggncacactggtgtg

SEQ ID NO: 54 - DNA, 79 bp, Homo sapiens
  misc_feature (1)...(79): n = g, a, c or t
ctgtagcttctgtncgacttccactgctcaggcgtcaggctcanatagctgctggccgcgtacttgttgttgctttgtt

SEQ ID NO: 55 - DNA, 93 bp, Homo sapiens
  misc_feature (1)...(93): n = g, a, c or t
ctgtagcttttgtnggncttccactgctcaggcgtcaggctcaggtagctgctggccgnntacttgttgntnctttgnttggagggtgtggtg

SEQ ID NO: 56 - DNA, 426 bp, Homo sapiens
  misc_feature (1)...(426): n = g, a, c or t
gtgaaccanctaatccctctgagaaaaactccccatctacccaatactgttacagcatacaatctctgttcttgggcattttgtcagtgatgctgatctttgccttcttccaggaacttgtaatagctggcatcgttgagaatgaatggaaaagnncgtgctccanacccaaatctaacatagttctcctgtcagnagaagaaaaaaaagaacagactattgaaataaaagaagaagtggttgggctaactgaaacatcttcccaaccaaagaatgaagaagacattgaaattattccaatccaagaagaggaagaagaagaaacagagacgaactttncagaacctccccaagatcaggaatcctcaccaatagaaaatgacagctctcctnaagtgatttcttctgntttctgnntcctttttt

SEQ ID NO: 57 - DNA, 232 bp, Homo sapiens
gctaaaccaaaagaagcctccagacagccctgagatcacctaaaaagctgctaccaagacagccacgaagatcctaccaaaatgaagcgcttcctcttcctcctactcaccatcagcctcctggttatggtacagatacaaactggactctcaggacaaaacgacaccagccaaaccagcagcccctcagcatccagcagcatgagcggaggcattttccttttcttcgtgg

SEQ ID NO: 58 - DNA, 191 bp, Homo sapiens
  misc_feature (1)...(191): n = g, a, c or t
ccttgcctcagatccaanntcactcgnaagaggccatgtctaccctnaatgacactcatggaggaaatgctgagagaagcattcanatgcatgacacaaggtaagactgccaaaaatcttgttcttgctctcctcattttgttatttgttttatttttaggagttttgagagcaaaatgacaacacccaga

SEQ ID NO: 59 - DNA, 259 bp, Homo sapiens
  misc_feature (1)...(259): n = g, a, c or t
ctgtagcttctgtgggacttccactgctcaggcgtcaggctcagatagctgctggccgcgtacttgttgttgctttgtttggagggtgtggtggtctccactcccgccttgacggggctgctatctgccttncaggccactgtcacggntnccgggtagaagtcacttatgagacacaccagtgtggncttgttggcttgaagctcntnanaggagggcgggaacanagtgaccgagggggcagccttgggctgaccta

SEQ ID NO: 60 - DNA, 410 bp, Homo sapiens
cctggtcaaatgtcacctccactgggaagccctccttgatctcccaggctgttaggggcctgccccaggttcctgcagactccctgcttctctccatcacaaacctgagcagtgtggggctgtcattatcatgtgtgaggttttagtaccaggaagtggggtactaccatagcaaatacccaaaaatggggaaatggcttggggaatggaaagaattggacaatgagcacttgatagaaaaagcctagattgccctgaagaggtggtcagtagaaatatggatgttaaaggtgcccctgctgaggtcctaggaggaaatgagggacatgacattggacgtgaagatggaggtggggactgcagtgatgcatccacagatctgggagaccaggatgctgcagccatcacag

SEQ ID NO: 61 - DNA, 361 bp, Homo sapiens
  misc_feature (1)...(361): n = g, a, c or t
cttctgtgnnacttccactgctcacgcgtnaggctcagatagctgctggccgcgtacttgttgttgctttgnttggagggtgtggtggtctccacccccgccttgacggggctgctatctgccttccaggccactgtcacggctcccgggtagaagtcacttatgagacacaccagtgtggccttgttggcttgaagctcctcanaggagggcgggaacagagtgaccgagggggcagccttgggctgacctaggacggccagtttggtccctccgccgaanacgacatggtcattattacgatcccacacttgacagtaatagtcggcctcatcgccggcttcgaccctgttgatggtca

SEQ ID NO: 62 - DNA, 368 bp, Homo sapiens
  misc_feature (1)...(368): n = g, a, c or t
ctgtagcttctgtgggacttccactgctcaggcgtcaggctcagatagctgctggccgcgtacttgttgttgctttgtttggagggtgtggtggtctccactcccgccttgacggggctgctatctgccttccaggccactgtcacggctcccgggtagaagtcacttatgagacacaccagtgtggccttgttggcttgaagctcctcanaggagggcgggaacagagtgaccgagggggcanccttgggctgacctaggacggccagtttggtccctccgccgaagacgacatggtcattattacgatcccacacttnacagttnatagtcngcctcatngccggnttcgaccctgttgatggtca

SEQ ID NO: 63 - DNA, 383 bp, Homo sapiens
  misc_feature (1)...(383): n = g, a, c or t
ctgtagcttctgtgggacttccactgctcaggcgtcaggctcagatagctgctggccgcgtacttgttgttgctttgtttggagggtgtggtggtctccactcccgccttgacggggctgctatctgccttccaggccactgtcacggctcccgggtagaagtcacttatgagacacaccagtgtggccttgttggcttgaagctcctcagaggagggcgggaacagagtgaccgagggggcagccttgggctgacctangacggccagtttggtccctccgccgaagacgacatggtcattattacgatcccacacttgacagtaatagtcggcctcatcgccggcttcgaccctgttgatggtcagggtggacctcggccg

SEQ ID NO: 64 - DNA, 373 bp, Homo sapiens; identical to SEQ ID NO: 6

SEQ ID NO: 65 - DNA, 334 bp, Homo sapiens
  misc_feature (1)...(334): n = g, a, c or t
ctgtagcttctgtgggacttccactgctcgggcgtcaggctcaggtagctgctggccgcgtacttgttgttgctctgtttggagggtttggtggtctccactcccgccttgacggggctgccatctgccttccaggccactgtcacagctcccgggtagaagtcacttatgagacacaccagngtggccttnntggcttgaanctcctcanaggagggcgggaacanngtgaccnagggggcanncttgggctgacctaggacggccagtttggtccctccgccgaagacgacatggtcattattacgatccnacacttgacagtaatagtcgg

SEQ ID NO: 66 - DNA, 377 bp, Homo sapiens
  misc_feature (1)...(377): n = g, a, c or t
ctgtagcttctgtgggacttccactgctcaggcgtcaggctcagatagctgctggccgcgtacttgttgttgctttgtttggagggtgtggtggtctccactcccgccttgacggggctgctatctgccttccaggccactgtcacggctcccgggtagaagtcacttatgagacacaccagtgtggccttgttggcttgaagctcctcagaggagggcgggaacagagtgaccgagggggcagccttgggctgacctaggacggccagtttggtccctccgccgaagacgacatggtcattattacgatcccacacttgacagtaatagtcggnctcatcgtcggcttcgaccctgttgatggtcagggtggacct

SEQ ID NO: 67 - DNA, 392 bp, Homo sapiens
  misc_feature (1)...(392): n = g, a, c or t
ngtcttgcctgctgctctggcccctggtcctgtcctgttctccagcatggtgtgtctgaggctccctggaggctcctgcatggcagttctgacagtgacactgatggtgctgagctccccacttgctttgggctggggacaccagaccacgtttcttggagtactctacgtctgagtgtcatttcttcaatgggacggagcgggtgcggttcctggacagatacttctataaccaagaggagtacgtgcgcttcgacagcgacgtgggggagttccgggcggtgacngagctggggcgggctgatgaggagtactggaacagccannaaggacttcctggaanacaggcgggncgcggtggacacctactgcanacacaactacggggttgg

SEQ ID NO: 68 - DNA, 446 bp, Homo sapiens
  misc_feature (1)...(446): n = g, a, c or t
naaaaatggagagtctgaattttattagagctcacacaccatatattaacatatacaactgtgaaccacctaatccctctgagaaaaactccccatctacccaatactgntacagcatacaatctctgttcttgggcattttgtcagtgatgctgatctttgccttcttccaggaacttgtaatanctggcatcgttgacaatgaatggaaaagaacgtgctccagacccaaatctaacatagttctcctgtcagcagaagaaaaaaaagaacanactattgaaataaaagaagaagtggttgggctaactgaaacatcttcccaaccaaagaatgaagaanacattgaaattattccaatncaagaagaggaagaagaaagaaacnggagacgaactttccagaacctnccaagatcaggaatcctcaccaatagaaaatgacag

SEQ ID NO: 69 - DNA, 180 bp, Homo sapiens
  misc_feature (1)...(180): n = g, a, c or t
ctgctgccacagccagtattgccggggctccaacccagtacccacctggccgtgggggtcctcccccacctatgggccgaagaacaccccctccaggcatgatgggcccacctcccnggtttganacctcctatgggtgcccccaatgggggatcccccntggaagangactccaatggg

SEQ ID NO: 70 - DNA, 113 bp, Homo sapiens
  misc_feature (1)...(113): n = g, a, c or t
nccatgtccccagaattgaagccagagaatcgctcanatatccctgagggccggtcgttatcaaaagagatgattaggacaggggcctggcctggcttctggtaataccaacg

SEQ ID NO: 71 - DNA, 117 bp, Homo sapiens
  misc_feature (1)...(117): n = g, a, c or t
ngtaaattcctgtaataaaagggaaattgagggcagagcaatcaggctggagttgcaaggacccaggggatcacctaatgccagaagccagccatccaaaactctgtttgtcaaagg

SEQ ID NO: 72 - DNA, 247 bp, Homo sapiens
ccactgcaacagtgagtcaaactctcctcgcatgaccacaaagtatagggacaggtgtgaccccctccctgacccatccccattcaggtatgctctagcacagagccggtagccacagcgggttggtgtagaaggactggctgaagatggacactgtgtgcccatccaccgcctctctcttcttcatcttgtaatctgtcaccttccaaatgagccttccattatagcaagtaccctccagcagttt

SEQ ID NO: 73 - DNA, 373 bp, Homo sapiens; identical to SEQ ID NO: 6

SEQ ID NO: 74 - DNA, 371 bp, Homo sapiens
ggacacagcatggacatgagggtccccgctcagctcctggggctcctgctgctctggctcccaggtgccaaatgtgacatccagatgacccaatctccttccaccctgtctgcatctgccggaaatacagttacaataagttgtcgggcctctcagaatatagatcggtggttggcctggcatcaacagaaaccaggcaaagcccctaatgtcctaatttatgcgacttccagtttagaagaaggggtctcattaagatttactggcagtggatctgggacacaattcaatttaaccatcaccagtctgcagcctgacgattcagcaacttattattgtcaacattattctgcatctcttcgcagttttgg

SEQ ID NO: 75 - DNA, 293 bp, Homo sapiens
ggaagcagcactggtggtgcctcagccatggcctggaccgttctcctcctcggcctcctctctcactgcacagactctgtgacctcctatgtgttgactcagacaccctcagtgtcagtggccccaggaaaagacggccaagattacctgtgggggaaacaatattgggagtaacaatgtacactggtattaccagaagccaggccaggcccctgtcctaatcatctcttttgataacgaccggccctcagggatatctgagcgattctctggcttcaattctggggacatgg

SEQ ID NO: 76 - DNA, 209 bp, Homo sapiens
aagcagcactggtggtgcctcagccatggcctggaccgttctcctcctcggcctcctctctcactgcacaggtgatccccccagggtctcaccaacctgcccagcccaaggcttctgggtccagcgtgtccttaattctgagctcaggagggcccttcctgtggtgggcaggatgctcatgaccctggtgcaaggtgggaaggttgggg

SEQ ID NO: 77 - DNA, 396 bp, Homo sapiens
  misc_feature (1)...(396): n = g, a, c or t
ctgtagcttctgtgggacttccactgctcaggcgtcaggctcagatagctgctggccgcgtacttgttgttgctttgtttggagggtgtggtggtctccactcccgccttgacggggctgctatctgccttccaggccactgtcacggctcccgggtagaagtcacttatgagacacaccagcgtggccttgttggcttgaaactcctcanangaaggcgggaaacagaangaccgaggggcanccttgggctgactaggacggcagtttggtcctccgccaaacacatggcattattacgatccacacttgacagtaatagtcngctcatcgncggcttcaccctgtgatggtcagggtggactcggccccgacacctaagggcgaatccancac

SEQ ID NO: 78 - DNA, 202 bp, Homo sapiens
  misc_feature (1)...(202): n = g, a, c or t
cctcggatgatgaagacagtgcccaccacaatgcccacgaggcccacagacaaccccagggcgcagaccacagtctctgtgagctctgacataggggctggaatctcaggctcccagtgtttcagaagaggcttgtccagtccccagtgctccaccttgcagtcatanctctcctcanctgaagggaggagggtgaggnaac

SEQ ID NO: 79 - DNA, 356 bp, Homo sapiens
  misc_feature (1)...(356): n = g, a, c or t
ccaaaactgcgaagagatgcagaataatgttgacaataataagttgctgaatcgtcaggctgcagactggtgatggttaaattgaattgtgtcccagatccactgccagtaaatcttaatgagaccccttcttctaaactggaagtcgcataaattaggacattaggggctttgcctggtttctgttgatgccaggccaaccaccgatctatattctgagaggccccgacaacttattgtaactggtatctccgacagatgcagacagggtggaaggagattgggtcatctggatgtcacatttggcacctgggagccagagcagcaggagccccangagctgagcggggaccctc

SEQ ID NO: 80 - DNA, 149 bp, Homo sapiens
  misc_feature (1)...(149): n = g, a, c or t
ccagnacncccatgaanttgatgganatgagcacttntacgtggacctggggaggaaggagactgtctggtgtttgcctgttctcatacaatttagatttgacccgcaatttgncctgacaaacactggctgttctaaaacataacttg

SEQ ID NO: 81 - DNA, 292 bp, Homo sapiens
  misc_feature (1)...(292): n = g, a, c or t
ggaagcagcactggtggtgcctcagccatggcctggaccgttctcctcctcggcctcctctctcactgcacagattctgtgacttcctatgtgttgactcagacaccctcagtgtcagtggccccaggaaagacggccaagattacctgtgggggaaacaatattgggagtcacaatgtacactggtattaccagaagccaggccaggcccctgtcctaatcatctcttttgataacgaccggncctcanggatatctgagcgattctctggcttcaattctggggacatgg

SEQ ID NO: 82 - DNA, 284 bp, Homo sapiens
  misc_feature (1)...(284): n = g, a, c or t
aatgaaaaggccctattgctatgcaatctggtccaaaaccactcttcaggaaggatgtcttcactggtgggccccacgcaaagcttcttcatgagggaatctaagactttgggggctgtccagattatgaatgggctcttccacattgccctggggggtcttctgatgatcccagcagggatctatgcacccatctgtgtgactgtgtggtaccctctctggggaggcattatgtatattatttccggatcactcctgcancaacggaaaaaactccaggaagt

SEQ ID NO: 83 - DNA, 374 bp, Homo sapiens
cctaggcatgacaatcggaggactcgagggggatggaggactagtgatcggctggctgcttccagtcgattagagaggtgaaaaagctgaacgtgtgccagtaatcttcaaaaggcagaacatatcacctctgccccgtaaactgttctctccgagggaaaaaatggaagttatcctcacagttcactgccgtggtatttcttcttgtcccatcttttgcatgacttgccatggtacagccttgtttcaaactgttcactgtgatctgtgggtctttgagtttcagtgagtttgctgaaatgtcgaagaagtagttccaaacttcaatgttcaatgaaatttttgttcaagtttgaaatggagagagcagcttt

SEQ ID NO: 84 - DNA, 357 bp, Homo sapiens
catgagggtccccgctcagctcctggggctcctgctgctctggctcccaggtgccaaatgtgacatccagatgacccaatctccttccaccctgtctgcatctgtcggagatacagttacaataagttgtcgggcctctcagaatatagatcggtggttggcctggcatcaacagaaaccaggcaaagcccctaatgtcctaatttatgcgacttccagtttagaagaaggggtctcattaagatttactggcagtggatctgggacacaattcaatttaaccatcaccagtctgcagcctgacgattcagcaacttattattgtcaacattattctgcatctcttcgcagttttgg

SEQ ID NO: 85 - DNA, 372 bp, Homo sapiens
ccaccctgaccatcaacaggatcgaagccggcgatgaggccgactattactgtcaagtgtgggatcttaataatgaccatgtcgtcttcggcggaggaaccaaactggccgtcctaggtcagcccaaggctgccccctcggtcactctgttcccgccctcctctgaggagcttcaagccaacaaggccacactggtgtgtctcataagtgacttctacccgggagccgtgacagtggcctggaaggcagatagcagccccgtcaaggcgggagtggagaccaccacaccctccaaacaaagcaacaacaagtacgcggcagcagctatctgagcctgacgcctgagcagtggaagtcccacagaagctacag

SEQ ID NO: 86 - DNA, 111 bp, Homo sapiens
  misc_feature (1)...(111): n = g, a, c or t
cgaagtcctgggaggaacctgctcantctgggcctaangaancagcactggtggtgcctnanccatngactggaccgttctnactcctcngncttctctttcactncacan

SEQ ID NO: 87 - DNA, 357 bp, Homo sapiens
  misc_feature (1)...(357): n = g, a, c or t
ccaccctgaccatcaacagggtcgaagccggcgatgaggccgactattactgtcaagtgtgggatcttaataatgaccatgtcgtcttcggcggaggaaccaaactggccgtcctaggtcagcccaaggctgccccctcggtcactctgttcccgccctcctctgaggagcttcaagccaacaaggccacactggtgtgtctcataagtgacttctacccgggagccgtnacagtggcctggaaggcagatagcagccccgtcaaggcgggagtggagaccaccacaccctncaaacaaagcaacaacaagtacgcggccagcagctatctgagcctgacgcctgagcagtggaagt

SEQ ID NO: 88 - DNA, 308 bp, Homo sapiens
ctcagtctgggcctaaggaagcagcactggtggtgcctcagccatggcctggaccgttctcctcctcggcctcctctctcactgcacagactctgtgacctcctatgtgttgactcagacaccctcagtgtcagtggccccaggaaagacggccaagattacctgtgggggaaacaatattgggagtaacaatgtacactggtattaccagaagccaggccaggcccctgtcctaatcatctcttttgataacgaccggccctcagggatatctgagcgattctctggcttcaattctggggacatgg

SEQ ID NO: 89 - DNA, 206 bp, Homo sapiens
  misc_feature (1)...(206): n = g, a, c or t
ccaccctgaccatcaacagggtcgaagccggcgatgaggccgactattactgtcaagtgtgggatcgtaataatgaccatgtcgtcttcggcggagggaccaaactggccgtcctaggtcagcccaaggctgccccctcggnnactctgttcccgccctcctctgaggagcttcaagccaacaaggccacactggtgtgtctcata

SEQ ID NO: 90 - DNA, 373 bp, Homo sapiens
ctgtagcttctgtgggacttccactgctcaggcgtcaggctcagatagctgctggccgcgtacttgttgttgctttgtttggagggtgtggtggtctccactcccgccttgacggggctgctatctgccttccaggccactgtcacggctcccgggtagaagtcacttatgagacacaccagtgtggccttgttggcttgaagctcctcagaggagggcgggaacagagtgaccgagggggcagccttgggctgacctaggacggccagtttggtccctccgccgaagacgacatggtcattattatgatcccacacttgacagtaatagtcggcctcatccccggcttcgaccctgttgatggtcagggtgg

SEQ ID NO: 91 - DNA, 347 bp, Homo sapiens
cccgctcagctcctggggctcctgctgctctggctcccaggtgccaaatgtgacatccagatgacccaatctccttccaccctgtctgcatctgtcggagatacagttacaataagttgtcgggcctctcagaatatagatcggtggttggcctggcatcaacagaaacctggcaaagcccctaatgtcctaatttatgcgacttccagtttagaagaaggggtctcattaagatttactggcagtggatctgggacacaattcaatttaaccatcaccagtctgcagcctgacgattcagcaacttattattgtcaacattattctgcatctcttcgcagttttgg

SEQ ID NO: 92 - DNA, 421 bp, Homo sapiens
ctgtagcttctgtgggacttccactgctcaggcgtcaggctcagatagctgctggccgcgtacttgttgttgctttgtttggagggtgtggtggtctccactcccgccttgacggggctgctatctgccttccaggccactgtcacggctcccgggtagaagtcacttatgagacacaccagtgtggccttgttggcttgaagctcctcagaggagggcgggaacagagtgaccgagggggcagccttgggctgacctaggacggccagtttggtccctccgccgaagacgacatggtcattattacgatcccacacttgacagtaatagtcggcctcatcgccggcttcgaccctgttgatggtcagggtggccatgtccccagaattgaagccaggccaggcccctgtcctaatcatct

SEQ ID NO: 93 - DNA, 324 bp, Homo sapiens
  misc_feature (1)...(324): n = g, a, c or t
ctgtagcttctgtggnacttccactgctcaggcgtcaggctcagatagctgctggccgcgtacttgttgttgctttgtttggagggtgtggtggtctccactcccgccttgacggggctgctatctgccttccaggccactgtcacggctcccgggtagaagtcacttatgagacacaccanngnggccttgntggcttgaagctcctnagaggagggcgggaacagagtgaccgagggggcagccttgggctgacctaggacggccagtttggtccctncgccnaanacgacntggtcattattacngatcccacacttgaca

SEQ ID NO: 94 - DNA, 150 bp, Homo sapiens
  misc_feature (1)...(150): n = g, a, c or t
ctgtagcttctgtggnncttccactgctcangcgtcaggctcagatagctgctggccgcgtacttgttgttgctttgtttgnagggtgtgnnggtctccactcccgnnttgacggggctgctatctgccttccaggccactgtcacggct

SEQ ID NO: 95 - DNA, 167 bp, Homo sapiens
  misc_feature (1)...(167): n = g, a, c or t
ctgtagcttctgcnggacttccactgctcaggcgtcaggctcagatagctgctggccgcgtacttgttgntgctttgtttggagggtgtggtggnctccactcccgncttgacggggctgnnatctgccttccaggccactgtcacggntcccggntagaagtcact

SEQ ID NO: 96 - DNA, 307 bp, Homo sapiens
  misc_feature (1)...(307): n = g, a, c or t
ctgtagcttctgtgggncttccactgctcaggcgtcaggctcagatagctgctggccgcgtacttgttgttgctttgtttggagggtgtggtggtctccactcccgccttgacggggctgctatctgccttccangccactgtcacggctcccgggtagaagtcacttatgagacacaccagtgtggccttgttggcttgaagctcctcanagganggcggnaacagagtgaccganggggcanccttgggctgacctangacggccagttnggtccctccgccgaanacgacatggtcattattac

SEQ ID NO: 97 - DNA, 571 bp, Homo sapiens
  misc_feature (1)...(571): n = g, a, c or t
ctgtagcttctgtgggacttccactgctcaggcgtcaggctcagatagctgctggccgcgtacttgttgttgctttgtttggagggtgtggtggtctccactcccgccttgacggggctgctatctgccttccaggccactgtcacggctcccgggtagaagtcacttatgagacacaccagtgtggccttgttggcttgaagctcctcagaggagggcgggaacagagtgaccgagggggcagccttgggctgacctcaatctgggtctggatcctggctctgggtcccagctctgtgattcccgagcatcagccccgagggcactgggtccttctaaagtctcccangaggtgcctccctcagaccccttgttcccaattccccaggagatggaacccacgtaacccaagggtaaacctgttccgacaagaacccagactgagggggccagaacagaacaaggcttanagacccagtctgcgcctgtcagacacacaaagagacaaacagagagagagagacagacagacagacngacagacgaggctcagtaggtcattctatctagt

SEQ ID NO: 98 - DNA, 337 bp, Homo sapiens
  misc_feature (1)...(337): n = g, a, c or t
ctgtagcttctgtgggncttccactgctcaggcgtcaggctcagatagctgctggccgcgtacttgttgttgctttgtttggagggtgtggtggtctccactcccgccttgacggggctgctatctgccttccaggccactgtcacggctcccgggtagaagtcacttatgagacacaccagtgtggccttgttggcttgaagctcctcagaggagggcgggaacagagtgaccgagggggcagccttgggctgacctaggacggccagtttggtccctccgccgaagacgacatggtcattattacnatcccacacttnacagtaatagtcggcct

SEQ ID NO: 99 - DNA, 342 bp, Homo sapiens
  misc_feature (1)...(342): n = g, a, c or t
ccaccctgaccatcaacagggtcgaagccggcgatgaggccgactattactgtcaagtgtgggatcgtaataatgaccatgtcgtcttcggcggannaaccaaactggccgnnctaggtcagcccaannctgccccctnggtnactcatgntcnngccctcctctgaggagcttcaagccaacaaggccacactggtgtgtctcataantgacttctacccgggagccgtgacagtggcctggaaggcanatagcanccccgtcaaggcggnagtgganaccacnacancctccaaacaaagcaacaacaagtacgcggncagnagctatctgagtcctgac

SEQ ID NO: 100 - DNA, 366 bp, Homo sapiens
  misc_feature (1)...(366): n = g, a, c or t
ctgtagcttctgtgggacttccactgctcaggcgtcaggctcagatagctgctggccgcgtacttgttgttgctttgtttggagggtgtggtggtctccactcccgccttgacggggctgctatctgccttccaggccactgtcacggctcccgggtagaagtcacttatgagacacaccagtgtggccttgttggcttgaagctcctcagaggagggcgggaacagagtgaccgagggggcagccttgggctgacctaggacggccagttttggtccctccgtcgaagacnacatggtcattattacgatcccacacttgacagtaatagncggnctcatcgccggcttcnaccctgttgatggt

SEQ ID NO: 101 - DNA, 131 bp, Homo sapiens
  misc_feature (1)...(131): n = g, a, c or t
ctgtagcttctgtgggncttccactgctcangcgtcaggctcagatagctgctggccgcgtacttgttgttgctttgtttggagggtgtggnggtctccactcccgccttgacggggctgctatctgcctt

SEQ ID NO: 102 - DNA, 330 bp, Homo sapiens
  misc_feature (1)...(330): n = g, a, c or t
ctgtagcttctgtggnacttccactgctcaggcgtnaggctcagatagctgctggccgcgtacttgttgttgctttgtttggagggtgtggtggtctccactcccgccttgacggggctgctatctgccttccaggccactgtcacggctcccgggtagaagtcacttatgagacacaccagtgtggccttgttggcttgaagctcctcagaggagggcgggaacanagtgaccgagggggcanncttgngctgacctangacggccagtttggtccctccgccgaagacgacatggtcattattacgatcccacacttgacagtaatag

SEQ ID NO: 103 - DNA, 369 bp, Homo sapiens
  misc_feature (1)...(369): n = g, a, c or t
cttctgtgggacttccactgctcaggcgtnaggctcanatagctgctggccgcgtacttgttgttgctttnnttggagggtgtggtggtcnncactcccgccttgacggggctgctatctgccttccaggccactgtcacggctcccgggtagaagtcacttatgagacacaccantgtggccttgttggcttgaagctcctcanaggagggcgggaacagagtgaccgagggggcagccttgggctgacctaggacggccagtttggtccctccgccgaagacgacatggtcattattacgatcccacacttgacagtaatagtcggcctcatcgccggcttcgaccctgttgatggtcagggtggcc

SEQ ID NO: 104 - DNA, 254 bp, Homo sapiens
  misc_feature (1)...(254): n = g, a, c or t
ccaccctgaccatcaacagggtcgaagccggcgatgaggccgactattactgtcaagtgtgggatcgtaataatgaccatgtcntcttcngnggagggaccaaactggccgtcctaggtcagcccaaggctgccccctcggtcactctgttcccgccctcctctgaggagcttcaagccaacaaggccacactggtgtgtctcataagtgacttctacccgggagccgtgacagtggcctggaaggcagatagc

SEQ ID NO: 105 - DNA, 366 bp, Homo sapiens
  misc_feature (1)...(366): n = g, a, c or t
caggacacagcatggacatgagggtccccgctcagctcctggggctcctgctgctctggctcccaggtgccaaatgtgacatccagatgacccaatctccttccaccctgtctgcatctgtcggagatacagttacaataagttgncgggcctctcanaatatagatcggtggttggcctggcatcaacagaaaccaggcaaagcccctaatgtcctaatttatgcgacttccagtttagaagaaggggtctcattaagatttactggcagtggatctgggacacaattcaatttaaccatcaccagtctgcagcctgacgattcagcaacttattattgtcaacattattntgcatctcttngca

SEQ ID NO: 106 - DNA, 485 bp, Homo sapiens
  misc_feature (1)...(485): n = g, a, c or t
aaaaatggagagtctgaattttattagagctcacacaccatatattaacatatacaactgtgaaccagctaatccctctgagaaaaactccccatctacccaatactgttacagcatacaatctctgttcttgggcattttgtcagtgatgctgatctttgccttcttccaggaacttgtaatagctggcatcgttgagaatgaatggaaaagaacgtgctccagacccaaatctaacatagttctcctgtcggcagaagaaaaaaaagaacagactattgaaataaaagaagaagtggttgggctaactgaaacatcttcccaaccaaagaatgaagaagacattgaaattattccaatccaagaagaggaagaagaagaaacagagacgaactttccagaacctccccaagatcaggaatcctcaccaatagaaaatgacagctctccttaagtgatttcttctgttttctgnttcctttttt

SEQ ID NO: 107 - DNA, 373 bp, Homo sapiens
ccaccctgaccatcaacagggtcgaagccggcgatgaggccgactattactgtcaagtgtgggatcgtaattatgaccatgtcgtcttcggcggagggaccaaactggccgtcctaggtcagcccaaggctgccccctcggtcactctgttcccgccctcctctgaggagcttcaagccaacaaggccacactggtgtgtctcataagtgacttctacccgggagccgtgacagtggcctggaaggcagatagcagccccgtcaaggcgggagtggagaccaccacaccctccaaacaaagcaacaacaagtacgcggccagcagctatctgagcctgacgcctgagcagtggaagtcccacagaagctacag

SEQ ID NO: 108 - DNA, 75 bp, Homo sapiens
  misc_feature (1)...(75): n = g, a, c or t
ctgtagcttctgtgggacttccactgctcaggcgtcaggctcanatanctgctggccgcgtacttgttgttgctt

SEQ ID NO: 109 - DNA, 485 bp, Homo sapiens
  misc_feature (1)...(485): n = g, a, c or t
aaaaatggagagtctgaattttattagagctcacacaccatatattaacatatacaactgtgaaccagctaatccctctgagaaaaactccccatctacccaatactgttacagcatacaatctctgttcttgggcattttgtcagtgatgctgatctttgccttcttccaggaacttgtaatagctggcatcgttgagaatgaatggaaaagaacgtgctccagacccaaatctaacatagttctcctgtcagcagaagaaaaaaaagaacagactattgaaataaaagaagaagtggttgggctaactgaaacatcttcccaaccaaagaatgaagaagacattgaaattattccaatccaagaagaggaagaagaagaaacagagacgaactttccagaacctccccaagatcaggaatcctcaccaatagaaaatgacagctctccttaagtgatttcttctgttttctgnttcctttttt

SEQ ID NO: 110 - DNA, 561 bp, Homo sapiens
  misc_feature (1)...(561): n = g, a, c or t
aaggaagcagcactggtggtgcctcagccatggcctggaccgttctcctcctcggcctcctctctcactgcacaggtgatccccccagggtctcaccaacctgcccagcccaaggcttctgggtccagcgtgtccttaattctgagctcaggagggcccttcctgtggtgggcaggatgctcatgaccctggtgcagggtgggaggctggtggggctgaattccccccaaactgtgctcaaggacttgtgagaacctgagggactgcacctgccaagagaaagtagtgagttttcagttcgaagtctccatacaacaggacatttgtgggccactggggctacggctgattgcaggggataccctgagggtttacagactctctggattttgtctgggacagcaggacaagggatttcaaaaggaatacctttcacttggaaggcaacctctctgncatttattcttttgnttatttatttatttttttatttattcttatctttgcagactctgtgacctcctatgtgttgactcagacaccctcagtgtcagtggcccc

SEQ ID NO: 111 - DNA, 255 bp, Homo sapiens
  misc_feature (1)...(255): n = g, a, c or t
ccaccctgaccatcaacagggtcgaagccggcgatgaggccgactattactgtcaagtgtgggatcgtaataatgaccatgtcgtcttcggcggagggaccaaactggccgtcctaggtcagcccaaggctgccccctcggtcactctgttcccgccctcctctgaggagcttcaagccaacaaggccacactggtgtgtctcataagtgacttctacccggnagccgtgacagtggcctggaaggcanatagca

SEQ ID NO: 112 - DNA, 365 bp, Homo sapiens
  misc_feature (1)...(365): n = g, a, c or t
ctgtagcttctgtgggacttccactgctcangcgtcangctcagatagctgctggccgcgtacttgttgttgctttgtttggagggtgtggtggtctccactcccgccttgacggggctgctatctgccttccaggccactgtcacggctcccgggtagaagtcacttatgagacacaccagtgtggccttgttggcttgaagctcctcataggagggcggnaacagantgaccganggggcagccttgngctgacctaggacggccagtttggtccctccgccgaagacgacatggtcattattacgatcccacacttgacagtaatagtcggcctcatngccggcttcgaccctgttgatggt

SEQ ID NO: 113 - DNA, 66 bp, Homo sapiens
  misc_feature (1)...(66): n = g, a, c or t
ctgtagcttccnccggacttccactgctcangcgtcaggctcagatagctgctggccgcgtacttg

SEQ ID NO: 114 - DNA, 94 bp, Homo sapiens
  misc_feature (1)...(94): n = g, a, c or t
ctgtagcttctgtnggacttccactgctcaggcgtcaggctcagatagctgctggccgcgtacttgttattgctttgnttggagggngtggtgg

SEQ ID NO: 115 - DNA, 386 bp, Homo sapiens
  misc_feature (1)...(386): n = g, a, c or t
ctgtagcttctgtgggacttccactgctcaggcgtcaggctcagatagctgctggccgcgtacttgttgttgctttgtttggagggtgtggtggtctccactcccgccttgacggggctgctatctgccttccaggccactgtcacggctcccgggtagaagtcacttatgagacacaccagtgtggccttgttggcttgaagctcctcagaggagggcgggaacagagtgaccgagggggcagccttgggctgacctannacggccagtttggtccctccgccnaagacgacatggttcattattacgatcccacacttgacagtaatagtcggcctcatcgccggcttcnaccctgttgatggtcagggtggctgttcatgctt

SEQ ID NO: 116 - DNA, 188 bp, Homo sapiens
  misc_feature (1)...(188): n = g, a, c or t
ccaccctgaccatcaacagggtcgaagccggcgatgaggccgactattactgtcaagtgtgggatcgtaataatgaccatgtcgtcttcngcggagggaccaaactggccgtcctaggtcancccaaggctgccccctcggtcactctgttcccgccctcctctgangagcttcaanccaacaaggcc

SEQ ID NO: 117 - DNA, 308 bp, Homo sapiens
  misc_feature (1)...(308): n = g, a, c or t
ctgtagcttctgtgggncttccactgctcanncgtcaggctcagatagctgctggccgcgtacttgttgttgctttgtttggagggtgtggtggtctccactcccgccttgacggggctgctatctgccttccaggccactgtcacggctcccgggtagaagtcacttatgagacacaccantgtggccttgttggcttgaagctcctcagaggagggcgggaacanantgaccganggggcagccttgggctgacctangacggccagtttggttcctccgccnaanacgacatggtcaattattaa

SEQ ID NO: 118 - DNA, 203 bp, Homo sapiens
  misc_feature (1)...(203): n = g, a, c or t
ctgtagcttctgtgnnncttccactgctcaggcgtcaggctcagatagctgctggccgcgtacttgttgttgctttgtttggagggtgtggtggtctccactcccgccttgacggggctgctatctgccttccaggccactgtcacggctcccgggtagaagtcacttatgagacacaccagtgtggccttgntggcttgaag

SEQ ID NO: 119 - DNA, 293 bp, Homo sapiens
  misc_feature (1)...(293): n = g, a, c or t
ccaccctgaccatcaacagggtcgaagccggcgatgaggccgactattactgtcaagtgtgggatcgtaataatgaccatgtcgtcttcggcggagggaccaaactggccgtcctaggtcagcccaaggctgccccctcggtcactctgttcccgccctcctctgaggagcttcaagccaacaaggccacactggtgtgtctcataagtgactttctacccgggagccgtgacantggcctgnaaggcanatagcangnnccgtcaaggcggnagtggagaccaccacaccct

SEQ ID NO: 120 - DNA, 266 bp, Homo sapiens
  misc_feature (1)...(266): n = g, a, c or t
ctaaggaagcagcactggtggtgcctcagccatggcctggaccgttctcctcctcggcctcctctctcactgcacagactctgtgacctcctatgtgttgactcagacaccctcagtgtcagtggccccangaaagacggccaagattacctgtgggggaaacaatattgggagtaacaatgtacactggtattaccagaagccnggccangcccctgttcctaatcatctcttttgataacgaccggnnctcagggatatctgag

SEQ ID NO: 121 - DNA, 210 bp, Homo sapiens
  misc_feature (1)...(210): n = g, a, c or t
ctgtagcttctgtnggacttccactgctcaggcgtcaggctcagatagctgctggccgcgtacttgttgttactttgtttggagggtgtggtggtctccactcccgccttgacggggctgctatctgccttccaggccactgtcacggctcccgggtagaagtcacttatgagacacaccantgtggccttgttggcttgaagctcctca

SEQ ID NO: 122 - DNA, 292 bp, Homo sapiens
ccatgtccccagaattgaagccagagaatcgctcagatatccctgagggccggtcgttatcaaaagagatgattaggacaggggcctggcctggcttctggtaataccagtgtacattgttactcccaatattgtttcccccacaggtaatcttggccgtctttcctggggccactgacactgagggtgtctgagtcaacacataggaggtcacagagtctgtgcagtgagagaggaggccgaggaggagaacggtccaggccatggccgaggcaccaccagtgctgcttcc

SEQ ID NO: 123 - DNA, 474 bp, Homo sapiens
  misc_feature (1)...(474): n = g, a, c or t
ggaagcagcactggtggtgcctcagccatggcctggaccgttctcctccccggcctcctctctcactgcacagactctgtgacctcctatgtgttgactcagacaccctcagtgtcagtggccccaggaaagacggccaagattacctgtgggggaaacaatattgggagttacagtgtacactggtattaccaaaagccaggccaggcccctgtcctaatcatctcttttgataacgaccggccgcccgggcaggtccaatgaagatactccacagttgtatgtggcctgtggtaggggaccccgatcatctctgagagtcctaagacatggacttgaggtgtcagaaatggctgtttctgagctacctggtnaccccaaacgctgtctggacagtgcgtcgacacattgaagatgagtttgatgcctacatcattgtgtctttcgtgaatgccaccctagtgttgtccattg

SEQ ID NO: 124 - DNA, 200 bp, Homo sapiens
  misc_feature (1)...(200): n = g, a, c or t
ccaccctgaccatcaacagggtcgaagccggcgatgaggccgactattactgtcaagtgtgggatcgtaataatgaccatgtcgtcttcggcgganngaccaaactggccgtcctaggtcagcccaaggctgccccctcggtcactctgttcccgccctcctctgaggagcttcaagccaacaaggccacactggtgtgt

SEQ ID NO: 125 - DNA, 155 bp, Homo sapiens
  misc_feature (1)...(155): n = g, a, c or t
ctgtagcttcngccggacttccactgctcaggcgtcaggctcagatagctgctggccgcgtacttgttgttgctttgtttggagggtgtggtggtctccactcccgccttgacggggctgctatctgccttccaggccactgtcacggctcccgg

SEQ ID NO: 126 - DNA, 160 bp, Homo sapiens
  misc_feature (1)...(160): n = g, a, c or t
ccaccctgaccatcaacagggtcgaagccggcgatgaggccgactattactgtcaagtgtgggatcttaatgatgaccatgtcgtcttcggcggangaaccaaactggccgtcctaggtcagcccaaggctgccccctcggtcactctgtnnccgccctc

SEQ ID NO: 127 - DNA, 201 bp, Homo sapiens
  misc_feature (1)...(201): n = g, a, c or t
ccaccctgaccatcaacagggtcgaagccggcgatgaggccgactattactgtcaagtgtgggatcgtaataatgaccatgtcgtcttcggcgganngaccaaactggccgtcctaggtcagnccaaggctgncccctcggtcactctgttcccgccctcctntgangagcttcaagccaacaaggccacactggtgtgtc

SEQ ID NO: 128 - DNA, 198 bp, Homo sapiens
  misc_feature (1)...(198): n = g, a, c or t
ctgtagcttctgnnggncttccactgctcaggcgtcaggctcanatagctgctggccgcgtacttgttgttgctttgtttggagggtgtggtggtctccactcccgccttgacggggctgctatctgccttccaggccactgtcacggctcccgggtagaagtcactttatganacacaccantgtggccttgttggc

SEQ ID NO: 129 - DNA, 485 bp, Homo sapiens
  misc_feature (1)...(485): n = g, a, c or t
aaaaaaggaaacanaaaacagaagaaatcacttaaggagagctgtcattttctattggtgaggattcctgatcttggggaggttctggaaagttcgtctctgtttcttcttcttcctcttcttggattggaataatttcaatgtcttcttcattctttggttgggaagatgtttcagttagcccaaccacttcttcttttatttcaatagtctgttcttttttttcttctgctgacaggagaactatgttagatttgggtctggagcacgttcttttccattcattctcaacgatgccagctattacaagttcctggaagaaggcaaagatcagcatcactgacaaaatgcccaagaacagagattgtatgctgtaacagtattgggtagatggggagtttttctcagagggattagctggttcacagttgtatatgttaatatatggtgtgtgagctctaataaaattcagactctccattttt

SEQ ID NO: 130 - DNA, 77 bp, Homo sapiens
  misc_feature (1)...(77): n = g, a, c or t
ctgtagcttctgtnggacttccactgctcaggcgtcaggctcagatagctgctggccgcgtacttgttgttgctttg

SEQ ID NO: 131 - DNA, 161 bp, Homo sapiens
  misc_feature (1)...(161): n = g, a, c or t
ctgtagcttctgtnggacttccactgctcaggcgtcaggctcagatagctgctggccgcgtacttgttgttgctttgtttggagggtgtggtggtctccactcccgccttgacggggctgctatctgccttccaggccactgtcacggctcccgggtagaa

SEQ ID NO: 132 - DNA, 294 bp, Homo sapiens
  misc_feature (1)...(294): n = g, a, c or t
ccaccctgaccatcaacagggtcgaagccggcgatgaggccgactattactgtcaagtgtgggatcataataatgaccatgtcgtcttcggcggagggaccaaactggccgtcctaggtcagcccaaggctgccccctcggtcactctgttcccgccctcctctgaggagcttcaagccaacaaggccacactggtgtgtctcataagtgacttctacccgggagccgtgacantnncctggaaggcanatancagccccgtcaangcgggagtgganaccaccacaccctcca

SEQ ID NO: 133 - DNA, 298 bp, Homo sapiens
  misc_feature (1)...(298): n = g, a, c or t
ccaccctgaccatcaacagggtcnaagccggcgatgaggccgactattactgtcaagtgtgggatcgtaataatgaccatgtcgtcttcggcggagggaccaaactggccgtcctaggtcagcccaaggctgccccctcggtcactctgntcccgncctcctntgangagcttcaagccaacaaggccacactggtgtgtctcataagtgacttctacccgggagccgtgacagtggcctggaaggcantatagcagccccgtcaaggcgggagtggagaccaccacaccctccaaac

SEQ ID NO: 134 - DNA, 373 bp, Homo sapiens
  misc_feature (1)...(373): n = g, a, c or t
ctgtagcttctgtgggacttccactgttcaggcgtcaggctcagatagctgctggccgcgtacttgttgttgctttgtttggagggtgtggtggtctccactcccgccttgacggggctgctatctgccttccaggccactgtcacggctcccgggtagaagtcacttatgagacacaccagtgtggccttgttggcttgaagctcctcagaggagggcgggaacagagtgaccgagggggcagccttgggctgacctangacggccagtttggtccctccaccgaagacgacatggtcattattacgatcccacacttgacagtaatagtcggcctcatcgccggcttcgaccctgttgatggtcagggtgg

SEQ ID NO: 135 - DNA, 487 bp, Homo sapiens
  misc_feature (1)...(487): n = g, a, c or t
aaaaatggagagtctgaattttattagagctcacacaccatatattaacatatacaactgtgaaccagctaatccctctgagaaaaactccccatctacccaatactgttacagcatacaatctctgttcttgggcattttgtcagtgatgctgatctttgccttcttccaggaacttgtaatagctggcatcgttgagaatgaatggaaaagaacgtgctccagacccaaatctaacatagttctcctgtcagcagaagaaaaaaaagaacagactattgaaataaaagaagaagtggttgggctaactgaaacatcttcccaaccaaagaatgaagaagacattgaaattattccaatccaagaagaggaagaagaagaaacagagacgaactttccagaacctccccaagatcaggaatcctcacnaatagaaaatgacagctctccttaagtgatttcttctgttttctgtttttcctttttt

SEQ ID NO: 136 - DNA, 368 bp, Homo sapiens
acagcatggacatgagggtccccgctcagctcctggggctcctgctgctctggctcccaggtgccaaatgtgacatccagatgacccaatctccttccaccctgtctgcatctgtcggagatacagttacaataagttgtcgggcctctcagaatatagatcggtggttggcctggcatcaacagaaaccaggcaaagcccctaatgtcctaatttatgcgacttccagtttagaagaaggggtctcattaagatttactggcagtggatctgggacacaattcaatttaaccatcaccagtctgcagcctgacgattcagcaacttattattgtgcaacattattctgcatctcttcgcagttttgg

SEQ ID NO: 137 - DNA, 59 bp, Homo sapiens
  misc_feature (1)...(59): n = g, a, c or t
ctgtagcttctgtgggncttccactgctcgggcgtcaggctcaggtagctgctggccgc

SEQ ID NO: 138 - DNA, 357 bp, Homo sapiens
  misc_feature (1)...(357): n = g, a, c or t
ccaccctgaccatcaacagggtcgaagccggcgatgaggccgactattactgtcaagtgtgggatcgtaataatgaccatgtcgtcttcggcggagggaccaaactggccgtcctaggtcagcccaaggctgccccctcggtcactctgttcccgccctcctctgannagcttnaagccaacaaggccacactggtgtgtctcataagtgacttctacccgggagccgtgacagtggcctggaaggcagatagcagccccgtcaaggcgggagtggagaccaccacaccctccaaacaaagcaacaacaagtacncggccagcanctatctgagcctgacgcctgagcagtggaagt

SEQ ID NO: 139 - DNA, 79 bp, Homo sapiens
ctgtagcttctgtgggacttccactgctcaggcgtcaggctcagatagctgctggccgcgtacttgttgttgctttgtt

SEQ ID NO: 140 - DNA, 239 bp, Homo sapiens
  misc_feature (1)...(239): n = g, a, c or t
ctgtagcttctgtgggacttccactgctcaggcgtcaggctcagatagctgctggccgcgtacttgttgttgctttgttnngagggtgtggnngtctccactcccgccttganngggctgctatcnnccttccagagccacnntcacggctcccgggtagaagtcacttatgagacacaccantgtggccttgttngcttnaagctcctcagaggagggcgggaacagagtgaccgagg

SEQ ID NO: 141 - DNA, 373 bp, Homo sapiens
ccaccctgaccatcaacagggtcgaagccggcgatgaggccaactattactgtcaagtgtgggatcgtaataatgaccatgtcgtcttcggcggagggaccaaactggccgtcctaggtcagcccaaggctgccccctcggtcactctgttcccgccctcctctgaggagcttcaagccaacaaggccacactggtgtgcctcataagtgacttctacccgggagccgtgacagtggcctggaaggcagatagcagccccgtcaaggcgggagtggagaccaccacaccctccaaacaaagcaacaacaagtacgcggccagcagctatctgagcctgacgcctgagcagtggaagtcccacagaagctacag

SEQ ID NO: 142 - DNA, 373 bp, Homo sapiens
ccaccctgaccatcaacagggtcgaagccggcgatgaggccgactattactgtcaagtgtgggatcgtaataatgaccatgtcgtcttcggcggagggaccaaactggccgtcctaggtcagcccaaggctgccccctcggtcactctgttcccgccctcctctgaggagcttcaagccaacaaggccacactggtgtgtctcataagtgacttctacccgggagccgtgacagtggcctggaaggcagatagcagccccgtcaaggcgggagtggagaccaccacaccctccaaacaaagcaacaacaagtacgcggccagcagctatctgagcctgacgcctgagcagtggaagtcccacagaagctacag

SEQ ID NO: 143 - DNA, 267 bp, Homo sapiens
cacagtcatcaattatagaccccacaacatgcgccctgaagacagaatgttccatatcagagctgtgatcttgagagccctctccttggctttcctgctgagtctccgaggagctggggccatcaaggcggaccatgtgtcaacttatgccgcgtttgtacagacgcatagaccaacaggggagtttatgtttgaatttgatgaagatgagatgttctatgtggatctggacaagaaggagaccgtctggcatctggaggagtttgg

SEQ ID NO: 144 - DNA, 367 bp, Homo sapiens
cttctgtgggacttccactgctcaggcgtcaggctcagatagctgctggccgcgtacttgttgttgctttgtttggagggtgtggtggtctccactcccgccttgacggggctgctatctgccttccaggccactgtcacggctcccgggtagaagtcacttatgagacacaccagtgtggccttgttggcttgaagctcctcagaggagggcgggaacagagtgaccgagggggcagccttgggctgacctaggacggccagtttggttcctccgccgaagacgacatggtcattattaagatcccacacttgacagtaatagtcggccttatcgccggcttcgaccctgttgatggtcagggtgg

SEQ ID NO: 145 - DNA, 90 bp, Homo sapiens
  misc_feature (1)...(90): n = g, a, c or t
ccaccctnaccatcaacagggtcgaagccggggatgaggccgactattactgnnaagtgtgggatcataataatgaccatgtcgnnttcg

SEQ ID NO: 146 - DNA, 291 bp, Homo sapiens
ccatgtccccagaattgaagccagagaatcgctcagatatccctgagggccggtcgttatcaaaagagatgattaggacaggggcctggcctggcttctggtaataccagtgtacattgttactcccaatattgtttcccccacaggtaatcttggccgtctttcctggggccactgacactgagggtgtctgagtcaacacataggaggtcacagagtctgtgcagtgagagaggaggccgaggaggagaacggtccaggccatggctgaggcaccaccagtgctgcttc

SEQ ID NO: 147 - DNA, 244 bp, Homo sapiens
ccatgtccccagaattgaagccagagaatcgctcagatatccctgagggccagtcgttatcaaaagagatgattaggacaggggcccggcctggcttctggtaataccagtgtacattgttactcccaatattgtttcccccacaggtaatcttggccgtctttcctggggccactgacactgagggtgtctgagtcaacacataggaggtcacagagtctgtgcagtgagagaggaggccgag

SEQ ID NO: 148 - DNA, 513 bp, Homo sapiens
ccaagccttttcctttgaggctcagggcgggctggctaacattgctatattgaacaacaacttgaataccttgatccagcgttccaaccacactcaggccaccaacgatccccctgaggtgaccgtgtttcccaaggagcctgtggagctgggccagcccaacaccctcatctgccacattgacaagttcttcccaccagtgctcaacgtcacgtggctgtgcaacggggagctggtcactgagggtgtcgctgagagcctcttcctgcccagaacagattacagcttccacaagttccattacctgacctttgtgccctcagcagaggacttctatgactgcagggtggaacactggggcttggaccagccgctcctcaagcactgggaggcccaagagccaatccagatgcctgagacaacggagactgtgctctgtgccctgggcctggtgctgggcctagtcggcatcatcgtgggcaccgtcctcatcataaagtctctgcgttctgg

SEQ ID NO: 149 - DNA, 181 bp, Homo sapiens
cttctgtgggacttccactgctcaggcgtcaggctcagatagctgctggccgcgtacttgttgttgctttgtttggagggtgtggtggtctccactcccgccttgacggggctgctatctgccttccaggccactgtcacggctcccgggtagaagtcacttatgagacacaccagtgtgg

SEQ ID NO: 150 - DNA, 373 bp, Homo sapiens; identical to SEQ ID NO: 6

SEQ ID NO: 151 - DNA, 252 bp, Homo sapiens
cttctgtgggacttccactgctcaggcgtcaggctcagatagctgctggccgcgtacttgttgttgctttgtttggagggtgtggtggtctccactcccgccttgacggggctgctatctgccttccaggccactgtcacggctcccgggtagaagtcacttatgagacacaccagtgtggccttgttggcttgaagctcctcagaggagggcgggaacagagtgaccgagggggcagccttgggctgacct

SEQ ID NO: 152 - DNA, 499 bp, Homo sapiens
  misc_feature (1)...(499): n = g, a, c or t
cctcggatgatgaagacagtgcccaccacaatgcccacgaggcccacagacaaccccagggcgcagaccacagtctctgtgagctctgacataggggctggaatctcaggctcccagtgtttcagaagaggcttgtccagtccccagtgctccaccttgcagtcataactctcctcagcagaagggaggagggtgaggtaactgatcttgaagaaggaatgatcactcttggagaggaagctggtctcanaaacaccttctgtgactgagtgcccattgctcanccatgtgatgttgaccacaggaggaaagatgttgtccacaagacagatgaggatgttgggctgacccagtgtcacgggagacttggaaaacactgtgacctcaggaacctcattggtagcagcggtagagttggagcgtttaatcagactgttcaagttatgttttangacagcgatgtttgtcagtgcaaattgcgggtcaaatctaaattgtc

SEQ ID NO: 153 - DNA, 373 bp, Homo sapiens; identical to SEQ ID NO: 90

SEQ ID NO: 154 - DNA, 243 bp, Homo sapiens
  misc_feature (1)...(243): n = g, a, c or t
ctgtagcttctgngggacttccactgctcaggcgtcaggctcagatagctgctggccgcgtacttgttgttgctttgtttggagggtgtggnggtctccactcccgccttgacggggctgctatctgccttccaggccactgtcacngctcccgggtanaagtcacttnngagacacaccantgtggccttgntggcttgaanctcctcataggagggcgggaacagantgaccgagggggca

SEQ ID NO: 155 - DNA, 307 bp, Homo sapiens
  misc_feature (1)...(307): n = g, a, c or t
ccaccctgaccatcaacagggtcgaagccggcgatgaggccgactattactgtcaagtgtgggatcgtaataatgaccatgtcgtcttcggcggagggaccaaactggccgtcctaggtcagcccaaggctgccccctcggtcactctgttcccgccctcctctgaggagcttcaagccaacaaggccacactggtgtgtctcataagtgacttctacccgggagccgtgacagtggcctggaaggcagatagcanccccgtcaaggcgggagtggagaccaccacaccctccaaacaaagnaacaa

SEQ ID NO: 156 - DNA, 502 bp, Homo sapiens
ccatgtccccagaattgaagccagagaatcgctcagatatccctgagggccggtcgttatcaaaagagatgattaggacaggggcctggcctggcttctggtaataccagtgtacattgttactcccaatattgtttcccccacaggtaatcttggccgtctttcctggggccactgacactgagggtgtctgagtcaacacataggaggtcacagagttactttctcttggcaggtgcagtccctcaggttctcacaagtccttgagcacagtttggggggaattcagccccaccagcctcccaccctgcaccagggtcatgagcatcctgcccaccacaggaagggccctcctgagctcagaattaaggacacgctggacccagaagccttgggctgggcaggttggtgagaccctggggggatcacctgtgcagtgagagaggaggccgaggaggagaacggtccaggccatggctgaggcaccaccagtgctgcttcc

SEQ ID NO: 157 - DNA, 538 bp, Homo sapiens
  misc_feature (1)...(538): n = g, a, c or t
ctgtcccaaacgggccagccctggggctttggggctgggcctccgtgaggagaggtcagtcggtcagcggcccggggtggctgccctgagccccagggctggtcctggggtctgtcagtccttccccaggctttccaggtccagaaggctttgtggggtctggggctgtgtcagggtaaggaaagctgccttggtggaggaagagaagtcagagaggtcacacatgtggccttagaacctgctaagtccaacgtcagcatgtgacaggaggggaagtgaggcaagacggcagaacccaggggaaaaggtggcagggagtctgagagtgaggttgggaggaccagcatcttttaggccctgagcaagaaggaggtgaccggagtcttccaggtatccctccctcctagcttctggaagtgggagtcggggagggggctccagtcagtcangtgtaagctccatgccatggggactctgcaggacaggcaggcttgaggagccactgtgcctggacaggttctgcaggctcccccacttg

SEQ ID NO: 158 - DNA, 373 bp, Homo sapiens; identical to SEQ ID NO: 6

SEQ ID NO: 159 - DNA, 290 bp, Homo sapiens
  misc_feature (1)...(290): n = g, a, c or t
ctgtagcttctgtgggacttccactgctcaggcgtcaggctcagatagctgctggccgcgtacttgttgttgctttgtttggagggtgtggtggtctccactcccgccttgacggggctgctatctgccttccaggccactgtcacggctcccgggtagaagtcacttatgagacacaccagtgtggccttgttggcttgaagctcctcagaggagggcgggaacagagtgaccgagggggcagccttgggctgacctangacggccagtttgnnccctccgccgaagac

SEQ ID NO: 160 - DNA, 274 bp, Homo sapiens
  misc_feature (1)...(274): n = g, a, c or t
ctgtagcttctgtgggacttccactgctcaggcgtcaggctcagatagctgctggccgcgtacttgttgttgctttgtttggagggtgtggtggtctccactcccgccttgacggggctgctatctgccttccaggccactgtcacggctcccgggtagaagtcacttatgagacacaccantgtggccttgttggcttgaagctcctcanaggagggcgggaacagagtgaccgagggggcagccttgggctgacctaggacggccagtttgg

SEQ ID NO: 161 - DNA, 375 bp, Homo sapiens
gtcaggacacagcatggacatgagggtccccgctcagctcctggggctcctgctgctctggctcccaggtgccaaatgtgacatccagatgacccaatctccttccaccctgtctgcatctgtcggagatacagttacaataagctgtcgggcctctcagaatatagatcggtggttggcctggcatcaacagaaaccaggcaaagcccctaatgtcctaatttatgcgacttccagtttagaagaaggggtctcattaagatttactggcagtggatctgggacacaattcaatttaaccatcaccagtctgcagcctgacgattcagcaacttattattgtcaacattattctgcatctcttcgcagttttgg

SEQ ID NO: 162 - DNA, 288 bp, Homo sapiens
  misc_feature (1)...(288): n = g, a, c or t
ccaccctgaccatcaacagggtcgaagccggcgatgaggccgactattactgtcaagtgtgggatcgtaataatgaccatgtcgtcttcggcggagggaccaaactggccgtcctaggtcagcccaaggctgccccctcggtcactctgttcccgccctcctctgaggagcttcaagccaacaaggccacactggtgtgtctcataagtgacttctacccgggagccgtgacagtggcctggaaggcanatagcanccccgncaaggcgggagtggagaccaccacac

SEQ ID NO: 163 - DNA, 297 bp, Homo sapiens
ccaccctgaccatcaacagggtcgaagccggcgatgaggccgactattactgtcaagtgtgggatcgtaataatgaccatgtcgtcttcggcggagggaccaaactggccgtcctaggtcagcccaaggctgccccctcggtcactctgttcccgccctcctctgaggagcttcaagccaacaaggccacactggcgtgtctcataagtgacttctacccgggagccgtgacagtggcctggaaggcagatagcagccccgtcaaggcgggagtggagaccaccacaccctccaaac

SEQ ID NO: 164 - DNA, 395 bp, Homo sapiens
ccatgtccccagaattgaagccagagaatcgctcagatatccctgagggccggtcgttatcaaaagagatgattaggacaggggcctggcctggcttttggtaataccagtgtacactgtaactcccaatattgtttcccccacaggtaatcttggccgtctttcctggggccactgacactgagggtgtctgagtcaacacataggaggtcacagactctgtgcagtgagagaggaggccgaggaggagaacggtccaggccatggctgaggcaccaccagtgctgcttccttaggcaaagttatccctgtctgaaatggtatcttttgtgaggaggtctgacttgctgaggatttggactatgaaagagagaaccttgagtttcctgggaaag

SEQ ID NO: 165 - DNA, 292 bp, Homo sapiens; identical to SEQ ID NO: 29

SEQ ID NO: 166 - DNA, 193 bp, Homo sapiens
  misc_feature (1)...(193): n = g, a, c or t
gaaccgnacccgctccgtcccattgaagaaatgacactcagacgtagagtactccaagaaacgtggnctggtgtccccagccaaagccagtggggagctcancaccatcantgtcactgncagaactgncatgcaggaacctccagggagcctnagacacaccatgctgganaacaggacaggaccaggggcc

SEQ ID NO: 167 - DNA, 373 bp, Homo sapiens
  misc_feature (1)...(373): n = g, a, c or t
ctgtagcttctgtgggacttccactgctcaggcgtcaggctcagatagctgctggccgcgtacttgttgttgctttgtttggagggtgtggtggtctccactcccgccttgacggggctgctatctgccttccaggccactgtcacggctcccgggtagaagtcacttatgagacacaccagtgtggccttgttggcttgaagctcctcagaggagggcgggaacagagtgaccgagggggcagccttgggctgacctaggacggccagtttggtccctccgccgaagacgacatggtcattattacgatcccacacttgacagtaatagtcggcctcatngccggcttcgaccctgttgatggtcagggtgg

SEQ ID NO: 168 - DNA, 83 bp, Homo sapiens
  misc_feature (1)...(83): n = g, a, c or t
ccaccctgaccatcaacagggtcgaagccggngatgaggccgactattactgncaagtgtgggatcgtaataatgaccatgtc

SEQ ID NO: 169 - DNA, 466 bp, Homo sapiens
  misc_feature (1)...(466): n = g, a, c or t
ccttgcctcagatccaaggtcactcggaagaggccatgtctaccctcaatgacactcatggaggaaatgctgagagaagcattcagatgcatgacacaaggtaagactgccaaaaatcttgttcttgctctcctcattttgttatttgtttcatttttaggagttttgagagcaaaatgacaacacccagaaattcagtaaatgggactttcccggcagagccaatgaaaggccctattgctatgcaatctggtccaaaaccactcttcaggaggatgtcttcactggtgggccccacgcaaagcttcttcatgagggaatctaagactttgggggctgtccagattatgaatgggctcttccacattgccctggggggtcttctgatgatcccagcagggatctatgcacccatctgtgtgactgtgtggtaccctctctggggangaancggaagcataaagtg

SEQ ID NO: 170 - DNA, 429 bp, Homo sapiens
ccttgcctcagatccaaggtcactcggaagaggccatgtctaccctcaatgacactcatggaggaaatgctgagagaagcattcagatgcatgacacaaggtaagactgccaaaaatcttgttcttgctctcctcattttgttatttgttttatttttaggagttttgagagcaaaatgacaacacccagaaattcagtaaatgggactttcccggcagagccaatgaaaggccctattgctatgcaatctggtccaaaaccactcttcaggaggatgtcttcactggtgggccccacgcaaagcttcttcatgagggaatctaagactttgggggctgtccagattatgaatgggctcttccacattgccctggggggtcttctgatgatcccagcaggaatctatgcacccatctgtgtgactgtgt

SEQ ID NO: 171 - DNA, 553 bp, Homo sapiens
  misc_feature (1)...(553): n = g, a, c or t
ccttgcctcagatccaaggtcactcggaagaggccatgtctaccctcaatgacactcatggaggaaatgctgagagaagcattcagatgcatgacacaaggtaagactgccaaaaatcttgttcttgctctcctcattttgttatttgttttatttttaggagttttgagagcaaaatgacaacacccagaaattcagtaaatgggactttcccggcagagccaatgaaaggccctattgctatgcaatctggtccaaaaccactcttcaggaggatgtcttcactggtgggccccacgcaaggcttcttcatgagggaatctaagactttgggggctgtccagattatgaatgggctcttccacattgccctggggggtcttctgatgatcccagcagggatctatgcacccatctgtgtgactgtgtggtaccctctctggggaggcattatgtatattatttccggatcactcctggcagcaacggagaaaaactccaggaagtgtttggtcaaaggaaaaatgataatgaattcattnngcctctttgc

SEQ ID NO: 172 - DNA, 421 bp, Homo sapiens
  misc_feature (1)...(421): n = g, a, c or t
ccaatcatagagatatctgcaccagcctgcaaagcttccatgaacgctttggtcccagacttggcgatagtaccaaggttattgatcaagtcagccttggtcattccaattccagtatccacaatagtgagagttcgatcttgtttgttcggtataaggttaatatgcagctctttctcagagtctaatttactgggatctgtcaagctttcataccggattttgtccaatgcatctgatgaatttgaaatgagctctctcagaaagatctctttgttcgagtagaaagtattgatgatcaatgacatcaactgggcaatttctgcctgaaaggcgaacgtntnaacctcctnctcctccatcggttggtcttgggtctgggtttcctcangcatntggaacgacaccgcgccggtntacc

SEQ ID NO: 173 - DNA, 481 bp, Homo sapiens
  misc_feature (1)...(481): n = g, a, c or t
ccttgcctcanatccanggtcactcggaagaggccatgtctaccctcaatgacactcatggaggaaatgctganagaagcattcanatgcatgacacaaggtaagactgccaaaaatcttgntcttgctctcctcattttgttattngttttanttttaggagttntgagagcaaaatnacancacccagaaattcagtaaatgggactttcccggcaganccaatgaaaggccctattgctatgcaatctggtccaaaaccactcttcaggaggatgtnttcactggtgggccccacgcaaagcttcttcatgagggaatctaagactttgggggctgtccagattatgaatgggctcttccacattgccctggggggtcttctgatgatcccancagggatctatgcncccatctgtgtgactgtgtggtaccctctctggggaggcattatgtatattatttccggatcactcctggc

SEQ ID NO: 174 - DNA, 110 bp, Homo sapiens
  misc_feature (1)...(110): n = g, a, c or t
cccgggctggcttacctgggcaccgtgggcatgggggaggtgtgtcacaagatttgggctctgcagagagaanattgggagttacggggatctgggatngaggtggntgc

SEQ ID NO: 175 - DNA, 372 bp, Homo sapiens
aggacacagcatggacatgagggtccccgctcagctcctggggctcctgctgctctggctcccaggtgccaaatgtgacatccagatgacccaatctccttccaccctgtctgcatctgtcggagatacagttacaataagttgtcgggcctctcagaatatagatcggtggttggcctggcatcaacagaaaccaggcaaagcccctaatgtcctaatttatgcgacttccagtttagaagaaggggtctcattaagatttactggcagtggatctgggacacaattcaatttaaccatcaccagtctgcagcctgacgattcagcaacttattattgtcaacattattctgcatctcttcgcagttttgg

SEQ ID NO: 176 - DNA, 373 bp, Homo sapiens
  misc_feature (1)...(373): n = g, a, c or t
ctgtagcttctgtgggacttccactgctcaggcgtcaggctcagatagctgctggccgcgtacttgttgttgctttgtttggagggtgtggtggnctccactcccgccttgacggggctgctatctgccttccaggccactgtcacggctcccgggtagaagtcacttatgagacacaccagtgtggccttgttggcttgaagctcctcagaggagggcgggaacagagtgaccgagggggcagccttgggctgacctaggacggccagtttggtccctccgccgaagacgacatggtcattattacgatcccacacttgacagtaatagtcggcctcatcgccggcttcgaccctgttgatggtcagggtgg

SEQ ID NO: 177 - DNA, 373 bp, Homo sapiens
ctgtagcttctgtgggacttccactgctcaggcgtcaggctcagatagctgctggccgcgtactagttgttgctttgtttggagggtgtggtggtctccactcccgccttgacggggctgctatctgccttccaggccactgtcacggctcccgggtagaagtcacttatgagacacaccagtgtggccttgttggcttgaagctcctcagaggagggcgggaacagagtgaccgagggggcagccttgggctgacttaggacggccagtttggtccctccgccgaagacgacatggtcattattacgatcccacacttgacaataatagtcggcctcatcgccggcttcgaccctgttgatggtcagggtgg

SEQ ID NO: 178 - DNA, 136 bp, Homo sapiens
  misc_feature (1)...(136): n = g, a, c or t
cttctgtgggacttccactgctcaggcgtcaggctcagatagctgctggccgcgtacttgttgttgctttgtttggagggtgtggtggtctccactcccnccttgacggggctgctatctgccttccaggccactg

SEQ ID NO: 179 - DNA, 327 bp, Homo sapiens
  misc_feature (1)...(327): n = g, a, c or t
ctgtagcttctgtgggacttccactgctcaggcgtcaggctcagatagctgctggccgcgtacttgttgttgctttgtttggagggtgtggtggtctccactcccgccttgacggggctgctatctgccttccaggccactgtcacggctcccgggtagaagtcacttatgagacacaccagtgtggccttgttggcttgaagctcctcagaggagggcgggaacagagtgaccgagggggcagccttgggctgacctaggacggccagtttggtccctccgccgaagacgacatggtcataattacgatcccacacttgncagtaa

SEQ ID NO: 180 - DNA, 192 bp, Homo sapiens
  misc_feature (1)...(192): n = g, a, c or t
ctgtagcttctgtgggacttccactgctcangcgtcaggctcagatagctgctggccgcgtacttgttgttgctttgtttggagggtgtggtggtctccactcccnccttgacggggcnngctatctgccttccangccactgncacggctcccnggtagaagtcacttatgagacacaccantgtggcctt

SEQ ID NO: 181 - DNA, 171 bp, Homo sapiens
  misc_feature (1)...(171): n = g, a, c or t
ccaccctgaccatcaacagggtcgaagccggcgatgaggccgactattactgtcaagtgtgggatcgtaataatgaccatgtcgtnttcggcggagggaccaaactggccgtcctaggtnancccaaggctgccccctcggtcactctgttccnnccctnctctgangagc

SEQ ID NO: 182 - DNA, 373 bp, Homo sapiens
ctgtagcttctgtgggacttccactgctcaggcgtcaggctcagatagctgctggccgcgtacttgttgttgctttgtttggagggtgtggtggtctccactcccgccttgacggggctgctatctgccttccaggccactgtcacggctcccgggtagaagtcacttatgagacacaccagtgtggccttgttggcttgaagctcctcagaggagggcgggaacagagtgaccgagggggcagccttgggctgacctaggacggccagtttggtccctccgccgaagacgacatggtcattattaagatcccacacttgacagtaatagtcagcctcatcgccggcttcgaccctgttgatggtcagggtgg

SEQ ID NO: 183 - DNA, 585 bp, Homo sapiens
ccagtacacccatgaatttgatggagatgagcagttctacgtggacctggggaggaaggagactgtctggtgtttgcctgttctcagacaatttagatttgacccgcaatttgcactgacaaacatcgctgtcctaaaacataacttgaacagtctgattaaacgctccaactctaccgctgctaccaatgaggttcctgaggtcacagtgttttccaagtctcccgtgacactgggtcagcccaacatcctcatctgtcttgtggacaacatctttcctcctgtggtcaacatcacatggctgagcaatgggcactcagtcacagaaggtgtttctgagaccagcttcctctccaagagtgatcattccttcttcaagatcagttacctcaccctcctcccttctgctgaggagagttatgactgcaaggtggagcactggggactggacaagcctcttctgaaacactgggagcctgagattccagcccctatgtcagagctcacagagactgtggtctgcgccctggggttgtctgtgggcctcgtgggcattgtggtgggcactgtcttcatcatccgagg

SEQ ID NO: 184 - DNA, 155 bp, Homo sapiens
  misc_feature (1)...(155): n = g, a, c or t
aagcagcactggtggtgcctcagccatggcctggaccgttctcctnctcggnctcctctctcaccgnacagactctgtgacctcctatgtgttgactcagacaccctnagtgtnagnggccccaggananacggccaagattacctgtgggggaa

SEQ ID NO: 185 - DNA, 119 bp, Homo sapiens
  misc_feature (1)...(119): n = g, a, c or t
ggacacagcntggacatgagggtccccgctcagctcctggggctcctgctgctctggctnccaggtgccaaatgtganatccagatgacccaatctccttccaccctgtctgcatctgt

SEQ ID NO: 186 - DNA, 101 bp, Homo sapiens
  misc_feature (1)...(101): n = g, a, c or t
ccaccctgaccatnaacagggtngaagccggcgatnaggccgactatnactgtcaagtgtgggatcgtaatnatgaccatgtcntcttnngcggagggacc

SEQ ID NO: 187 - DNA, 239 bp, Homo sapiens
cccactgtcactctgttcccgccctcctctgaggagctccaagccaacaaggccacactagtgtgtctgatcagtgacttctacccgggagctgtgacagtggcctggaaggcagatggcagccccgtcaaggcgggagtggagaccaccaaaccctccaaacagagcaacaacaagtacgcggccagcagctacctgagcctgacgcccgagcagtggaagtcccacagaagctacag

SEQ ID NO: 188 - DNA, 84 bp, Homo sapiens
  misc_feature (1)...(84): n = g, a, c or t
ccaccctgaccatcaacagggtcgaagccggngatgaggccgactattactgncaagngtgggatcgtaataangaccatgtcg

SEQ ID NO: 189 - DNA, 139 bp, Homo sapiens
  misc_feature (1)...(139): n = g, a, c or t
ccaccctgaccatcaacagggtcnaantccggcgatgaggccgactattactgtcaagtgtgggatcgtaataatgaccatgtcgtcttcggcggagggaccaaactggccgncctaggtcagcccaaggctgccccct

SEQ ID NO: 190 - DNA, 283 bp, Homo sapiens
  misc_feature (1)...(283): n = g, a, c or t
ctgtagcttctgtgggacttccactgctcaggcgtcaggctcagatagctgctggccgcgtacttgttgttgctttgtttggagggtgtggtggtctccactcccgccttgacggggctgctatctgccttccaggccactgtcacggctcccgggtagaagtcacttatgagacacaccagtgtggccttgttggcttgaagctcctcanaggagggcgggaacagagtgaccgagggggcagccttgggctgacctaggacggccngtttggtccctncgc

SEQ ID NO: 191 - DNA, 179 bp, Homo sapiens
  misc_feature (1)...(179): n = g, a, c or t
aatgtttcattgnactcaacatgtgaagaaaactattggtnntgncccatgactgtttgcacttntctgntaacctgacaaattcctactccttccccatgagcattgtaaanccttgtgcacaatntgaaaacttatgagtgacctgagatnttatctatcccctanctttttaccta

SEQ ID NO: 192 - DNA, 90 bp, Homo sapiens
  misc_feature (1)...(90): n = g, a, c or t
ctgtagcttctgtgggacttccactgctcaggcgtcaggctcagatagctgctggccgcgtacttgttgttgctttgnttggagggtgtg

SEQ ID NO: 193 - DNA, 585 bp, Homo sapiens; identical to SEQ ID NO: 183

SEQ ID NO: 194 - DNA, 283 bp, Homo sapiens
actggtggtgcctcagccatggcctggaccgttctcctcctcggcctcctctctcactgcacagactctgtgacctcctatgtgttgactcagacaccctcagtgtcagtggccccaggaaagacggccaagattacctgtgggggaaacaatattgggagtaacaatgtacactggtattaccagaagccaggccaggcccctgtcctaatcatctcttttgataacgaccggccctcagggatatctgagcgattctctggcttcaattctggggacatgg

SEQ ID NO: 195 - DNA, 54 bp, Homo sapiens
  misc_feature (1)...(54): n = g, a, c or t
ctgtagcttctgtgggacttncactgctcaggcgtcaggctcanatagctgctg

SEQ ID NO: 196 - DNA, 375 bp, Homo sapiens; identical to SEQ ID NO: 50

SEQ ID NO: 197 - DNA, 130 bp, Homo sapiens
  misc_feature (1)...(130): n = g, a, c or t
atggacatgagggtccccgctcagctcctggggctcctgcnngctctggctcccaggtgccaaatgtgacatncagatgacccaatctcctnccacccngtctgcatctgncggagatacanntncaata

SEQ ID NO: 198 - DNA, 191 bp, Homo sapiens
  misc_feature (1)...(191): n = g, a, c or t
taataatgaccatgtcgtcttcggcggagggaccaaactggccgtcctaggtcagcccaaggctgccccctcggtcactctgttcccgccctnctntgagnagcttcaagccaacaaggccacactggtgtgtctcataagtgacttctacccgggagccgtgacagtggcctggaaggcanatagcagcc

SEQ ID NO: 199 - DNA, 282 bp, Homo sapiens
ctggtggtgcctcagccatggcctggaccgttctcctcctcggcctcctctctcaccgcacagattctgtgacttcctatgtgttgactcaaacaccctcagtgtcagtggccccaggaaagacggccaagattacctgtgggggaaacaatattgggagtcacaatgtacactagtattaccagaagccaggccaggcccctgtcctaatcatctcttttgataacgaccggccctcagggatatctgagcgattctctggcttcaattctggggacatgg

SEQ ID NO: 200 - DNA, 464 bp, Homo sapiens
  misc_feature (1)...(464): n = g, a, c or t
caggcagaggctctgggtcagtgcaggaagcagagtcacagccagcgccttggggtggggatgaaaggagatgacctggtggctgcgtgacagccactgtaggactctgatctcagggggacaggctgacacaggcagttgggaattctgggcagggacaagcaggcgttacagaaaagtgataaccaatcccagttaaaatagtctcaggagtcagtgcaggagccctttctgactcctgtgatggataataaggcccancccgaggaagatgagccccagcacgaagcctccaatgccactcagcatcttgctctgggcagattcagactgagcccgccactccacggtgatggggttctggaggctggggtgctccacgtggcaggtgtagacgtctccatgctggggagtcatttccagcatcaccaggatctggaaggnccagtcaccgnttcctaata

SEQ ID NO: 201 - DNA, 373 bp, Homo sapiens; identical to SEQ ID NO: 6

SEQ ID NO: 202 - DNA, 373 bp, Homo sapiens
  misc_feature (1)...(373): n = g, a, c or t
ccaccctgaccatcaacagggtcgaagccggcgatgaggccgactattactgtcaagtgtgggatcgtaataatgaccatgtcgtcttcggcggagggaccaaactggncgtnctaggtnagnccaaggctgccccctcggtcactctgttcccgccctcctctgaggagcttcaagccaacaaggccacactggtgtgtctcataagtgacttctacccgggagccgcgacagtggcctggaaggcagatagcagccccgtcaaggcgggagtggagaccaccacaccctccaaacaaagcaacaacaagtacgcggccagcagctatctgagcctgacgcctgagcagtggaagtcccacagaagctacag

SEQ ID NO: 203 - DNA, 373 bp, Homo sapiens; identical to SEQ ID NO: 6

SEQ ID NO: 204 - DNA, 565 bp, Homo sapiens
cagagctcaagtctgaactctacctccagacagaatgaagttcatctcgacatctctgcttcttatgctgctggtcagcagcctctctccagtccaaggtgttctggaggtctattacacaagcttgaggtgtagatgtgtccaagagagctcagtctttatccctagacgcttcattgatcgaattcaaatcttgccccgtgggaatggttgtccaagaaaagaaatcatagtctggaagaagaacaagtcaattgtgtgtgtggaccctcaagctgaatggatacaaagaatgatggaagtattgagaaaaagaagttcttcaactctaccagttccagtgtttaagagaaagattccctgatgctgatatttccactaagaacacctgcattcttcccttatccctgctctggattttagttttgtgcttagttaaatcttttccaggaaaaagaacttccccatacaaataagcatgagactatgtaaaaataaccttgcagaagctgatggggcaaactcaagcttcttcactcacagcaccctatatacacttggagtt

SEQ ID NO: 205 - DNA, 474 bp, Homo sapiens
  misc_feature (1)...(474): n = g, a, c or t
gtgcgaaggtccagctcagtggcacaagtgaaagcaatgatcgagactaagacgggtataatccctgagacccagattgtgacttgcaatggaaagagactggaagatgggaagatgatggcagattacggcatcagaaagggcaacttactcttcctggcatgttattgtattggagggtgaccaccctgggcatggggtgttggcagggatcaaaaagcttatttcttttaatctcttactcaacgaacacatcttctgatgatttcccaaaattaatgagaatgagatgagtagagtaagatttgggtgggatgggtaggatgaagtatattgcccaactctatgtttctttgattctaacacaattaattaagtgacatgatttttactaatgtattactgagactagtaaataaatttttaaggcaaaatagagcattccnaaaaaaaaaaaaaaaanaaaaaaaaagg

SEQ ID NO: 206 - DNA, 237 bp, Homo sapiens
ccagtattcctggaggatataacactgacatcagcagggttttcaatggcaacaattgcacgagctgccagcagaagcttctcccaggtcctcttgagatttatgatatagatgccatcacttttccttttatagatgtactgttccatctggaagtcaagattggtgccacctaagtgggttcctgctgcaaggaacttaaggacatcctcctccttcatttgcaggacatcaagg

SEQ ID NO: 207 - DNA, 585 bp, Homo sapiens
ctcagagctcaagtctgaactctatctccagacagaatgaagttcatctcgacatctctgcttctcatgctgctggtcagcagcctctctccagtccaaggtgttctggaggtctattacacaagcttgaggtgtagatgtgtccaagagagctcagtctttatccctagacgcttcattgatcgaattcaaatcttgccccgtgggaatggttgtccaagaaaagaaatcatagtctggaagaagaacaagtcaattgtgtgtgtggaccctcaagctgaatggatacaaagaatgatggaagtattgagaaaaagaagttcttcaactctaccagttccagtgtttaagagaaagattccctgatgctgatatttccactaagaacacctgcattcttcccttatccctgctctggattttagttttgtgcttagttaaatcttttccaggaaaaagaacttccccatacaaataagcatgaggctatgtaaaaataaccttgcagaagctgatggggcaaactcaagcttcttcactcacagcaccctatatacacttggagtttgcattcttattcatcag

SEQ ID NO: 208 - DNA, 436 bp, Homo sapiens
ctgagcagagggacctgcacacagagactccctcctgggctcctggcaccatggccccactgaagatgctggccctggttaccctcctcctgggggcttctctgcagcacatccacgcagctcgagggaccaatgtgggccgggagtgctgcctggagtacttcaagggagccattccccttagaaagctgaagacgtggtaccagacatctgaggactgctccagggatgccatcgtttttgtaactgtgcagggcagggccatctgttcggaccccaacaacaagagagtgaagaatgcagttaaatacctgcaaagccttgagaggtcttgaagcctcctcaccccagactcctgactgtctcccgggactacctgggacctccaccgtcggtgttcaccgcccccaccctgagcgcctgggtccaggggagg

SEQ ID NO: 209 - DNA, 524 bp, Homo sapiens
gctctggcccctggtcctgtcctgttctccagcatggtgtgtctgaggctccctggaggctcctgcatggcagttctgacagtgacactgatggtgctgagctccccactggctttggctggggacaccagaccacgtttcttggagtactctacgtctgagtgtcatttcttcaatgggacggagcgggtgcggttcctggacagatacttctataaccaagaggagtacgtgcgcttcgacagcgacgtgggggagttccgggcggtgacggagctggggcggcctgatgaggagtactggaacagccagaaggacttcctggaagacaggcgggccgcggtggacacctactgcagacacaactacggggttgtggagagcttcacagtgcagcggcgagtccatcctaaggtgactgtgtatccttcaaagacccagcccctgcagcaccacaacctcctggtctgttctgtgagtggtttctatccaggcagcattgaagtcaggtggttccggaatgg

SEQ ID NO: 210 - DNA, 579 bp, Homo sapiens
  misc_feature (1)...(579): n = g, a, c or t
aaagaatatgtagaatctaggtaagtggataaaaggtctgggggcaggggaaaggagagcatttcattgtgaatcaaggaatttctccacctgttttaactcttccatatgacatcaaagagatgtcacttgcagctagcatttcagtgatgttttcttgctaataatatcgtgataaaagaaacattgactataagaaataggaatgggtctcataaaaggaaacagcaaaacccccaaactaaaaaacagcgcaggctatttctctcttctctccttttgcttggcactcatgagatgctaggtgtggaagtcagccaactgaaaaagagaggtggctgaagaaggtggggaggctgaagccagttaaataggatggtccaattcacagacggcgaggctacagtgcaaataggactctttcaacttgagcaggaccccattacttcactggagttagaaagaaaggagagcgtagactttttgaactttctataagagtgtacctccncagtatacagaagacgacgtgaaatttgatctgcaagaaaactgagtccatattcacatatgtatcaa

SEQ ID NO: 211 - DNA, 556 bp, Homo sapiens
cagagctcaagtctgaactctacctccagacagaatgaagttcatctcgacatctctgcttctcatgctgctggtcagcagcctctctccagtccaaggtgttctggaggtctattacacaagcttgaggtgtagatgtgtccaagagagctcagtctttatccctagacgcttcattgatcgaattcaaatcttgccccgtgggaatggttgtccaagaaaagaaatcatagtctggaagaagaacaagtcaattgtgtgtgtggaccctcaagctgaatggatacaaagaatgatggaagtattgagaaaaagaagttcttcaactctaccagttccagtgtttaagagaaagattccctgatgctgatatttccactaagaacacctgcattcttcccttatccctgctctggattttagttttgtgcttagttaaatcttttccaggaaaaagaacttccccatacaaataagcatgagactatgtaaaaataaccttgcagaagctgatggggcaaactcaagcttcttcactcacaacaccctatataca

SEQ ID NO: 212 - DNA, 353 bp, Homo sapiens
cgcagccatggctcgtggtcccaagaagcatctgaagcgggtggcagctccaaagcattggatgctggataaattgaccggtgtgtttgctcctcgtccatccaccggtccccacaagttgagagagtgtctccccctcatcattttcctgaggaacagacttaagtatgccctgacaggagatgaagtaaagaagatttgcatgcagcggttcattaaaatcgatggcaaggtccgaactgatataacctaccctgctggattcatggatgtcatcagcattgacaagacgggagagaatttccgtctgatctatgacaccaagggtcgctttgctgtacatcgtattacac

SEQ ID NO: 213 - DNA, 513 bp, Homo sapiens
ctgctactcatttgcttctatgggtatgctagaagcgagaatccgtatactaaccaacaattctcagaccccaatcctaagccctcaggaggttgtgtcttgtagccagtatgctcaaggctgtgatggcggcttcccataccttattgcaggaaagtacgcccaagattttgggctggtggaagaagcttgcttcccctacacaggcactgattctccatgcaaaatgaaggaagactgctttcgttattactcctctgagtaccactatgtaggaggtttctatggaggctgcaatgaagccctgatgaagcttgagttggtccatcatgggcccatggcagttgcttttgaagtatatgatgacttcctccactacaaaaaggggatctaccaccacactggtctaagagaccctttcaacccctttgagctgactaatcatgctgttctgcttgtgggctatggcactgactcagcctctgggatggattactggattgttaaaaacag

SEQ ID NO: 214 - DNA, 538 bp, Homo sapiens
aaacattaaacaacaagtatataatcaaaataatcctgtattacttataactgaataactattttcaaagaaactttcctccctgatgaataagaatgcaaactccaagtgtatatagggtgctgtgagtgaagaagcttgagtttgccccatcagcttctacaaggttatttttacatagtctcatgcttatttgtatggggaagttctttttcctggaaaagatttaactaagcacaaaactaaaatccagagcagggataagggaagaatgcaggtgttcttagtggaaatatcagcatcagggaatctttctcttaaacactggaactggtagagttgaagaacttctttttctcaatacttccatcattctttgtatccattcagcttgagggcccacacacacaattgacttgttcttcttccagactatgatttcttttcttggacaaccactcccacggggcaagatttgaattcgatcaatgaagcgtctagggataaagactgagctctcttggacacatctacacct

SEQ ID NO: 215 - DNA, 588 bp, Homo sapiens
aaacattagtgttcatagcttccaagagacatgctgactttcatttcttgaggtactctgcacatacgcaccacatctctatctggcctttgcatggagtgaccatagctccttctctcttacattgaatgtagagaatgtagccattgtagcagcttgtgttgtcacgcttcttcttttgagcaactttcttacactgaagaaaggcagaatgagtgcttcagaatgtgatttcctactaacctgttccttggataggctttttagtatagtattttttttgtcattttctccatcaacaaccagggagactgcacctgatggaaaagatatatgactgcttcatgacattcctaaactatcttttttttattccacatctacgtttttggtggagtcccttttgcatcattgttttaaggatgataaaaaaaaataacaactagggacaatacagaacccattccatttatctttctacagggctgacattgtggcacattcttagagttaccacaccccatgagggaagctctaaatagccaacacccatctgttttttgtaaaaacagcatagcttatacatgg

SEQ ID NO: 216 - DNA, 580 bp, Homo sapiens
cagagctcaagtctgaactctacctccagacagaatgaagttcatctcgacatctctgcttctcatgctgctggtcagcagcctctctccagtccaaggtgttctggaggtctattacacaagcttgaggtgtagatgtgtccaagagagctcagtctttatccctagacgcttcattgatcgaattcaaatcttgccccgtgggaatggttgtccaagaaaagaaatcatagtctggaagaagaacaagtcaattgtgtgtgtggaccctcaagctgaatggatacaaagaatgatggaagtattgagaaaaagaagttcttcaactctaccagttccagtgtttaagagaaagattccctgatgctgatatttccactaagaacacctgcattcttcccttatccctgctctggattttagttttgtgcttagttaaatcttttccaggaaaaagaacttccccatacaaataagcatgagactatgtaaaaataacctcgcagaagctgatggggcaaactcaagcttcttcactcacagcaccctatatacacttggagtttgcattcttattcat

SEQ ID NO: 217 - DNA, 396 bp, Homo sapiens
  misc_feature (1)...(396): n = g, a, c or t
ctgttgactcagattcggcattttaattacattgtttccaagtatgatattctgagagtgtctatagcacttagtgtctgcttcatataaactaccagttattatatatttatgatgcaagtagttttccaaatgtggtgaaagtctgagtctttttatccccatgggtaaaatctgaatctggctctctgtgtctctcagtgcttgtttattgctggtcagagagtaaattcttgataaaagctgtntganttggctctcacagtttatgcagacattggagagacaatttggttatttcaaacatcacaggatttgagtaagaagacctggttatgaaacaaggctctcataattactagttatgactgttgacaaggttaccttttcttgttt

SEQ ID NO: 218 - DNA, 426 bp, Homo sapiens
  misc_feature (1)...(426): n = g, a, c or t
tggacagncctggaaggtgtcgaagtgcagacagactacgtgcccctgctgaactcgctggcggcctatggctggcagctcacctgtgtgctaccaactcccgtcgtcaagactaccagcgaggggagtgtatccaccaagcagattgtctttcttcagagaccttgtctacctcagaaaatcaagaagaaggaatcgaagtttcagtggcgattctccagagaagaaatgcacaacaggcagatgaggaaatcaaaaggtaaactcagtgccagagacaaacaacaagcagaagaaaatgagaagaacttagaagaccagtcttccaaagctggagacatgggaaactgtgtttcaggacagcagcaggagggtggagtctccgaggagatgaagggccctgtccaagaggacaagggagaacag

SEQ ID NO: 219 - DNA, 431 bp, Homo sapiens
  misc_feature (1)...(431): n = g, a, c or t
tcaagtctgaactctacctccagacagaatgaagttcatctcgacatctctgcttctcatgctgctggtcagcagcctctctccagtccaaggtgttctggaggtctattacacaagcttgaggtgtagatgtgtccaanagagctcagtctttatccctanacgcttcattgatcgaattcaaatcttgccccgtgggaatggttgtccaagaaaagaaatcatagtctggaagaagaacaagtcaattgtgtgtgtggaccctcaagctgaatggatacaaagaatgatggaagtattgagaaaaagaagttcttcaactctaccagttccagtgtttaagagaaagattccctgatgctgatatttccactaagaacacctgcattcttcccttatccctgctctggattttagttttgngcttagtt

SEQ ID NO: 220 - DNA, 286 bp, Homo sapiens
  misc_feature (1)...(286): n = g, a, c or t
ctgtctcacactttacaagctgtgagagacacatcagagccctgggcactgtcactgcttgcagcctgagtgtaactccctccttttctatctgagctcttcctcctccacatcacggcagcgaccacagctccagtgatcacagctccaaggagaaccaggccagcaatgatgcccacgatggggatggtgggctgggaagacagctcccatctcanggtgaggggcttgggcagaccctcatgctgcacatggcaggtgtatctctgctcctctccagaaggca

SEQ ID NO: 221 - DNA, 536 bp, Homo sapiens
  misc_feature (1)...(536): n = g, a, c or t
ctcaagtctgaactctacctccagacagaatgaagttcatctcgacatctctgcttctcatgctgctggtcagcagcctctctccagtccaaggtgttctggaggtctattacacaagcttgaggtgtagatgtgtccaagagagctcagtctttatccctagacgcttcattgatcgaattcaaatcttgccccgtgggaatggttgtccaagaaaagaaatcatagtctggaagaagaacaagtcaattgtgtgtgtggaccctcaagctgaatggatacaaagaatgatggaagtattgagaaaaagaagttcttcaactctaccagttccagtgtttaagagaaagattccctgatgctgatatttccactaagaacacctgcattcttcccttatccctgctctggattttagttttgngcttagttaaatcttttccaggaaaaagaacttccccatacaaataagcatgagactatgtaaaaataaccttgcagaagctgatggggcaaactcaagcttnttcactcac

SEQ ID NO: 222 - DNA, 565 bp, Homo sapiens
  misc_feature (1)...(565): n = g, a, c or t
ctcagagctcaagtctgaactctacctccagacagaatgaagttcatctcgacatctctgcttctcatgctgctggtcagcagcctctctccagtccaaggtgttctggaggtctattacacaagcttgaggtgtagatgtgtccaagagagctcagtctttatccctagacgcttcattgatcgaattcaaatcttgccccgtgggaatggttgtccaagaaaagaaatcatagtctggaagaagaacaagtcaattgtgtgtgtggaccctcaagctgaatggatacaaagaatgatggaagtattgagaaaaagaagttcttcaactctaccagttccagtgtttaagagaaagattccctgatgctgatatttccactaagaacacctgcattcttcccttatccctgctctggattttagttttgtgcttagttaaatcttttccaggaaaaagaacttccccatacaaataagcatgagactatgtaaaaataaccttgcngaagctgatggngcaaactcaagcttcttcactcacagcaccctatatacacttggag

SEQ ID NO: 223 - DNA, 529 bp, Homo sapiens
cgcggtgcgacgaaggagtaggtggtgggatctcaccgtgggtccgattagccttttctctgccttgcttgcttgagcttcagcggaattcgaaatggctggcggtaaggctggaaaggactccggaaaggccaagacaaaggcggtttcccgctcgcagagagccggcttgcagttcccagtgggccgtattcatcgacacctaaaatctaggacgaccagtcatggacgtgtgggcgcgactgccgctgtgtacagcgcagccatcctggagtacctcaccgcagaggtacttgaactggcaggaaatgcatcaaaagacttaaaggtaaagcgtattacccctcgtcacttgcaacttgctattcgtggagatgaagaattggattctctcatcaaggctacaattgctggtggtggtgtcattccacacatccacaaatctctgattgggaagaaaggacaacagaagactgtctaaaggatgcctggattccttgttatctcaggactctaaatactctaacag

SEQ ID NO: 224 - DNA, 297 bp, Homo sapiens
  misc_feature (1)...(297): n = g, a, c or t
cctcccctggacccaggcgctcagggtgggggcggtgaacaccaacggtggaggtcccaggtagtcccgggagacagtcaggagtctggggtgaggaggcttcaagacctctcaaggctttgcaggtatttaactgcattcttcactctcttgttgttggggtccgaacagatggccctgccctgcacagttacaaaaacgatggcntccctggagcagncctnagatgnctggnaccacgtcttcagctttctaangggaatggctcccttgaagtactccaggcangcactcccg

SEQ ID NO: 225 - DNA, 253 bp, Homo sapiens
cctcccctggacccaggcgctcagggtgggggcggtgaacaccaacggtggaggtcccaggtagtcccgggagacagtcaggagtctggggtgaggaggcttcaagacctctcaaggctttgcaggtatttaactgcattcttcactctcttgttgttggggtccgaacagatggccctgccctgcacagttacaaaaacgatggcatccctggagcagtcctcagatgtctggtaccacgtcttcagctttc

SEQ ID NO: 226 - DNA, 598 bp, Homo sapiens
ccatctgatctataaatgcggtggcatcgacaaaagaaccattgaaaaatttgggaaggaggctgctgagatgggaaagggctccttcaagtatgcctgggtcttggataaactgaaagctgagcgtgaacgtggtatcaccattgatatctccttgtggaaatttgagaccagcaagtactatgtgactatcattgatgccccaggacacagagactttatcaaaaacatgattacagggacatctcaggctgactgtgctgtcctgattgttgctgctggtgttggtgaatttgaagctggtatctccaagaatgggcagacccgagagcatgcccttctggcttacacactgggtgtgaaacaactaattgtcggtgttaacaaaatggattccactgagccaccctacagccagaagagatatgaggaaattgttaaggaagtcagcacttacattaagaaaattggctacaaccccgacacagtagcatttgtgccaatttctggttggaatggtgacaacatgctggagccaagtgctaacatgccttggttcaagggatggaaagtcacccgtaaggatggcaatgccagt

SEQ ID NO: 227 - DNA, 612 bp, Homo sapiens
  misc_feature (1)...(612): n = g, a, c or t
ctgttgactcagattcggcattttaattacattgtttccaagtatgatattctgagagtgtctatagcacttagtgtctgcttcatataaactaccagttattatatatttatgatgcaagtagttttccaaatgtggtgaaagtctgagtctttttatccccatgggtaaaatctgaatctggctctctgtgtctctcagtgcttgtttattgctggtcagagagtaaattcttgataaaagctgttgacttggctctcacagtttatgcagacattggagagacaatttggttatttcaaacatcacaggatttgagtaagaagacctggttatgaaacaaggctctcataattactagttatgactgttgacaagttaccttttcttgtttacaagttatttggcctctttgaattacttgtaaaatagagatagggattctttcttgatcatggaacatcaaatgaagttatttgatgaaatactttgtcatctggaaattataaatataactaaatgttaattattatttggaaatttngggcacctcatggnggcattttctatggtcattttttttcttttctcgcataatggctaaaagtaggt

SEQ ID NO: 228 - DNA, 288 bp, Homo sapiens
  misc_feature (1)...(288): n = g, a, c or t
agccattgnntgtagctttagctcagcgcaaagaagagcgccaggctcacctcactaaccagtatatgcagagaatggcaagtgtacgagctgttcccaaccctgtaatcaacccctaccagccagcacctccttcaggttacttcatggcagctatcccacagactcagaaccgngctgcatactatcctcctagccaaattgctcaactaagaccaagtcctcgctggactgctcagggtgccagacctcatccattccaaaatatgcccggtgctatccgcccag

SEQ ID NO: 229 - DNA, 594 bp, Homo sapiens
ctcagagctcaagtctgaactctacctccagacagaatgaagttcatctcgacatctctgcttctcatgctgctggtcagcagcctctctccagtccaaggtgttctggaggtctattacacaagcttggggtgtagatgtgtccaagagagctcagtctttatccctagacgcttcattgatcgaattcaaatcttgccccgtgggaatggttgtccaagaaaagaaatcatagtctggaagaagaacaagtcaattgtgtgtgtggaccctcaagctgaatggatacaaagaatgatggaagtattgagaaaaagaagtttttcaactctaccagttccagtgtttaagagaaagattccctgatgctgatatttccactaagaacacctgcattcttcccttatccctgctctggattttagttttgtgcttagttaaatcttttccaggaaaaagaacttccccatacaaataagcatgagactatgtaaaaataaccttgcagaagctgatggggcaaactcaagcttcttcactcacagcaccctatatacacttggagtttgcattcttattcatcagggaggaaag

SEQ ID NO: 230 - DNA, 571 bp, Homo sapiens
ctccttctctcttacattgaatgtagagaatgtagccattgtagcagcttgtgttgtcacgcttcttcttttgagcaactttcttacactgaagaaaggcagaatgagtgcttcagaatgtgatttcctactaacctgttccttggataggctttttagtatagtatttttttttgtcattttctccatcaacaaccagggagactgcacctgatggaaaagatatatgactgcttcatgacattcctaaactatcttttttttattccacatctacgtttttggtggagtcccttttgcatcattgttttaaggatgataaaaaaaataacaactagggacaatacagaacccattccatttatctttctacagggctgacattgtggcacattcttagagttaccacaccccatgagggaagctctaaatagccaacacccatctgttttttgtaaaaacagcatagcttatacatggacatgtctctgccttaacttttcctaactcccactctaggctattgtttgcatgtctacctacttttagccattatgcgagaaaagaaaaa

SEQ ID NO: 231 - DNA, 584 bp, Homo sapiens
  misc_feature (1)...(584): n = g, a, c or t
aaacattagtgttcatagcttccaagagacatgctgactttcatttcttgaggtactctgcacatacgcaccacatctctatctggcctttgcatggagtgaccatagctccttctctcttacattgaatgtagagaatgtagccattgtagcagcttgtgttgtcacgcttcttcttttgagcaactttcttacactgaagaaaggcagaatgagtgcttcagaatgtgatttcctactaacctgttccttggataggctttttagtatagtatttttttttgtcattttctccatcaacaaccagggagactgcacctgatggaaaagatatatgactgcttcatgacattcctaaactacctttttttattccacatctacgtttttggtggagtcccttttgcatcattgttttaaggatgataaaaaaaaataacaactagggacaatacagaacccattccatttatctttctacagggctgacattgtggcacattcttagagttaccacaccccatgagggaagctctaaatagccaacacccatctgttttttgtaaaaacagcatancttatac

SEQ ID NO: 232 - DNA, 457 bp, Homo sapiens
ccacggctgcttccagctcctccctggagaagagctacgagctgcctgacggccaggtcatcaccattggcaatgagcggttccgctgccctgaggcactcttccagccttccttcctgggcatggagtcctgtggcatccacgaaactaccttcaactccatcatgaagtgtgacgtggacatccgcaaagacctgtacgccaacacagtgctgtctggcggcaccaccatgtaccctggcattgccgacaggatgcaaaaggagatcactgccctggcacccagcacaatgaagatcaagatcattgctcctcctgagcgcaagtactccgtgtggatcggcggctccatcctggcctcgctgtccaccttccagcagatgtggatcagcaagcaggagtatgacgagtccggcccctccatcgtccaccgcaaatgcttctaggcggactatga

SEQ ID NO: 233 - DNA, 256 bp, Homo sapiens
  misc_feature (1)...(256): n = g, a, c or t
cctcccctggacccaggcgctcagggtgggggcggtgaacaccaacggtggaggtcccaggtagtcccgggagacagtcaggagtctggggtgaggaggcttcaagacctctcaaggctttgcaggtatttaactgcattcttcactctcttgttgntggggtccgaacagatggccctgccctgcncagttacaaaaacgatggcatccctggagcagtcctcagatgtctggtaccacgtcttcagctttctaa

SEQ ID NO: 234 - DNA, 571 bp, Homo sapiens
  misc_feature (1)...(571): n = g, a, c or t
cagagctcaagtctgaactctacctccagacagaatgaagttcatctcgacatctctgcttctcatgctgctggtcagcagcctctctccagtccaaggtgttctggaggtctattacacaagcttgaggtgtagatgtgtccaagagagctcagtctttatccctagacgcttcattgatcgaattcaaatcttgccccgtgggaatggttgtccaagaaaagaaatcatagtctggaagaagaacaagtcaattgtgtgtgtggaccctcaagctgaatggatacaaagaatgatggaagtattgagaaaaagaagttcttcaactctaccagttccagtgtttaagagaaagattccctgatgctgatatttccactaagaacacctgcattcttcccttatccctgctctggattttagttttgtgcttagttaaatcttttccaggaaaaagaacttccccatacaaataagcatganactatgtaaaaataacccttgcagaagctgatggggcaaactcaagcttcttcactcacagcaccctatatacacttggagtttgcat

SEQ ID NO: 235 - DNA, 489 bp, Homo sapiens
  misc_feature (1)...(489): n = g, a, c or t
ctgttgactcagattcggcattttaattacattgtttccaagtatgatattctgagagtgtctatagcacttagtgtctgcttcatataaactaccagttattatatatttatgatgcaagtagttttccaaatgtggtgaaagtctgagtctttttatccccatgggtaaaatctgaatctggctctctgtgtctntcagtgcttgtttattgctggtcagagagtaaattcttgataaaagctgttgacttggctctcacagtttatgcanacattggagagacaatttggttatttcaaacatcacaggatnngagtaagaanacctggttatgaaacaaggctctcataattactagttatgactgttgacaagttaccttntcttgnttacaagttatttggcctctttgaattacttgnaaaatagagatagggattctttcttgatcatggaacatcnaatgaagttattngatgaaatact

SEQ ID NO: 236 - DNA, 306 bp, Homo sapiens
ctgctgcacccagagctcctttgggtctgcacatagctctgcctgagagcgcttgcggggcaagaacaggatagctgggatggagcagcccaagcttggttcctgcttccggtagctgcggacaaccttggcgggaatcttcctttggctgtacttgaggcaacagtcctgagcccctccatcactgccttgggtcctggggatgccaaaggccagaaccaggataaggaggctcagagccagtgactgagccatgtctgtggtagagggtgagtaagaggccagagctgagggtgaggtgggcag

SEQ ID NO: 237 - DNA, 560 bp, Homo sapiens
  misc_feature (1)...(560): n = g, a, c or t
ctcagagctcaagtctgaactctacctccagacagaatgaagttcatctcgacatctctgcttctcatgctgctggtcagcagcctctctccagtccaaggtgttctggaggtctattacacaagcttgaggtgtagatgtgtccaagagagctcagtctttatccctagacgcttcattgatcgaattcaaatcttgccccgtgggaatggttgtccaagaaaagaaatcatagtctggaagaagaacaagtcaattgtgtgtgtggaccctcaagctgaatggatacaaagaatgatggaagtattgagaaaaagaagttcttcaactctaccagttccagtgtttaagagaaagattccctgatgctgatatttccactaagaacacctgcattcttcccttatccctgctctggattttagttttgtgcttagttaaatcttttccaggaaaaagancttccccatacaaataagcatgagactatgtaaaaataaccttgcagaagctgatggggcaaactcaagcttcttcactcacagcaccctatatacact

SEQ ID NO: 238 - DNA, 484 bp, Homo sapiens
  misc_feature (1)...(484): n = g, a, c or t
aaaaaaggaaacagaaaacagaagaaatcacttaaggagagctgtcattttctattggtgaggattcctgatcttggggaggttctggaaagttcgtctctgtttcttcttcttcctcttcttggattggaataatttcaatgtcttcttcattctttggttgggaagatgtttcagttagcccaaccacttcttcttttatttcaatagtctgttctttttttcttctgctgacaggagaactatgttagatttgggtctggagcacgttcttttccattcattctcaacgatgccagctattacaagttcctggaagaaggcaaagatcagcatcactgacaaaatgcccaagaacagagattgtatgctgtaacagtattgggtagatggggagtttttctcanagggattagctggttcatagttgnatatgttaatatatggtgtgtgagctctaataaaattcanactctccattttt

SEQ ID NO: 239 - DNA, 493 bp, Homo sapiens
ctgaacatgttgggagagaagcttcttggtcctaacgccagccccgatggtctcattccgtggacgaggttttgtaaggaaaatataaatgataaaaattttcccttctggctttggattgaaagcatcctagaactcattaaaaaacacctgctccctctctggaatgatgggtgcatcatgggcttcatcagcaaggagcgagagcgtgccctgttgaaggaccagcagccggggaccttcctgctgcggttcagtgagagctcccgggaaggggccatcacattcacatgggtggagcggtcccagaacggaggcgaacctgacttccatgcggttgaaccctacacgaagaaagaactttctgctgttactttccctgacatcattcgcaattacaaagtcatggctgctgagaatattcctgagaatcccctgaagtatctgtatccaaatattgacaaagaccatgcctttggaaagtattactcca

SEQ ID NO: 240 - DNA, 439 bp, Homo sapiens
  misc_feature (1)...(439): n = g, a, c or t
cagagctcaagtctgaactctacctccagacagaatgaagttcatctcgacatctctgcttctcatgctgctggtcagcagcctctctccagtccaaggtgttctggaggtctattacacaagcttgaggtgtagatgtgtccaagagagctcagtctttatccctagacgcttcattgatcgaattcaaatcttgccccgtgggaatggttgtccaagaaaagaaatcatagtctggaagaagaacaagtcaattgtgtgtgtggaccctcaagctgaatgaatacaaagaatgatggaagtattgagaaaaagaagttcttcaactctaccagttccagtgtttaaganaaagattccctgatgctgatatttccactaagaacacctgcattcttcccttatccctgctctggattttagttttgngcttagttaa

SEQ ID NO: 241 - DNA, 529 bp, Homo sapiens
  misc_feature (1)...(529): n = g, a, c or t
tgtgtccaagagagctcagtctttatccctagacgcttcattgatcgaattcaaatcttgccccgtgggaatggttgtccaagaaaagaaatcatagtctggaagaagaacaagtcaattgtgtgtgtggaccctcaagctgaatggatacaaagaatgatggaagtattgagaaaaagaagttcttcaactctaccagttccagtgtttaagagaaagattccctgatgctgatatttccactaagaacacctgcattcttcccttatccctgctctggattttagttttgtgcttagttaaatcttttccaggaaaaagaacttccccatacaaataagcatgagactatgtaaaaataaccttgcagaagctgatggggcaaactcaagcttcttcactcacagcaccctatatacacttggagtttgcattcttattcatcagggaggaaagtttctttgaaaatagttattcagttataagtaatacaggattattttgattatatacttgntgnttaatgttt

SEQ ID NO: 242 - DNA, 440 bp, Homo sapiens
ctccctgagcagagggacctgcacacagagactccctcctgggctcctggcaccatggccccactgaagatgctggccctggtcaccctcctcctgggggcttctctgcagcacatccacgcagctcgagggaccaatgtgggccgggagtgctgcctggagtacttcaagggagccattccccttagaaagctgaagacgtggtaccagacatctgaggactgctccagggatgccatcgtttttgtaactgtgcagggcagggccatctgttcggaccccaacaacaagagagtgaagaatgcagttaaatacctgcaaagccttgagaggtcttgaagcctcctcaccccagactcctgactgtctcccgggactacctgggacctccaccgttggtgttcaccgcccccaccctgagcgcctgggtccaggggagg

SEQ ID NO: 243 - DNA, 345 bp, Homo sapiens
  misc_feature (1)...(345): n = g, a, c or t
cctcccctggacccaggcgctcagggtgggggcggtgaacaccaacggtggaggtcccaggtagtcccgggagacagtcaggagtctggggtgaggaggcttcaagacctctcaaggctttgcaggtatttaactgcattcttcactctcttgntgttggggtccgaacagatggccctgccctgcacagttacaaaaacgatggcatccctggagcagtcctcagatgtctggtaccacgtcttcagctttctaaggggaatggctcccttgaagtactccaggcagcactcccggcccacattggtccctcgagctgcgtggatgtgctgcananaanccccc

SEQ ID NO: 244 - DNA, 368 bp, Homo sapiens
  misc_feature (1)...(368): n = g, a, c or t
caagcttttttttttttttttttttttttttttttatgantaatggtctatttatngatnccattctattttaacaaanaaaatntttcaaattacaaggtntacaantcaatactgntttgaanngaaaaatnatttgctttgaaagtgtntgcatgtatatatatatgataaatgattataacgtgtgtgtcanngacaanatgtantctttggttgttagttatatactgnctacctgtganangcaaggtaagngggtnacanactntnaaatttatnaaacacttanatttttcanggaagttacntgaaggaactagggagtttcatgantanataaaangttcgggngggatctccaccgg

SEQ ID NO: 245 - DNA, 573 bp, Homo sapiens
ccaaaagaagtaagacagcttgctgaagatttcctgaaagactatattcatataaacattggtgcacttgaactgagtgcaaaccacaacattcttcagattgtggatgtgtgtcatgacgtagaaaaggatgaaaaacttattcgtctaatggaagagatcatgagtgagaaggagaataaaaccattgtttttgtggaaaccaaaagaagatgtgatgagcttaccagaaaaatgaggagagatgggtggcctgccatgggtatccatggtgacaagagtcaacaagagcgtgactgggttctaaatgaattcaaacatggaaaagctcctattctgattgctacagatgtggcctccagagggctagatgtggaagatgtgaaatttgtcatcaattatgactaccctaactcctcagaggattatattcatcgaattggaagaactgctcgcagtaccaaaacaggcacagcatacactttctttacacctaataacataaagcaagtgagcgaccttatctctgtgcttcgtgaagctaatcaagcaattaatcccaagttgcttcag

SEQ ID NO: 246 - DNA, 425 bp, Homo sapiens
gacctgcacacagagactccctcctgggctcctggcaccatggccctactgaagatgctggccctggtcaccctcctcctgggggcttctctgcagcacatccacgcagctcgagggaccaatgtgggccgggagtgctgcctggagtacttcaagggagccattccccttagaaagctgaagacgtggtaccagacatctgaggactgctccagggatgccatcgtttttgtaactgtgcagggcagggccatctgttcggaccccaacaacaagagagtgaagaatgcagttaaatacctgcaaagccttgagaggtcttgaagcctcctcaccccagactcctgactgtctcccgggactacctgggacctccaccgttggtgttcaccgcccccaccctgagcgcctgggtccaggggagg

SEQ ID NO: 247 - DNA, 593 bp, Homo sapiens
atctcgacatctctgcttctcatgctgctggtcagcagcctctctccagtccaaggtgttctggaggtctattacacaagcttgaggtgtagatgtgtccaagagagctcagtctttatccctagacgcttcattgatcgaattcaaatcttgccccgtgggaatggttgtccaagaaaagaaatcatagtctggaagaagaacaagtcaattgtgtgtgtggaccctcaagctgaatggatacaaagaatgatggaagtattgagaaaaagaagttcttcaactctaccagttccagtgtttaagagaaagattccctgatgctgatatttccactaagaacacctgcattcttcccttatccctgctctggattttagttttgtgcttagttaaatcttttccaggaaaaagaacttccccatacaaataagcatgagactatgtaaaaataaccttgcagaagctgatggggcaaactcaagcttcttcactcacagcaccctatatacacttggagtttgcattcttattcatcggggaggaaagtttctttgaaaatagttattcagttataagtaatacaggattat

SEQ ID NO: 248 - DNA, 453 bp, Homo sapiens
  misc_feature (1)...(453): n = g, a, c or t
cagctcagtggcacaagtgaaagcaatgatcgagactaagacgggtataatccctgagacccagattgtgacttgcaatggaaagagactggaagatgggaagatgatggcagattacggcatcagaaagggcaacttactcttcctggcatcttattgtattggagggtgaccaccctgggcatggggtgttggcaggggtcaaaaagcttatttcttttaatctcttactcaacgaacacatcttctgatgatttcccaaaattaatgagaatgagatgagtagagtaagatttgggtgggatgggtaggatgaagtatattgcccaactctatgtttctttgattctaacacaattaattaagtgacatgatttttactaatgtattactgagactagtaaataaatttttaagacnaaaaaaaaaaaaaaaaaaaaaaaaaaaagcttg

SEQ ID NO: 249 - DNA, 608 bp, Homo sapiens
ctcagagctcaagtctgaactctacctccagacagaatgaagttcatctcgacatctctgcttctcatgctgctggtcagcagcctctctccagtccaaggtgttctggaggtctattacacaagcttgaggtgtagatgtgtccaagagagctcagtctttatccctagacgcttcattgatcgaattcaaatcttgccccgtgggaatggttgtccaagaaaagaaatcatagtctggaagaagaacaagtcaattgcgtgtgtggaccctcaagctgaatggatacaaagaatgatggaagtattgagaaaaagaagttcttcaactccaccagttccagtgtttaagagaaagattccctgatgctgatatttccactaagaacacctgcattcttcccttatccctgctctggattttagttttgtgcttagttaaatcttttccaggaaaaagaacttccccatacaaataagcatgagactatgtaaaaataaccttgcagaagctgatggggcaaactcaagcttctttactcacagcaccctatatacacttggagtttgcattcttattcatcagggaggaaagtttctttgaaaata

SEQ ID NO: 250 - DNA, 400 bp, Homo sapiens
ccaggtaccaatgggtgcgctgcaatccagacagtaattctgcaaactgccttgaagaaaaaggaccaatgttcgaactacttccaggtgaatccaacaagatcccccgtctgaggactgacctttttccaaagacgagaatccaggacttgaatcgtatcttcccactttctgaggactactctggatcaggcttcggctccggctccggctctggatcaggatctgggagtggcttcctaacggaaatggaacaggattaccaactagtagacgaaagtgatgctttccatgacaaccttaggtctcttgacaggaatctgccctcagacagccaggacttgggtcaacatggattagaagaggattttatgttataaaagaggattttcccaccttg

SEQ ID NO: 251 - DNA, 393 bp, Homo sapiens
ctgctcatcagatggcgggaagatgaagacagatggtgcagccacagttcgtttgatctctaccttggtccctcccccgaaagtgagcgaaggaggccacttggcacgaccgtgacagtaataaactgcaaaatcttcaggctctaggctgctgacggtgagagtgaagtctgtcccagatccactgccagtgaatctggcggggatgccagcggccctgtaggatgtatcataaatgatgatcctgggagcctggccaggtttctgttgggaccagcctaagtaggtggcaacactctgactggccctgcaggagagggtggctctctcccctggagacaaagacagggtggctggagactgtgacaacacaagttctccggtggagtctgg

SEQ ID NO: 252 - DNA, 425 bp, Homo sapiens
cctggtggaaagaaggctctagaacctgcttatagagccacaacagggtgcagacaactgtgatgtcaaccaatgtcactcgttcgcccaccagaaaagtcctcgtcttcaagtaagcatccagcagccccagaattcgcctcacttcctcctttgcattctcagtggcctgtttgttgtggtgcatgatgcccaaggtggggaacacccaggtactggctgggggcactatatcggaatcagcaaagctcacccactgcaccacctgggctgctgcctctggagtacttccccgcagctcctcattgctcacatagtaggcaatggcgttgctctcaaacacacagaatccatcatcaccctcaaatgctgggaccttgccggcaggaaatttgcggagaaattcaggggtgcggttggtttgg

SEQ ID NO: 253 - DNA, 603 bp, Homo sapiens
aaaaaaacttgtgcaaattgcaatcactgagtgattatggaaaggcaaagtatatacagtaatgtgagagaaactcaaaccaagtaagggtaaaaatgaaatgattaacaccaccagaggaggaagctactatcaaaataaaaccatacttcctaataaaggtaaggccatcataaccccagaaaatgcttcatactttagataattaaaaacacattataaccaaaagcagatagtaacattgagtatgctgatttcaaaaagaagatgggtctagataccaggacagctctttttagtgccttccttaaaaagggcaaaactttttagagccatgtaattgtttatagccatggcctggcttcaggcatctcataagtgaggcttcagaaagtccttgaagagtatatggcagtgaaactgggctcccatctttaccataaagatgttcttcttgagaataagtgcatataggaagtgatcgcttatgacatcatttcattgatcttgaggccatataaagagacttgctgatattagagcagtttctttctaatcaatattccgctgaattccaagcaatgaggcacacaccagtttgtc

SEQ ID NO: 254 - DNA, 485 bp, Homo sapiens
aaaaaaggaaacagaaaacagaagaaatcacttaaggagagctgtcattttctattggtgaggattcctgatcttggggaggttctggaaagttcgtctctgtttcttcttcttcctcttcttggattggaataatttcaatgtcttcttcattctttggttgggaagatgtttcagttagcccaaccacttcttcttttatttcaatagtctgttcttttttttcttctgctgacaggagaactatgttagatttgggtctggagcacgttcttttccattcattctcaacgatgccagctattacaagttcctggaagaaggcaaagatcagcatcactgacaaaatgcccaagaacagagattgtatgctgtaacagtattgggtagatggggagtttttctcagagggattagctggttcacagttgtatatgttaatatatggtgtgtgagctctaataaaattcagactctccattttt

SEQ ID NO: 255 - DNA, 568 bp, Homo sapiens
ctcagagctcaagtctgaactctacctccagacagaatgaagttcatctcgacatctctgcttctcatgctgctggtcagcagcctctctccagtccaaggtgttctggaggtctattacacaagcttgaggtgtagatgtgtccaagagagctcagtctttatccctagacgcttcattgatcgaattcaaatcttgccccgtgggaatggttgtccaagaaaagaaatcatagtctggaagaagaacaagtcaattgtgtgtgtggaccctcaagctgaatggatacaaagaatgatggaagtattgagaaaaagaagttcttcaactctaccagttccagtgtttaagagaaagattccctgatgctgatatttccactaagaacacctgcattcttcccttatccctgctctggattttagttttgtgcttagttaaatcttttccaggaaaaagaacttccccatacaaataagcatgagactatgtaaaaataaccttgcagaagctgatggggcaaactcaagcttcttcactcacagcaccctatatacacttggagttt

SEQ ID NO: 256 - DNA, 518 bp, Homo sapiens
cctcccgcttacgcagcttgtcatactggcgacaggttctctcgaagagcgaggagatgctggtgtggttggaaaaaaggaaacagaaaacagaagaaatcacttaaggagagctgtcattttctattggtgaggattcctgatcttggggaggttctggaaagttcgtctctgtttcttcttcttcctcttcttggattggaataatttcaatgtcttcttcattctttggttgggaagatgtttcagttagcccaaccacttcttcttttatttcaatagtctgttcttttttttcttctgctgacaggagaactatgttagatttgggtctggagcacgttcttttccattcattctcaacgatgccagctattacaagttcctggaagaaggcaaagatcagcatcactgacaaaatgcccaagaacagagattgtatgctgtaacagtattgggtagatggggagtttttctcagagggattagctggttcacagttgtatatgttaatatat

SEQ ID NO: 257 - DNA, 231 bp, Homo sapiens
aaacttgatccaacctctttgcatcttacaaggttaaacagctaaaagaagtaaaataagaaggcaatgcttgtggaatgtacagtgcatattggcggcgcacgcctcattacgattcgcctgcttgcttctcctgttcaatcgtttctttggaaggcagtggatttttctcttgcgtctctgtcttcttcagtttcgacttatcgaatttctcgatctcagccatatcgg

SEQ ID NO: 258 - DNA, 551 bp, Homo sapiens
  misc_feature (1)...(551): n = g, a, c or t
ctgaatatactaaacnttgctctattatctgttgaattgctgtatttcactttttcagcatttggggatcattatttaattgaatttgtagagatcgattttccagacaggtctctgttcttcaatgaacaaatgataagaaacaatttgactccttatatgacaatggaattaaataaattgacactcatctaggaataattctacaatcatctccatctctaagattacctactgcaaacaaagaattgatctttctttctcaaaaaccacatgggtaagatgatcattgtgactctgaatgcaagaataagtgagtggaagctacaaggggagattatctgccaacatagaaagaatctagaagaaaagattttattacaggtaacatgacatagcttggagccatctttttggtctcttgcatacattttctctgcatgtctaaggaagaattcacaaggtagcaagcaccaatactttctgctttggagtttcacaaattgaaaatttgtccctctcttgttaagtcaatcaaacatctaccaatg

SEQ ID NO: 259 - DNA, 231 bp, Homo sapiens
aaacttgatccaacctctttgcatcttacaaagttaaacagctaaaagaagtaaaataagaaggcaatgcttgtggaatgtacagtgcatattggcggcgcacgcctcattacgattcgcctgcttgcttctcctgttcaatcgtttctttggaaggcagtggatttttctcttgcgtctctgtcttcttcagtttcgacttatcgaatttctcgatctcagccatatcgg

SEQ ID NO: 260 - DNA, 278 bp, Homo sapiens
aaaatatccctgaagtgacacactccttttttgagaccgatactggtattcttttattatagagactaaaaggtctgccttactagacttcccactttttgttctgaaaggaattaaggactgcaggtttccagctctgtcttcccgaggccattatgaacagattaaatggaaggacaaattctaaataactgggctttcaacatgaaaagggaaaggctgatggggagttcagaaccttgaatactgtaactgaacatccctcaaggttaatgcag

SEQ ID NO: 261 - DNA, 272 bp, Homo sapiens
ccaaaagaagtaagacagcttgctgaagatttcctgaaagactatattcatataaacattggtgcacttgaactgagtgcaaaccacaacattcttcagattgtggatgtgtgtcatgacgtagaaaaggatgaaaaacttattcgtctaatggaagagatcatgagtgagaaggagaataaaaccattgtttttgtggaaaccaaaagaagatgtgatgagcttaccagaaaaatgaggagagatgggtggcctgccatgggtatccatgg

SEQ ID NO: 262 - DNA, 500 bp, Homo sapiens
  misc_feature (1)...(500): n = g, a, c or t
ccggcagtttgtcacagccacagatgttgtccgagggaaccccaagttgaacttggcttttattgccaacctctttaacagataccctgccctgcacaaaccagagaaccaggacattgactggggggctcttgaaggtgagacgagagaagagcggacatttaggaactggatgaactccctgggtgttaaccctcgagtcaatcatttgtacagtgacttatcagatgccctggtcatcttccagctctatgaaaagatcaaagttcctgttgactggaacagagtaaacaaaccgccataccccaaactgggaggcaatatgaagaagcttgagaattgtaactacgcggtagaattggggaagaatcaagcgaagttctccctggttggcatcggtggacaagatctcaatgaaggaaaccgcactctcacactggccttgatttggcagctaatgagaaggtatacactgaatatcctcnaagaaattggtggtg

SEQ ID NO: 263 - DNA, 287 bp, Homo sapiens
ctctggcctcttactcaccctctaccacagacatggctcagtcactggctctgagcctccttaccctggttctggcctttggcatccccaggacccaaggcagtgatggaggggctcaggactgttgcctcaagtacagccaaaggaagattcccgccaaggttgtccgcagctaccggaagcaggaaccaagcttaggctgctccatcccagctatcctgttcttgccccgcaagcgctctcaggcagagctatgtgcagacccaaaggagctctgggtgcagcag

SEQ ID NO: 264 - DNA, 306 bp, Homo sapiens
ctgcccacctcaccctcagctctggcctctgactcaccctctaccacagacatggctcagtcactggctctgagcctccttatcctggttctggcctttggcatccccaggacccaaggcagtgatggaggggctcaggactgttgcctcaagtacagccaaaggaagattcccgccaaggttgtccgcagctaccggaagcaggaaccaagcttaggctgctccatcccagctatcctgttcttgccccgcaagcgctctcaggcagagctatgtgcagacccaaaggagctctgggtgcagcag

SEQ ID NO: 265 - DNA, 242 bp, Homo sapiens
ctgggagagctagactaagttggtcatgatgcagaagctactcaaatgcagtcggcttgtcctggctcttgccctcatcctggttctggaatcctcagttcaaggttatcctacgcagagagccaggtaccaatgggtgcgctgcaatccagacagtaattctgcaaactgccttgaagaaaaaggaccaatgttcgaactacttccaggtgaatccaacaagatcccccgtctgaggactg

SEQ ID NO: 266 - DNA, 132 bp, Homo sapiens
ctgcttccattggtgggtcatttttgctgtcaccagcaacgttgccacgacgaacatccttgacagacacattcttgacattgaagcccacattgtccccaggaagagcttcactcaaagcttcatggtgca

SEQ ID NO: 267 - DNA, 108 bp, Homo sapiens
ccatgggaatctaattaatttcataatgatgttggttgaacatgataccaaaaaatgcaggtattttcaagaacaataagatagataacagcattaaagcataatcct

SEQ ID NO: 268 - DNA, 414 bp, Homo sapiens
cctgacacaatatccctgttcactttgaagtgaattttgactctatattcagaaccttcctttaacacaatggtttcctttttgagggcttccagatctccagtaaggtccatggtgattggtcccggggcactctcacaaaccagggtgagccgggtgacaacgacattgggggctttcggatctgtcaccacaggaccatctcccagcagcgttttcttgtacttaattagactctcatcatctttgtccatttcctgcagctctttcagggacttctgtggtggaggcttataattgagcttgctgtccagctcatcatcgtcatcctcctccacatgtgggctctggggctttttcagtcattctgatctatttattcagtgcttcacgtctctgtccggggtgcctctg

SEQ ID NO: 269 - DNA, 461 bp, Homo sapiens
cgcgtggagggaatatgtgttctggaagaatagagatcaaattccaaggacggtggggaacagtgtgtgatgataacttcaacatagatcatgcatctgtcatttgtagacaacttgaatgtggaagtgctgtcagtttctctggttcatctaattttggagaaggctctggaccaatctggtttgatgatcttatatgcaaccggaaatgagtcagctctctggaactgcaaacatcaaggatggggaaagcataactgtgatcatgctgaggatgctggagtgatttgctcaaagggagcagatctgagcctgagactggtagatggagtcactgaatgttcaggaagattagaagtgagattccaaggagaatgggggacaatatgtgatgacggctgggacagttacgatgctgctgtggcatgcaagcaactgggatgtccaactgccgtcccagc

SEQ ID NO: 270 - DNA, 206 bp, Homo sapiens
gaatccaacaagatcccccgtctgaggactgacctttttccaaagacgagaatccaggacttgaatcgtatcttcccactttctgaggactactctggatcaggcttcggctccggctccggctctggatcaggatctgggagtggcttcctaacggaaatggacaaggattccaactagtagacgaaagtgatgctttccatgac

SEQ ID NO: 271 - DNA, 500 bp, Homo sapiens
  misc_feature (1)...(500): n = g, a, c or t
atgatgcagaagctactcaaatgcagtcgggttgtcctggctcttgccctcatcctggttctggaatcctcagttcaaggttatcctacgcagagagccaggtaccaatgggtgcgctgcaatccagacagtaattctgcaaactgccttgaagaaaaaggaccaatgttcnaactacttccaggtgaatccaacaagatcccccgtctgaggactgacctttttccaaagaccagaatccaggacttgaatcgtatcttcccnctttctgaggactactctggatcaggcttcggctccggctccggntctggatcaggatctgggagtggcttcctaacggaaatggaacaggattaccaactagtagaccaaagtgatgctttccatgacaaccttaggtctcttgacaggaatctgccctcanacagccnggacttgggtcaacatggattagaagaggattttatgttataaaagaggattttccccccttgncn

SEQ ID NO: 272 - DNA, 511 bp, Homo sapiens
  misc_feature (1)...(511): n = g, a, c or t
ggtcatgatgcagaagctactcaaatgcagtcggcttgtcctggctcttgccctcatcctggttctggaatcctcagttcaaggttatcctacgcagagagccaggtaccaatgggtgcgctgcaatccagacagtaattctgcaaactgccttgaagaaaaaggaccaatgttcgaactacttccaggtgaatccaacaagatcccccgtctgaggactgacctttttccaaagacgagaatccaggacttgaatcgtatcttcccnctttctgaggactactctggatcaggcttcggctcccgctccggctctggatcaggatctgggagtggcttcctaacggaaatggaaccnggattacccaactagtagacgaaagtgatgctttccatgacaacccttaggtctcttgacaggaatctgccctcacacngccaggacttgggtcaacatggattagaagaggattttattgntataaaagaggattttccccnccnttgaccc

SEQ ID NO: 273 - DNA, 101 bp, Homo sapiens
  misc_feature (1)...(101): n = g, a, c or t
gttngtaatnatgcanaagctactcnaatgcagtccnnctttttctggctcttgccctcatcctggttctngaatcctcacttcaaggttatcctacncac

SEQ ID NO: 274 - DNA, 451 bp, Homo sapiens
  misc_feature (1)...(451): n = g, a, c or t
anctagactannntggtcatgatgcagaagctactcaaatgcagtcggcttgtcctggctcttgccctcatcctggttctggaatcctcagttcaaggttatcctacgcagagagccaggtaccaatgggtgcgctgcaatccagacagtaattctgcaaactgccttgaagaaaaaggaccaatgttngaactacttncaggtgaatncaacangatcccccgtctgaggactgacctttttccaaagacgagaatccaggacttgaatcgtatcttcccactttctgaggactactctggatcaggcttcggctccggctccggctctggatcaggatctgggagtggcttcctaacggaaatggaacaggattaccaactantagacgaaagtgatgctttccatgacaaccttangtctcttgacaggaatctgcccncagacagcc

SEQ ID NO: 275 - DNA, 423 bp, Homo sapiens
attgacacttcctggtgggatccgagtgaggcgacggggtaggggttggcgctcaggcggcgaccatggcgtatcacggcctcactgtgcctctcattgtgatgagcgtgttctggggcttcgtcggcttcttggtgccttggttcatccctaagggtcctaaccggggagttatcattaccatgttggtgacctgttcagtttgctgctatctcttttggctgattgcaattctggcccaactcaaccctctctttggaccgcaattgaaaaatgaaaccatctggtatctgaagtatcattggccttgaggaagaagacatgctctacagtgctcagtctttgaggtcacgagaagagaatgccttctagatgcaaaatcacctccaaaccagaccacttttcttgacttgcctgttttgg

SEQ ID NO: 276 - DNA, 433 bp, Homo sapiens
  misc_feature (1)...(433): n = g, a, c or t
tgnncatgatgcanaagctactcaaatgcagtcggcttgtcctggctcttgccctcatcctggttctggaatcctcagttcaaggttatcctacgcagagagccaggtaccaatgggtgcgctgcaatccagacagtaattctgcaaactgccttgaagaaaaaggaccaatgttcgaactacttccangtgaatccaacaagatcccccgtctgaggactgacctttttncaaagacgagaatccaggacttgaatcgtatcttcccactttctgaggactactctggatcaggcttnggntccggctccggctctggatcangatctgggagtggcttcctaacggaaatggaacaggattaccaactagnngacgaaagtgatgctttccatgacaaccttaggtctcttgacaggaatctgccctcaga

SEQ ID NO: 277 - DNA, 478 bp, Homo sapiens
ctggctaggtgtgtgtgtatgtgagtaggggtgctattgattggcacatattttcccccctggagtttaggggtggcagaaagcttttatagtaccaaaaaagtaaacattgataatatggcctgacaacaatcagatatgctaagctctagaagcaaaagcaaggtaggattgcctccaaatgttgacaggtattagccataccacagtaactagatctaatgtgagggctaaatgcctggagaggcagaaccctaaaggatgcttagttatagctccatgctgccgccgagtggcttgatgctccattacaccctccttggatccaaccttccattaaggctgaaggctctagagggcagagtattcaagatgttagatctggtccaagcccaaattctagagttaaaagcagaggggttcttagtggctgaaaaaaaacaaaacctgatgacatttgggactccagttttgagga

SEQ ID NO: 278 - DNA, 208 bp, Homo sapiens
aagctactcaaatgcagtcggcttgtcctggctcttgccctcatcctggttctggaatcctcagttcaaggttatcctacgcagagagccaggtaccaatgggtgcgctgcaatccagacagtaattctgcaaactgccttgaagaaaaaggaccaatgttcgaactacttccaggtgaatccaacaagatcccccgtctgaggactg

SEQ ID NO: 279 - DNA, 330 bp, Homo sapiens; identical to SEQ ID NO: 2

SEQ ID NO: 280 - DNA, 294 bp, Homo sapiens
ccaaactcctccagatgccagacggtctccttcttgtccagatccacatagaacatctcatcttcatcaaattcaaacataaactcccctgttggtctatgcgtctgtacaaacgcggcataagttgacacatggtccgccttgatggccccagctcctcggagactcagcaggaaagccaaggagagggctctcaagatcacagctctgatatggaacattctgtcttcagggcgcatgttgtggggtctataattgatgactgtgagcacaggaacagtgatgaggaactga

SEQ ID NO: 281 - DNA, 269 bp, Homo sapiens; identical to SEQ ID NO: 4

SEQ ID NO: 282 - DNA, 491 bp, Homo sapiens
ccaggagtgtcaaactctgtaagcacacggataccccggagccgtgcgtattcaatgacctccttcacatcctgtgctgtgtagatgtgggtgacagggttgtaggacccctttctcatgagctctggaaaagtgaagctctcatatgggaaggaaggatcatctaccagatgccagtggaacacgttcaatttattgtacgccatgacatccagagtgtccaggatgctagagagtggcaggtaatggcgagatgtatccaacagcaagccccggtgaggaaagcggggaaagtcctcaatctcagtcttgttgataaagaactcggagagctccccagacagtctcagagaggagtaaacactggtcatcatttatggtcagggtataattctccactgactccaaagtaggaagctggttacatccaggtgtgactacagagacaaccaacacattcttctccagtgtatgcccgtttccctaggttg

SEQ ID NO: 283 - DNA, 472 bp, Homo sapiens
  misc_feature (1)...(472): n = g, a, c or t
cctcnnacngaaggctggtgaccaggtcccaggcgggcaagactcagccttggtggggcctgaggacagaggaggcccaggagcatcggggagagaggtggagggacaccgggagagccaggagcgtggacacagccagaactcatcacagaggctggcgtccagtcccgggtcacgtgcagcaggaacaagcagccactctgggggcaccaggtggagaggcaagacgacaaagagggtgcccgtgttcttgcgaaagcggggctgctggccacgagtgctggacagaggcccccacgctctgcttgcccccatcacgccgttccgtgactgtcacgcagaatctgcanacaggaagggagactctaagcgggagtgcggccaagcctgcctccgcccgtcagggaggactcccgggctcactcnaaggaggtgccaccatttccgctttggnnagcttttctttttcttt

SEQ ID NO: 284 - DNA, 349 bp, Homo sapiens
  misc_feature (1)...(349): n = g, a, c or t
aaaaaatttactcatcttccataaagcgacttttaatgtatcaacacttaaagatacacagtgacttaatgaaatatcagcacaactgcatagaattgagctccagagaattatacactcgagctgctttcctgggctctggtttataagggtattggcttagagaccagcttggagtcatttgcccctacccgggaaatgcaggccaggaaacttaagattttgcgggccttttctgtttctaggtaaaatgcagggagctccctgaaggncttgaaaaccatcaaccattcaaatatggtatcctggggacctttcctcttgagtaaanggaagaaaggaggtttgg

SEQ ID NO: 285 - DNA, 179 bp, Homo sapiens
  misc_feature (1)...(179): n = g, a, c or t
aaagntggctcaagactggcccangcataatactgtcaatctaaaggtaaccggcaacatcaaaaagtacatctcaaaagaatcaggcttaaagataaacaggagaactggatatatctaagagtaagaagtgtaaacaatagaaaagaggtagggtttagggttctcatctagggatt

SEQ ID NO: 286 - DNA, 462 bp, Homo sapiens; identical to SEQ ID NO: 16
  misc_feature (1)...(462): n = g, a, c or t

SEQ ID NO: 287 - DNA, 388 bp, Homo sapiens
ggacattcaaatgtctttatccacattcctgaaggataattgttatagattccctacctccataggaatgcttataatggattatctatacaatctccacattcccacattttgcattagagaatggaatcagtcaaaccctgttcccagagtttcccttagagttctcacctgttgtcttatatccatctaggaatccccatctctaatgtaagcttggagatccgggcccccgggggacaggtgactgaaggacaaaaactgatcctgctctgctcagtggctgggggtacaggaaatgtcacattctcctggtacagagaggccacaggaaccagtatgggaaagaaaacccagcgttccctgtcagcagagctggagatcccag

SEQ ID NO: 288 - DNA, 387 bp, Homo sapiens; identical to SEQ ID NO: 20

SEQ ID NO: 289 - DNA, 279 bp, Homo sapiens
  misc_feature (1)...(279): n = g, a, c or t
ngnccacaagatatgttctatagacgtccatgagtcctcttgctgtgngggagcggtatccacagacttntggaataattggcctgtgaggaagctcatcaaagctgcaaacagtacaantgaatgcaataganagncacagggccttattagcctttctgatggaggacttganatttgttgnccaggaanctattgtgtcataaactgaagagacatnccactttgatggattatttttcttttcagaaagacttggcttccttgtcctttctactg

SEQ ID NO: 290 - DNA, 235 bp, Homo sapiens
  misc_feature (1)...(235): n = g, a, c or t
ngtccagtagggctgagatgttgggagccatcaatcaggaaagccgggttagtaaagcagttgaagtgatgattcancacgtagaaaacttgaagaggatgtatgccaaaaagcaccgctgaattagaagaactgaaacaggttcttctgcagaatgaaaggcctttcaatnctcttgaagatgatgatgactgccaaattaaaaaacgttcagcttttctaaactccaagccat

SEQ ID NO: 291 - DNA, 318 bp, Homo sapiens
  misc_feature (1)...(318): n = g, a, c or t
cctttccttgagctgcacgtgaacctgtgtgggcaggcagcgtttgcaggcgtgtttacgggcaggcagcgtttgcaggcgtgtttaccggcaggcagcgtttgcaggcgtgtttacatgcaggcgtancaccatgtgagaccactggtccagggtttcagaggtcctgctcaggtgaatcggctgtgttctcacaagttcacggagctgantgggtgtgcaacatgaaatactagtgctgtgagggacagaagggacagaaagaggctnaagaccatnatccagctatacctgtgcctcggcttttctcagacctcg

SEQ ID NO: 292 - DNA, 381 bp, Homo sapiens
  misc_feature (1)...(381): n = g, a, c or t
ccaagcctcatcaataactgtatccaaaaggagacgctgcttggggtgtacccagagaaaacaccaagctttcctggcttcccggccctccctctccccattagtctttggggtgcatacataagtgttgtgtgaagtctcttggggtttagaagatcttgcactcattgatggagaagagcctccttctgtttcgtctcctggcctggttgacggcagttcggacgacgcactcaaacacctgctgtactccccgattgctaagggctgagcactccaggtagcccttggctctgacatcctgggccagnttcttcccttccatggcattgacgcangaggccctgtggggccccatctcccgctggtcagtctgggtgg

SEQ ID NO: 293 - DNA, 416 bp, Homo sapiens; identical to SEQ ID NO: 37
  misc_feature (1)...(416): n = g, a, c or t

SEQ ID NO: 294 - DNA, 317 bp, Homo sapiens
aaattatgacacaaaattttattaacaaggaaatatccattaattgactactacagtaaaaactttataatgcttgtatcatgaagaaagaccttccttttccttatatattaattgaactacataggcttgctgtacattttgttattcatgttataagaattctagattccattgcttttgaaatatgtttctttttaggaactaaaagtcaacttatagtttgatttctgttttatttgtactgtgtttctgattttgtgggtttctaaataaaaagatcaaacccaccactttcaatatactgttttctattt

SEQ ID NO: 295 - DNA, 156 bp, Homo sapiens; identical to SEQ ID NO: 40
  misc_feature (1)...(156): n = g, a, c or t

SEQ ID NO: 296 - DNA, 533 bp, Homo sapiens; identical to SEQ ID NO: 43
  misc_feature (1)...(533): n = g, a, c or t

SEQ ID NO: 297 - DNA, 529 bp, Homo sapiens
  misc_feature (1)...(529): n = g, a, c or t
cctgtggaaacgggcccctcccggagcccanggaaaagactgcttctctctcagcagccccattcctggttattccagggctgaccaacaaggacatttccacctcacaagctgctgctcactgatgttcccgtgggataagaggggaaattaagtgacaaccgcagcagcatccgctgggtctgtccctgtatcgcatgccagaggcttgcgcatcaccaagggtcgggcgtagctgtgctgccctgcgttgtgtgcatagcctctctctcctctgcttgcttaagtccttcttanccaccctctcccttanggctctaccaggtatgccacggggagcaggaatattaatcctagaatcctgactctcagtggcaatacagagtgtactccagggatgctgggtgaaacccggggaattctactcaccattaaccttgggagtaagaggccatacctcatctgaaactttacctgcccgggcgggccgttcaaaaggccnattcccccnccctttgcgccnttatag

SEQ ID NO: 298 - DNA, 345 bp, Homo sapiens
  misc_feature (1)...(345): n = g, a, c or t
ccaatgtggttggtcttcancttgcanttagccaggttccataccttgaccagcttgtcccagccacaggagacgatgatagggttgctgctgttgggcgagaagcggacacaagacacccactctgagtggctctcatcctggacagtgtatttgcacacacccagggtattccatagcttgatggttttatctcgagatccagagacaatctgccggttgtcagaggagaaggccacactcagcacatccttggtatggcccacaaatcgcctcgtggtggtgcccgttgtgagatcccagaggcgcagggttccatcccaggagcctgagagggcaaactgg

SEQ ID NO: 299 - DNA, 182 bp, Homo sapiens
  misc_feature (1)...(182): n = g, a, c or t
ccacaagatatgttctagagacgtccatgagtcctcttgctgtgtgggagcggnatccacagacttctggaataattggcctgtgaggaagcccatcaaagctgcaaacagtacaatgaatgcaatagagagccagagggccttattagcctttntgatggaggacttgagatttgttgccc

SEQ ID NO: 300 - DNA, 440 bp, Homo sapiens
ctgcaaatggttctgctgaaacatctgccttggacacagggttctcgctcaacctttcagagctgagagaatatacagagggtctcacggaagccaaggaagacgatgatggggaccacagttcccttcagtctggtcagtccgttatctccctgctgagctcagaagaattaaaaaaactcatcgaggaggtgaaggttctggatgaagcaacattaaagcaattagacggcatccatgtcaccatcttacacaaggaggaaggtgctggtcttgggttcagcttggcaggaggagcagatctagaaaacaaggtgattacggttcacagagtgtttccaaatgggctggcctcccaggaagggactattcagaagggcaatgaggttctttcctcaacggcaagtctctcaaggggaccacgcaccatgatgccttgg

SEQ ID NO: 301 - DNA, 396 bp, Homo sapiens
  misc_feature (1)...(396): n = g, a, c or t
cttgcgtccccgcgtgtgtgcgcctaatctcaggtggtccacccgagaccccttgagcaccaaccctagtcccccgcgcggccccttattcgctccgacaagatgaaagaaacaatcatgaaccaggaaaaactcgccaaactgcaggcacaagtgcgcattggtgggaaaggaactgctcgcagaaagaagaaggtggttcatagaacagccacagcagatgacaaaaaacttcagttctccttaaagaagttangggtaaacaatatctctggtattgaagaggtgaatatgtttacaaaccaaggaacagtgatccactttaacaaccctaaagttcaggcatctctggcagcgaacactttcaccattacaggccatgctgagacaaagcag

SEQ ID NO: 302 - DNA, 548 bp, Homo sapiens
  misc_feature (1)...(548): n = g, a, c or t
ctgcgtgattcccgtgattgcgttacaagctttgtctccttcgacttggagtctttgtccaggacaatgagacactcaaagagaacttattgtcctgattgggatgacaaggattgggattatggaaaatggaggagcagcagcagtcataaaagaaggaagagatcacatagcagtgcccaggagaacaagcgctgcaaatacaatcactctaaaatgtgtgatagccattatctggaaagcaggtctataaatgagaaagattatcatagtcgacgctacattgatgagtacagaaatgactacactcaaggatgtgaacctggacatcgccaaagagaccatgaaagccggtatcagaaccatagtagcaagtcttctggtagaagtggaagaagtagttataaaagcaaacacaggattcaccacagtacttcacatcgtcgttcacatggggtatgaaccgtttttacctgcccgggcgggcgctaanggcgaattccagcacactnggcgccgttctaggggatccgagctcggtccanctt

SEQ ID NO: 303 - DNA, 232 bp, Homo sapiens
ccagcgacagcctggcctgggaatggactggcagctcatcactaaaatgactcctttcatggaatccactgctatgcagccacactgaccacagagcaactgaataggtgagcattggattgttgatgacaactcttcagcagaacaattgtgtgtttgaagggactgttttatgatgaaataactgttatttcctggagctaattgttgaatgacagtttgtcaactgttt

SEQ ID NO: 304 - DNA, 232 bp, Homo sapiens; identical to SEQ ID NO: 57

SEQ ID NO: 305 - DNA, 191 bp, Homo sapiens; identical to SEQ ID NO: 58
  misc_feature (1)...(191): n = g, a, c or t

SEQ ID NO: 306 - DNA, 342 bp, Homo sapiens
aaacttttgagttgtagtcagaaactgttgttggactgcatagttttcaaaagtttttggtacatttctgactttagaaatctggggtaggaatccctttccatatgcatatagactattttctgagcttcttcaaaacatgtttcagtgggttcctgaatgttcctgatgatagtctctcttgtcgaactgtcaatgttaatctctctaggggactgtggctggatgtaaatcttataaagcttctttgccctagaaattctgctccaccgtgaggcaattttcttataggtttcacatgccatccagaattgaatattctcgtcactgtgctccattttt

SEQ ID NO: 307 - DNA, 545 bp, Homo sapiens
ccagtagggctgagatgttgggagccatcaatcaggaaagccgggttagtaaagcagttgaagtgatgattcagcacgtagaaaacttgaagaggatgtatgccaaagagcacgctgaattagaagaactgaaacaggttcttctgcagaatgaaaggtctttcaatcctcttgaagatgatgatgactgccaaattaaaaaacgttcagcttctctaaactccaagccatcttctctacgaagagtgactattgcctctttacccagaaatattggaaatgcaggaatggtggctgggatggaaaataatgatcgattcagtagaaggtcaagcagttggcgtattttggggtcaaagcagagtgaacaccgtccctcattacctcgatttattagcacctattcctgggcagatgctgaagaagaaaaatgtgaactaaaaactaaagatgactcagagccatctggagaagaaacagtagaaaggacaaggaagccaagtctttctgaaaagaaaaataatccatcaaagtgggatgtctct

SEQ ID NO: 308 - DNA, 330 bp, Homo sapiens
cctccatctcggctccagtccacactgtagatcgtgtctgggtgcacctctgggcccagtgtcagcatggccgccccagtgcccacgtcccacaccatgatcacgttgtcacaacctgcactgagcagcacgttctgggctgtggtgtgccaggccacaatgcccacacgcttggtgtggccctccagggtgacgacgggctcccgcaggggcagcatcaggcccccatccgggatctcccacaccatgactgtgcagtcctcggagccactggcaatgacgttgtcattgtgcgggcaccaggcgatgtctagcgcaggggctgtgtgg

SEQ ID NO: 309 - DNA, 392 bp, Homo sapiens; identical to SEQ ID NO: 67
  misc_feature (1)...(392): n = g, a, c or t

SEQ ID NO: 310 - DNA, 221 bp, Homo sapiens
  misc_feature (1)...(221): n = g, a, c or t
nccaggctcaggccctggggtgaaaggagacaggtgctgccaagaccatacatcagtcatctggcagcagctcgagaagcatgtcctccacgccgtcaatcttgatgtggtgcactaaagcgccnagaaaacttggagtctgaggatcggtatcgtccatcagggtagagctgccacatgataggcagcaggcttgggcctatctgggtgggggtcatagg

SEQ ID NO: 311 - DNA, 118 bp, Homo sapiens
  misc_feature (1)...(118): n = g, a, c or t
ncctcccagagaaggctggtgaccaggtcccaggcgggcaagactcagccttggtggggcctgaggacagaggaggcccaggagcatcggggagagaggtggagggacaccnggaaaa

SEQ ID NO: 312 - DNA, 133 bp, Homo sapiens
  misc_feature (1)...(133): n = g, a, c or t
gccggncaggtaaagaactaatttgtaaattatgacacaaaattttattaacaaggaaatatccattaattgactactacagtaaaaactttataatgcttgtatcatgaagaaagaccttccttttncctat

SEQ ID NO: 313 - DNA, 274 bp, Homo sapiens
  misc_feature (1)...(274): n = g, a, c or t
ngtaaatgattctttatttcaataaactttaacaaacaatatataatatttcttccttaaaaagctcattcaaagatcataggcagacttcttccccattgtattttagttggggagataaaggcaaaaagaggaaatgtaagctatcttacagtcattctgagaacctctggtttcatgctatactttcccagctaaaagttactaatttacgaagttcagatctgaaacttaaaaatcaanatccatatattaggatgtcctgctgtcacac

SEQ ID NO: 314 - DNA, 268 bp, Homo sapiens
  misc_feature (1)...(268): n = g, a, c or t
gtgatctccccatttgaaggtcgactgattagcaatctaagttctgcccggaactttaattcctctttgccaggtaatgcattcacagatcctggggactagggtgtggacatctttgggaggcattattctgcctgccataatagaattgttnggaagattaaacaacataatatacatgacgtatgttgangcacgcttggcacctgggaaatactcaggatgtactaaccattgctcctacacagntcagctnctgaaggagtcc

SEQ ID NO: 315 - DNA, 201 bp, Homo sapiens
aaaatttccaacctgaagatgggtcataattacacgttcaccgtccaagcaagatgcctttttggcaaccagatctgtggggagcctgccatcctgctgtacgatgagctggggtctggtgcagatgcatctgcaacgcaggctgccagatctacggatgttgctgctgtggtggtgcccatcttattcctgatactgctg

SEQ ID NO: 316 - DNA, 202 bp, Homo sapiens; identical to SEQ ID NO: 78
  misc_feature (1)...(202): n = g, a, c or t

SEQ ID NO: 317 - DNA, 182 bp, Homo sapiens
  misc_feature (1)...(182): n = g, a, c or t
accagcagtcctgcggcacctacctccgcgtgcgccagccgccccccaggcccttcctggacatgggggagggcaccaagaaccgaatcatcacagccgaggggatcatcctcctgttctgcgcggtggtgcctgggacgctgctgctgttnaggaaacgatggcaagaacganaactcngg

SEQ ID NO: 318 - DNA, 149 bp, Homo sapiens; identical to SEQ ID NO: 80
  misc_feature (1)...(149): n = g, a, c or t

SEQ ID NO: 319 - DNA, 240 bp, Homo sapiens
  misc_feature (1)...(240): n = g, a, c or t
ccagcctacaatggggatgttgtgtttctgttcaccttcgtttactatgcctgtgtcttctccaccacgctggggtctgggaggaatggacagacagaggatgagctctacccagggcctgcaggacctgcctgtagcccactctgctcgccttagcactaccactcctgccaaggaggattccatttggcagagcttcttccaggtgcccagctatacctgtgcctcggctttttcana

SEQ ID NO: 320 - DNA, 374 bp, Homo sapiens; identical to SEQ ID NO: 83

SEQ ID NO: 321 - DNA, 285 bp, Homo sapiens
cctttccttgagctgcacgtgaacctgtgtgggcaggcagcgtttgcaggcgtgtttacgggcaggcagcgtttgcaggcgtgtttaccggcaggcagcgtttgcaggcgtgtttacatgcaggcgtagcaccatgtgagaccactggtccagggtttcagaggtcctgctcaggtgaatcggctgtgttctcacaagttcacggagctgagtgggtgtgcaacatgaaatactagtgctgtgagggacagaagggacagaaagaggctgaagaccatcatccag

SEQ ID NO: 322 - DNA, 135 bp, Homo sapiens
aaagagaactaatggaagtggattgaatacagcagtctcaactgggggcaattttgccccccagaggacattgggcaatgtttggagacattttggtcattatacttggggggttgggggatggtgggatgtgtg

SEQ ID NO: 323 - DNA, 297 bp, Homo sapiens
ccattgcgggaaccctcaagttcaacccagagaccgactacctgacgggcacggatggcaagaagttcaggctggaggctccggatgcagatgagcttcccaaaggggagtttgacccagggcaggacacctaccagcacccacccaaggacagcagcgggcagcatgtggacgtgagccccaccagccagcgcctgcagctcctggagccttttgacaagtgggatggcaaggacctggaggacctgcagatcctcatcaaggtcaaagggaagtgtaccactgaccacatctcag

SEQ ID NO: 324 - DNA, 413 bp, Homo sapiens
  misc_feature (1)...(413): n = g, a, c or t
ccttgcctcanatccnnggtcactcggaagaggccatgtctaccctcaatgacactcatggaggaaatgctgagagaagcattcagatgcatgacacaagagccaatgaaaggccctattgctatgcaatctggtccaaaaccactcttcaggaggatgtcttcactggtgggccccacgcaaagcttcttcatgagggaatctaagactttgggggctgtccagattatgaatgggctcttccacattgccctggggggtcttctgatgatcccagcaagggatctatgcacccatctgtgtgactgtgtggtaccctctctgggggaggcattatgtatattattttccggatcactcctggcagnaacggagaaaaaactccangaagttgtttggtcaaaggaaaaatg

SEQ ID NO: 325 - DNA, 340 bp, Homo sapiens
ctggggggtccgggaaaggggttgggccatgagccaggcagctccgaagcagtcactgaggccagggagcctgcacccaggtcatggggcgacctggctctcactcctggcctgggtgctcacctacagaccacttcacttcccctgtccgcagcgtcactatgtcctcataggtggctgtctggtcaatgtccaggccctcgtaggtgtgatcttcctccatgccagccttgctgtcatccttgtccagcagcaggaagataggcacgatgatgaagaggatgatcagcagcgtctggatcatgatgataccatccttcagcgtgttcctctgcttcag

SEQ ID NO: 326 - DNA, 240 bp, Homo sapiens
ccagcctacaatggggatgttgtgtttctgttcaccttcgtttactatgcctgtgtcttctccaccacgctggggtctgggaggaatggacagacagaggatgagctctacccagggcctgcaggacctgcctgtagcccactctgctcgccttagcactaccactcctgccaaggaggattccatttggcagagcttcttccaggtgcccagctatacctgtgcctcggcttttctcag

SEQ ID NO: 327 - DNA, 353 bp, Homo sapiens
aaaaaaacaaagaagaagaagtcacaaagcaattgaaatggagcatccgcttggagaattaagacagggtgctcctgagacagacttccaagacagcttctttgaagtgctgtgtggggttaaatattcttcagcaaagagggtcacaggtaagggccccgtgaaacagcagttcttaatatcatctttatcttcccttaggataatataccccaaaatactttgcatctataagatgtatacatcactgcagttcacgaaacacagtctgctgcccaatacatatccatgttgcatggctaatgaaatgtcaaaccctactgggtacatggcagtggagctccacagcaagg

SEQ ID NO: 328 - DNA, 267 bp, Homo sapiens; identical to SEQ ID NO: 143

SEQ ID NO: 329 - DNA, 228 bp, Homo sapiens
cctccccaggacgacgtcttcccgacgcaagagcacccgtaactgtaacctatcctttatctcgatggttaagggcagccaggcgtgctgcttctcgtccaaatacacgaacttctcccaggcccacaggcggtccgggtggtcggtgactgcctccccgagtgtcgggcactcggccatggcgtcctcgggccgcctaagaagcaagagccagagcctctcaaggcc

SEQ ID NO: 330 - DNA, 580 bp, Homo sapiens
ctgaaggatgaaagagattggcaaggaagcaggaatgagtcagctttgggggaatattacctggtggctcccatcatttattgcttaggacatacccttttacctacttgctatcatgctggacctcagcatttcagggaccagaaaagatggggacaccaatgcaagcccaagactaccatccagaggaccgttcctgcccatgctgcttcctctagttttgctttcagagtggtgtcaccccacttgctaactcaagagtgcatcactaggcttcctgagcaggtttgatcgggatttggcctgggtctgttggtcagggaggcagaggtgtggggagaagggtgaaaggtgactgagccagggttccaggctcctcactcacggggctgaagctgggcatcgtcaggctcagagcccctcgacgtgcggcagcggtagcccttcttcttgagcacgtggcagatcatgaagcctgccaggcccatgaggaagaagaccagcacaagcaggaagagcatatatagcccatgttggggcggttccaggtcaggctgtggttccgacatgaggccctggg

SEQ ID NO: 331 - DNA, 542 bp, Homo sapiens
  misc_feature (1)...(542): n = g, a, c or t
aaactccaaattcctttatcgaagcagctatctgctaatattactgaatgacaagtctttggaaatgatagttaaccgaaaatgcagaaagaatcatagcaactaatgataatgacgggtaaaggatagaaaataaaatttttagccacaggttgtggttacagcatccaggccatcaccgacatctcggcagggctatgccgccacttcgtattaaacgtctactcctccgagaatgcccttattaaattaagtgcaaagtaaggcatcccaccccagacagagggatccacattctttaatcatgatgcgggccactgtaacagggagatggatgcaggacgcagacggggtggggcgcccaagcgacgcacttagacggtgatctgttggttttctctgaaaaatgatctctggtgtgaggcacaaatatctggaaacatccggaagacctggtctggcggcggctcctcgggggcctgcatcacaganccggctccacagctcttcccagcctcttctgccagttgccggacatacag

SEQ ID NO: 332 - DNA, 345 bp, Homo sapiens
ccaatgtggttggtcttcagcttgcagttagccaggttccataccttgaccagcttgtcccagccacgggagacgatgatagggttgctgctgttgggcgagaagcggacacaagacacccactctgagtggctctcatcctggacagtgtatttgcacacacccagggtattccatagcttgatggttttatctcgagatccagagacaatctgccggttgtcagaggagaaggccacactcagcacatccttggtatggcccacaaatcgcctcgtggtggtgcccgttgtgagatcccagaggcgcagggttccatcccaggagcctgagagggcaaactgg

SEQ ID NO: 333 - DNA, 542 bp, Homo sapiens
ctgtatgtccggcaactggcagaagaggctgggaagagctgtggagccggctctgtgatgcaggcccccgaggagccgccgccagaccaggtcttccggatgtttccagatacttgtgcctcacaccagagatcatttttcagagaaaaccaacagatcaccgtctaagtgcgtcgcttgggcgccccaccccgtctgcgtcctgcatccatctccctgttacagtggcccgcatcatgattaaagaatgtggatccctctgtctggggtgggatgccttactttgcacttaatttaataagggcattctcggaggagtagacgtttaatacgaagtggcggcatagccccgccgagatgtcggtgatggcctggatgctgtaaccacaacctgtggctaaaaattttattttctatcctttacccgtcattatcattagttgctatgattctttctgcattttcggttaactatcatttccaaagacttgtcattcagtaatattagcagatagctgcttcgataaaggaatttggagttt

SEQ ID NO: 334 - DNA, 618 bp, Homo sapiens
  misc_feature (1)...(618): n = g, a, c or t
aaaaaaaaaataattaagatacaggtttcaaaccatattaccacgatttcaaaaattttgtgaataaaagaagacacaccgtatttataaagcttctaggggctgtaatagatacataattttggatgtggtataggttggcctatatatacaaaaatacgtcactaaaattaagtggagtcacaataactttttatgtaactttgttttagttctaatttggtaacagtgactcaaaataaatagaatcatattttaggtggaaactcgatgatccatgtaagtagcggggctggagttctgtgctgtctgggcagagaaagcacttggactgaatgatgggcacagctctctctgtgaagtcctgcagagtcactaaccttgagttcatgtgctctaagcttcactgtccctccaacccaagatcccaatttcttttattccatcttgtttcctcttgtaaacagaagagcacaatatgacctgttttcaaaggagccggcaggaatctggttctgataacaaagtccctgtcactcctgtgtctattagttctcctaggtagtttcttcagggctgcgccaacttcacttcacagtanatgaaggaatagtgcca

SEQ ID NO: 335 - DNA, 193 bp, Homo sapiens; identical to SEQ ID NO: 166
  misc_feature (1)...(193): n = g, a, c or t

SEQ ID NO: 336 - DNA, 421 bp, Homo sapiens; identical to SEQ ID NO: 172
  misc_feature (1)...(421): n = g, a, c or t

SEQ ID NO: 337 - DNA, 481 bp, Homo sapiens; identical to SEQ ID NO: 173
  misc_feature (1)...(481): n = g, a, c or t

SEQ ID NO: 338 - DNA, 146 bp, Homo sapiens
  misc_feature (1)...(146): n = g, a, c or t
gtgtttgatggtaaggtttntcacanagccgaaaatgtngctgaanatcaaaaaaatctcacaagaaggggagggagaagagattcgattctgagtctcctactcccgggttctgcgtagagaagccgactgntgctggaggtcng

SEQ ID NO: 339 - DNA, 395 bp, Homo sapiens
  misc_feature (1)...(395): n = g, a, c or t
ctggaaaaggcnaaanagagncttaagaacgtggatgagaacattcgcangctcacngggcgggatccgaatgacntgaggcccatccaagccagattgctggccctttctggtcctggnggaggnagaggacgtggtagtntattactgaggcgtggattctnanatagtgnaggaggacccncagccnaacagagagaccttgaaggggcagtcantangctgggcggggagcgtnggaccagaagagaatcacgccaggaaagcgacccggangatgatgatgttaaaaagccancattgcagncttcagttgtagctacctncaaagagcgcacacgtanagacnttatccagnatcaaaatatggatgaaaagggaaagcaaaggaaccg

SEQ ID NO: 340 - DNA, 579 bp, Homo sapiens
ctgccctacttttcaattcagatatactagtaccttacctagaaataatgttaacctagggtgaagtcactataatctgtagtctattatttgggcatttgctacatgatgagtgctgccagattgtggcaggtaaagagacaatgtaatttgcactccctatgatatttctacatttttagcgaccactagtggaagacattccccaaaattagaaaaaaaggagatagaagatttctgtctatgtaaagttctcaaaatttgttctaaattaataaaactatctttgcgttcttttctgcaacagatgattccaacatgggtgtttgtctattcttctttactcttgaaacattagaccatgggaggctcttacagccttgagttgatatttatacaacccaaatctaggcttgaacggtgaggtgtcaggtcatcaaatattcatgtctatatagtcttacacaggttctcaaaaaaaatgttcatgggataggtcattgataatggattccttattctgagaactccagacgactgaaatatatgagagaaggaaaaggacatagtaggagcagg

SEQ ID NO: 341 - DNA, 585 bp, Homo sapiens; identical to SEQ ID NO: 183

SEQ ID NO: 342 - DNA, 295 bp, Homo sapiens
aaaaagtttctaatattaaagtcagaatattaatacaattaatattaatattaactacagaaaagacaaacagtagagaacagcaaaaaaataaaaaggatctccttttttcccagcccaaattctcctctctaaaagtgtccacaagaaggggtgtttattcttccaacacatttcacttttctgtaaatatacataaacttaaaaagaaaacctcatggagtcatcttgcacacactttcatgcagtgctctttgtagctaacagtgaagatttacctcgttctgctcagagg

SEQ ID NO: 343 - DNA, 534 bp, Homo sapiens
aaatgtttcatttgcagagttttatatccattaagtgcctttgaaagtttccagttgtgtgggctgctgtctcacctcccaccaatttctcctttctccatatggtgctaaaacctcaaagctgaggagggctgcaggacccttagcagattcagtgtgtcacccttgtcctgtgttcacgccagggcttcctaaatgaaagacatcggttacctgcttatgggaaggtgagcagcaaaggaattgaagttcgggacagggtagaattatgggttttcattgtgtttcatgccaaacccacaaaatccaaaatagaattcaagttaaacaaacttctactacaaaatggaaggggaaaaaggctcaggaaggtctatgagaatgagctgacttatctcgttaaatcttaagataaatgagggtaacccaaggctgcaccttggtgtaccaccctgagtggagttgaggtgacttcatttgattgcttcaggcgaactatataggtcaagtccagattataaaaaaattatctgc

SEQ ID NO: 344 - DNA, 464 bp, Homo sapiens; identical to SEQ ID NO: 200
  misc_feature (1)...(464): n = g, a, c or t

SEQ ID NO: 345 - DNA, 437 bp, Homo sapiens
  misc_feature (1)...(437): n = g, a, c or t
cctccgtggcagcagaagatcttttcgtccactatggccgcgatgggcaggcagttgaagcagtcagtgaaggttttccacagtttgatgttgtagcgtctcttgcactcatcgtagaaaccatagatgcggttgatgctggcacactcgtggttcccacggagcaggaagaagttctcggggtacttgatcttataggccagcagcaggcagatggtctccaaggactgcttgcccctgtccacatagtcccccagaaagaggtagttgctctcgggagggaaaccgccatactcaaatagtcgcagaaggtcgtagtactggccgtgtatgtcaccgcagatcttgaggggtgcctccagctccanaagaatgggctggctcagaaaaatctcccgggatttcaggcacagaccgcggatctcgttctctgtcag

SEQ ID NO: 346 - DNA, 562 bp, Homo sapiens
ctgttgactcagattcggcattttaattacattgtttccaagtatgatattctgagagtgtctatagcacttagtgtctgcttcatataaactaccagttattatatatttatgatgcaagtagttttccaaatgtggtgaaagtctgagtctttttatccccatgggtaaaatctgaatctggctctctgtgtctctcagtgcttgtttattgctggtcagagagtaaattcttgataaaagctgttgacttggctctcacagtttatgcagacattggagagacaatttggttatttcaaacatcacaggatttgagtaagaagacctggttatgaaacaaggctctcataattactagttatgactgttgacaagttaccttttcttgtttacaagttatttggcctctttgaattacttgtaaaatagagatagggattctttcttgatcatgaaacatcaaatgaagttatttgatgaaatactttgtcatctggaaattataaatataactaaatgttaattattatttgaaatttgggcacctcatggtggcatt

SEQ ID NO: 347 - DNA, 332 bp, Homo sapiens
aaatattgtacagggaataatcgagcatgcaaaattgaaaaccccatgtaaagacagcatgataagctcactggaaattttttaattaaataagcttaaaaagacattggactaaatgctaatatatggaatataagatttcccaatgttaatttagttaacaacttttttgtagtagcatacacacacataccacctttatgtactatctctagaagtaaaatagtaaactatataagatagatatatatgagtagaacaaggaggacatcttgaggtcatttcagaaatgtacatgattttattgagtctgcacacagtttatgattttt

SEQ ID NO: 348 - DNA, 126 bp, Homo sapiens
  misc_feature (1)...(126): n = g, a, c or t
ggntgttgactcanattcggcattttaattacattgtttccaagtatgatattctgagagtgtctatagcacttagtgtctgcttcatataaactaccagttattatatatttatgatgcaagtag

SEQ ID NO: 349 - DNA, 294 bp, Homo sapiens
ccacaaagccattgtatgtagctttagctcagcgcaaagaagagcgccaggctcacctcactaaccagtatatgcagagaatggcaagtgtacgagctgttcccaaccctgtaatcaacccctaccagccagcacctccttcaggttacttcatggcagctatcccacagactcagaaccgtgctgcatactatcctcctagccaaattgctcaactaagaccaagtcctcgctggactgctcagggtgccagacctcatccattccaaaatatgcccggtgctatccgcccag

SEQ ID NO: 350 - DNA, 237 bp, Homo sapiens; identical to SEQ ID NO: 206

SEQ ID NO: 351 - DNA, 428 bp, Homo sapiens
  misc_feature (1)...(428): n = g, a, c or t
gtacaagcttttttttttttttttttttttttttttttccaccaaagtttatttntntgaaacaatcaccagttgctgtcctntntggcacactganagccccaggagggtctttaactccnttcctcanattatattcatcccaaaaatntancctnggacaatantttggttacagcatantcccagnaatgaggtcccccaaatngctaagttttacatagggganactgggaaattcaaanaatnggatgganaaaccataggatccaanataatgtcagggggttnaaaatnttgganaggcatggtaccatcattgagttngaatctccttctcacttggagnggaagttgtaggattctgcctctaggaaatgngccntccntntgaataattggncccagnaanaggagngtaactagag

SEQ ID NO: 352 - DNA, 563 bp, Homo sapiens
aaaaaaaactacatctctttattgcagaatttatacttgtttgaaaaatacaaaatgtagcgttgataagattgaagcatgttgaaaggtaagtacagggaaaggtcctttcagaatgactgcaacagtgcagcaaggattcccattccccgcctaaaggacaatacctttttaatagaaataaatgagttagttagttagatttttattacagattgaattaaacagttagttacaaagacattctctgatacattcattcatagaggtcttaacgtataaatacatagtaaatatcctataaaatggtaggcaatctcatcgtgcattatctttttgtgctcagacttgacttcacattcagtctctacatacagcttgattagaatcataaaaacaatatgaagacgattgcataaagggatagtttgacaaagcatattcagatattgtaacatttatggtgggtaaaaatgtatcttttgaaacaatatattagactccatttttagctgaaatgaaatttactgattcaatctttttaagaatttgtggatgtttac

SEQ ID NO: 353 - DNA, 524 bp, Homo sapiens; identical to SEQ ID NO: 209

SEQ ID NO: 354 - DNA, 340 bp, Homo sapiens
  misc_feature (1)...(340): n = g, a, c or t
ctgaagcagaggaacacgctgaaggatggtatcatcatgatccanacgctgctgatcatcctnntcntcatcgtgcctatcttcctgctgctggacaaggatgacagcaaggctggcatggaggaagatcacacctacgagggcctggacattgaccagacagccacctatgaggacatagtgacgctgcggacaggggaagtgaagtggtctgtaggtgagcacccaggccaggagtgagagccaggtcgccccatgacctgggtgcaggctccctggcctcagtgactgcttcggagctgcctggctcatggcccaacccctttcccggaccccccag

SEQ ID NO: 355 - DNA, 556 bp, Homo sapiens; identical to SEQ ID NO: 211

SEQ ID NO: 356 - DNA, 561 bp, Homo sapiens
ccaagaggtggactcagagccttccttgagctaaactcggccaaccaaggcacgcagcatgtcccctcaggtctccagtcagtccaggttgaccctcagttctggacgtgtgtatatagctgtatttaatacctcaaggtcattgtggctctggggatgccggggcaggaggacgagggtgcgctgtggacacagcagtccgcggaattccgttctgggaagccaatggtcgccggcaccccttgcttcctccctctgttgtctgcctgtgtgacacacatcaatggcaataacttcttccaactcctcgcagaagtgggagaggccggcagcctgcaccgagaggggctttcctctctcttgctccccgcttcgttctgttttggctgcagagagtggttcatccatactctcattccctcgcctccccttgtggacgggggtcttgccttttcaattcctgtgttttggtgtcttcccttatctgctaccctgaatcacctgccctggtcttgctgtgtgatgggaacatgcttgtaaactgcgtaacaaatctacttt

SEQ ID NO: 357 - DNA, 353 bp, Homo sapiens; identical to SEQ ID NO: 212

SEQ ID NO: 358 - DNA, 202 bp, Homo sapiens
  misc_feature (1)...(202): n = g, a, c or t
ctgaagcagaggaacacgctgaaggatggtatcatcatgatccanacgctgctgatcatcctattcatcatcgtgcctatcttcctgctgctggacaaggatgacagcaaggctggcatggaggaagatcacncctacgagggcctggacattgaccagacagccacctatgaggacatagtgacgctgcggacaggggaag

SEQ ID NO: 359 - DNA, 463 bp, Homo sapiens
  misc_feature (1)...(463): n = g, a, c or t
ctcctntgtatgactgcaagtcctccaagatgccttctgcatntntnaatactacattcacctgattataaatttccttctcagactctgtaggctgggcattttcanantcaaggaaaaaatttggcccctgctcaaggtctgtgcatgtcaaaactttaagaagattccccatgttaaggtaccttcagccagtgctggtgattctgtccttgtccttctatccttggattggcgttccctctttcctagttcacttgttccagtccttcaacttctgtttcttgctaacaggtgtgcaaatgaattaccaactgggtaaccttgaatgagttaatcaaattccaggccatcgtccacgccaccaacagtcaaaggccaaggaagctgttggctgaaaaggtggtctatgttggcgtntggatccctgccctcctgctgactattnccgacttcatctttg

SEQ ID NO: 360 - DNA, 588 bp, Homo sapiens; identical to SEQ ID NO: 215

SEQ ID NO: 361 - DNA, 396 bp, Homo sapiens; identical to SEQ ID NO: 217
  misc_feature (1)...(396): n = g, a, c or t

SEQ ID NO: 362 - DNA, 253 bp, Homo sapiens
  misc_feature (1)...(253): n = g, a, c or t
gaaggatggtatcatcatgatccagacgctgctgatcatcctcttcatcatcgtgcctatcttcctgctgctggacaaggatgacagcaaggctggcatggaggaagatcacacctacgagggcctggacattgaccagacagccacctatgaggacatagtgacgctgcggacaggggaagtgaagtggttctgtaggtgangcacccaggccaggagtgagagccaggtcgccccatgacctgggtgcagg

SEQ ID NO: 363 - DNA, 571 bp, Homo sapiens
  misc_feature (1)...(571): n = g, a, c or t
ccttgcctcagatccaaggtcactcggaagaggccatgtctaccctcaatgacactcatggaggaaatgctgagagaagcattcagatgcatgacacaaggtaagactgccaaaaatcttgttcttgctctcctcattttgttatttgttttatttttaggagttttgagagcaaaatgacaacacccagaaattcagtaaatgggactttcccggcagagccaatgaaaggccctattgctatgcaatctggtccaaaaccactcttcaggaggatgtcttcactggtgggccccgcgcaaagcttcttcatgagggaatctaagactttgggggctgtccagattatgaatgggctcttccacattgccctggggggtcttctgatgattccagcagggatctatgcacccatctgtgtgactgtgtggtaccctctctggggaggcattatgtatattatttccggatcactcctggcagcaacggagaaaaactccaggaagtgttgggtcaaaggaaaaatgataatgaattcattgancctntttgctgccatttctggaatgat

SEQ ID NO: 364 - DNA, 420 bp, Homo sapiens
ctgtagcctctgcaagtgaaaatccaggccgacttgcagtcattggactgatgtccaagtgcaatcaccatacagcagctacaggcagggctggctgatagggagtatgggagaaggacacgctcagatgaaaacatgcatgcaacgattttcaccactgaacacactgttttctgtgatagaaactgtcggccctgctgggggacaagatattcacggcctcactagccagtgagatgccaccagggcggcctgcccctgatgctcctttgttacctgctaaagaaggaccataaggtaaaaggcaccttaccttatggagtgagcccagaccccagggaaaagcttgggtagaacaatccaaggggcagcctgggtgtgagaatccagcccaagctagctgctctagaagcctggagg

SEQ ID NO: 365 - DNA, 374 bp, Homo sapiens
  misc_feature (1)...(374): n = g, a, c or t
agccacttgtttctcatttggtcgaaacagcctgcccacagggatcaccactggctcatatagcttctgcttccagacacactccatcgccttgtcgattttggaatgtctgggctcagacttcatgctcgtgggtgtaatacgatgtacagcaaagcgacccttggtgtcatagatcagacggaaattctctcccgtcttgncaatgctgatgacatccatgaatccagcagnggtaggtnatatcagttcggaccttgccatcnattttaatgaaccgctgcatgcaaatcttctttacttcatctnctgncagggcatacttaagtctgttcctcaggaaaatgatgagggggagacactctctnnacttg

SEQ ID NO: 366 - DNA, 431 bp, Homo sapiens; identical to SEQ ID NO: 219
  misc_feature (1)...(431): n = g, a, c or t

SEQ ID NO: 367 - DNA, 286 bp, Homo sapiens; identical to SEQ ID NO: 220
  misc_feature (1)...(286): n = g, a, c or t

SEQ ID NO: 368 - DNA, 536 bp, Homo sapiens; identical to SEQ ID NO: 221
  misc_feature (1)...(536): n = g, a, c or t

SEQ ID NO: 369 - DNA, 565 bp, Homo sapiens; identical to SEQ ID NO: 222
  misc_feature (1)...(565): n = g, a, c or t

SEQ ID NO: 370 - DNA, 402 bp, Homo sapiens
  misc_feature (1)...(402): n = g, a, c or t
ctgttgactcanattcggcattttaattacattgtttccaagtatgatattctgagagtgtctatagcacttagtgtctgcttcatataaactaccagttattatatatttatgatgcaagtanttttccaaatgtggngaaagtctgagtctttttatccccatgggtaaaatctgaatctggctctctgtgtctctcagtgcttgtttattgctggtcagagagtaaattcttgataaaanctgttgacttggctctcacagtttatgcagacattggagagacaatttggttatttcaaacatcacaggatttgagtaagaagacctggttatgaaacaaggctctcataattactagttatgactgttgacaagntaccttttcttgtttacaantta

SEQ ID NO: 371 - DNA, 346 bp, Homo sapiens
ctgccctacttttcaattcagatatactagtaccttacctagaaataatgttaacctagggtgaagtcactataatctgtagtctattatttgggcatttgctacatgatgagtgctgccagattgtggcaggtaaagagacaatgtaatttgcactccctatgatatttctacatttttagcgaccactagtggaagacattccccaaaattagaaaaaaaggagatagaagatttctgtctatgtaaagttctcaaaatttgttctaaattaataaaactatctttgtgttcttttctgcaacagatgattcaaaaaaaaaaaaaaaaaaaaaaaaaaagcttg

SEQ ID NO: 372 - DNA, 348 bp, Homo sapiens
cctacgacgaggaccggcttttcttcttcgacttttcccagaacactcgggtgccttgcctgcccgaatttgctgactgggctcaggaacagggagatgctcctgccattttatttgacaaagagttctgcgagtggatgatccagcaaatagggccaaaacttgatgggaaaatcccggtgtccagagggtttcctatcgctgaagtgttcacgctgaagcccctggagtttggcaagcccaacactttggtctgttttgtcagtaatctcttcccacccatgctgacagtgaactggcagcatcattccgtccctgtggaaggatttgggcctacttttgtctcag

SEQ ID NO: 373 - DNA, 598 bp, Homo sapiens; identical to SEQ ID NO: 226

SEQ ID NO: 374 - DNA, 381 bp, Homo sapiens
cctgacacaatatccctgttcactttgaagtgaattttgactctatattcagaaccttcctttaacacaatggtttcctttttgagggcttccagatctccagtaaggtccatggtgattggtcccggggcactctcacaaaccagggtgagccgggtgacaacgacattgggggctttcggatctgtcaccacaggaccatctcccagcagcgttttcttgtacttaattagactctcatcatctttgtccatttcctgcagctctttcagggacttctgtggtggaggcttataattgagcttgctgtccagctcatcatcgtcatcctcctccacatgtggctctggggctttttcagtcattctgatctatttattc

SEQ ID NO: 375 - DNA, 573 bp, Homo sapiens; identical to SEQ ID NO: 245

SEQ ID NO: 376 - DNA, 612 bp, Homo sapiens; identical to SEQ ID NO: 227
  misc_feature (1)...(612): n = g, a, c or t

SEQ ID NO: 377 - DNA, 288 bp, Homo sapiens; identical to SEQ ID NO: 228
  misc_feature (1)...(288): n = g, a, c or t

SEQ ID NO: 378 - DNA, 584 bp, Homo sapiens; identical to SEQ ID NO: 231
  misc_feature (1)...(584): n = g, a, c or t

SEQ ID NO: 379 - DNA, 457 bp, Homo sapiens; identical to SEQ ID NO: 232

SEQ ID NO: 380 - DNA, 574 bp, Homo sapiens
ctgctgtaaccaggtttccccttgtgggaagtgttgtttcttgctgggcagttgggaagggaatggagaacagagaagagagtggaaatcacatgctcacttgaactttcctggggaacgtctcctcacagcgtacacaagagcctccctttagaaatggagtgttcattttatcatgggaaaagaatctgagtgggacatgattcagaacaggaccggcccaaggaagtgcaggggctgtggagtgggatggagacaagctctgaaaggacacatgggagatctagatgtagaaggtacacaagtagtaggataactcacaggatggatccactggaggttaagacatgtggtaagacagtgtaataggaagctgctcagttggagaaagtaaggaagcaaacattgttaccgtgggggcaatggagaggacagtgaggagccctttatcctgataagggtggctttgaggtaaaggaaggaaagaggatgccttgagaggccccactgtattagagaggacctggaagccaggatgctaattctggggagatggattccccaggcttactct

SEQ ID NO: 381 - DNA, 571 bp, Homo sapiens; identical to SEQ ID NO: 234
  misc_feature (1)...(571): n = g, a, c or t

SEQ ID NO: 382 - DNA, 471 bp, Homo sapiens
ccaccaccaatttcttcgaggatattcagtgtataccttctcattagctgccaaatcaaggccagtgtgagagtgcggtttccttcattgagatcttgtccaccgatgccaaccagggagaacttcgcttgattcttccccaattctaccgcgtagttacaattctcaagcttcttcatattgcctcccagtttggggtatggcggtttgtttactctgttccagtcaacaggaactttgatcttttcatagagctggaagatgaccagggcatctgataagtcactgtacaaatgattgactcgagggttaacacccagggagttcatccagttcctaaatgtccgctcttctctcgtctcaccttcaagagccccccagtcaatgtcctggttctctggtttgtgcagggcagggtatctgttaaagaggttggcaataaaagccaagttcaacttggggttccctcgg

SEQ ID NO: 383 - DNA, 489 bp, Homo sapiens; identical to SEQ ID NO: 235
  misc_feature (1)...(489): n = g, a, c or t

SEQ ID NO: 384 - DNA, 306 bp, Homo sapiens; identical to SEQ ID NO: 236

SEQ ID NO: 385 - DNA, 560 bp, Homo sapiens; identical to SEQ ID NO: 237
  misc_feature (1)...(560): n = g, a, c or t

SEQ ID NO: 386 - DNA, 186 bp, Homo sapiens
ctgtgccaaggtgctgaatcccatgactcgcagctctgtgccgcagccctggtagacctccgaggtgttgttgcacttctgctggcagaagtagatgccattgtcctcaaaccggatgccttggatggtgagggtggcgagagattcgttctgggactcttccatgcggcccttttccagcttcag

SEQ ID NO: 387 - DNA, 439 bp, Homo sapiens; identical to SEQ ID NO: 240
  misc_feature (1)...(439): n = g, a, c or t

SEQ ID NO: 388 - DNA, 320 bp, Homo sapiens
  misc_feature (1)...(320): n = g, a, c or t
ccacacagactcaccaagccacagacttgtcttccacaagcacgttcttacctcagccacgaagggaccaagccacacgtactaaaggttgaactcaaagatatgtacagggtattaaacaaatnccaaggggaacagntaacttgaatacaaggtcaaaatcagcaacaagntctacaatccagtgctgatatcaaatacaagcttcaaggacaatttcttttcgaaggcttattccantttcgngaggctagcatgaggtgtgngcatttgccaggggcaaatttctattctcaattaacccatgcagnaaatgctac

SEQ ID NO: 389 - DNA, 331 bp, Homo sapiens
ctgccctacttttcaattcagatatactagtaccttacctagaaataatgttaacctagggtgaagtcactataatctgtagtctattatttgggcatttgctacatgatgagtgctgccagattgtggcaggtaaagagacaatgtaatttgcactccctatgatatttctacatttttagcgaccactagtggaagacattccccaaaattagaaaaaaaggagatagaagatttctgtctatgtaaagttctcaaaatttgttctaaattaataaaactatctttgtgttcttttctacaaaaaaaaaaaaaaaaaaaaaaaaaaagg

SEQ ID NO: 390 - DNA, 391 bp, Homo sapiens
  misc_feature (1)...(391): n = g, a, c or t
ctttttttttttttttttttttttttngagttttnattatttgnggngctaaaaanaagggaacatggttggaggcccagtgaganaaacagtgntttgaatcaaagagcanaatgatagaaactgacttcanagcaacttnttggcagcagtatccaatttggaagttgaaggtctgtcctggagccagatgctaacgaaacacagcaaatgcttttcctaaggcacaatagtcttttcagngagctcaggaaccctgtttatgcanatcctcgnngaactttcttgctcctcctgtgcatgaagatgcccactccacanatgatgagccccagcacnaagcccccagctcccgtcaatgtcttactccgggcanaatcagactgngcct

SEQ ID NO: 391 - DNA, 462 bp, Homo sapiens
  misc_feature (1)...(462): n = g, a, c or t
ccttgcctcanatccaaggtcactcggaagaggccatgtctaccctcaatgacactcatggaggaaatgctganagangcattcagatgcatgacacaaggtaagactgccaaaaatcttgttcttgctctcctcattttgttatttgttttatttttaggagtttngagagcaaaatgacnacacccagaaattcagtaaatgggactttcccggcagaaccaatgaaaggccctattgctatgcaatctggtncaaaaccactcttnangaggatgtcttcactggtgggccccacncaaagcttcttcntgagggaatctaanactttgggggctgnccagattatnaatgggctcttccacattgccctggggggtcttntgatgatcccancngggatctatgcacccatctgtgtgactgtgtggtnccctctctggggaggcattatgtatatta

SEQ ID NO: 392 - DNA, 554 bp, Homo sapiens
  misc_feature (1)...(554): n = g, a, c or t
aaagcgaattcatactataacagcagaaacaaaacttcagatttcagaatttgttattggcaaaatttattctcattatacctgcttcatatgggtatattactattaaaacagaataccatagagtaattgcattatttgaaaattctntcattttacaatgcacttcaccaatgaaacagntaatttccattttgaaaattaaaagaaaacagcacagagaagttaaatgcggtgtagcaaagttatggggtctgcttgagggcactaacctcaacagattattcctcctctccttagaataaccatgaaaatacaaatttacttagcacatttttgctttttaagtagctggttcattttctgaatttcccacattcagagttccagtcattattgttacatcatgtttgcagaaaccttgtcttatttagtgtctatttgcatataaccctgaaaacattattatttgaaaacttttctatatctcaaattaatatacattttcataacctacctttgnattaagacttgcaattttatcaatctattat

SEQ ID NO: 393 - DNA, 555 bp, Homo sapiens
ctgttgactcagattcggcattttaattacattgtttccaagtatgatattctgagagtgtctatagcacttagtgtctgcttcatataaactaccagttattatatatttatgatgcaagtagttttccaaatgtggtgaaagtctgagtctttttatccccatgggtaaaatctgaatctggctctctgtgtctctcagtgcttgtttattgctggtcagagagtaaattcttgataaaagctgttgacttggctcccacagtttatgcagacattggagagacaatttggttatttcaaacatcacaggatttgagtaagaagacctggttatgaaacaaggctctcataattactagttatgactgttgacaagttaccttttcttgtttacaagttatttggcctctttgaattacttgtaaaatagagatagggattctttcttgatcatggaacatcaaatgaagttatttgatgaaatactttgtcatctggaaattataaatataactaaatgttaattattatttgaaatttgggcacctcatgg

SEQ ID NO: 394 - DNA, 340 bp, Homo sapiens; identical to SEQ ID NO: 325

SEQ ID NO: 395 - DNA, 482 bp, Homo sapiens
aaaaaaacagaacatttacaagacaccagttattttgtgccccatatgtcattaaaaaagtttactttacctttattattatttccctaggctagtcaagcagcaaaccattaatcggtcggagaaaccttcatgacatatgcccgactggctcttcgccacccacttgaaggacactacccaatcgatggaagcctttaatcgcacagccctccctattagcggactattggcggatgcagacatgttctactcgagcagttaccaaggaccactttactgcgatcaggattccaacgaccacctaatttcgtatctttcaactcttttcgaccggacctcttattcggaagcgttacaggaagacaggtctcaacttagggatcagatcacgttatcaacgctctgggatcgctgcaacctggcacttcaaggaagtgcaccgataacgtctagaccggcaaacacagatctagaggtgg

SEQ ID NO: 396 - DNA, 448 bp, Homo sapiens
gaaagaatccctatctctattttacaagtaattcaaagaggccaaataacttgtaaacaagaaaaggtaacttgtcaacagtcataactagtaattatgagagccttgtttcataaccaggtcttcttactcaaatcctgtgatgtttgaaataaccaaattgtctctccaatgtctgcataaactgtgagagccaagtcaacagcttttatcaagaatttactctctgaccagcaataaacaagcactgagagacacagagagccagattcagattttacccatggggataaaaagactcagactttcaccacatttggaaaactacttgcatcataaatatataataactggtagtttatatgaagcagacactaagtgctatagacactctcagaatatcatacttggaaacaatgtaattaaaatgccgaatctgagtcaacag

SEQ ID NO: 397 - DNA, 573 bp, Homo sapiens; identical to SEQ ID NO: 245

SEQ ID NO: 398 - DNA, 340 bp, Homo sapiens; identical to SEQ ID NO: 325

SEQ ID NO: 399 - DNA, 593 bp, Homo sapiens; identical to SEQ ID NO: 247

SEQ ID NO: 400 - DNA, 504 bp, Homo sapiens
aaatcctgagtcaagccaaaaaaaaaaaaaaaaaccaaaacaaaacaaaaaaaacaaataaagccatgccaatctcatcttgttttctgcgcaagttaggttttgtcaagaaagggtgtaacgcaactaagtcatagtccgcctagaagcatttgcggtggacgatggaggggccggactcgtcatactcctgcttgctgatcacatctgctggaaggtggacagcgaggccaggatggagccgccgatccacacggagtacttgcgctcaggaggagcaatgatcttgatcttcattgtgctgggtgccagggcagtgatctccttctgcatcctgtcggcaatgccagggtacatggtggtgccgccagacagcactgtgttggcgtacaggtctttgcggatgtccacgtcacacttcatgatggagttgaaggtagtttcgtggatgccacaggactccatgcccaggaaggaaggctggaagagtgcctcagggcagcg

SEQ ID NO: 401 - DNA, 608 bp, Homo sapiens; identical to SEQ ID NO: 249

SEQ ID NO: 402 - DNA, 588 bp, Homo sapiens
ctgggccaggagctgtgcccagtgcctgcagccttcataagcacacacgtccattccctactaaggcccagacctcctggtatctgccccgggctccctcatcccacctccatccggagttgcccaagatgcatgtccagcataggcaggattgctcggtggtgagaaggttaggtccggctcagactgaataagaagagataaaatttgccttaaaacttacctggcagtggctttgctgcacggtctgaaaccacctgttcccaccctcttgaccgaaatttccttgtgacacagagaagggcaaaggtctgagcccagagttgacggagggagtatttcagggttcacttcaggggctcccaaagcgacaagatcgttagggagagaggcccagggtggggactgggaatttaaggagagctgggaacggatcccttaggttcaggaagcttctgtgcaagctgcgaggatggcttgggccgaagggttgctctgcccgccgcgctagctgtgagctgagcaaagccctgggctcacagcaccccaaaagcctgtggcttcagtcctgcgtctgcaccacacatt

SEQ ID NO: 403 - DNA, 425 bp, Homo sapiens; identical to SEQ ID NO: 252

SEQ ID NO: 404 - DNA, 603 bp, Homo sapiens
  misc_feature (1)...(603): n = g, a, c or t
ctggtggttaacaagtggatcgtcatgttcagtagtttatacattatgtgagaagtaacgttctgattctttttcttacacagaattggcagagggggtcgatttgggaggaaaggtgtggctataaactttgttactgaagaagacaagaggattcttcgtgacattgagactttctacaatactacagtggaggagatgcccatgaatgtggctgaccttatttaattcctgggatgagagttttggatgcagtgctcgctgttgctgaataggcgatcacaacgtgcattgtgcttctttctttgggaatatttgaatcttgtctcaatgctcataacggatcagaaatacagattttgatagcaaagcgacgttagtcgtgagctcttgtgaggaaagtcattggctttatcctctttagagttagactgttggggtgggtataaaagatggggtctgtaaaatctttctttcttagaaatttatttcctagttctgtagaaatggntgnattagatgttctctatcatttaataatatacttgnggactaaaagatataagtgctgnataaaatcagccaattatgttaaactagcat

SEQ ID NO: 405 - DNA, 603 bp, Homo sapiens; identical to SEQ ID NO: 253

SEQ ID NO: 406 - DNA, 578 bp, Homo sapiens
ctgctgtggaagggctccttcaagcccagcgagcatgtgaaacccagggccccaggaaacctgacagttcacaccaatgtctccgacactctgctgctgacctggagcaacccgtatccccctgacaattacctgtataatcatctcacctatgcagtcaacatttggagtgaaaacgacccggcagatttcagaatctataacgtgacctacctagaaccctccctccgcatcgcagccagcaccctgaagtctgggatttcctacagggcacgggtgagggcctgggctcagtgctataacaccacctggagtgagtggagccccagcaccaagtggcacaactcctacagggagcccttcgagcagcacctcctgctgggcgtcagcgcttcctgcattgtcatcctggccgtctgcctgttgtgctatgtcagcatcaccaagattaagaaagaatggtgggatcagattcccaacccagcccgcagccgcctcgtggctataataatccaggatgctcaggggtcacagtgggagaagcggtcccgaggccaggaaccagccaagtgcccaca

SEQ ID NO: 407 - DNA, 568 bp, Homo sapiens; identical to SEQ ID NO: 255

SEQ ID NO: 408 - DNA, 125 bp, Homo sapiens
  misc_feature (1)...(125): n = g, a, c or t
ctggggggtccaggaaaggggttgggccatgagccaggcagctccgaagcagtcactgaggccagggagcctgcacccagnncatgggncgaccnggctctcactcctggcctgggtgctcacct

SEQ ID NO: 409 - DNA, 291 bp, Homo sapiens
ccagtgcttagacaaatttggggttggggggaacactttggtttgaaagcacagagcagtttgccatgtttcttctgtgcctaccattctcccttggcctcaacttctgtaagatgggggggggacaaaaagagaagtaaagttaagaagaaagtggaaaattaaaaaaaagatgtcaaagtttttacatgcatatatttcagcttatgctgaagacctacctgtatgttgcacattgaatcatactttcagaacccctcagaaaccatccctctctccctaaagaatttt

SEQ ID NO: 410 - DNA, 231 bp, Homo sapiens; identical to SEQ ID NO: 259

SEQ ID NO: 411 - DNA, 406 bp, Homo sapiens
cctaagaactgagacttgtgacacaaggccaacgacctaagattagcccagggttgtagctggaagacctacaacccaaggatggaaggcccctgtcacaaagcctacctagatggatagaggacccaagcgaaaaaggtatctcaagactaacggccggaatctggaggcccatgacccagaacccaggaaggatagaagcttgaagacctggggaaatcccaagatgagaaccctaaaccctacctcttttctattgtttacacttcttactcttagatatttccagttctcctgtttatctttaagcctgattcttttgagatgtactttttgatgttgccggttacctttagattgacagtattatgcctgggccagtcttgagccagctttacctcggccg

SEQ ID NO: 412 - DNA, 278 bp, Homo sapiens; identical to SEQ ID NO: 260

SEQ ID NO: 413 - DNA, 284 bp, Homo sapiens
ccgggcaggtctggaagccttgttggcccctaagcctttgtttcatgctacagtactgaggggtatgtgtccccaatgcacagccacccgcacacaactcaatgagcttcctgggaaacactattcccccacctccaccttaggtggctgcctcagttttccaaccactggaatcagtccctcagctcctgcctctagtctccaccccaaaagttcagtcgtctctgtcttggagggcactgtcggccccctcaggttgaagttcaacactcctcaatgagcag

SEQ ID NO: 414 - DNA, 288 bp, Homo sapiens
aaaaatacagcttttattctgagacattgaccttcactagagtgggacctgtggccccagcctggctggagaagcagtccagggcctgagtgacaccatttccctttcctgaaataggaacaagttattccaaaggagaaaggagagcccagagagatctgtacaggacctctcttgcacatggtgactggaggcagagggtggggagctggagaggagtccagtccctccaacaaatattgagggcttcaaagagctcttcctggacgtttctcttaatctggattt

SEQ ID NO: 415 - DNA, 348 bp, Homo sapiens
  misc_feature (1)...(348): n = g, a, c or t
ccaaaagaagtaagacagcttgctgaagatttcctgaaagactatattcatataaacattggtgcacttgaactgagtgcaaaccacaacattcttcagattgtggatgtgtgtcatgacntanaaaaggatgaaaaacttattngtctaatggaagagatcatgagtgagaaggagaataaaaccattgtttttgtggaaaccaaaagaagatgtgatgagcttaccagaaaaatgaggagagatgggtggcctgccatgggtatccatggngacaagagtcaacaagagcgtgactgggctctaaatgaatccaaacatggaaaagctcctattctgattnctaca

SEQ ID NO: 416 - DNA, 284 bp, Homo sapiens
  misc_feature (1)...(284): n = g, a, c or t
ggcggcaagatggcagtgcaaatatccaagaagaggaagtttgtcgctgatggcatcttcaaagctgaactgaatgagtttcttactcgggagctggctgaagatggctactctggagttgagggtgcgagttacaccaaccaggacagaaatcattatcttanccaccagaacacanaatgttcttggtgagaagggccggcggattcgggaactgactgctgtagttcagaagaggtttggctttccagagggcagtgtagagctttatgctnaaaaggtgg

SEQ ID NO: 417 - DNA, 212 bp, Homo sapiens
ccaatgtggttggtcttcagcttgcagttagccaggttccataccttgaccagcttgtcccagccacaggagacgatgatagggttgctgctgttgggcgagaagcggacacaagacacccactctgagtggctctcatcctggacagtgtatttgcacacacccagggtattccatagcttgatggttttatctcgagatccaaaaacaat

SEQ ID NO: 418 - DNA, 285 bp, Homo sapiens
cctttccttgagctgcacgtgaacctgtgtgggcaggcagcgtttgcaggcgtgtttacgggcaggcagcgtttgcaggcgtgtttaccggcaggcagcgtttgcaggcgtgtttacatgcaggcgtagcaccatgtgagaccactggtccagggtttcagaggtcctgctcaggtgaatcggctgtgttctcacaagttcacggagctgagtgggtgtgcaacatgaaatactagtgctgtgagggacagaaaggacagaaagaggctgaagaccatcatccag

SEQ ID NO: 419 - DNA, 271 bp, Homo sapiens
ggtggcaacaaacctgaccacatgattaagcctgttgaagtcactgagtcagcataaataaagactgcacaggagaattacccctatacctgagcctcaaccttctgggggaaagggaactagataacatacttcttacttgtctgtacagtaccttgttgcagatgggtgatatataatggtaatagaatagcacagccagacttgcttcctgcatggtagggagagacacaaaagatgggaaactgcttttccacaaggaatctccgta

SEQ ID NO: 420 - DNA, 287 bp, Homo sapiens; identical to SEQ ID NO: 263

SEQ ID NO: 421 - DNA, 286 bp, Homo sapiens
ccagagcggtgagtcccaccacctcgaactctgggaattcgagccacagctctgccagtaccccaagactcagcactagtctgatgacctgctaattcactgacagcatagggctgtctgttgtttttgcgcaagttggtgtgaacaaagttcacaatatctggtcgaataggagccttgaatacagcaggcaaagtgacatttttgccagatgactcccccttttcggagtacaccgatatcagtgggcgagcacacgccatggcggagagaggagacagccacg

SEQ ID NO: 422 - DNA, 306 bp, Homo sapiens; identical to SEQ ID NO: 264

SEQ ID NO: 423 - DNA, 242 bp, Homo sapiens; identical to SEQ ID NO: 265

SEQ ID NO: 424 - DNA, 132 bp, Homo sapiens; identical to SEQ ID NO: 266

SEQ ID NO: 425 - DNA, 414 bp, Homo sapiens; identical to SEQ ID NO: 268

SEQ ID NO: 426 - DNA, 101 bp, Homo sapiens
  misc_feature (1)...(101): n = g, a, c or t
ctgtgattctccactgaaattttttttttaagggagctcaaggtcacaagaagaaatgaaaggaacaatcagcagccctgttcanaaggnggtttgaagac

SEQ ID NO: 427 - DNA, 353 bp, Homo sapiens
gtttcagccgaaggactcttctattcggaagtacaccctcactattaggaagattcttaggggtaatttttctgaggaaggaggactagccaacttaagaattacaggaagaaagtggtttggaagacagccaaagaaataaaagcagattaaactgtatcaggtacattccagcctgttggcaactccataaaaacatttcagattttaatccgaatttagctaatgagactggatttttgttttttatgttgtgtgtcacagagctaaaaactcagttcccaaatccccagtttatgcagccgccatcaggtattttaagctaaacttcttcacccctgagagcatgtcag

SEQ ID NO: 428 - DNA, 104 bp, Homo sapiens
  misc_feature (1)...(104): n = g, a, c or t
tatttaaaaactcaacaggacctacactacntgttcaaatctgtaatctttcacaccncactaacaaagttnttaggaaaacaggactacccaaanatgttacc

SEQ ID NO: 429 - DNA, 471 bp, Homo sapiens
  misc_feature (1)...(471): n = g, a, c or t
ccaaaaaanntcaagattnnntttttttatttgtactgaaaaactaatcataactgttaattctcagccatctttgaagcttgaaagaagagtctttggtattttgtaaacgttagcagactttcctgccagtgtcagaaaatcctatttatgaatcctgtcggtattccttggtatctgaaaaaaataccaaatagtaccatacatgagttatttctaagtttgaaaagtaaaaagaaattgcatcacactaattacaaaatacaagttctggaaaaaatatttttcttcattttaaaacttttttaactaataatggctttgaaagaagaggcttaatttgggggtggtaactaaaatcaaaagaaatgattgacttgagggtctctgtttggtaaaaatacatcattagcttaaataagcagcagaaggttagttttaattatgtancttctgtnaatattaagtgtt

SEQ ID NO: 430 - DNA, 395 bp, Homo sapiens
  misc_feature (1)...(395): n = g, a, c or t
aggcgacnnggtaggggnnggcgctcaggcggcgaccatggcgtatcacggcctcactgtgcctctcattgtgatgagcgtgttctggggcttcgtcggcttcttggtgccttggttcatccctaagggtcctaaccggggagttatcattaccatgttggtgacctgttcagtttgctgctatctcttttggctgattgcaattctggcccaactcaaccctctctttggaccgcaattgaaaaatgaaaccatctggtatctgaagtatcattggccttgaggaagaagacatgctctacagtgctcagtctttgaggtcacgagaagagaatgccttctagatgcaaaatcacctccaaaccagaccacttttcttgacttgcctgttttgg

SEQ ID NO: 431 - DNA, 303 bp, Homo sapiens
  misc_feature (1)...(303): n = g, a, c or t
caggcatgaaaaaatgacaagaattttaaaacaagggcatcatttgatctttaaatatgactattttctttaaaaacgatggattttgaccaacctagatgtacaccatagtttatagatcaaataaaagctattaaaaatatcttaacttnttacaaatgttagcagtctttgtgtgcagtattagagatcagagttgtgattgtttctgagcatgtcttgtgggttataactatgttttcaattaaaattataagattgagatactttctggaagatgtatagaaaatgttgntatattca

SEQ ID NO: 432 - DNA, 477 bp, Homo sapiens
  misc_feature (1)...(477): n = g, a, c or t
tttttttnnttttttttnntaaaanaaggattttaggtttntttggngaaacaaaagcagatataaaaagttacaaagattttanattttcattcacaaaaaaagtcattcacattttacactatacacgttatgatataaatacaggaaagtattatgtgcattgtaaagagaaaggaaaaatagaaacctactagatcaacacagngttgttctgtgctctaaaatacctaaaggnggattacatttaatgcaacaaccaagggaacctgcttaaacatactgngtattattgtagctagagtcattccttctaagccaaaggaggttttataaaaaanaatcaatattgggccaatccctttgngccctttttctctttttctatgngcattttattttttgnctactcttcttcaagttgctctaaactgaaattagggaaggagtctcactttccnttanaggtttttcttt

SEQ ID NO: 433 - DNA, 566 bp, Homo sapiens
ccaggttttagatattaacctggctgcagagccaaaagtgaaccgaggaaaagcaggtgtgaaacgatctgcagcggagatgtacgggtcagtaacagaacacccttctccgtcccctctactcagctcctcttttgacttggactatgactttcaacgggactattatgataggatgtacagttacccagcacgtgtacctcctcctcctcctattgctcgggctgtagtgccctcgaaacgtcagcgtgtatcaggaaacacttcacgaaggggcaaaagtggcttcaattctaagagtggacagcggggatcttccaagtctggaaagttgaaaggagatgaccttcaggccattaagaaggagctgacccagataaaacaaaaagtggattctctcctggaaaacctggaaaaaattgaaaaggaacagagcaaacaagcagtagagatgaagaatgataagtcagaagaggagcagagcagcagctccgtgaagaaagatgagactaatgtgaagatggagtctgaggggggtgcagatgactctgctgaggagggggacc

SEQ ID NO: 434 - DNA, 384 bp, Homo sapiens
  misc_feature (1)...(384): n = g, a, c or t
ccacaggggaaggcaagaggcgatagctgggggtcacttgtcactagatggaagctccttggtccacacagtcccaaagaaaggtctgcctttgggcccacgaaacccatcccagccctcacaggctgaacctcaccctgggttttcccagagaggtgcccaagaagacccaagctgccccaagtcagaggagcagcaggaaacagcctcagaagtccgtcactcttcagtactcctcccttagaatgtccacttcctgtttggtgaccatggcaaccaaaagacaatggcagtgcagtgcgtgtgggatgggggagctccatcttccttgggtacatggggaggagactccagtgaccangagaagcggggagagccatggga

SEQ ID NO: 435 - DNA, 468 bp, Homo sapiens
  misc_feature (1)...(468): n = g, a, c or t
ctgtggctgtctgtcagagaagcacatttttctgcagataattagaatggcttcccccatctctcacggactgtcccaagtctagaaaagaattgagttcctcttctattagtcaaataaaagggaagagaatgtttgtcttcctttcctttctgtagtgttaagaaaataaacgaacttaatgattctaaattatcagtgagcttaacactgtactatagaccaaagattaccttttcaaaaagtcctttgaggtgaaatattttgtatacgtaatacatagatgcacatataaacacacacatatagaatctcaatattttaacacttctttgggtagttgtactaactcactaaccctgaggaaaaagttaagaaattgaaagtgttttcttcanaagttgagatttaacaataaaaggtgttactttgataactaaaaggaactttattatcctcttcctaaaa

SEQ ID NO: 436 - DNA, 124 bp, Homo sapiens
  misc_feature (1)...(124): n = g, a, c or t
gtagggttgccagatgcnntacaanatttctggttaaatttgaatttcagtaaacaatgaatagtttttcattgtaccatgaaatatccaaaacatacttatatgtnaagtattatttatttgn

SEQ ID NO: 437 - DNA, 126 bp, Homo sapiens; identical to SEQ ID NO: 348
  misc_feature (1)...(126): n = g, a, c or t

SEQ ID NO: 438 - DNA, 612 bp, Homo sapiens; identical to SEQ ID NO: 227
  misc_feature (1)...(612): n = g, a, c or t

SEQ ID NO: 439 - DNA, 330 bp, Homo sapiens; identical to SEQ ID NO: 2

SEQ ID NO: 440 - DNA, 472 bp, Homo sapiens; identical to SEQ ID NO: 283
  misc_feature (1)...(472): n = g, a, c or t

SEQ ID NO: 441 - DNA, 349 bp, Homo sapiens; identical to SEQ ID NO: 284
  misc_feature (1)...(349): n = g, a, c or t

SEQ ID NO: 442 - DNA, 179 bp, Homo sapiens; identical to SEQ ID NO: 285
  misc_feature (1)...(179): n = g, a, c or t

SEQ ID NO: 443 - DNA, 170 bp, Homo sapiens; identical to SEQ ID NO: 15

SEQ ID NO: 444 - DNA, 342 bp, Homo sapiens
  misc_feature (1)...(342): n = g, a, c or t
ngtctcacaggtagtctcctgagtagttgacggctagcggggagctagttccgccgcatagttatagtgttgatgtgtgaacgctgacctgtcctgtgtgctaagagctatgcagcttagctgaggcgcctagattactagatgtgctgtatcacggggaatgaggtgggggtgcttattttttaatgaactaatcagagcctcttgagaaattgttactcattgaactggagcatcaagacatctcatggaagtggatacggagtgatttggtgtccatgcttttcaccctnaggacatttaatcngagaacctcctgtngaattttgtgggagacacttg

SEQ ID NO: 445 - DNA, 387 bp, Homo sapiens; identical to SEQ ID NO: 20

SEQ ID NO: 446 - DNA, 279 bp, Homo sapiens; identical to SEQ ID NO: 289
  misc_feature (1)...(279): n = g, a, c or t

SEQ ID NO: 447 - DNA, 235 bp, Homo sapiens; identical to SEQ ID NO: 290
  misc_feature (1)...(235): n = g, a, c or t

SEQ ID NO: 448 - DNA, 292 bp, Homo sapiens; identical to SEQ ID NO: 29

SEQ ID NO: 449 - DNA, 318 bp, Homo sapiens; identical to SEQ ID NO: 291
  misc_feature (1)...(318): n = g, a, c or t

SEQ ID NO: 450 - DNA, 317 bp, Homo sapiens; identical to SEQ ID NO: 294

SEQ ID NO: 451 - DNA, 156 bp, Homo sapiens; identical to SEQ ID NO: 40
  misc_feature (1)...(156): n = g, a, c or t

SEQ ID NO: 452 - DNA, 345 bp, Homo sapiens; identical to SEQ ID NO: 298
  misc_feature (1)...(345): n = g, a, c or t

SEQ ID NO: 453 - DNA, 182 bp, Homo sapiens; identical to SEQ ID NO: 299
  misc_feature (1)...(182): n = g, a, c or t

SEQ ID NO: 454 - DNA, 440 bp, Homo sapiens; identical to SEQ ID NO: 300

SEQ ID NO: 455 - DNA, 396 bp, Homo sapiens; identical to SEQ ID NO: 301
  misc_feature (1)...(396): n = g, a, c or t

SEQ ID NO: 456 - DNA, 232 bp, Homo sapiens; identical to SEQ ID NO: 303

SEQ ID NO: 457 - DNA, 232 bp, Homo sapiens; identical to SEQ ID NO: 57

SEQ ID NO: 458 - DNA, 342 bp, Homo sapiens; identical to SEQ ID NO: 306

SEQ ID NO: 459 - DNA, 545 bp, Homo sapiens; identical to SEQ ID NO: 307

SEQ ID NO: 460 - DNA, 330 bp, Homo sapiens; identical to SEQ ID NO: 308

SEQ ID NO: 461 - DNA, 118 bp, Homo sapiens; identical to SEQ ID NO: 311
  misc_feature (1)...(118): n = g, a, c or t

SEQ ID NO: 462 - DNA, 310 bp, Homo sapiens
  misc_feature (1)...(310): n = g, a, c or t
atgttgggagccatcaatcaggaaagccgggttagtaaagcagttgaagtgatgattcagcacgtanaaaacttgaagaggatgtatgccaaanagcacgcttgaattagaagaactgaaacaggttcttctgcataatgaaaggtctttcaatcctcttgaagatgatgatgactgccaaattaaaaaacgtccagcttctctaaactccaagccatcttctctacgaagagtgactattgcctctttacccanaaatattggaaatgcaggaatggtggctgggatggaaaataatgatccgattcnn

SEQ ID NO: 463 - DNA, 133 bp, Homo sapiens; identical to SEQ ID NO: 312
  misc_feature (1)...(133): n = g, a, c or t

SEQ ID NO: 464 - DNA, 182 bp, Homo sapiens; identical to SEQ ID NO: 317
  misc_feature (1)...(182): n = g, a, c or t

SEQ ID NO: 465 - DNA, 149 bp, Homo sapiens; identical to SEQ ID NO: 80
  misc_feature (1)...(149): n = g, a, c or t

SEQ ID NO: 466 - DNA, 374 bp, Homo sapiens; identical to SEQ ID NO: 83

SEQ ID NO: 467 - DNA, 545 bp, Homo sapiens; identical to SEQ ID NO: 307

SEQ ID NO: 468 - DNA, 285 bp, Homo sapiens; identical to SEQ ID NO: 321

SEQ ID NO: 469 - DNA, 135 bp, Homo sapiens; identical to SEQ ID NO: 322

SEQ ID NO: 470 - DNA, 511 bp, Homo sapiens
ccagtagggctgagatgttgggagccatcaatcaggaaagccgggttagtaaagcagttgaagtgatgattcagcacgtagaaaacttgaagaggatgtatgccaaagagcacgctgaattagaagaactgaaacaggttcttctgcagaatgaaaggtctttcaatcctcttgaagatgatgatgactgccaaattaaaaaacgttcagcttctctaaactccaagccatcttctctacgaagagtgactattgcctctttacccagaaatattggaaatgcaggaatggtggctgggatggaaaataatgatcgattcagtagaaggtcaagcagttggcgtattttggggtcaaagcagagtgaacaccgtccctcattacctcgatttattagcacctattcctgggcagatgctgaagaagaaaaatgtgaactaaaaactaaagatgactcagagccatctggagaagaaacagtagaaaggacaaggaagccaagtctttctga

SEQ ID NO: 471 - DNA, 562 bp, Homo sapiens
  misc_feature (1)...(562): n = g, a, c or t
ctgagacaaaagtaggcccaaatccttccacagggatggaatgatgctgccagttcactgtcagcatgggtgggaagagattactgacaaaacagaccaaagtgttgggcttgccaaactccaggggcttcagcgtgaacacttcagcgataggaaaccctggtggggggattgaagtgtagggggaaaaagagactagtttagatggtatctctgtgtttggaggggccatggcatatggaggggagggcagagaagaacacagtgggtcaggctttgggagacagagatgagcgaggagctgggctctgaagggaggtcttcttccaggcaaggactgcanctagacgtagaagcagagccagatccaggctactctggacccctccaccatgacttccttcagcacttcctgtctagagctcacattgatgtctaaccatgcactgtcttctcactaagacatagtcacgtcatcagatatttccactcttcccatccatcttgctgggcatagtagcacaagtgttaatattcagtangtatcagttggtacctgttg

SEQ ID NO: 472 - DNA, 487 bp, Homo sapiens; identical to SEQ ID NO: 135
  misc_feature (1)...(487): n = g, a, c or t

SEQ ID NO: 473 - DNA, 340 bp, Homo sapiens; identical to SEQ ID NO: 325

SEQ ID NO: 474 - DNA, 542 bp, Homo sapiens; identical to SEQ ID NO: 331
  misc_feature (1)...(542): n = g, a, c or t

SEQ ID NO: 475 - DNA, 342 bp, Homo sapiens; identical to SEQ ID NO: 306

SEQ ID NO: 476 - DNA, 421 bp, Homo sapiens; identical to SEQ ID NO: 172
  misc_feature (1)...(421): n = g, a, c or t

SEQ ID NO: 477 - DNA, 562 bp, Homo sapiens; identical to SEQ ID NO: 346

SEQ ID NO: 478 - DNA, 294 bp, Homo sapiens; identical to SEQ ID NO: 349

SEQ ID NO: 479 - DNA, 237 bp, Homo sapiens; identical to SEQ ID NO: 206

SEQ ID NO: 480 - DNA, 563 bp, Homo sapiens; identical to SEQ ID NO: 352

SEQ ID NO: 481 - DNA, 340 bp, Homo sapiens; identical to SEQ ID NO: 354
  misc_feature (1)...(340): n = g, a, c or t

SEQ ID NO: 482 - DNA, 353 bp, Homo sapiens; identical to SEQ ID NO: 212

SEQ ID NO: 483 - DNA, 202 bp, Homo sapiens; identical to SEQ ID NO: 358
  misc_feature (1)...(202): n = g, a, c or t

SEQ ID NO: 484 - DNA, 306 bp, Homo sapiens
aaaaacaatctacaggcagttctttacaagtctcatatttacagatagcacaagctatggcatggcgtatggcctccctcctaaatatacgattctttggcatattggaattggtcagcctcaaagaccggctggctacatcgtcgcacgagacagtcccgcttattcctctgcacggactcggagacggtcctcagcgggaggagctcaggtctccctgggccagacacgtgccccagagagtccccagaagcatggacagttctgctctgtttccatcgctcaggcaggggagagagtccgtgg

SEQ ID NO: 485 - DNA, 396 bp, Homo sapiens; identical to SEQ ID NO: 217
  misc_feature (1)...(396): n = g, a, c or t

SEQ ID NO: 486 - DNA, 253 bp, Homo sapiens; identical to SEQ ID NO: 362
  misc_feature (1)...(253): n = g, a, c or t

SEQ ID NO: 487 - DNA, 374 bp, Homo sapiens; identical to SEQ ID NO: 365
  misc_feature (1)...(374): n = g, a, c or t

SEQ ID NO: 488 - DNA, 529 bp, Homo sapiens; identical to SEQ ID NO: 223

SEQ ID NO: 489 - DNA, 402 bp, Homo sapiens; identical to SEQ ID NO: 370
  misc_feature (1)...(402): n = g, a, c or t

SEQ ID NO: 490 - DNA, 556 bp, Homo sapiens
gtttgatgaccgtcgcggacgcccagtgggatttcccatgcggggaagaggtggttttgacagaatgcctcctggtcggggtgggcgtcccatgcctccatctagaagagattatgatgatatgagccctcgtcgaggaccacctccccctcctcccggacgaggcggccggggtggtagcagagctcggaatcttcctcttcctccaccaccaccacctagagggggagacctcatggcctatgacagaagagggagacctggagaccgttacgacggcatggttggtttcagtgctgatgaaacttgggactctgcaatagatacatggagcccatcagaatggcagatggcttatgaaccacagggtggctccggatatgattattcctatgcagggggtcgtggctcatatggtgatcttggtggacctattattactacacaagtaactattcccaaagatttggctggatctattattggcaaaggtggtcagcggattaaacaaatccgtcatgagtcgggagcttcgatcaaaattgatgagccttta

SEQ ID NO: 491 - DNA, 381 bp, Homo sapiens; identical to SEQ ID NO: 374

SEQ ID NO: 492 - DNA, 573 bp, Homo sapiens; identical to SEQ ID NO: 245

SEQ ID NO: 493 - DNA, 288 bp, Homo sapiens; identical to SEQ ID NO: 228
  misc_feature (1)...(288): n = g, a, c or t

SEQ ID NO: 494 - DNA, 574 bp, Homo sapiens; identical to SEQ ID NO: 380

SEQ ID NO: 495 - DNA, 471 bp, Homo sapiens; identical to SEQ ID NO: 382

SEQ ID NO: 496 - DNA, 489 bp, Homo sapiens; identical to SEQ ID NO: 235
  misc_feature (1)...(489): n = g, a, c or t

SEQ ID NO: 497 - DNA, 306 bp, Homo sapiens; identical to SEQ ID NO: 236

SEQ ID NO: 498 - DNA, 345 bp, Homo sapiens
  misc_feature (1)...(345): n = g, a, c or t
ccaatgtggttggtcttcagcttgcagttagccaggttccataccttgaccagcttgtcccagccacaggagacgatgatagggttgctgctgttgggcgagaagcggacacaagacacccactctgagtggctctcatcctggacagtgtatttgcacacacccagggtattccatagcttgatggttttatctcgagatccanagacaatctgccggttgtcagaggagaaggccacactcancacatccttggcatggcccacaaatcgnctngtggtggtgcccgttgtgagatcccagaggcgcagggttccatcccaggagcctgagagggcaaactgg

SEQ ID NO: 499 - DNA, 555 bp, Homo sapiens; identical to SEQ ID NO: 393

SEQ ID NO: 500 - DNA, 340 bp, Homo sapiens; identical to SEQ ID NO: 325

SEQ ID NO: 501 - DNA, 482 bp, Homo sapiens; identical to SEQ ID NO: 395

SEQ ID NO: 502 - DNA, 448 bp, Homo sapiens; identical to SEQ ID NO: 396

SEQ ID NO: 503 - DNA, 573 bp, Homo sapiens; identical to SEQ ID NO: 245

SEQ ID NO: 504 - DNA, 340 bp, Homo sapiens; identical to SEQ ID NO: 325

SEQ ID NO: 505 - DNA, 593 bp, Homo sapiens; identical to SEQ ID NO: 247

SEQ ID NO: 506 - DNA, 425 bp, Homo sapiens; identical to SEQ ID NO: 252

SEQ ID NO: 507 - DNA, 603 bp, Homo sapiens; identical to SEQ ID NO: 253

SEQ ID NO: 508 - DNA, 578 bp, Homo sapiens; identical to SEQ ID NO: 406

SEQ ID NO: 509 - DNA, 568 bp, Homo sapiens; identical to SEQ ID NO: 255

SEQ ID NO: 510 - DNA, 125 bp, Homo sapiens; identical to SEQ ID NO: 408
  misc_feature (1)...(125): n = g, a, c or t

SEQ ID NO: 511 - DNA, 231 bp, Homo sapiens; identical to SEQ ID NO: 259

SEQ ID NO: 512 - DNA, 278 bp, Homo sapiens; identical to SEQ ID NO: 260

SEQ ID NO: 513 - DNA, 288 bp, Homo sapiens; identical to SEQ ID NO: 414

SEQ ID NO: 514 - DNA, 284 bp, Homo sapiens; identical to SEQ ID NO: 416
  misc_feature (1)...(284): n = g, a, c or t

SEQ ID NO: 515 - DNA, 211 bp, Homo sapiens
  misc_feature (1)...(211): n = g, a, c or t
ctgtctcacactttacaagctgtgagagacacatcagagccctgggcactgtcactgcttgcagcctgagagtagctccctccttttctatctgagctgttcctcctccacatcacagcagcgaccacagctccagtgatcacagctccaaggagaaccaggccagcaatgatgcccacgatggggacggtgggctgggaaganggctccn

SEQ ID NO: 516 - DNA, 212 bp, Homo sapiens; identical to SEQ ID NO: 417

SEQ ID NO: 517 - DNA, 272 bp, Homo sapiens; identical to SEQ ID NO: 261

SEQ ID NO: 518 - DNA, 285 bp, Homo sapiens; identical to SEQ ID NO: 418

SEQ ID NO: 519 - DNA, 287 bp, Homo sapiens; identical to SEQ ID NO: 263

SEQ ID NO: 520 - DNA, 286 bp, Homo sapiens; identical to SEQ ID NO: 421

SEQ ID NO: 521 - DNA, 242 bp, Homo sapiens; identical to SEQ ID NO: 265

SEQ ID NO: 522 - DNA, 132 bp, Homo sapiens; identical to SEQ ID NO: 266

SEQ ID NO: 523 - DNA, 414 bp, Homo sapiens; identical to SEQ ID NO: 268

SEQ ID NO: 524 - DNA, 104 bp, Homo sapiens; identical to SEQ ID NO: 428
  misc_feature (1)...(104): n = g, a, c or t

SEQ ID NO: 525 - DNA, 423 bp, Homo sapiens; identical to SEQ ID NO: 275

SEQ ID NO: 526 - DNA, 478 bp, Homo sapiens; identical to SEQ ID NO: 277

SEQ ID NO: 527 - DNA, 384 bp, Homo sapiens
cctgacacaatatccctgttcactttgaagtgaattttgactctatattcagaaccttcctttaacacaatggtttcctttttgagggcttccagatctccagtaaggtccatggtgattggtcccggggcactctcacaaaccagggtgagccgggtgacaacgacattgggggctttcggatctgtcaccacaggaccatctcccagcagcgttttcttgtacttaattagactctcatcatctttgtccatttcctgcagctctttcagggacttctgtggtggaggcttataattgagcttgctgtccagctcatcatcgtcatcctcctccacatgtggctctggggctttttcagtcattctgatctatttattcagt

SEQ ID NO: 528 - DNA, 208 bp, Homo sapiens; identical to SEQ ID NO: 278

SEQ ID NO: 529 - DNA, 330 bp, Homo sapiens; identical to SEQ ID NO: 2

SEQ ID NO: 530 - DNA, 294 bp, Homo sapiens; identical to SEQ ID NO: 280

SEQ ID NO: 531 - DNA, 269 bp, Homo sapiens; identical to SEQ ID NO: 4

SEQ ID NO: 532 - DNA, 197 bp, Homo sapiens
cctgaacaaggacctctgccctccctattcagacccttcgttgcctcacctggtcaatacaaccacttcacctctgaccgcaggggcaggggactagatagaatgacctactgagcctcgtctgtctgtctgtctgtctgtctctctctctctgtttgtctctttgtgtgtccgacaagaacccagactgagggggc

SEQ ID NO: 533 - DNA, 364 bp, Homo sapiens; identical to SEQ ID NO: 9
  misc_feature (1)...(364): n = g, a, c or t

SEQ ID NO: 534 - DNA, 382 bp, Homo sapiens; identical to SEQ ID NO: 10
  misc_feature (1)...(382): n = g, a, c or t

SEQ ID NO: 535 - DNA, 349 bp, Homo sapiens; identical to SEQ ID NO: 284
  misc_feature (1)...(349): n = g, a, c or t

SEQ ID NO: 536 - DNA, 170 bp, Homo sapiens; identical to SEQ ID NO: 15

SEQ ID NO: 537 - DNA, 387 bp, Homo sapiens; identical to SEQ ID NO: 20

SEQ ID NO: 538 - DNA, 533 bp, Homo sapiens; identical to SEQ ID NO: 43
  misc_feature (1)...(533): n = g, a, c or t

SEQ ID NO: 539 - DNA, 332 bp, Homo sapiens; identical to SEQ ID NO: 44

SEQ ID NO: 540 - DNA, 375 bp, Homo sapiens; identical to SEQ ID NO: 50

SEQ ID NO: 541 - DNA, 443 bp, Homo sapiens
ccatttgactaaccagtcctacaaatttcacatatccgtcactcagatgagcatataccaagtcagaggaaacaaaacatgcacatatacaaaagtagaaagagaaaacactcatgccttcagaagttcacaaattaaaagccctttaataatataaaacagttgaacactggaatgtttttttctaggtcatgaaaaaagtgaattccaaatctatgtaataaatctaaaataatacagcatcactgtcttctgttctggtgtttatcaaacctgcacatgagtttttagaaggtgaattggggatgcttcagaatgtattttctccaaacagatggagcctgaaaactgtgtgattttccaaaccaagtggagaaaagcaggaagaaattggtgtttagctggtcagcagacggggatccccgggatgcaatcagccttgg

SEQ ID NO: 542 - DNA, 232 bp, Homo sapiens; identical to SEQ ID NO: 57

SEQ ID NO: 543 - DNA, 392 bp, Homo sapiens; identical to SEQ ID NO: 67
  misc_feature (1)...(392): n = g, a, c or t

SEQ ID NO: 544 - DNA, 371 bp, Homo sapiens; identical to SEQ ID NO: 74

SEQ ID NO: 545 - DNA, 187 bp, Homo sapiens
  misc_feature (1)...(187): n = g, a, c or t
gacctgctcggaggaatggcgccgccgggttcaagcactgtcttcctgttggccctgacaatcatagccagcacctgggctctgacgcccactcactacctcaccaagcatgacgnggagagactaaaagcctcgctggatccgccctttcacaaagttggaagtctngtcttctactccatcntgg

SEQ ID NO: 546 - DNA, 558 bp, Homo sapiens
  misc_feature (1)...(558): n = g, a, c or t
ccatgggatggctcttctgaccattgggggccaggccaggccaggccaggcttagggcagcaaggaccaggccaaaggggcagggcctcctttggaggggttgaggggtacatcctcggctggtgtttgcatccaggggtccagcaggatctcttccagtgagggtcgggaagaaggtttgggggccaggcaccggcggattagggcacagcaatcttggggaaaacatgggcttgggaagtggagctcagcttccagaatctcctggtccctctcaaagggaatgtccccacacaccatgtcatagaggaggatgcccagtgaccagacagtggccgggagtgcatggtactggtgtcgagagatccactctggggggctgtacacccttgtcccatcaaagtcagtgtagggttcatcatgaagcagggcaccagaaccaaaatcaatgagtttggcacagccacggcgtaggtctatcaggatgntctcatccttgatgtcacgatggacaactncacgggaaatggcagtgctggatggctgccactactttgg

SEQ ID NO: 547 - DNA, 357 bp, Homo sapiens; identical to SEQ ID NO: 84

SEQ ID NO: 548 - DNA, 260 bp, Homo sapiens
  misc_feature (1)...(260): n = g, a, c or t
ccaagtagtggcanccatccagcactgccattcccgtggagttgtccatcgtgacatcaaggatgagaacatcctgatagacctacgccgtggctgtgccaaactcattgattttggttctggtgccctgcttcatgatgaaccctacactgactttgatgggacaagggtgtacagccccccagagtggatctctcgacaccagtaccatgcactcccggccactgtctggtcactgggcatcctnctctatgacatgg

SEQ ID NO: 549 - DNA, 366 bp, Homo sapiens; identical to SEQ ID NO: 105
  misc_feature (1)...(366): n = g, a, c or t

SEQ ID NO: 550 - DNA, 368 bp, Homo sapiens; identical to SEQ ID NO: 136

SEQ ID NO: 551 - DNA, 539 bp, Homo sapiens
ccttggtcctagcacccactcgagaattggctcagcagatacagaaggtggtcatggcactaggagactacatgggcgcctcctgtcacgcctgtatcgggggcaccaacgtgcgtgctgaggtgcagaaactgcagatggaagctccccacatcatcgtgggtacccctggccgtgtgtttgatatgcttaaccggagatacctgtcccccaaatacatcaagatgtttgtactggatgaagctgacgaaatgttaagccgtggattcaaggaccagatctatgacatattccaaaagctcaacagcaacacccaggtagttttgctgtcagccacaatgccttctgatgtgcttgaggtgaccaagaagttcatgagggaccccattcggattcttgtcaagaaggaagagttgaccctggagggtatccgccagttctacatcaacgtggaacgagaggagtggaagctggacacactatgtgacttgtatgaaaccctgaccatcacccaggcagtcatcttcatcaacacccgg

SEQ ID NO: 552 - DNA, 529 bp, Homo sapiens
  misc_feature (1)...(529): n = g, a, c or t
aaatcctgagtcaagccaaaaaaaaaaaaaccaaaacaaaacaaaaaaaacaaataaagccatgccaatctcatcttgttttctgcgcaagttaggttttgtcaagaaagggtgtaacgcaactaagtcatagtccgcctagaagcatttgcggtggacgatggaggggccggactcgtcatactcctgcttgctgatccacatctgctggaaggtggacagcgaggccaggatggagccgccgatccacacggagtacttgcgctcaggaggagcaatgatcttgatcttcattgngctgggtgccagggcagngatctccttctgcatcctgtcggnaatgccagggtacatggtggtgccgccagacagcactgngttggcgtacaggtctttgcggatgtccacgtcacacttcatgatggagttgaaggtagtttcgtggatgccacaggactccatgcccaggaaggaaggctgnaanagtgcctcagggcagcggaaccgctcattgccaatggtgatgacc

SEQ ID NO: 553 - DNA, 375 bp, Homo sapiens; identical to SEQ ID NO: 161

SEQ ID NO: 554 - DNA, 193 bp, Homo sapiens; identical to SEQ ID NO: 166
  misc_feature (1)...(193): n = g, a, c or t

SEQ ID NO: 555 - DNA, 421 bp, Homo sapiens; identical to SEQ ID NO: 172
  misc_feature (1)...(421): n = g, a, c or t

SEQ ID NO: 556 - DNA, 372 bp, Homo sapiens; identical to SEQ ID NO: 175

SEQ ID NO: 557 - DNA, 119 bp, Homo sapiens; identical to SEQ ID NO: 185
  misc_feature (1)...(119): n = g, a, c or t

SEQ ID NO: 558 - DNA, 375 bp, Homo sapiens; identical to SEQ ID NO: 50

SEQ ID NO: 559 - DNA, 130 bp, Homo sapiens; identical to SEQ ID NO: 197
  misc_feature (1)...(130): n = g, a, c or t

SEQ ID NO: 560 - DNA, 464 bp, Homo sapiens; identical to SEQ ID NO: 200
  misc_feature (1)...(464): n = g, a, c or t

SEQ ID NO: 561 - DNA, 332 bp, Homo sapiens; identical to SEQ ID NO: 347

SEQ ID NO: 562 - DNA, 237 bp, Homo sapiens; identical to SEQ ID NO: 206

SEQ ID NO: 563 - DNA, 443 bp, Homo sapiens
aaactcattgattaaataatgattaatgcattctccacattttaatattgcaaaggcccattggagtttctgaagtggctccacagaattgaaataatttcaaataactgtaaaggaactgaaaatcttcacagagatgaagtggggtttccattaggtgctttgaaatttgataacaaatcatcaacttccactggtcaatatatagattttgggtgtctgaggccccaagattagatgccactaatctccaaagattccctccaattatgaaatattttaatgtctacttttagagagcactagccagtatatgaccatgtgattaatttcttttcacactagataaaattacctggttcaaaagtggtttttgtttattaaatttggtaataaatatatataatacacagacaggatagtttttatgctgaagtttttgg

SEQ ID NO: 564 - DNA, 524 bp, Homo sapiens; identical to SEQ ID NO: 209

SEQ ID NO: 565 - DNA, 556 bp, Homo sapiens; identical to SEQ ID NO: 211

SEQ ID NO: 566 - DNA, 353 bp, Homo sapiens; identical to SEQ ID NO: 212

SEQ ID NO: 567 - DNA, 286 bp, Homo sapiens; identical to SEQ ID NO: 220
  misc_feature (1)...(286): n = g, a, c or t

SEQ ID NO: 568 - DNA, 529 bp, Homo sapiens; identical to SEQ ID NO: 223

SEQ ID NO: 569 - DNA, 556 bp, Homo sapiens; identical to SEQ ID NO: 490

SEQ ID NO: 570 - DNA, 598 bp, Homo sapiens; identical to SEQ ID NO: 226

SEQ ID NO: 571 - DNA, 647 bp, Homo sapiens
  misc_feature (1)...(647): n = g, a, c or t
ctgagggaggggtcagggtgggtgcgcggtgacggggagggcaaaggtggtgtcagtatcttcattttgaggattggggttcagagcacttctggggtgtcagctcctccttgtccccccgtggggctccgtaggactggaaagaggacatgaagagctctgacagagagcagcagaaactctggaactgtttccagagggcctgcactgcatggaccagggccaccaccttctccttcacccaggccagaaccccgtgccaccaggtctgcagccgctgcagcatggcctggaaccatctcatgaccttgtcacaaaagctctccccaggctcctcggttgcgggatcctcaacatccgggacaggggatctgttgcctcggcaccgtaatccatctctttctttttcaagtagaggagtgagctctaggtgctgctcctcataataagccgccactgtctccaggtagccctctttgaagtcgtcctccagctctgccaggctcgacatcacctgtccacgtcctgattctgcattttgcattttatcataaaatctttctatggcctggtgcattcgggccttcagcttcttcatgtcatcagagaggaccttcgggaagcacatggcggccaaangttcaagg

SEQ ID NO: 572 - DNA, 360 bp, Homo sapiens
cctgacacaatatccctgttcactttgaagtgaattttgactctatattcagaaccttcctttaacacaatggtttcctttttgagggcttccagatctccagtaaggtccatggtgattggtcccggggcactctcacaaaccagggtgagccgggtgacaacgacattgggggctttcggatctgtcaccacaggaccatctcccagcagcgttttcttgtacttaattagactctcatcatctttgtccatttcctgcagctctttcagggacttctgtggtggaggcttataattgagcttgctgtccagctcatcatcgtcatcctcctccacatgtggctctggggctttttca

SEQ ID NO: 573 - DNA, 457 bp, Homo sapiens; identical to SEQ ID NO: 232

SEQ ID NO: 574 - DNA, 388 bp, Homo sapiens
  misc_feature (1)...(388): n = g, a, c or t
aaaaacaaaacaaaacgatccttttgattgtgtggtgcagacgcaggactgaagccacaggcttttggggtgctgtgagcccagggctttgctcagctcacagctagcgcggcgggcagagcaacccttcggcccaagccatcctcgcagcttgtacagaagcttcctgaacctaagggatccgttcccagctctccttaaattcccagtccccaccctgggcctctctccctaacgatcttgtcgctttgggagcctctgaagtgaaccctgaaatactccctccgtcaactctgggctcagacctttgcccttctctgngtcacaaggaaatttcggtcaaganggtgggaacaggtggtttcagaccgtgcagcaaagccactgc

SEQ ID NO: 575 - DNA, 571 bp, Homo sapiens; identical to SEQ ID NO: 234
  misc_feature (1)...(571): n = g, a, c or t

SEQ ID NO: 576 - DNA, 306 bp, Homo sapiens; identical to SEQ ID NO: 236

SEQ ID NO: 577 - DNA, 342 bp, Homo sapiens
  misc_feature (1)...(342): n = g, a, c or t
aaaaacaaaacaaaacgatccttttgaatgtgtggngcagacgcaggactgaagccacaggcttttggggtgctgtgagcccagggctttgctcagctcacagctagcgcggcgggcagagcaacccttcggcccaagccatcctcgcagcttgcacagaagcttcctgaacctaagggatccgttcccagctctccttaaattcccagtccccaccctgggcctctctccctaacgatcttgtcgctttgggagcccctgaagngaaccctgaaatactccctccgtcaactctgggctcagacctttgcccttctctgtgtcacaaggaaatttcggtca

SEQ ID NO: 578 - DNA, 560 bp, Homo sapiens; identical to SEQ ID NO: 237
  misc_feature (1)...(560): n = g, a, c or t

SEQ ID NO: 579 - DNA, 504 bp, Homo sapiens; identical to SEQ ID NO: 400

SEQ ID NO: 580 - DNA, 303 bp, Homo sapiens
ctggagatggcagccgttgtttgcggagcccaggctgactccggattcaacgttgctggggagagaaaagcagtatagactccaccttccaggatgtccatttcggggagaggagcaggtgggaccctcaagaaaatgacggagaacatcccagacagatgggactcaagcaggatgggtgctatatccaagaagccaagaagggagagtttcgtgcactgtggttaacaggagggctgcctggaggcagtggctgagccagaaagtaacacagagctcatgcttggagagagagagtcttgg

SEQ ID NO: 581 - DNA, 363 bp, Homo sapiens
  misc_feature (1)...(363): n = g, a, c or t
tctatgaggccctagagctccgggacaatgataagactcgctatatggggaagggtgtctcaaaggctgttgagcacatcaataaaactattgcgcctgccctggttagcaagaaactgaacgtcacagaacaagagaagattgacaaactgatgatcgagatggatggaacagaaaataaatctaantttggtgcgaacgccattctgggggtgtcccttgccgtctgcaaagctggtgccgttgagaagggggtccccctgtaccgccacatcgctgacttggctggcaactctgaagtcatcctgccagtcccggcgttcaatgtcatcaatggcggttctcatgctggcaacaagctgg

SEQ ID NO: 582 - DNA, 584 bp, Homo sapiens
  misc_feature (1)...(584): n = g, a, c or t
aaataatccaggcaggagaagagaggagggcacacttggaactcccctccccacaatacgtgattatttacattttagtaattggacaatcccggctcaggaggaggttgcaagaatctgcaaaagttggagggagcgccccaggagaacaaacagcaagccttatttcccctagcccatcccccaaaaaaccatccatcccatcctagtgtctggtggtgtccggtggtgtccatcttccattccttcccaaattatggaagtaaggttcttctcaccagaataagagcacttgggataacagagtagggtcccctcacccaaaaaaaaaaaaaaaaangaagccttggggtaacaacagggcattacctcccccagaataaagaatcctgggctgaggcaggtaagcagcttgacccaatatgggaccctaggctaggggaaagggtccctttactaaaataaaagctactggggtattggaaggaaagcacccttgcccaagtaagagcatatgaactaagtttgngtggnggtagtaggaggngccaatgtggggtgacacatcatcagaataagagtcc

SEQ ID NO: 583 - DNA, 547 bp, Homo sapiens
  misc_feature (1)...(547): n = g, a, c or t
ctgattgnncacctgaccacacgcccccacaggctctgaccagcagcctatgagggggtttggcaccaagctctgtccaatcaggtaggctgggcctgaactagccaatcagatcaactctgtcttgggcgtttgaactcagggagggaggcccttgggagcaggtgcttgtggacaaggctccacaagcgttgagccttggaaaggtagacaagcgttgagccactaagcagaggaccttgggttcccaatacaaaaatacctactgctgagagggctgctgaccatttggtcaggattcctgttgcctttatatccaaaataaactcccctttcttgaggttgtctgagtcttgggtctatgccttgaaaaaagctgaattattggacagtctcacctcctgccatagggtcctgaatgtttcagaccacaaggggctccacacctttgctgtgtgttctggggcaacctactaatcctctctgcaagtcggtctccttatccccccaaatggnaattgnatttgccttctccactttgggaggc

SEQ ID NO: 584 - DNA, 400 bp, Homo sapiens; identical to SEQ ID NO: 250

SEQ ID NO: 585 - DNA, 393 bp, Homo sapiens; identical to SEQ ID NO: 251

SEQ ID NO: 586 - DNA, 425 bp, Homo sapiens; identical to SEQ ID NO: 252

SEQ ID NO: 587 - DNA, 595 bp, Homo sapiens
ctgagggaggggtcagggtgggtgcgcggtgacggggagggcaaaggtggtgtcagtatcttcattttgaggattggggttcagagcacttctggggtgtcagctcctccttgtccccccgtggggctccgtaggactggaaagaggacatgaagagctctgacagagagcagcagaaactctggaactgtttccagagggcctgcactgcatggaccagggccaccaccttctccttcacccaggccagaaccccgtgccaccaggcctgcagccgctgcagcatggcctggaaccatctcatgaccttgtcacaaaagctctccccaggctcctcggttgcgggatcctcaacatccgggacaggggatctgttgcctcggcaccgtaatccatctctttctttttcaagtagaggagtgagctctgggtgctgctcctcataataagccgccactgtctccaggtagccctctttgaagtcgtcctccagctctgccaggctcgacatcaccattcgggccttcagctttttcatgtcatcagagaggaccttcgggaagcacatggcggccaaaagttcaaggagccaagg

SEQ ID NO: 588 - DNA, 278 bp, Homo sapiens; identical to SEQ ID NO: 260

SEQ ID NO: 589 - DNA, 284 bp, Homo sapiens; identical to SEQ ID NO: 416
  misc_feature (1)...(284): n = g, a, c or t

SEQ ID NO: 590 - DNA, 211 bp, Homo sapiens; identical to SEQ ID NO: 515
  misc_feature (1)...(211): n = g, a, c or t

SEQ ID NO: 591 - DNA, 286 bp, Homo sapiens; identical to SEQ ID NO: 421

SEQ ID NO: 592 - DNA, 242 bp, Homo sapiens; identical to SEQ ID NO: 265

SEQ ID NO: 593 - DNA, 132 bp, Homo sapiens; identical to SEQ ID NO: 266

SEQ ID NO: 594 - DNA, 108 bp, Homo sapiens; identical to SEQ ID NO: 267

SEQ ID NO: 595 - DNA, 206 bp, Homo sapiens; identical to SEQ ID NO: 270

SEQ ID NO: 596 - DNA, 322 bp, Homo sapiens
  misc_feature (1)...(322): n = g, a, c or t
ttctgccacctatggggnccaggcaggtgtggtgccttggctaagtccacanacttctgagaggcccacgctttcttcttctccanaaataaaccctgaaactcaagcagctttaatcagagggcaggattccacgatagcagcatcagaacagcaagtggcanccnagaattcttgattccnatgatcangcaacagtaaaccctgtggaatttaatactgaggttgcaacaccaccattttcccttctgganacttctaatgaaacanatttcctgattggcattaatgaagagncactggaaggcacngcaatctattt

SEQ ID NO: 597 - DNA, 500 bp, Homo sapiens; identical to SEQ ID NO: 271
  misc_feature (1)...(500): n = g, a, c or t

SEQ ID NO: 598 - DNA, 511 bp, Homo sapiens; identical to SEQ ID NO: 272
  misc_feature (1)...(511): n = g, a, c or t

SEQ ID NO: 599 - DNA, 101 bp, Homo sapiens; identical to SEQ ID NO: 273
  misc_feature (1)...(101): n = g, a, c or t

SEQ ID NO: 600 - DNA, 414 bp, Homo sapiens
gcttcctaacggaaatggaacaggattaccaactagtagacgaaagtgatgctttccatgacaaccttaggtctcttgacaggaatctgccctcagacagccaggacttgggtcaacatggattagaagaggattttatgttataaaagaggattttcccaccttgacaccaggcaatgtagttagcatattttatgtaccatggttatacgattaatcttgggacaaagaattttatagaaatttttaaacatctgaaaaagaagcttaagttttatcatccttttttttctcatgaattcttaaaggattatgctttaatgctgttatctatcttattgttcttgaaaatacctgcattttttggtatcatgttcaaccaacatcattatgaaattaattagattcccatgg

SEQ ID NO: 601 - DNA, 525 bp, Homo sapiens
  misc_feature (1)...(525): n = g, a, c or t
ctggtgtcaagacctgggttagaggtttgtcaaacagaggcagggcccagtcacctctttggaggggagtgatgagaaggggattttggtcacctgagagggttgagtaaacttggatcagggcacaggcttctctcaccatactcagctttttgcactcactccctagttgagcctactggcatcaagctctagatgccaaggctgggatggctgtggagcaggagctatggcccaagtagctctgagaggggaagagacctaaaacccctagcagggaaaatactgacgctaggtgtgaacatatcctctcttttcacaagagtcctgatggggctggctgagcttttgggtactcatccctactgttatagctggagaggatttgggtattgaagcagggaggggcagatcccacgaagtgactgcagatctggaataataagtaaggggtagatctgcccatagagctcactttagaccggcctatactcctacaaggaattggggtangatcttctactc

SEQ ID NO: 602 - DNA, 433 bp, Homo sapiens; identical to SEQ ID NO: 276
  misc_feature (1)...(433): n = g, a, c or t

SEQ ID NO: 603 - DNA, 510 bp, Homo sapiens
  misc_feature (1)...(510): n = g, a, c or t
gaggaagaaacagctccctaatgacaaatgcatctgtgggcgggaggggacttgggattgtgctggaactggatttctgaattgctactacatcttttttcctctcatccaggtctcttcagagctgctgtgcccagtggtgcttcaactggtatctatgaggccctagagctccgggacaatgataagactcgctatatggggaagggtgtctcaaaggctgttgagcacatnaataaaactattgcgcctgccctggttagcaagaaactgaacgtcacagaacaagagaagattgacaaactgatgatcgagatggatggaacagaaaataaatctaagtttggtgcgaacgccattctgggggtgtcccttgccgtctgcaaagctggtgccgttgagaagggggtccccctgtaccgccacatcgctgacttggctggcaactctgaagtcatcctgccagtcccggcgttcaatgtcatcaatggcggntctcatgctggcaac

SEQ ID NO: 604 - DNA, 478 bp, Homo sapiens; identical to SEQ ID NO: 277

SEQ ID NO: 605 - DNA, 384 bp, Homo sapiens; identical to SEQ ID NO: 527

SEQ ID NO: 606 - DNA, 208 bp, Homo sapiens; identical to SEQ ID NO: 278

SEQ ID NO: 607 - DNA, 550 bp, Homo sapiens
  misc_feature (1)...(550): n = g, a, c or t
gcagaagctactcaaatgcngtcggcttgtcctggctcttgccctcatcctggttctggaatcctcagttcaaggttatcctacgcagagagccaggtaccaatgggtgcgctgcaatccagacagtaattctgcaaactgccttgaagaaaaaggaccaatgttcgaactacttccaggtgaatccaacaagatcccccgtctgaggactgacctttttccaaagacgagaatccaggacttgaatcgtatcttcccactttctgaggactactctggatcaggcttcggctccggctccggctctggatcaggatctgggagtggcttcctaacggaaatggaacaggattaccaactagtagacgaaagtgatgctttccatgacaaccttaggtctcttgacaggaatctgccctcagacagccaggacttgggtcaacatggattagaagaggattttatgttataaaagaggattttcccaccttgacaccaggcaatgtagttagcatattttatgtaccatggttatatgattaatcttggg

SEQ ID NO: 608 - DNA, 564 bp, Homo sapiens
ccagaggatcagtgtccgatgaggaaatgatggagctcagagaagcttttgccaaagttgcttcaatgagttgaatgacttgttcaaggctgcttgcttgcctttgcctgggtatagagtacgagaaattacagaaaacctgatggctacaggtgatctggaccaagatggaaggatcagctttgatgagtttatcaagattttccatggcctaaaaagcacagatgttgccaagacctttagaaaagcaatcaataagaaggaagggatttgtgcaatcggtggtacttcagagcagtctagcgttggcacccaacactcctattcagaggaagaaaagtatgcctttgtcaactggataaacaaagccctggaaaatgatcctgattgtcggcatgtcatcccaatgaacccaaacacgaatgatctctttaatgctgttggagatggcattgtcctttgtaaaatgatcaacctgtcagtgccagacacaattgatgaaagaacaatcaacaaaaagaagctaacccctttcaccattcaggaaaatctgaacttggctct

SEQ ID NO: 609 - DNA, 564 bp, Homo sapiens
tgcagatggaagctccccacatcatcgtgggtacccctggccgtgtgtttgatatgcttaaccggagatacctgtcccccaaatacatcaagatgtttgtactggatgaagctgacgaaatgttaagccgtggattcaaggaccagatctatgacatattccaaaagctcaacagcaacacccaggtagttttgctgtcagccacaatgccttctgatgtgcttgaggtgaccaagaagttcatgagggaccccattcggattcttgtcaagaaggaagagttgaccctggagggtatccgccagttctacatcaacgtggaacgagaggagtggaagctggacacactatgtgacttgtatgaaaccctgaccatcacccaggcagtcatcttcatcaacacccggaggaaggtggactggctcaccgagaagatgcatgctcgagatttcactgtatccgccatgcatggagatatggaccaaaaggaacgagacgtgattatgagggagtttcgttctggctctagcagagttttgattaccactgacctgctggacctgc

SEQ ID NO: 610 - DNA, 550 bp, Homo sapiens
ccagatgccaagtgacaagaccattgggggaggagatgattccttcaacaccttcttcagtgaaacgggtgctggcaagcatgtaccccgggcagtgtttgtagacttggaacccacagtcattgatgaagttcgcactggcacttaccgccagctcttccaccctgagcaactcatcacaggcaaggaagatgctgccaataactatgcccgagggcactacaccattggcaaggagatcattgacctcgtgttggaccgaattcgcaagctggctgaccagtgcaccggtcttcagggcttcttggttttccacagctttggtgggggaactggttctgggttcacctcgctgctcatggaacgtctctcagttgattatggcaagaagtccaagctggagttctccatttacccggcgccccaggtttccacaggagaggagaccagagtctgcctggagtgcagactgggagggggcagatgactggggtggagcatgaagaaatttctggggtgattatcctatcttatttggggtgatatttac

SEQ ID NO: 611 - DNA, 349 bp, Homo sapiens; identical to SEQ ID NO: 284
  misc_feature (1)...(349): n = g, a, c or t

SEQ ID NO: 612 - DNA, 342 bp, Homo sapiens; identical to SEQ ID NO: 444
  misc_feature (1)...(342): n = g, a, c or t

SEQ ID NO: 613 - DNA, 246 bp, Homo sapiens; identical to SEQ ID NO: 34

SEQ ID NO: 614 - DNA, 178 bp, Homo sapiens; identical to SEQ ID NO: 39
  misc_feature (1)...(178): n = g, a, c or t

SEQ ID NO: 615 - DNA, 406 bp, Homo sapiens
  misc_feature (1)...(406): n = g, a, c or t
ncgaggtcctccccaaagccagtcctgtgtcaccaatcaaaggaaaggaagccgtcagcagagatgaacagaataaccaccaaggaagccacttcctcctgccccccaaaatcccctcttggagagacccgccagaaactctggaggagcctcaaaatgctccccgagagaggccagagggtccggcagcagctaaaaagccacctcgccactgtgaacttgtcgtcactcttggatgtccggagatccacggtgatctcaggccctgggaccggaaaaggcagccaagatcactcaggggatcccacctcgggggacagaggctacacggatccctgtgcggccacatctntnaaaagcccctcacagccccaggcaccaaaanacanaaaggtccccaccagga

SEQ ID NO: 616 - DNA, 445 bp, Homo sapiens
ctgccgccgtggaatccaaaatttcgggagctgtgaccctttcctcatgtaaaacgagtagtcttggacgatctgggcataggaaccaatcagaaacaatcgcttcagcaatcaagaccattgttcatcatggaggaacccgtggatacctctgagcctctatctgcattaccattcactgggcagcagtcttttgagccaagtggcaaatttggacagtatccatcgatgcagatgaaccacatccaggcactggggaagtggaggacatagaacagctcaatcagtgtttgatccaacacttccatctcattaagacaagtttgatttttctttgctttttatttcatggaatacatgagaatctcttaactgttggagtttccaaggaggcatacctcatgacttcagttaatgggaagaacaaaactaaaatgctgtatgg

SEQ ID NO: 617 - DNA, 240 bp, Homo sapiens
cctaagccgcctaaggggctgcctcggctgtccatcagttacctcgtttcctgagcagagtaattgggtgagattgttcatggaggcattgctggctctctagtcctggaacctacagttggtccaattcattatgccaaagggtccgtctaggaggttcttgttccaagtattgagattcccgagagaagtaggtccccttagatagaagcagagtttctcagaggtatttagcagcag

SEQ ID NO: 618 - DNA, 268 bp, Homo sapiens
aaaatttattttattttacaatacttttagatttatagaaaagttgggaagatggtacaaagagttcccatatataccatacccagtttcccctaataacatcttacattggtatattatggttgtcacaattaaatgggctaatattgatacattagtattaactaaagtccatactttgttcagatttcattagtttttatgtaatgtcttttgtctgttctaggatcccgttgaagataccacattacacttaggctcctgttgg

SEQ ID NO: 619 - DNA, 277 bp, Homo sapiens
  misc_feature (1)...(277): n = g, a, c or t
cgcttttttaggcctagttgaaagtcaagaaggacagcagcaagcataggctcaggattaaagaaaaaaatctgctcacagtctgttctggaggtcacatcaccaacaaagctcacgccctatgcagttctgagaaggtggaggcaccaggctcaaaagaggaaatttanaatttctcattgggagagtaaggtacccccatcccagaatgataactgcacagtggcagaacaaactccaccctaatgtgggtggaccccatccagtctgttgaagg

SEQ ID NO: 620 - DNA, 233 bp, Homo sapiens
ctgtgcgtgctcacgggctcctcctgctggaagagagagagatgtgcacgccactcctatggcatgtctagcaggtctgagcagtgttcatagaagaaaaatgttttaacagtctcagattttgggaggtagggggaaaaaaatcattgaaatctgggaaagacatttttaagctgctgacttcacctgcaaaatctaacaggttggattagtttttttttttttttttacct

SEQ ID NO: 621 - DNA, 311 bp, Homo sapiens
  misc_feature (1)...(311): n = g, a, c or t
ctgcaagacagcagagaanctgccaatatccagttagcagatgactttgctggcaagcagaggaagncggtaaaagcttgtctcccagccaggaaacttgacaccaagntaagatttggagctaggaaacaaacccaaaaggctcacagcaagcggagaaaaaaaccccaaaatctgtaacctgtatcacaaagcgttcatatccttcagatataaagagttattagatatcaataagaaaaatgcaaacactcctgaaaagtagaaaaaagctatgaacaggcaattcactgaaattaaaaaaaaaaaaa

SEQ ID NO: 622 - DNA, 243 bp, Homo sapiens
ctgtggcttagctggctttgctggtcgtaatggaggacaaaagtgccttctggtgaaactcagcttccatagtgatggaacctaagggtagcagagtttatggtgaccctgtagtgtatctccagaaatggtgattgtttgaatgcatgtaagacattccctagggactccaagaaatattgattagaggaagatgtggtgctttgaaagggacttggtgttcctacatgaaccaagtgaagg

SEQ ID NO: 623 - DNA, 388 bp, Homo sapiens; identical to SEQ ID NO: 287

SEQ ID NO: 624 - DNA, 529 bp, Homo sapiens; identical to SEQ ID NO: 297
  misc_feature (1)...(529): n = g, a, c or t

SEQ ID NO: 625 - DNA, 571 bp, Homo sapiens
ctgagctcctctggttcttctctagacctgctccctctctgaaatgcaaggccgtgcctttaatgggcttttggcattctgtctccagacctcccttctcatctgaagggctctcaggagaacagagaaaaaaccagcctgtctccaaactggcccgtctcagggactgggggcctttacccccagtgaaagatgcagactttacagcgctgcagtacagtagagttaagtgactccttcagatagttggatgggtctctcgatcattcctgataataacattttgcctatgttaagtgctttccacctatcatgttaccttctaactactcccttggttggatacaggtattagccccatttcacaattaagaaattgaggcttaaaaggattaaagagttttttagaggagaaacagctcttccttacagaaggatcccaagtaataaatgtgaatgctccctctccagaaggtggcacttaattcccctgtcctggagtttgacctcgcttagtgactggcttctgatgaataaaatggggaaaaggaaaaatagtaactccacagtg

SEQ ID NO: 626 - DNA, 449 bp, Homo sapiens; identical to SEQ ID NO: 52
  misc_feature (1)...(449): n = g, a, c or t

SEQ ID NO: 627 - DNA, 410 bp, Homo sapiens; identical to SEQ ID NO: 60

SEQ ID NO: 628 - DNA, 343 bp, Homo sapiens; identical to SEQ ID NO: 48
  misc_feature (1)...(343): n = g, a, c or t

SEQ ID NO: 629 - DNA, 117 bp, Homo sapiens; identical to SEQ ID NO: 71
  misc_feature (1)...(117): n = g, a, c or t

SEQ ID NO: 630 - DNA, 111 bp, Homo sapiens
  misc_feature (1)...(111): n = g, a, c or t
agcactggtggtgctcaccatggctggacgtctctctcggctctctctcactgacagactctggactctatgtntactcaacaccctagtgcagtggccacgaaaacagca

SEQ ID NO: 631 - DNA, 303 bp, Homo sapiens
  misc_feature (1)...(303): n = g, a, c or t
ctggacgangaangntnctgacactcactaggactgtgactagatgttccagtggcagaaagtcctcctggtttccttcgggccctggcgtaatgcagcagagcagcagcanctacnannacnaagatgttgaccaccagccccntgattcccgcagtggtaaggcctgttctgttcctggaagttcctgtaacattgagtgtcaccactttactgtgctgggcccccaggccattgtcaagcctcacatgagtagtttccagaatgntctgtagtcagagagaggttgaaggatgcccctcc

SEQ ID NO: 632 - DNA, 246 bp, Homo sapiens
  misc_feature (1)...(246): n = g, a, c or t
ncgangtctgaagcccactaaggaatccaggagatgtgctgggccctggagtgggagcaccttgccactggattagaaaacctgccagtcagggctttaactgggaaacaggtgacagtccagcagggccctgcattctggtcagactgagaatgaggacatgtgaaacaaaggccagtagatatggtctggggcagnctaaatcttccacttcaatgctgcttctccccaaggggaactttgcgg

SEQ ID NO: 633 - DNA, 544 bp, Homo sapiens
  misc_feature (1)...(544): n = g, a, c or t
aaatgcgcatgtaatttatttatgataatgtaaatacttcttaaatgtctgtaactcttcaaaagtgatgcttcaggataaatgagctgctaagcattttaagaatttaccgtaactctaatatactggaggggaagggatggatctgaaaggctaccatcagtaagaggaataaaacttgctctgtgtcctccagaagtctggacagtgatcagcaggtaatagacacagaggaactgatttcaacttttgaaaaagagttttccactaattaacactgtcccacggcggaataggttccctgaagatgttgagtgctgaaagtgatcaagcagaggctagagggcttcttgcctgggagcaggggagggttgggggagaaggacaagaggacagtggggtaggtgacctctagcatcattgtcactgctaatattctatcttgtgcattcatttgctcattcacacagcttcccaagatggcccccaatgatccttgccagtggngtattcatgcccttgggcaattccttnccagactgaa

SEQ ID NO: 634 - DNA, 220 bp, Homo sapiens
ccacctgggggcaggtagccccggcttgcttgttctctctttcctagcccaggaatcgggtccttgggtctaaagcacagggccaagttctcaaggatcaacatcccagacagctcccatggtctggggcttggagctggtatgaagggtgaaccaggttccatcctggactgtttatggttggagggcctgggcccctggcaccaagaccttcacttcc

SEQ ID NO: 635 - DNA, 224 bp, Homo sapiens
  misc_feature (1)...(224): n = g, a, c or t
cctaaaaaagcggcctcggtgggaatgcatttctcttgctccacgtctattttagttgcatatctgtagtgatgacaaatgcctccagccttgtcctctgcaaggctgcactgggctgcatacaggctcctgtctcaggtgtctggtttcctccttgaaaggttggggcagcggagtcagccctgtctatctgggcaaggncctgacacttggaancatgaaaa

SEQ ID NO: 636 - DNA, 453 bp, Homo sapiens
ctgtcatgaggtctcttctatagccatcaggtcttctcacagggatattcaccaccttgctctggataggcacatggccgttgtcagctctacagtaatatttgccggcatcactctctttcacagctgggatctccagctctgctgacagggaacgctgggttttctttcccatactggttcctgtggcctctctgtaccaggagaatgtgacatttcctgtacccccagccactgagcagagcaggatcagtttttgtccttcagtcacctgtcccccgggggcccggatctccaagcttacattagagatggggattcctagatggatataagacaacaggtgagaactctaagggaaactctgggaacagggtttgactgattccattctctaatgcaaaatgtgggaatgtggagattgtatagataatccattataagcattcctat

SEQ ID NO: 637 - DNA, 215 bp, Homo sapiens
ccgcccgggcaggtccacccaggaactcctgactgctttccttcccctgcttgctatacattgtctggaactggctaagaaatggggaacatttgtgaaaaccaagaaatgtaatggttttggatgaataaaatagaccaaagttaaggtaagtgcacaaatatcagtgtcaggctatggaagaaagataaagagatacttcttttttttttttt

SEQ ID NO: 638 - DNA, 497 bp, Homo sapiens
  misc_feature (1)...(497): n = g, a, c or t
gttcggggagagggtggtancacagggcttgggatatcggcagtgtgggaaatgcgaagcatttctcatcatcatcatctctgctacagncatgtttctgcatgtcagcgagcgacactgtccctgcctcaggttggaggttttatcanccaaagtgtttttttcatgtatcgttcgttccattcatccactctgnnccttgncagcctttgaaaggcttggttgctcccaggctgctgttctcagggaccttaaaagggacctggttagtcttggggcagagagtatctacttgggcactctcttccaagaaagaccttgtctccattttcattaggacaatgcttcttgtgtgtgttctggaagatcttctaaatggaatgcttgttgcactgntcccangcgagtggntgccatgagacctgangaccacacttgggggaccaatcatgtncttnaccactgngccttagaatcgcccctggacagagttcctg

SEQ ID NO: 639 - DNA, 591 bp, Homo sapiens
ctgataacgttcacagccccatcctcagcacgtggattcgagtcaccgtgagaattccggtatctcaccctgtcctcaccttcagggctcccagggcccacactgtggtgggggacctgctggagcttcactgtgagtccctgagaggctctcccccgatcctgtaccgattttatcatgaggatgtcaccctggggaacagctcagccccctctggaggaggagcctccttcaacctctctctgactgcagaacattctggaaactactcctgtgatgcagacaatggcctgggggcccagcacagtcatggagtgagtctcagggtcacagttccggtgtctcgccccgtcctcaccctcagggctcccggggcccaggctgtggtgggggacccgctggagcttcactgtgagtccctgagaggctccttcccgatcctgtactggttttatcacgaggatgacaccttggggaacatctcggcccactctggaggaggggcatccttcaacctctctctgactacagaacattctggaaactactcatgtgaggctgacaatggcctggggcccagcacagtaaagt

SEQ ID NO: 640 - DNA, 349 bp, Homo sapiens
ccagagtgcaggatacatcattggcaccaagggtctttttcaattcttggtcaatcctctgcagcaagcacccccggatgacgtcctcatagatgccctcagtggtcagagcctggctgcccacggcaaggacatccccctcgaactcaggcagctcctttttgcagcctggctcgagttggctcagcacaaaaggtaaaaagatgcagagaccccagcctcggatgaacctcctctgcgccaacccgctgtccgatttgaatttcttcagcacgcgccccctgactctctccagcctctgggcagcctggtcacagttgagggccgtcgtcagacactggtcagccag

SEQ ID NO: 641 - DNA, 555 bp, Homo sapiens
aaaggatgcactcttgccattttatgtactggaagatcattggtcagatgaatactgtgtctgacaaaaatgtaaactgtataaactgaggaacctcagctaatcagtattactttgtagatcaccatgcccaccacatttcaaactcaaactatctgtagatttcaaaatccattgtgtttgagtttgtttgcagttccctcagcttgctggtaattgtggtgttttgttttttgttttgttttcaatgcaaatgtgatgtaatattcttattttctttggatcaaagctggactggaaattgtatcgtgtaattatttttgtgttcttaatgttatttggtacttaagttgtaaataacgtctactactgtttattccagtttctactacctcaggtgtcctatagatttttcttctaccaaagttcactttcacaatgaaattatatttgctgtgtgactatgattcctaagatttccagggcttaagggctaacttctattagcaccttactgtgtaagcaaatgttacaaaaaaaaaaaaaaatctctgg

SEQ ID NO: 642 - DNA, 179 bp, Homo sapiens; identical to SEQ ID NO: 191
  misc_feature (1)...(179): n = g, a, c or t

SEQ ID NO: 643 - DNA, 582 bp, Homo sapiens
  misc_feature (1)...(582): n = g, a, c or t
ccattggatggctggggattcaccagagaaacggacacaccaggttctattctaaaaacattaagtggtttcccaggacagcagtcttccctgattttatcttctgcttcggaggcaaacttgacttctatgtgttctagctcaagcgaattagtcagatagactatattctccataagcacagccttttcatcaaattctaattgcaaatccagaatacgaggccccatcttctccagattttccttaatcatggcaacaaatggcatgactttcttcatgtatttcttcagttctggcatactgcttagttcactagcaatgactttgttgtcaggcagttttccgttattggcctcaaagtgtttacgtagaacagacagggtggtatgttgccaaggtggatagttctttgccacatagatggtgcaatgtgagggcttctgcaggggttgtttgtcagtcttcttccctttagctggcatcatatagttcttgagtcgtagtctaaggtcatgtgttacttccataagatactgngaggagtgtattaaaacttcattaacaggacctgccacaggc

SEQ ID NO: 644 - DNA, 420 bp, Homo sapiens
  misc_feature (1)...(420): n = g, a, c or t
ctggggcacacagaggaggggcctgggtaccccttttggggaaactgagacgaagctatttagaacagcttgaaaataagagacttttctagaatggggtggcagctaaagtagcttctttttctttctttcagaatgctcagatgcatcagttccttaatatacacgtgaaatttgaaaactgtacattcggtgagattaaattttatatacaactagcaattgtccagctttgttgctcattttcaattaaggctaaagtgttcaacatgagaaaatgtgatacatttgatacagtgtggggtgggagtggatgggcagctcttggtggtactggaccttncacaaggctgtgtccacccagaatccatgctggcaggagggaggcagaggtatcaaaccanacctctcaccaagcgg

SEQ ID NO: 645 - DNA, 505 bp, Homo sapiens
  misc_feature (1)...(505): n = g, a, c or t
aaagacagaatccctgagtgctgagcagattctcaaaacacatttanaatccctgaaattagaaagatcaatgacaaaatatctgtcagccaggccacaaacaggtgtaaaattatgaaaggagtggttggatgtgccaagtttggtaaagtggtgactgcatctgagaaagaggctgtgaggctgaactcttggtggcttccttctgtaacttccagagggagtcttcaacacaggccccgtgctcgtaggaatacggtagcacctatgtaggaagtgcgtggagttttctgtcttctttctgtgtgatttttggcctttttatcagcacttctcccctcccaggagcctggggatgccaaacatccagaatgtgatgggacaagatgggggcaggggcctcacctccctgcagaggtccggccaggtctccttgtccctggacaatctcctgagcctctctgcttggtggagcaggcacctgtgtgcagaattcccactgtgg

SEQ ID NO: 646 - DNA, 474 bp, Homo sapiens; identical to SEQ ID NO: 205
  misc_feature (1)...(474): n = g, a, c or t

SEQ ID NO: 647 - DNA, 478 bp, Homo sapiens
ccagcatcaccacagcctggggcccagaaggagccataacctgttgctgcctgatggagggcccagcatgggacacaagccagatcatcatcaccgggagtcaagacggcatggtccgggtttggaagactgaggatgtgaagatgtctgttcctggacggccagcaggagaggagcccctggctcagcctccaagcccaagaggccacaagtgggagaagaacctggccttgagtcgagagctggacgttagcattgctttgacagggaagcccagcaaaaccagccccgcagtgactgctctggccgtgtccagaaaccacaccaaactcctggttggtgatgagagggggagaatattctgctggtctgcagatgggtaggaagagagaggcagcagaggctctggcacaacagtgccaggctgagggtggcagaggtgactggggcctgagctctgcctacagaagaaaccccc

SEQ ID NO: 648 - DNA, 443 bp, Homo sapiens; identical to SEQ ID NO: 563

SEQ ID NO: 649 - DNA, 563 bp, Homo sapiens; identical to SEQ ID NO: 352

SEQ ID NO: 650 - DNA, 306 bp, Homo sapiens; identical to SEQ ID NO: 484

SEQ ID NO: 651 - DNA, 561 bp, Homo sapiens; identical to SEQ ID NO: 356

SEQ ID NO: 652 - DNA, 420 bp, Homo sapiens; identical to SEQ ID NO: 364

SEQ ID NO: 653 - DNA, 196 bp, Homo sapiens
tcagaagtgtgctcctctggcctcagttctcctcttttggaacaacataaaacaaatttaattttctacgcctctggggatatctgctcagccaatggaaaatctgggttcaaccagcccctgccatttcttaagactttctgctgcactcacaggatcctgagctgcacttacctgtgagagtcttcaaactttt

SEQ ID NO: 654 - DNA, 581 bp, Homo sapiens
  misc_feature (1)...(581): n = g, a, c or t
ctgctcgacagcatatggcaccagcccattttcaatttgctgagcatcggccaaagcctgtatgcgaaagccaaggagctggacagagtgaaggaaattcaggagcagctcttccatatcaagaagctgttgaagacctgtaggtttgctaacagtgcattaaaggagtttgtagggcaggtgccgggacacttgactgatgagctccacctgttctcccttgaggacctggtcaggatcaagaaagggctgctggcacccttactcaaggacattctgaaagcttcccttgcacatgtggctggctgtgagctgtgtcaaggaaagggctttatttgtgaattttgccagaatacgactgtcatcttcccatttcagacagcaacatgtagaagatgttcagcgtgcagggcttgctttcacaaacagtgcttccagtcctccgagtgcccccggtgtgcgaggatcacagcgaggagaaaacttctggaaagtgtggcctctgcagcaacatgatgcccctgagtactgngaaaaagactgttcaacatgccttatgataacaccgatttgngtctatt

SEQ ID NO: 655 - DNA, 482 bp, Homo sapiens; identical to SEQ ID NO: 395

SEQ ID NO: 656 - DNA, 252 bp, Homo sapiens
  misc_feature (1)...(252): n = g, a, c or t
aaaatacttttataaaattataaattgataataatccccncaaactgaagngaaatacttttaatactacttgaaattaaagtacagttgnttatacaacaatgaataaggacaagatatnaaactgaaaattcaaaaataaacagaagaaatgtaaacagttctaaaatatcagtatttataaatgttgcttagaggaaggctattcaaagcatggtccattaactatttgtgagctgtccagaatgaaag

SEQ ID NO: 657 - DNA, 379 bp, Homo sapiens
  misc_feature (1)...(379): n = g, a, c or t
aaaataagctatggtttttccagtagccaaaatgatcctgcaccanagctcatanactgagaacctgancatgcaaanccacagtctgggtgaagggatgtctgctttgtaaatgacctgctaattctttgcaacccacagtaatttggtttctgtgaacccacagaagcaggcccaccaaaaagggccttgtctgctagcctggagtatacatgantcactggcggtgggatcagtcattttttaggctgccccattttcctaacatgttaaaatgtgtgttctcagtcttttcaagagaggaagaagcaaagcggcacttacagagtgtgtgatangacacagatctgtggcgagggattggggaaggtgggtggca

SEQ ID NO: 658 - DNA, 551 bp, Homo sapiens; identical to SEQ ID NO: 258
  misc_feature (1)...(551): n = g, a, c or t

SEQ ID NO: 659 - DNA, 278 bp, Homo sapiens; identical to SEQ ID NO: 260

SEQ ID NO: 660 - DNA, 414 bp, Homo sapiens; identical to SEQ ID NO: 268

SEQ ID NO: 661 - DNA, 353 bp, Homo sapiens; identical to SEQ ID NO: 427

SEQ ID NO: 662 - DNA, 101 bp, Homo sapiens
  misc_feature (1)...(101): n = g, a, c or t
agggggntggtggctgncntnatnaggacctggacggcctggnctgagctgaccnatgccngatntactggtnctncactgaangtacacaanatcnttaa

SEQ ID NO: 663 - DNA, 442 bp, Homo sapiens
cctccaattccacagagcacaatttaaaactacagcatatgaaaatagcaaatgcaaaaaaacaaaaacaaaaacacaacacaaaatgccacatgtaaatggtggagtatgtatttatacataacatccccacatacatacatacactcaaaacaatactatataatttttctatgtgaacatacaatgtccttctggaagaacatacaaaaactggtaacagtagctaactttaggggagaatccttgattagggttggtagatgaaaagacttcagccctttctgtaaggtgggcagcacatatttacaaaaggaatgtatctctgtattgtgtgtgaatataccattaatttctaaaaggttccatgagaaaattttcgaagaattgcacaaacatcctttgctatgtagacaaagatggtgactcggcacaaagccag

SEQ ID NO: 664 - DNA, 317 bp, Homo sapiens
  misc_feature (1)...(317): n = g, a, c or t
ctggtggttaacaagtggatcgtcatgttcagtagtttatacattatgtgagaagtaacgttctgattctttttcttacacagaattggcagagggggtcgatttgggaggaaaggtgtggctataaactttgttactgaagaagacaagaggattcttcgtgacattgagactttctacaatactacagtggaggagatgcccatgaatgtgactgaccttatttaattcctgggatgagagttttcgatgcagtgctcgctgttgntgaataggcnatcacnacgtgcattgtgcttctttctttggnaatattt

SEQ ID NO: 665 - DNA, 1324 bp, Homo sapiens
cttgagaggctctggctcttgcttcttaggcggcccgaggacgccatggccgagtgcccgacactcggggaggcagtcaccgaccacccggaccgcctgtgggcctgggagaagttcgtgtatttggacgagaagcagcacgcctggctgcccttaaccatcgagataaaggataggttacagttacgggtgctcttgcgtcgggaagacgtcgtcctggggaggcctatgacccccacccagataggcccaagcctgctgcctatcatgtggcagctctaccctgatggacgataccgatcctcagactccagtttctggcgcttagtgtaccacatcaagattgacggcgtggaggacatgcttctcgagctgctgccagatgactgatgtatggtcttggcagcacctgtctcctttcaccccagggcctgagcctggccagcctacaatggggatgttgtgtttctgttcaccttcgtttactatgcctgtgtcttctccaccacgctggggtctgggaggaatggacagacagaggatgagctctacccagggcctgcaggacctgcctgtagcccactctgctcgccttagcactaccactcctgccaaggaggattccatttggcagagcttcttccaggtgcccagctatacctgtgcctcggcttttctcagctggatgatggtcttcagcctctttctgtcccttctgtccctcacagcactagtatttcatgttgcacacccactcagctccgtgaacttgtgagaacacagccgattcacctgagcaggacctctgaaaccctggaccagtggtctcacatggtgctacgcctgcatgtaaacacgcctgcaaacgctgcctgccggtaaacacgcctgcaaacgctgcctgcccgtaaacacgcctgcaaacgctgcctgcccacacaggttcacgtgcagctcaaggaaaggcctgaaaggagcccttatctgtgctcaggactcagaagcctctgggtcagtggtccacatcccgggacgcagcaggaggccaggccggcgagccctgtggatgagccctcagaacccttggcttgcccacgtggaaaagggatagaggttgggtttcccccctttatagatggtcacgcacctgggtgttacaaagttgtatgtggcatgaatactttttgtaatgattgattaaatgcaagatagtttatctaacttcgtgcgcaatcagcttctatccttgacttagattctggtggagagaagtgagaataggcagcccccaaataaaaaatattcatggaaaaaaaaaaaaaaa

SEQ ID NO: 666 - protein, 114 aa, Homo sapiens
MAECPTLGEAVTDHPDRLWAWEKFVYLDEKQHAWLPLTIEIKDRLQLRVLLRREDVVLGRPMTPTQIGPSLLPIMWQLYPDGRYRSSDSSFWRLVYHIKIDGVEDMLLELLPDD

SEQ ID NO: 667 - DNA, 1659 bp, Homo sapiens
tcagcgggcgagtccccggctcctccagctccttcctcctcttcctcctcctcctccacctccggcttttgggggatcactgtcctctctcggcagcagaatgagccggcaggtggtccgctccagcaagttccgccacgtgtttggacagccggccaaggccgaccagtgctatgaagatgtgcgcgtctcacagaccacctgggacagtggcttctgtgctgtcaaccctaagtttgtggccctgatctgtgaggccagcgggggaggggccttcctggtgctgcccctgggcaagactggacgtgtggacaagaatgcgcccacggtctgtggccacacagcccctgtgctagacatcgcctggtgcccgcacaatgacaacgtcattgccagtggctccgaggactgcacagtcatggtgtgggagatcccggatgggggcctgatgctgcccctgcgggagcccgtcgtcaccctggagggccacaccaagcgtgtgggcattgtggcctggcacaccacagcccagaacgtgctgctcagtgcaggttgtgacaacgtgatcatggtgtgggacgtgggcactggggcggccatgctgacactgggcccagaggtgcacccagacacgatctacagtgtggactggagccgagatggaggcctcatttgtacctcctgccgtgacaagcgcgtgcgcatcatcgagccccgcaaaggcactgtcgtagctgagaaggaccgtccccacgaggggacccggcccgtgcgtgcagtgttcgtgtcggaggggaagatcctgaccacgggcttcagccgcatgagtgagcggcaggtggcgctgtgggacacaaagcacctggaggagccgctgtccctgcaggagctggacaccagcagcggtgtcctgctgcccttctttgaccctgacaccaacatcgtctacctctgtggcaagggtgacagctcaatccggtactttgagatcacttccgaggcccctttcctgcactatctctccatgttcagttccaaggagtcccagcggggcatgggctacatgcccaaacgtggcctggaggtgaacaagtgtgagatcgccaggttctacaagctgcacgagcggaggtgtgagcccattgccatgacagtgcctcgaaagtcggacctgttccaggaggacctgtacccacccaccgcagggcccgaccctgccctcacggctgaggagtggctggggggtcgggatgctgggcccctcctcatctccctcaaggatggctacgtacccccaaagagccgggagctgagggtcaaccggggcctggacaccgggcgcaggagggcagcaccagaggccagtggcactcccagctcggatgccgtgtctcggctggaggaggagatgcggaagctccaggccacggtgcaggagctccagaagcgcttggacaggctggaggagacagtccaggccaagtagagccccgcagggcctccagcagggtcagccattcacacccatccactcacctcccattcccagccacatggcagagaaaaaaatcataataaaatggctttattttctggtaaaaaaaaaaaaaaaaaaaaaaaaaaaaaaaaaaaaaaaaaaaaaaaaaaagggggggggga

SEQ ID NO: 668 - protein, 461 aa, Homo sapiens
MSRQVVRSSKFRHVFGQPAKADQCYEDVRVSQTTWDSGFCAVNPKFVALICEASGGGAFLVLPLGKTGRVDKNAPTVCGHTAPVLDIAWCPHNDNVIASGSEDCTVMVWEIPDGGLMLPLREPVVTLEGHTKRVGIVAWHTTAQNVLLSAGCDNVIMVWDVGTGAAMLTLGPEVHPDTIYSVDWSRDGGLICTSCRDKRVRIIEPRKGTVVAEKDRPHEGTRPVRAVFVSEGKILTTGFSRMSERQVALWDTKHLEEPLSLQELDTSSGVLLPFFDPDTNIVYLCGKGDSSIRYFEITSEAPFLHYLSMFSSKESQRGMGYMPKRGLEVNKCEIARFYKLHERRCEPIAMTVPRKSDLFQEDLYPPTAGPDPALTAEEWLGGRDAGPLLISLKDGYVPPKSRELRVNRGLDTGRRRAAPEASGTPSSDAVSRLEEEMRKLQATVQELQKRLDRLEETVQAK

SEQ ID NO: 669 - protein, 79 aa, Homo sapiens
GKHPDPSAWHRPSDTEPLNKGTPTPHHILRSGAPQVDTRTLTPCPSSTPQVSPRLPPRSLCSRPPLRSFKPTRPHWCVS

SEQ ID NO: 670 - protein, 124 aa, Homo sapiens
TFRHRAPEQGHPNTSSYTEVRGSPGGHQDSDPLPLIHPAGQPKAAPSVTLFPPSSEELQANKATLVCLISDFYPGAVTVAWKADSSPVKAGVETTTPSKQSNNKYAASSYLSLTPEQWKSHKSY

SEQ ID NO: 671 - protein, 50 aa, Homo sapiens
PAGWMRGRGSESWCPPGEPLTSVYDEVLGCPCSGALCLKVYARQRGQGVF

SEQ ID NO: 672 - protein, 108 aa, Homo sapiens
VAFVGLPLLRRQAQVAAGRVLVVALFGGCGGLHSRLDGAAICLPGHCHGSRVEVTYETHQCGLVGLKLLRGGREQSDRGGSLGLTCGVDEGQGVRVLVSTWGAPDLSI

SEQ ID NO: 673 - protein, 58 aa, Homo sapiens [sequence omitted]

SEQ ID NO: 674 - protein, 109 aa, Homo sapiens
HTAPVLDIAWCPHNDNVIASGSEDCTVMVWEIPDGGLMLPLREPVVTLEGHTKRVGIVAWHTTAQNVLLSAGCDNVIMVWDVGTGAAMLTLGPEVHPDTIYSVDWSRDG

SEQ ID NO: 675 - protein, 100 aa, Homo sapiens
IVSGCTSGPSVSMAAPVPTSHTMITLSQPALSSTFWAVVCQATMPTRLVWPSRVTTGSRRGSIRPPSGISHTMTVQSSEPLAMTLSLCGHQAMSSTGAVW

SEQ ID NO: 676 - protein, 103 aa, Homo sapiens [sequence omitted]

SEQ ID NO: 677 - protein, 89 aa, Homo sapiens
TGFYPDHVELSWWVNGKEVHSGVSTDPQPLKEQPALNDSRYCLSSRLRVSATFWQNPRNHFRCQVQFYGLSENDEWTQDRAKPVTQIVS

SEQ ID NO: 678 - protein, 89 aa, Homo sapiens
ADDLGDRFGPILGPLVILREPVELDLTAEVVAGVLPEGGRDPQAAAQAVSGVIEGGLLLEGLRVCADPTVHLLPIHPPAQLHVVGVEAC

SEQ ID NO: 679 - protein, 59 aa, Homo sapiens
QRKWLRGFCQKVAETLRRLLRQYLESLRAGCSLRGCGSVLTPLCTSFPFTHQLSSTWSG

SEQ ID NO: 680 - protein, 123 aa, Homo sapiens
  variant (1)...(123): Xaa = Any amino acid
TXXINRXEAGDEADYYCQVWDRNNDHVVFGGGTKLAVLGQPKAAPSVTLFPPSSEELQANKATLVCLISDFYPGAVTVAWKAXSSPVKAGVETTTPSKQSNNKYAASSYLSLTPEQWKSHXTT

SEQ ID NO: 681 - protein, 85 aa, Homo sapiens
  variant (1)...(85): Xaa = Any amino acid
CSXVGLPLLRRQAQIAAGRVLVVALFGGCGGLHSRLDGAAXCLPGHCHGSRVEVTYETHQCGLVGLKLLRGGREQSDRGGSLGLT

SEQ ID NO: 682 - protein, 85 aa, Homo sapiens
VASVGLPLLRRQAQIAAGRVLVVALFGGCGGLHSRLDGAAICLPGHCHGSRVEVTYETHQCGLVGLKLLRGGREQSDRGGSLGLT

SEQ ID NO: 683 - protein, 123 aa, Homo sapiens
TLTINRVEAGDEADYYCQVWDRNNDHVVFGGGTKLAVLGQPKAAPSVTLFPPSSEELQANKATLVCLISDFYPGAVTVAWKADSSPVKAGVETTTPSKQSNNKYAASSYLSLTPEQWKSHRSY

SEQ ID NO: 684 - protein, 161 aa, Homo sapiens
  variant (1)...(161): Xaa = Any amino acid
PCLRSKVTRKRPCLPSMTLMEEMLREAFRCMTQEPMKGPIAMQSGPKPLFRRMSSLVGPTQSFFMRESKTLGAVQIMNGLFHIALGGLLMIPAGIYAPICVTGVVPSLGRHYVYYFRITPGSNRKKNSRKCLVKGKNDNEFIXPSLLAFSGKNSFQIMGPY

SEQ ID NO: 685 - protein, 60 aa, Homo sapiens
  variant (1)...(60): Xaa = Any amino acid
LGWYPLWGGIMYIISGSLLAATGKKTPGSVWSKEKMIMNSLXPLCLPFLERILFKSWDHT

SEQ ID NO: 686 - protein, 67 aa, Homo sapiens
LPQIQGHSEEAMSTLNDTHGGNAERSIQMHDTRANERPYCYAIWSKTTLQEDVFTGGPHAKLLHEGI

SEQ ID NO: 687 - protein, 68 aa, Homo sapiens
DFGGCPDYEWALPHCPGGSSDDPSRDLCTHLCDWGGTLSGEALCILFPDHSWQQPEKKLQEVFGQRKK

SEQ ID NO: 688 - protein, 106 aa, Homo sapiens
  variant (1)...(106): Xaa = Any amino acid
VWSHDLKRILSRKGKQRGXNEFIIIFSFDQTLPGVFFPVAARSDPEIIYIMPPQRGYHPSHTDGCIDPCWDHQKTPQGNVEEPIHNLDSPQSLRFPHEEALRGAHQ

SEQ ID NO: 689 - protein, 94 aa, Homo sapiens
IPAGIIRRPPRAMWKSPFIIWTAPKVLDSLMKKLCVGPTSEDILLKSGFGPDCIAIGPFIGSCVMHLNASLSISSMSVIEGRHGLFRVTLDLRQ

SEQ ID NO: 690 - protein, 151 aa, Homo sapiens
  variant (1)...(151): Xaa = Any amino acid
PGGQHGGDWSWRVTVEPQDSGTSALPLVSLFFYVVTDGKEVLLPEVGAKGQLKFISGHTSELGNFRFTLLPPTSPGDTAPKYGSYNVFWTSNPGLPLLTEMVKSRLNSWFQHRPPGASPERYLGLPGSLKWEDRXPSGQGXGAVLDTAGDP

SEQ ID NO: 691 - protein, 59 aa, Homo sapiens
WGSARRGLELESDCRASGLRYFCPPFGLPVLLCGDRWQGSPTTRGWGQGAVEVYQWAHQ

SEQ ID NO: 692 - protein, 85 aa, Homo sapiens
  variant (1)...(85): Xaa = Any amino acid
FKGHLLYQELPXALAHLDXCPPTSGILASRGSVQGRPLGADAETSYLGDSLPSLSAGAVLGWRSRRHCSCHTWGLYPLDWLVAKV

SEQ ID NO: 693 - protein, 53 aa, Homo sapiens
TSTAPWPQPLVVGLPCHLSPHRRTGRPKGGQKYLSPEALQSLSSSSPLRADPQ

SEQ ID NO: 694 - protein, 62 aa, Homo sapiens
ATLYHLCQQGQSWVGGPEDIVAAILGGCIPWTGWWQKCKAEVTKFTGVPTDKLQLPLGPNLW

SEQ ID NO: 695 - protein, 51 aa, Homo sapiens
LPYLGAVSPGLVGGKSVKRKLPSSLVCPLINFNCPLAPTSGSRTSLPSVTT

SEQ ID NO: 696 - protein, 71 aa, Homo sapiens
  variant (1)...(71): Xaa = Any amino acid
IRSKSHPGLGPSTHSRIGSADTEGGHGTRRLHGRLLSRLYPGHQRXVLTCINCXWNSPHHRGYPWPXXLKC

SEQ ID NO: 697 - protein, 97 aa, Homo sapiens
  variant (1)...(97): Xaa = Any amino acid
ASYSYXXEKPSAIQQRAILPCIKGYDVIAQAQSGTGKTATFAISILXQIELDLKATQALVLAPTRELAQQIQKVVMALGDYMGASCHACIRGTNVXC

SEQ ID NO: 698 - protein, 52 aa, Homo sapiens
  variant (1)...(52): Xaa = Any amino acid
PPSVSAEPILEWVLGPRPGWLLDLIQSXAESIWQMWPFSQSQIGLEQSHHNP

SEQ ID NO: 699 - protein, 70 aa, Homo sapiens
SGHSMDMRVPAQLLGLLLLWLPGAKCDIQMTQSPSTLSASVGDTSYNKLSGLSEYRSVVGLASTETRQSP

SEQ ID NO: 700 - protein, 97 aa, Homo sapiens
  variant (1)...(97): Xaa = Any amino acid
PNLLPPCLHLSEIQVTISCRASQNIDRWLAWHQQKPGKAPNVLIYATSSLEEGVSLRFTGSGSGTQFNLTITSLQPDDSATYYXQHYSASLRSFWTS

SEQ ID NO: 701 - protein, 72 aa, Homo sapiens [sequence omitted]

SEQ ID NO: 702 - protein, 51 aa, Homo sapiens
EARQLIVTCISDRCRQGGRRLGHLDVTFGTWEPEQQEPQELSGDPHVHAVS

SEQ ID NO: 703 - protein, 61 aa, Homo sapiens
  variant (1)...(61): Xaa = Any amino acid
LLAAYLLLLCLEGVVXSTPALTGLAICLPGHCHXSRVEVTYETHQXGLVGLKLLXGGRETE

SEQ ID NO: 704 - protein, 56 aa, Homo sapiens
  variant (1)...(56): Xaa = Any amino acid
VAAVGLPLLRRQAQIAAGRVLVVALFGGCGXLHSRLDGACYLPSRPLSXLPGRSHL

SEQ ID NO: 705 - protein, 76 aa, Homo sapiens
  variant (1)...(76): Xaa = Any amino acid
VSPXLPPRSFCFPPSXEELQANKAXLVCLISDFYPGXVTVAWKADSKPRQGGSGXHHTLQTKQQQVRGQQLSEPDA

SEQ ID NO: 706 - protein, 154 aa, Homo sapiens
  variant (1)...(154): Xaa = Any amino acid
TLTINRVEAGDEADYYCQVWDRNNDHVVFGGGTKLAVLGQPKAAPSVTLFPPSSEELQANKATLVCLISDFYPGAVTVAWKADSSPVKAGVETTTPSKQSNNKYAASSYLSLTPEQWKSHRSYRPARAAKGEFQHTWRRYYGSXSVPTWRNHXH

SEQ ID NO: 707 - protein, 67 aa, Homo sapiens
  variant (1)...(67): Xaa = Any amino acid
YXHDYAKLVPSXIHSNGAKCAGIRPWPPGQVCSFCGTSTAQASGSDSCWPRTCCCFVWRVWWSPLPP

SEQ ID NO: 708 - protein, 116 aa, Homo sapiens
  variant (1)...(116): Xaa = Any amino acid
MXMITPSWYRXGSIVTAPSVLEFALGRPGRSVASVGLPLLRRQAQIAAGRVLVVALFGGCGGLHSRLDGAAICLPGHCHGSRVEVTYETHQCGLVGLKLLRGGREQSDRGGSLGLT

SEQ ID NO: 709 - protein, 125 aa, Homo sapiens
  variant (1)...(125): Xaa = Any amino acid
TLTINRVEAGDEADYYCQVWDRNNDHVVFGGGTKLAVLGQPKAAPSVTLFPPSSEELQANKATLVCLISDFYPGAVTVAWKADSSPVKAGVETTTPSKQSNNKYAXQQLSEALTPEQVESPTEAT

SEQ ID NO: 710 - protein, 70 aa, Homo sapiens
  variant (1)...(70): Xaa = Any amino acid
LLXRVLVVALFGGCGGLHSRLDGAAICLPGHCHGSRVEVTYETHQCGLVGLKLLRGGREQSDRGGSLGLT

SEQ ID NO: 711 - protein, 53 aa, Homo sapiens
  variant (1)...(53): Xaa = Any amino acid
VASVGLSTCSGVKASDSCXAAYLLLLCLEGVVVSTPALTGLLSAFQATVTAPG

SEQ ID NO: 712 - protein, 56 aa, Homo sapiens
PPRVRAPSVPGPRPSRQRSFHSAWDDGEEKNPDLPHPGPKESAGDVHQAEVRADEE

SEQ ID NO: 713 - protein, 56 aa, Homo sapiens
RRGSVRPASQGPGRADKDHSTQPGTMGRKKIQISRILDQRNRQVTFTKRKFGLMKK

SEQ ID NO: 714 - protein, 56 aa, Homo sapiens
LLHQPELPLGERHLPIPLVQDAGDLDFFPPHRPRLSGMIFVCSAWALGRWAHGPAA

SEQ ID NO: 715 - protein, 120 aa, Homo sapiens
  variant (1)...(120): Xaa = Any amino acid
PAICTDKYRCLKHNLNSLIKRSNSTAATNEXPEVTVFSKSPVTLGQPNILICLVDNIFPPVXNITWLSNGHSVTEXVSETSFLSKSDHSFFKISTSPSSLLXEESYDCKXXHWGLGQASS

SEQ ID NO: 716 - protein, 52 aa, Homo sapiens
  variant (1)...(52): Xaa = Any amino acid
AMGTQSQXVFLRPASSPRVIIPSSRSVPHPPPFWXRRVMTARXXTGDWDKPL

SEQ ID NO: 717 - protein, 60 aa, Homo sapiens
  variant (1)...(60): Xaa = Any amino acid
VPIAQPCDVXHRRKDVVHKTDEDVGLTQCHGRLGKHCDLRXLIGSSGRVGAFNQTVQVMF

SEQ ID NO: 718 - protein, 52 aa, Homo sapiens [sequence omitted]

SEQ ID NO: 719 - protein, 53 aa, Homo sapiens [sequence omitted]

SEQ ID NO: 720 - protein, 59 aa, Homo sapiens [sequence omitted]

SEQ ID NO: 721 - protein, 68 aa, Homo sapiens
  variant (1)...(68): Xaa = Any amino acid
QVLGWLTWAPWAWGRCVTRFGLCREKIGSYGDLGWRWMRQHPAGACPWTRATLGLLSRLELEGEDLXR

SEQ ID NO: 722 - protein, 51 aa, Homo sapiens
  variant (1)...(51): Xaa = Any amino acid
XGXGPRPPAQGGTRALEWPESRDRPQQGADASTSIPDPRNSQSSLCRAQIL

SEQ ID NO: 723 - protein, 52 aa, Homo sapiens
SGPSPGTGPSRVLTHPPPSQIPVTPNLLSAEPKSCDTPPPCPRCPGKPAQDL

SEQ ID NO: 724 - protein, 57 aa, Homo sapiens
RKQHWWCLSHGLDRSPPRPPLSLHRLCDLLCVDSDTLSVSGPRKDGQDYLWGKQYWE

SEQ ID NO: 725 - protein, 97 aa, Homo sapiens
GSSTGGASAMAWTVLLLGLLSHCTDSVTSYVLTQTPSVSVAPGKTAKITCGGNNIGSNNVHWYYQKPGQAPVLIISFDNDRPSGISERFSGFNSGDM

SEQ ID NO: 726 - protein, 65 aa, Homo sapiens
  variant (1)...(65): Xaa = Any amino acid
QAXDEADYYCQXWDRNNDHVVFGGGTKLAXLXXPNAAPSXTLFPPSSEELQANXATXVCLIXDFY

SEQ ID NO: 727 - protein, 60 aa, Homo sapiens
  variant (1)...(60): Xaa = Any amino acid
KXAMRPTITVKXGIVIMTMSSSAEGPNWXSXVXPTLPPQXLCSRPPLRSFKPTXPHXCVS

SEQ ID NO: 728 - protein, 59 aa, Homo sapiens
  variant (1)...(59): Xaa = Any amino acid
DTXVWXCWLEAPQRRAGTEXLRGQRWXDXGXPVWSLRRRRHGHYYDPXLDSNSRPHRXL

SEQ ID NO: 729 - protein, 56 aa, Homo sapiens
GVFLHTFTSSALSIYTHTQHPQYLTSNRLYHLYLTMTPGRRSKFFFTISNSSLSLF

SEQ ID NO: 730 - protein, 50 aa, Homo sapiens
ISQITKSSLRQQFKTVPGIKIYSHLRSLPSHLHLLSLKYIHTHPTPSILD

SEQ ID NO: 731 - protein, 70 aa, Homo sapiens
RSAYAARWVAKSLVKGGLCRRVLVQVSYAIGVSHPLSISIFHYGTSQKSERELLEIVKKNFDLRPGVIVR

SEQ ID NO: 732 - protein, 53 aa, Homo sapiens
GLLMLLVGWQNPLLKEVCAGGFLFRSLMLLEFLIHYLSPFSIMVPLRRVRESY

SEQ ID NO: 733 - protein, 76 aa, Homo sapiens
  variant (1)...(76): Xaa = Any amino acid
KQHWWCLSHGLDRSPPRPPLSLHRLCDLLCVDSDTLSVSGPXKDGQDYLWGKQYWELQCTLVLPKARPGPCPNHLF

SEQ ID NO: 734 - protein, 96 aa, Homo sapiens
  variant (1)...(96): Xaa = Any amino acid
SSTGGASAMAWTVLLLGLLSHCTDSVTSYVLTQTPSVSVAPXKTAKITCGGNNIGSYSVHWYYQKPGQAPVLIISFDDXRPSXISERFSGLQFWGT

SEQ ID NO: 735 - protein, 85 aa, Homo sapiens
  variant (1)...(85): Xaa = Any amino acid
VASVGLPLLRRQAQIAAGRVLVVALFGGCXGLHSRLDGAAICLPGHCHGSRVEVTYETHQCGLVGLKLLTGGREQSDRGGSLGLT

SEQ ID NO: 736 - protein, 87 aa, Homo sapiens
  variant (1)...(87): Xaa = Any amino acid
VLGQPKAAPSVTLFPPSCEELQANKATLVCLISDFYPGAVTVAWKADSSPVKAGVETXTPSKQSNNKYAASSYLSLTPEQWKSHRSY

SEQ ID NO: 737 - protein, 125 aa, Homo sapiens
RSTLTINRVEAGDEADYYCQVWDRNNDHVVFGGGTKLAVLSQPKAAPSVTLFPPSSEELQANKATLVCLISDFYPGAVTVAWKADSSPVKAGVETTTPSKQSNNKYAASSYLSLTPEHWKSHKSY

SEQ ID NO: 738 - protein, 85 aa, Homo sapiens
VAFVGLPMLRGQAQIAAGRVLVVALFGGCGGLHSRLDGAAICLPGHCHGSRVEVTYETHQCGLVGLKLLRGGREQSDRGGSLGLT

SEQ ID NO: 739 - protein, 67 aa, Homo sapiens [sequence omitted]

SEQ ID NO: 740 - protein, 97 aa, Homo sapiens; identical to SEQ ID NO: 725

SEQ ID NO: 741 - protein, 57 aa, Homo sapiens
SWPSFLGPLTLRVSESTHRRSQSLCSERGGRGGERSRPWLRHHQCCFLRPRLSRFLP

SEQ ID NO: 742 - protein, 143 aa, Homo sapiens
  variant (1)...(143): Xaa = Any amino acid
TLTINRVEAGDEADYYCQVWDRNNDHVVFGGGTKLAVLGQPKAAPSVTLFPPSSEELQANKATLVCLISDFYPGAVTVAWKADSSPVKAGVETTTPSKQSNNKYAASSYLXLTPEQWKSHRSYSLGLAYLGHPWGNGGXCVTK

SEQ ID NO: 743 - protein, 53 aa, Homo sapiens
  variant (1)...(53): Xaa = Any amino acid
HXFPHCPTGAQGKPSPGCSFCGTSTAQASXSDSCWPRTCCCFVWRVWWSPLPP

SEQ ID NO: 744 - protein, 105 aa, Homo sapiens
  variant (1)...(105): Xaa = Any amino acid
FCDTXSPIAPRVPKVSQAQAVASVGLPLLRRQXQIAAGRVLVVALFGGCGGLHSRLDGAAICLPGHCHGSRVEVTYETHQCGLVGLKLLRGGREQSDRGGSLGLT

SEQ ID NO: 745 - protein, 59 aa, Homo sapiens
  variant (1)...(59): Xaa = Any amino acid
XGXGPEHTFGWNSLRDQKAPVSHRAEEPGQKSNPRVRCAGETQSSLYLSGWQEGTGSGR

SEQ ID NO: 746 - protein, 78 aa, Homo sapiens
  variant (1)...(78): Xaa = Any amino acid
GTKRPQYPTELRSQARKVTPEFAVQGRHRALFICQDGRRGQGQGAEGXMSVLGAKAPRDLRTGGQVSKVKQLPVQIRA

SEQ ID NO: 747 - protein, 50 aa, Homo sapiens
  variant (1)...(50): Xaa = Any amino acid
PQSSLCRGDTELSLSVRMAGGDRVRALRVXCRCWGPRPREISGQVVRCLR

SEQ ID NO: 748 - protein, 56 aa, Homo sapiens
  variant (1)...(56): Xaa = Any amino acid
NSSPCRSGHSGKHPDPSAWHRPSDTEPLNXGTPTPHHILRAGAPQVDTRTLTPLPL

SEQ ID NO: 749 - protein, 118 aa, Homo sapiens
  variant (1)...(118): Xaa = Any amino acid
GVGVXLFRGSVSEGLCQAEGSGCFPLCPDLHGELFYLRHLTTCPEISRGLGPQHRHXTLSALTLSPPAILTDKESSVSPLHSELWGYFSGLAPQLCGILGPFGPSGCSSQMCVLDXGR

SEQ ID NO: 750 - protein, 60 aa, Homo sapiens
  variant (1)...(60): Xaa = Any amino acid
GARGSESWCPPGEPLPSVYDEVLGCXCSGALCLKVYARQRGQGVFHYALICTGSCFTLDT

SEQ ID NO: 751 - protein, 67 aa, Homo sapiens
  variant (1)...(67): Xaa = Any amino acid
AAPSVTLFPPSSEELQANKATLVCLISDFYPGAVTVAWXADSTPXKAGVETTTPXKQSNNKYPASSY

SEQ ID NO: 752 - protein, 67 aa, Homo sapiens
  variant (1)...(67): Xaa = Any amino acid
IAAGRVLVVALFXGCGGLHSRLXGGAICXPGHCHGSRVEVTYETHQCGLVGLKLLRGGREQSDRGGS

SEQ ID NO: 753 - protein, 97 aa, Homo sapiens; identical to SEQ ID NO: 725

SEQ ID NO: 754 - protein, 56 aa, Homo sapiens
KQHWWCLSHGLDRSPPRPPLSLHRLCDLLCVDSDTLSVSGPRKDGQDYLWGKQYWE

SEQ ID NO: 755 - protein, 139 aa, Homo sapiens
  variant (1)...(139): Xaa = Any amino acid
XPXXRSKVTRKRPCLPSMTLMEEMLREAFRCMTQGKTAKKSCSCSPHFVICFIFXSFESKMTTPRNSVNGTFPAEPMKXPIAMQSGPKPLFRRMSSLVGPTQSFFMRESKTLGAVQIMNGLFHIALGXLLMIPXGXYAP

SEQ ID NO: 756 - protein, 51 aa, Homo sapiens
  variant (1)...(51): Xaa = Any amino acid
EQNDNTQKFSKWDFPGRANERXYCYAIWSKTTLQEDVFTGGPHAKLLHEGI

SEQ ID NO: 757 - protein, 92 aa, Homo sapiens
  variant (1)...(92): Xaa = Any amino acid
GAXIPXGIIRXPPRAMWKSPFIIWTAPKVLDSLMKKLCVGPTSEDILLKSGFGPDCIAIXPFIGSAGKVPFTEFLGVVILLSKLXKIKQITK

SEQ ID NO: 758 - protein, 53 aa, Homo sapiens
  variant (1)...(53): Xaa = Any amino acid
PAGWMRGRGSKSWCPPGEPLTSVYDEVLGCPCSGALCLKVYARQRGXGVFTMP

SEQ ID NO: 759 - protein, 108 aa, Homo sapiens
  variant (1)...(108): Xaa = Any amino acid
VAFVGLPLLRRQAQVAAGRVLVVALFGGCGGLHSRLDGAAICLPGHCHGSRVEVTYETHQCGLVGLKLLXGGREQSDRGGSLGLTCGVDEGQGVKVLVSTWGAPDLSI

SEQ ID NO: 760 - protein, 78 aa, Homo sapiens
  variant (1)...(78): Xaa = Any amino acid
KHXXPSAWHRPSDTEPLNKGTPTPHHILRSGAPQVDTRTLTPCPSSTPQVSPRLPPRSLCSRPPXRSFKPTRPHWCVS

SEQ ID NO: 761 - protein, 124 aa, Homo sapiens
  variant (1)...(124): Xaa = Any amino acid
TFRHRAPEQGHPNTSSYTEVRGSPGGHQDFDPLPLIHPAGQPKAAPSVTLFPPSXEELQANKATLVCLISDFYPGAVTVAWKADSSPVKAGVETTTPSKQSNNKYAASSYLSLTPEQWKSHKSY

SEQ ID NO: 762 - protein, 62 aa, Homo sapiens
NGQVVGEKKVPGSLEKNVKRCSRPMRRIRQEIHRCARLLRSTCQQQLPSLSLGEQDSGVWDF

SEQ ID NO: 763 - protein, 59 aa, Homo sapiens
KSQTPESCSPKLKEGSCCWQVLLRSLAHLCISCLILLIGLEHLFTFFSREPGTFFSPTT

SEQ ID NO: 764 - protein, 87 aa, Homo sapiens
  variant (1)...(87): Xaa = Any amino acid
VSPKAAPSVTLFPPSSEELQANKATLVCLISDFYPGAVTVAWKADSSPVKAGVETTTPSKQXNNKYXASSYLSLTPEQWKXHISYXP

SEQ ID NO: 765 - protein, 55 aa, Homo sapiens
  variant (1)...(55): Xaa = Any amino acid
STLTINRXEAGDEADYYCQVWDRNNDHVVFGGGTKLAVLGQPQGCPLGHSVPALL

SEQ ID NO: 766 - protein, 121 aa, Homo sapiens
  variant (1)...(121): Xaa = Any amino acid
RXVAYVXLPLLRRQAQIAAGXVLVVXLFGGCGGLHSRLDGAAICLPGHCHGSRVEVTYETHQCGLVGLKLLRGGREQSDRGGSLGADLGRPVWSLRRRRHGHYYDPTLDSNSRPHRRLXPC

SEQ ID NO: 767 - protein, 60 aa, Homo sapiens
NSVMMVFKDSRKGVMSQNLPECPSIVRRKRTSLVDVHVLIPWRLGHQTMRFGNICYQDEP

SEQ ID NO: 768 - protein, 73 aa, Homo sapiens
  variant (1)...(73): Xaa = Any amino acid
ARSXWLSDPPRPLPHTRAPEHTFGWNSLRDQKAPVSHRAEEPGQKSNPRVRCAGETQSSLYLSGWQEGTGSGH

SEQ ID NO: 769 - protein, 74 aa, Homo sapiens
  variant (1)...(74): Xaa = Any amino acid
GTKRPQYPTELRSQARKVTPEFAVQERHRALFICQDGRRGQGQGTEGXMSVWGAKAPRDLRTXXHVSXVKXLPR

SEQ ID NO: 770 - protein, 50 aa, Homo sapiens
  variant (1)...(50): Xaa = Any amino acid
PQSSLCRRDTELSLSVRMAGGDRVRALRVXCRCGGPRPREISGXVXMCLX

SEQ ID NO: 771 - protein, 62 aa, Homo sapiens
  variant (1)...(62): Xaa = Any amino acid
QIKRALCLSCTANSGVTFLAWLLSSVGYWGLLVPQAVPAKCVFWSPCMGQGPGGIGEPXRPR

SEQ ID NO: 772 - protein, 59 aa, Homo sapiens
  variant (1)...(59): Xaa = Any amino acid
RELCVSPAQRTLGLLFWPGSSALWDTGAFWSLRLFQPNVCSGARVWGKGLGGSESHXDR

SEQ ID NO: 773 - protein, 102 aa, Homo sapiens
  variant (1)...(102): Xaa = Any amino acid
TGKXFYXRHMXXCPEISRGLGPPHRHXTLSALTLSPPAILTDKESSVSLLHSELWGYFSGLAPQLCGILGPFGPSGCSSQMCVLEPVYGARAWGDRRAXSTA

SEQ ID NO: 774 - protein, 102 aa, Homo sapiens
  variant (1)...(102): Xaa = Any amino acid
MDMRVPAQLLGLLLLWLPGAKCDIQMTQSPSTLSASVGDTVTISCRASQNIDRWLAWHQQKPGKAPNVLIYATSSLEEGVSLRFTGSGSGTQFNLTXTRSAA

SEQ ID NO: 775 - protein, 54 aa, Homo sapiens
  variant (1)...(54): Xaa = Any amino acid
CPNLCDFQFRRRGLIKIYWQWIWDTIQFNHXQVCSLTIXQLIIXNIILHXXXVL

SEQ ID NO: 776 - protein, 68 aa, Homo sapiens
DIRGFAWFLLMPGQPPIYILRGPTTYCNCISDRCRQGGRRLGHLDVTFGTWEPEQQEPQELSGDPHVH

SEQ ID NO: 777 - protein, 50 aa, Homo sapiens
  variant (1)...(50): Xaa = Any amino acid
QNXXXMQNNVXNNKLXNRQAADLXMVKLNCVPDPLPVNLNETPSSKLEVA

SEQ ID NO: 778 - protein, 138 aa, Homo sapiens
  variant (1)...(138): Xaa = Any amino acid
QYTHEFDGDEQFYVDLGRKETAWCLPVLRQFRFDPQFALTNIAVLKHNLNSLIKRSNSTAATNEVPEVTVFSKSPVTLGQPNILICLVDNIFPPVXNITWLSNGHSVTXXVSETSFLSKSDHXFFXIXYPTLLPSSEE

SEQ ID NO: 779 - protein, 60 aa, Homo sapiens
  variant (1)...(60): Xaa = Any amino acid
VPIAQPCDVXHRRKDVVHKTDEDVGLTQCHGRLGKHCDLRNLIGSSGRVGAFNQTVQVMF

SEQ ID NO: 780 - protein, 66 aa, Homo sapiens
PSVTGDLENTVTSGTSLVAAVELERLIRLFKLCFRTAMFVSANCGSNLNCLRTGKHQAVSFLPRST

SEQ ID NO: 781 - protein, 84 aa, Homo sapiens
  variant (1)...(84): Xaa = Any amino acid
SVASVGLPLLRRQAQIAAGRVLVVALFGGCGXLHSRLDGXAIXLPGHCHGSRVEVTYETHQCGLVGLXLLIXGREQSDRXGSLG

SEQ ID NO: 782 - protein, 84 aa, Homo sapiens
  variant (1)...(84): Xaa = Any amino acid
PKAAXSVTLFPPXYEEXQANKATLVCLISDFYPGAVTVAWKXDSXPVKAGVEXTTPSKQSNNKYAASSYLSLTPEQWKSHRSYR

SEQ ID NO: 783 - protein, 51 aa, Homo sapiens
  variant (1)...(51): Xaa = Any amino acid
DTFKWAQCQPTGLLTGTTSQMPFSAHTLQAEARGXHPSGDGXCXCVXVCSA

SEQ ID NO: 784 - protein, 59 aa, Homo sapiens
  variant (1)...(59): Xaa = Any amino acid
PXXVQMSETPSNGPSASQLGSSLAPRPRCPSLPTPCRLRPEEXTPPEMGXVXVCXYVLX

SEQ ID NO: 785 - protein, 59 aa, Homo sapiens
  variant (1)...(59): Xaa = Any amino acid
RRTYXHTXTXPISGGVXSSGLSLQGVGREGHLGRGASEEPSWLALGPFEGVSDIWTXXG

SEQ ID NO: 786 - protein, 58 aa, Homo sapiens
  variant (1)...(58): Xaa = Any amino acid
AEHXHTHXHXPSPEGXPPLASACRVWAEKGIWDVVPVRSPVGWHWAHLKVSQTFGPXX

SEQ ID NO: 787 - protein, 52 aa, Homo sapiens
  variant (1)...(52): Xaa = Any amino acid
PKEVRQLAEDFLKDYIHINIGALELXANHNILXXVDVCHDXXKDEKLIRLME

SEQ ID NO: 788 - protein, 55 aa, Homo sapiens
  variant (1)...(55): Xaa = Any amino acid
QHWWXXSHGXGRSPLRPPLSLHXLCXLLCVDSDTLSVSGPRKGGQDYLWGKQYWE

SEQ ID NO: 789 - protein, 95 aa, Homo sapiens
  variant (1)...(95): Xaa = Any amino acid
STGXXSAMXWAVLLFGLLSHCTXSVXSYVLTQTPSVSVAPGKAAKITCGGNNIGSNNVXWYYQKPGQAPVLIISFDNDRPSGISERFSGFNSGDM

SEQ ID NO: 790 - protein, 90 aa, Homo sapiens
VLTVINYRPHNMRPEDRMFHIRAVILRALSLAFLLSLRGAGAIKADHVSTYAAFVQTHRPTGEFMFEFDEDEMFYVDLDKKETVWHLEEF

SEQ ID NO: 791 - protein, 55 aa, Homo sapiens
VSEELGPSRRTMCQLMPRLYRRIDQQGSLCLNLMKMRCSMWIWTRRRPSGIWRSL

SEQ ID NO: 792 - protein, 56 aa, Homo sapiens
LACCSGPWSCPVLQHGVSEAPWRLLHGSSDSDTDGAELPTGFGWGHQTTFLGVLYV

SEQ ID NO: 793 - protein, 177 aa, Homo sapiens
  variant (1)...(177): Xaa = Any amino acid
LPAALAPGPVLFSSMVCLRLPGGSCMAVLTVTLMVLSSPLALAGDTRPRFLEYSTSECHFFNGTERVRFLDRYFYNQEEYVRFDSDVGEFRAVTELGRPDEEYWNSQKDFLEDRRAAVDTYCRHNYGVGESFTVQRRVHPKVTVYPSKTHPCSTTTSWSVLXVVSIQAALNXVVPEW

SEQ ID NO: 794 - protein, 56 aa, Homo sapiens
APHWLWLGTPDHVSWSTLRLSVISSMGRSGCGSWTDTSITKRSTCASTATWGSSGR

SEQ ID NO: 795 - protein, 70 aa, Homo sapiens [sequence omitted]

SEQ ID NO: 796 - protein, 53 aa, Homo sapiens
STPRNVVWCPQPKPVGSSAPSVSLSELPCRSLQGASDTPCWRTGQDQGPEQQA

SEQ ID NO: 797 - protein, 146 aa, Homo sapiens [sequence omitted]

SEQ ID NO: 798 - protein, 58 aa, Homo sapiens
HSDVEYSKKRGLVSPAKASGELSTISVTVRTAMQEPPGSLRHTMLENRTGPGARAAGK

SEQ ID NO: 799 - protein, 110 aa, Homo sapiens
ALNEDLRSWTAADMAAQITKRKWEAAHEAEQLRAYLDGTCVEWLRRYLENGKETLQRTDPPKTHMTHHPISDHEATLRCWALGFYPAEITLTWQRDGEDQTQDTELVETR

SEQ ID NO: 800 - protein, 110 aa, Homo sapiens
PGLHELRVLGLVLPIPLPGQCDLRRVEAQGPAPQGGLMVRDGVVGHMCLGGVRALQRLLPVLQVSAEPLHARAIQVGSQLLRLMGRLPLALGDLSRHVRRGPRAQVLVQG

SEQ ID NO: 801 - protein, 70 aa, Homo sapiens
SPQGRSPGPSTSGWPHGQRWGGGSYVSWGGPCAAASPSRSPGICGATPRTCHPGRLSTAPPHGPPPTCAW

SEQ ID NO: 802 - protein, 53 aa, Homo sapiens
  variant (1)...(53): Xaa = Any amino acid
PRGQXWADLGRPVWSLRRRRHGYYYXPXLDSNSXPSSPASDPFDGXGXDLWPX

SEQ ID NO: 803 - protein, 85 aa, Homo sapiens
  variant (1)...(85): Xaa = Any amino acid
XAXVGLPLLRRQAXIAAGRVLVVALFGGCGGLHSRLDGAAICLPGHCHGSRVEVTYETHQCGLVGLKLLRGGREQSDRGGXLGLT

SEQ ID NO: 804 - protein, 129 aa, Homo sapiens
  variant (1)...(129): Xaa = Any amino acid
RAKGPXLXHQKGQKPAMKXDYYCQVXDXNNNHVVFGGGTILAVLSQPKXAPSVTLFPPSSEELQANKATLVCLISDFYPGAVTVAWKADSSPVKAGVETTTPSKQSNNKYAASSYXSLTPEQWKSHXSX

SEQ ID NO: 805 - protein, 140 aa, Homo sapiens
  variant (1)...(140): Xaa = Any amino acid
TLTINRVEAGDEADYYCQVWDLNNDHVVFGGGTKLAVLGQPKAAPSVTLFPPSSEELQANKATLVCLISDFYPGAVTVAWKADSSPVKXGVETTTPXKQSNNKYAASSYXSLTPEQWKSHRXYRPARAXXGEFQHTGGRY

SEQ ID NO: 806 - protein, 71 aa, Homo sapiens
  variant (1)...(71): Xaa = Any amino acid
ETSYXHDXAKLGTELXSTSNAPQCAGIRXXPPGQVCXFCGTSTAQASGXDSCWPRTCCCFVXRVWWSPLXP

SEQ ID NO: 807 - protein, 120 aa, Homo sapiens
  variant (1)...(120): Xaa = Any amino acid
KPAMXMIXPSLVPSSXPLVTPPSVLEFAXXRPGRSVXSVGLPLLRRQAXIAAGRVLVVALFXGCGGLHSXLDGAAICLPGHCHGSRVEVTYETHQCGLVGLKLLRGGREQSDRGGSLGLT

SEQ ID NO: 808 - protein, 80 aa, Homo sapiens
  variant (1)...(80): Xaa = Any amino acid
TXXXNRGEAGDEADYYCQVWDLNNDHVVFGGGTKLXVLGQPKAAPSVTLFPPSSEELQANKATLVCLISDXYPXAVTVAW

SEQ ID NO: 809 - protein, 63 aa, Homo sapiens
  variant (1)...(63): Xaa = Any amino acid
KKIKIYXVYXLTSYTQRIXDFSLKIIIKPPISPVEKEILRFXCFFFQHNSVTYGWEKICREII

SEQ ID NO: 810 - protein, 123 aa, Homo sapiens
  variant (1)...(123): Xaa = Any amino acid
TLTINRVEAGDEADYYCQVWDRNNDHVVFGGGTKLAVLGQPKAAPSVTLFPPSSEELQANKATLVCLISDXYPGAVTVAWKADSSPVKAGVETTTPSKQSNNKYAASSYLSLTPEQWKSHRSY

SEQ ID NO: 811 - protein, 50 aa, Homo sapiens
  variant (1)...(50): Xaa = Any amino acid
LLAAYLLLLCLEGVVVSTPALTGLLSAFQATVTAPGXKSLMRHTSVALLA

SEQ ID NO: 812 - protein, 85 aa, Homo sapiens
  variant (1)...(85): Xaa = Any amino acid
VASVGLPLLRRQAQIAAGRVLVVALFGGCGGLHSRLDGAAICLPGHCHGSRVXVTYETHQCGLVGLKLLRGGREQSDRGGSLGLT

SEQ ID NO: 813 - protein, 71 aa, Homo sapiens
DIRGFAWFLLMPGQPPIYILRGPTTYCNCISDRCRQGGRRLGHLDVTFGTWEPEQQEPQELSGDPHVHAVS

SEQ ID NO: 814 - protein, 124 aa, Homo sapiens
SGHSMDMRVPAQLLGLLLLWLPGAKCDIQMTQSPSTLSASVGDTVTISCRASQNIDRWLAWHQQKPGKAPNVLIYATSSLEEGVSLRFTGSGSGTQFNLTITSLQPDDSATYYCQHYSASLRSF

SEQ ID NO: 815 - protein, 114 aa, Homo sapiens
  variant (1)...(114): Xaa = Any amino acid
TLTINRVEAGDEADYYCQVWDRNNDHVVFGGGTKLAVLGQPKAAPSVTLFPPSSEELQANKATLVCLISDFYPGAVTVAWKXDSSPVKAGVETTTPSKQSNNKYRGQQLSEPDA

SEQ ID NO: 816 - protein, 70 aa, Homo sapiens
  variant (1)...(70): Xaa = Any amino acid
LLPAVLVVALFGGCGGLHSRLDGAAIXLPGHCHGSRVEVTYETHQCGLVGLKLLRGGREQSDRGGSLGLT

SEQ ID NO: 817 - protein, 61 aa, Homo sapiens
TCISRFLGQLFIISLKSHDINSGPHTWGLKKSGTYNRNHIMSLISKPVSCLWTVCVRHAYL

SEQ ID NO: 818 - protein, 65 aa, Homo sapiens
  variant (1)...(65): Xaa = Any amino acid
TLTINRVEAGDGADYYCQVWDRNNDHVVFGGGTKLAVLSQPKAAPSXTLFPPXSXELXANKXTLV

SEQ ID NO: 819 - protein, 61 aa, Homo sapiens
  variant (1)...(61): Xaa = Any amino acid
TPVXPCWLXAXQXRAGTEXPRGQPWADLGRPVWSLRRRRHGHYYDPTLDNNSRPHRRLRPC

SEQ ID NO: 820 - protein, 141 aa, Homo sapiens
  variant (1)...(141): Xaa = Any amino acid
EPXNPSEKNSPSTQYCYSIQSLFLGILSVMLIFAFFQELVIAGIVENEWKXXCSXPKSNIVLLSXEEKKEQTIEIKEEVVGLTETSSQPKNEEDIEIIPIQEEEEEETETNFXEPPQDQESSPIENDSSPXVISSXFXXLF

SEQ ID NO: 821 - protein, 101 aa, Homo sapiens
  variant (1)...(101): Xaa = Any amino acid
SWGGSXKFVSVSSSSSSWIGIISMSSSFFGWEDVSVSPTTSSFISIVCSFFSSXDRRTMLDLGXEHXLFHSFSTMPAITSSWKKAKISITDKMPKNRDCML

SEQ ID NO: 822 - protein, 66 aa, Homo sapiens
DHLKSCYQDSHEDPTKMKRFLFLLLTISLLVMVQIQTGLSGQNDTSQTSSPSASSSMSGGIFLFFV

SEQ ID NO: 823 - protein, 75 aa, Homo sapiens
TKRSLQTALRSPKKLLPRQPRRSYQNEALPLPPTHHQPPGYGTDTNWTLRTKRHQPNQQPLSIQQHERRHFPFLR

SEQ ID NO: 824 - protein, 59 aa, Homo sapiens
TKKRKMPPLMLLDAEGLLVWLVSFCPESPVCICTITRRLMVSRRKRKRFILVGSSWLSW

SEQ ID NO: 825 - protein, 59 aa, Homo sapiens
  variant (1)...(59): Xaa = Any amino acid
PCLRSXXTXKRPCLPXMTLMEEMLREAFXCMTQGKTAKNLVLALLILLFVLFLGVLRAK

SEQ ID NO: 826 - protein, 63 aa, Homo sapiens
  variant (1)...(63): Xaa = Any amino acid
SGCCHFALKTPKNKTNNKMRRARTRFLAVLPCVMHXNASLSISSMSVIXGRHGLXRVXLDLRQ

SEQ ID NO: 827 - protein, 85 aa, Homo sapiens
  variant (1)...(85): Xaa = Any amino acid
VASVGLPLLRRQAQIAAGRVLVVALFGGCGGLHSRLDGAAICLXGHCHXXRVEVTYETHQCXLVGLKLXXGGREXSDRGGSLGLT

SEQ ID NO: 828 - protein, 85 aa, Homo sapiens
  variant (1)...(85): Xaa = Any amino acid
GQPKAAPSVTXFPPSXXELQANKXTLVCLISDFYPXXVTVAXKADSSPVKAGVETTTPSKQSNNKYAASSYLSLTPEQWKSHRSY

SEQ ID NO: 829 - protein, 61 aa, Homo sapiens
ALDRKSLDCPEEVVSRNMDVKGAPAEVLGGNEGHDIGREDGGGDCSDASTDLGDQDAAAIT

SEQ ID NO: 830 - protein, 103 aa, Homo sapiens
VMAAASWSPRSVDASLQSPPPSSRPMSCPSFPPRTSAGAPLTSIFLLTTSSGQSRLFLSSAHCPILSIPQAISPFLGICYGSTPLPGTKTSHMIMTAPHCSGL

SEQ ID NO: 831 - protein, 83 aa, Homo sapiens
  variant (1)...(83): Xaa = Any amino acid
SVXLPLLTRXAQIAAGRVLVVALXGGCGGLHPRLDGAAICLPGHCHGSRVEVTYETHQCGLVGLKLLXGGREQSDRGGSLGLT

SEQ ID NO: 832 - protein, 119 aa, Homo sapiens
  variant (1)...(119): Xaa = Any amino acid
TINRVEAGDEADYYCQVWDRNNDHVXFGGGTKLAVLGQPKAAPSVTLFPPSXEELQANKATLVCLISDFYPGAVTVAWKADSSPVKAGVETTTPSXQSNNKYAASSYLSXTREQWKXHR

SEQ ID NO: 833 - protein, 85 aa, Homo sapiens
  variant (1)...(85): Xaa = Any amino acid
VASVGLPLLRRQAQIAAGRVLVVALFGGCGGLHSRLDGAAICLPGHCHGSRVEVTYETHQCGLVGLKLLXGGREQSDRGGXLGLT

SEQ ID NO: 834 - protein, 121 aa, Homo sapiens
  variant (1)...(121): Xaa = Any amino acid
PSTGSXPXMRXTXNCXVWDRNNDHVVFGGGTKLAVLGQPKXAPSVTLFPPSXEELQANKATLVCLISDFYPGAVTVAWKADSSPVKAGVETTTPSKQSNNKYAASSYLSLTPEQWKSHRSY

SEQ ID NO: 835 - protein, 127 aa, Homo sapiens
  variant (1)...(127): Xaa = Any amino acid
VASVGLPLLRRQAQIAAGRVLVVALFGGCGGLHSRLDGAAICLPGHCHGSRVEVTYETHQCGLVGLKLLRGGREQSDRGGSLGLTXDGQFGPSAEDDMVIITIPHLTVIVGLIAGFDPVDGQGGPRP

SEQ ID NO: 836 - protein, 127 aa, Homo sapiens
  variant (1)...(127): Xaa = Any amino acid
RPRSTLTINRVEAGDEADYYCQVWDRNNDHVVFGGGTKLAVXGQPKAAPSVTLFPPSSEELQANKATLVCLISDFYPGAVTVAWKADSSPVKAGVETTTPSKQSNNKYAASSYLSLTPEQWKSHRSY

SEQ ID NO: 837 - protein, 85 aa, Homo sapiens; identical to SEQ ID NO: 682

SEQ ID NO: 838 - protein, 123 aa, Homo sapiens; identical to SEQ ID NO: 683

SEQ ID NO: 839 - protein, 85 aa, Homo sapiens
  variant (1)...(85): Xaa = Any amino acid
VASVGLPLLGRQAQVAAGRVLVVALFGGFGGLHSRLDGAAICLPGHCHSSRVEVTYETHQXGLXGLXLLXGGREXXDXGGXLGLT

SEQ ID NO: 840 - protein, 54 aa, Homo sapiens
LLPGSCDSGLEGRWQPRQGGSGDHQTLQTEQQQVRGQQLPEPDARAVEVPQKLQ

SEQ ID NO: 841 - protein, 110 aa, Homo sapiens
  variant (1)...(110): Xaa = Any amino acid
DYYCQVXDRNNDHVVFGGGTKLAVLGQPKXAPXVXXFPPSXEEXQAXKAXLVCLISDFYPGAVTVAWKADGSPVKAGVETTKPSKQSNNKYAASSYLSLTPEQWKSHRSY

SEQ ID NO: 842 - protein, 85 aa, Homo sapiens; identical to SEQ ID NO: 682

SEQ ID NO: 843 - protein, 125 aa, Homo sapiens
  variant (1)...(125): Xaa = Any amino acid
RSTLTINRVEADDEXDYYCQVWDRNNDHVVFGGGTKLAVLGQPKAAPSVTLFPPSSEELQANKATLVCLISDFYPGAVTVAWKADSSPVKAGVETTTPSKQSNNKYAASSYLSLTPEQWKSHRSY

SEQ ID NO: 844 - protein, 94 aa, Homo sapiens
  variant (1)...(94): Xaa = Any amino acid
XLACCSGPWSCPVLQHGVSEAPWRLLHGSSDSDTDGAELPTCFGLGTPDHVSWSTLRLSVISSMGRSGCGSWTDTSITKRSTCASTATWGSSGR

SEQ ID NO: 845 - protein, 57 aa, Homo sapiens
VLPAALAPGPVLFSSMVCLRLPGGSCMAVLTVTLMVLSSPLALGWGHQTTFLGVLYV

SEQ ID NO: 846 - protein, 93 aa, Homo sapiens
  variant (1)...(93): Xaa = Any amino acid
APHLLWAGDTRPRFLEYSTSECHFFNGTERVRFLDRYFYNQEEYVRFDSDVGEFRAVXELGRADEEYWNSXXGLPGXQAXRGGHLLXTQLRGW

SEQ ID NO: 847 - protein, 121 aa, Homo sapiens
  variant (1)...(121): Xaa = Any amino acid
VSTAXRLXSRKSXXAVPVLLISPPQLXHRPELPHVAVEAHVLLLVIEVSVQEPHPLRPIEEMTLRRRVLQETWSGVPSPKQVGSSAPSVSLSELPCRSLQGASDTPCWRTGQDQGPEQQAR

SEQ ID NO: 848 - protein, 54 aa, Homo sapiens
  variant (1)...(54): Xaa = Any amino acid
QPRSCXCSRCPPXPACXPGSPXWLFQYSSSARPSXVTARNSPTSLSKRTYSSWL

SEQ ID NO: 849 - protein, 59 aa, Homo sapiens
HSDVEYSKKRGLVSPAQSKWGAQHHQCHCQNCHAGASREPQTHHAGEQDRTRGQSSRQD

SEQ ID NO: 850 - protein, 67 aa, Homo sapiens
  variant (1)...(67): Xaa = Any amino acid
NPVVVXAVGVHRXPPXFQEVLXGCSSTPHQPAPAXSPPGTPPRRCRSARTPLGYRSICPGTAPAPSH

SEQ ID NO: 851 - protein, 55 aa, Homo sapiens
  variant (1)...(55): Xaa = Any amino acid
STPRNVVWCPQPKASGELSTISVTVRTAMQEPPGSLRHTMLENRTGPGARAAGKX

SEQ ID NO: 852 - protein, 146 aa, Homo sapiens
  variant (1)...(146): Xaa = Any amino acid
KMESLNFIRAHTPYINIYNCEPPNPSEKNSPSTQYXYSIQSLFLGILSVMLIFAFFQELVIXGIVDNEWKRTCSRPKSNIVLLSAEEKKEXTIEIKEEVVGLTETSSQPKNEEXIEIIPXQEEEEERNXRRTFQNXPRSGILTNRK

SEQ ID NO: 853 - protein, 137 aa, Homo sapiens
  variant (1)...(137): Xaa = Any amino acid
CHFLLVRIPDLXRFWKVRLXFLSSSSSXIGIISMXSSFFGWEDVSVSPTTSSFISIXCSFFSSADRRTMLDLGLEHVLFHSLSTMPXITSSWKKAKISITDKMPKNRDCMLXQYWVDGEFFSEGLGGSQLYMLIYGV

SEQ ID NO: 854 - protein, 59 aa, Homo sapiens
  variant (1)...(59): Xaa = Any amino acid
AATASIAGAPTQYPPGRGGPPPPMGRRTPPPGMMGPPPXFXTSYGCPQWGIPXGRXLQW

SEQ ID NO: 855 - protein, 59 aa, Homo sapiens
  variant (1)...(59): Xaa = Any amino acid
PLEXSSXGDPPLGAPIGGXKXGRWAHHAWRGCSSAHRWGRTPTARWVLGWSPGNTGCGS

SEQ ID NO: 856 - protein, 50 aa, Homo sapiens
KLLEGTCYNGRLIWKVTDYKMKKREAVDGHTVSIFSQSFYTNPLWLPALC

SEQ ID NO: 857 - protein, 61 aa, Homo sapiens
RRERRWMGTQCPSSASPSTPTRCGYRLCARAYLNGDGSGRGSHLSLYFVVMRGEFDSLLQW

SEQ ID NO: 858 - protein, 85 aa, Homo sapiens; identical to SEQ ID NO: 682

SEQ ID NO: 859 - protein, 123 aa, Homo sapiens; identical to SEQ ID NO: 683

SEQ ID NO: 860 - protein, 123 aa, Homo sapiens
GHSMDMRVPAQLLGLLLLWLPGAKCDIQMTQSPSTLSASAGNTVTISCRASQNIDRWLAWHQQKPGKAPNVLIYATSSLEEGVSLRFTGSGSGTQFNLTITSLQPDDSATYYCQHYSASLRSF

SEQ ID NO: 861 - protein, 71 aa, Homo sapiens
DIRGFAWFLLMPGQPPIYILRGPTTYCNCISGRCRQGGRRLGHLDVTFGTWEPEQQEPQELSGDPHVHAVS

SEQ ID NO: 862 - protein, 57 aa, Homo sapiens
GSSTGGASAMAWTVLLLGLLSHCTDSVTSYVLTQTPSVSVAPGKDGQDYLWGKQYWE

SEQ ID NO: 863 - protein, 65 aa, Homo sapiens
LRHPQCQWPQEKTAKITCGGNNIGSNNVHWYYQKPGQAPVLIISFDNDRPSGISERFSGFNSGDM

SEQ ID NO: 864 - protein, 72 aa, Homo sapiens
KQHWWCLSHGLDRSPPRPPLSLHRLCDLLCVDSDTLSVSGPRKRRPRLPVGETILGVTMYTGITRSQARPLS

SEQ ID NO: 865 - protein, 72 aa, Homo sapiens
DRGLAWLLVIPVYIVTPNIVSPTGNLGRLFLGPLTLRVSESTHRRSQSLCSERGGRGGERSRPWLRHHQCCF

SEQ ID NO: 866 - protein, 69 aa, Homo sapiens
SSTGGASAMAWTVLLLGLLSHCTGDPPRVSPTCPAQGFWVQRVLNSELRRALPVVGRMLMTLVQGGKVG

SEQ ID NO: 867 - protein, 59 aa, Homo sapiens
AALVVPQPWPGPFSSSASSLTAQVIPPGSHQPAQPKASGSSVSLILSSGGPFLWWAGCS

SEQ ID NO: 868 - protein, 115 aa, Homo sapiens
  variant (1)...(115): Xaa = Any amino acid
VASVGLPLLRRQAQIAAGRVLVVALFGGCGGLHSRLDGAAICLPGHCHGSRVEVTYETHQRGLVGLKLLXXRRETEXPRGXLGLTRTAVWSSAKHMALLRSTLDSNSXLIXGFTL

SEQ ID NO: 869 - protein, 97 aa, Homo sapiens
  variant (1)...(97): Xaa = Any amino acid
CHVFGGGPNCRPSQPKXAPRXFCFPPXXEEFQANKATLVCLISDFYPGAVTVAWKADSSPVKAGVETTTPSKQSNNKYAASSYLSLTPEQWKSHRSY

SEQ ID NO: 870 - protein, 75 aa, Homo sapiens
  variant (1)...(75): Xaa = Any amino acid
XGFALRCRGRVHPDHHRVKPXMSXLLLSSVDRNNAMCLAEDQTAVLVSPRXPLGXSVSRLXXRSFKPTRPRWCVS

SEQ ID NO: 871 - protein, 67 aa, Homo sapiens
  variant (1)...(67): Xaa = Any amino acid
PRMMKTVPTTMPTRPTDNPRAQTTVSVSSDIGAGISGSQCFRRGLSSPQCSTLQSXLSSXEGRRVRX

SEQ ID NO: 872 - protein, 66 aa, Homo sapiens
  variant (1)...(66): Xaa = Any amino acid
XLTLLPSXEEXYDCKVEHWGLDKPLLKHWEPEIPAPMSELTETVVCALGLSVGLVGIVVGTVFIIR

SEQ ID NO: 873 - protein, 63 aa, Homo sapiens
  variant (1)...(63): Xaa = Any amino acid
GLCLVSVDARPTTDLYSERPRQLIVTGISDRCRQGGRRLGHLDVTFGTWEPEQQEPXELSGDP

SEQ ID NO: 874 - protein, 77 aa, Homo sapiens
VVGASQNIDRWLAWHQQKPGKAPNVLIYATSSLEEGVSLRFTGSGSGTQFNLTITSLQPDDSATYYCQHYSASLRSF

SEQ ID NO: 875 - protein, 97 aa, Homo sapiens
  variant (1)...(97): Xaa = Any amino acid
GSSTGGASAMAWTVLLLGLLSHCTDSVTSYVLTQTPSVSVAPGKTAKITCGGNNIGSHNVHWYYQKPGQAPVLIISFDNDRXSXISERFSGFNSGDM

SEQ ID NO: 876 - protein, 76 aa, Homo sapiens
KQHWWCLSHGLDRSPPRPPLSLHRFCDFLCVDSDTLSVSGPRKDGQDYLWGKQYWESQCTLVLPEARPGPCPNHLF

SEQ ID NO: 877 - protein, 94 aa, Homo sapiens
  variant (1)...(94): Xaa = Any amino acid
NEKALLLCNLVQNHSSGRMSSLVGPTQSFFMRESKTLGAVQIMNGLFHIALGGLLMIPAGIYAPICVTVWYPLWGGIMYIISGSLLXQRKKLQE

SEQ ID NO: 878 - protein, 60 aa, Homo sapiens
  variant (1)...(60): Xaa = Any amino acid
DFGGCPDYEWALPHCPGGSSDDPSRDLCTHLCDCVVPSLGRHYVYYFRITPAXTEKTPGS

SEQ ID NO: 879 - protein, 60 aa, Homo sapiens
IPAGIIRRPPRAMWKSPFIIWTAPKVLDSLMKKLCVGPTSEDILPEEWFWTRLHSNRAFS

SEQ ID NO: 880 - protein, 62 aa, Homo sapiens
SGNNIHNASPERVPHSHTDGCIDPCWDHQKTPQGNVEEPIHNLDSPQSLRFPHEEALRGAHQ

SEQ ID NO: 881 - protein, 71 aa, Homo sapiens [sequence omitted]

SEQ ID NO: 882 - protein, 73 aa, Homo sapiens
TKISLNIEVWNYFFDISANSLKLKDPQITVNSLKQGCTMASHAKDGTRRNTTAVNCEDNFHFFPRREQFTGQR

SEQ ID NO: 883 - protein, 118 aa, Homo sapiens
MRVPAQLLGLLLLWLPGAKCDIQMTQSPSTLSASVGDTVTISCRASQNIDRWLAWHQQKPGKAPNVLIYATSSLEEGVSLRFTGSGSGTQFNLTITSLQPDDSATYYCQHYSASLRSF

SEQ ID NO: 884 - protein, 66 aa, Homo sapiens
DIRGFAWFLLMPGQPPIYILRGPTTYCNCISDRCRQGGRRLGHLDVTFGTWEPEQQEPQELSGDPH

SEQ ID NO: 885 - protein, 109 aa, Homo sapiens
TLTINRIEAGDEADYYCQVWDLNNDHVVFGGGTKLAVLGQPKAAPSVTLFPPSSEELQANKATLVCLISDFYPGAVTVAWKADSSPVKAGVETTTPSKQSNNKYAAAAI

SEQ ID NO: 886 - protein, 85 aa, Homo sapiens
CSFCGTSTAQASGSDSCCRVLVVALFGGCGGLHSRLDGAAICLPGHCHGSRVEVTYETHQCGLVGLKLLRGGREQSDRGGSLGLT

SEQ ID NO: 887 - protein, 51 aa, Homo sapiens
VASVGLPLLRRQAQIAAAAYLLLLCLEGVVVSTPALTGLLSAFQATVTAPG

SEQ ID NO: 888 - protein, 118 aa, Homo sapiens
  variant (1)...(118): Xaa = Any amino acid
TLTINRVEAGDEADYYCQVWDLNNDHVVFGGGTKLAVLGQPKAAPSVTLFPPSSEELQANKATLVCLISDFYPGAXTVAWKADSSPVKAGVETTTPXKQSNNKYAASSYLSLTPEQWK

SEQ ID NO: 889 - protein, 80 aa, Homo sapiens
  variant (1)...(80): Xaa = Any amino acid
LPLLRRQAQIAAGRVLVVALFXGCGGLHSRLDGAAICLPGHCXGSRVEVTYETHQCGLVGLKLLRGGREQSDRGGSLGLT

SEQ ID NO: 890 - protein, 62 aa, Homo sapiens
LSLGLRKQHWWCLSHGLDRSPPRPPLSLHRLCDLLCVDSDTLSVSGPRKDGQDYLWGKQYWE

SEQ ID NO: 891 - protein, 97 aa, Homo sapiens; identical to SEQ ID NO: 725

SEQ ID NO: 892 - protein, 52 aa, Homo sapiens
SWPSFLGPLTLRVSESTHRRSQSLCSERGGRGGERSRPWLRHHQCCFLRPRL

SEQ ID NO: 893 - protein, 68 aa, Homo sapiens
  variant (1)...(68): Xaa = Any amino acid
TLTINRVEAGDEADYYCQVWDRNNDHVVFGGGTKLAVLGQPKAAPSXTLFPPSSEELQANKATLVCLI

SEQ ID NO: 894 - protein, 62 aa, Homo sapiens
  variant (1)...(62): Xaa = Any amino acid
DTPVWPCWLEAPQRRAGTEXPRGQPWADLGRPVWSLRRRRHGHYYDPTLDSNSRPHRRLRPC

SEQ ID NO: 895 - protein, 85 aa, Homo sapiens; identical to SEQ ID NO: 682

SEQ ID NO: 896 - protein, 123 aa, Homo sapiens
TLTINRVEAGDEADYYCQVWDHNNDHVVFGGGTKLAVLGQPKAAPSVTLFPPSSEELQANKATLVCLISDFYPGAVTVAWKADSSPVKAGVETTTPSKQSNNKYAASSYLSLTPEQWKSHRSY

SEQ ID NO: 897 - protein, 115 aa, Homo sapiens
PAQLLGLLLLWLPGAKCDIQMTQSPSTLSASVGDTVTISCRASQNIDRWLAWHQQKPGKAPNVLIYATSSLEEGVSLRFTGSGSGTQFNLTITSLQPDDSATYYCQHYSASLRSF

SEQ ID NO: 898 - protein, 63 aa, Homo sapiens
DIRGFARFLLMPGQPPIYILRGPTTYCNCISDRCRQGGRRLGHLDVTFGTWEPEQQEPQELSG

SEQ ID NO: 899 - protein, 85 aa, Homo sapiens; identical to SEQ ID NO: 682

SEQ ID NO: 900 - protein, 53 aa, Homo sapiens
DGQFGPSAEDDMVIITIPHLTVIVGLIAGFDPVDGQGGHVPRIEARPGPCPNH

SEQ ID NO: 901 - protein, 139 aa, Homo sapiens
MIRTGAWPGFNSGDMATLTINRVEAGDEADYYCQVWDRNNDHVVFGGGTKLAVLGQPKAAPSVTLFPPSSEELQANKATLVCLISDFYPGAVTVAWKADSSPVKAGVETTTPSKQSNNKYAASSYLSLTPEQWKSHRSY

SEQ ID NO: 902 - protein, 85 aa, Homo sapiens
  variant (1)...(85): Xaa = Any amino acid
VASVXLPLLRRQAQIAAGRVLVVALFGGCGGLHSRLDGAAICLPGHCHGSRVEVTYETHXXGLXGLKLXRGGREQSDRGGSLGLT

SEQ ID NO: 903 - protein, 107 aa, Homo sapiens
  variant (1)...(107): Xaa = Any amino acid
VKCGIXNNDXVXXGXGTKLAVLGQPKAAPSVTLFPPSSXELQAXKAXXVCLISDFYPGAVTVAWKADSSPVKAGVETTTPSKQSNNKYAASSYLSLTPEQWKXHRSY

SEQ ID NO: 904 - protein, 55 aa, Homo sapiens
  variant (1)...(55): Xaa = Any amino acid
VASXGLPLLRRQAQIAAGRVLVXALFGGCGXLHSXLDGAXICLPGHCHXSRXEVT

SEQ ID NO: 905 - protein, 55 aa, Homo sapiens
  variant (1)...(55): Xaa = Any amino acid
SDFXPGXVTVAWKADXSPVKXGVEXTTPSKQSXNKYAASSYLSLTPEQWKSXRSY

SEQ ID NO: 906 - protein, 101 aa, Homo sapiens
  variant (1)...(101): Xaa = Any amino acid
VASVXLPLLRRQAQIAAGRVLVVALFGGCGGLHSRLDGAAICLPXHCHGSRVEVTYETHQCGLVGLKLLXGXRXQSDRXGXLGLTXDGQXGPSAEXDMVII

SEQ ID NO: 907 - protein, 101 aa, Homo sapiens
  variant (1)...(101): Xaa = Any amino acid
NNDHVXFGGGTXLAVXGQPKXAXSVTLXPXSXEELQANKATLVCLISDFYPGAVTVXWKADSSPVKAGVETTTPSKQSNNKYAASSYLSLTPEQWKXHRSY

SEQ ID NO: 908 - protein, 57 aa, Homo sapiens
  variant (1)...(57): Xaa = Any amino acid
PRGQPWADLNLGLDPGSGSQLCDSRASAPRALGPSKVSXEVPPSDPLFPIPQEMEPT

SEQ ID NO: 909 - protein, 189 aa, Homo sapiens
  variant (1)...(189): Xaa = Any amino acid
VASVGLPLLRRQAQIAAGRVLVVALFGGCGGLHSRLDGAAICLPGHCHGSRVEVTYETHQCGLVGLKLLRGGREQSDRGGSLGLTSIWVWILALGPSSVIPEHQPRGHWVLLKSPXRCLPQTPCSQFPRRWNPRNPRVNLFRQEPRLRGPEQNKAXRPSLRLSDTQRDKQRERDRQTDXQTRLSRSFYL

SEQ ID NO: 910 - protein, 113 aa, Homo sapiens
  variant (1)...(113): Xaa = Any amino acid
ASSVXLSVCLSLSVCLFVCLTGADWVXKPCSVLAPSVWVLVGTGLPLGYVGSISWGIGNKGSEGGTXWETLEGPSALGADARESQSWDPEPGSRPRLRSAQGCPLGHSVPALL

SEQ ID NO: 911 - protein, 50 aa, Homo sapiens
  variant (1)...(50): Xaa = Any amino acid
QAQTGSXSLVLFWPPQSGFLSEQVYPWVTWVPSPGELGTRGLREAPXGRL

SEQ ID NO: 912 - protein, 85 aa, Homo sapiens
GQPKAAPSVTLFPPSSEELQANKATLVCLISDFYPGAVTVAWKADSSPVKAGVETTTPSKQSNNKYAASSYLSLTPEQWKSHRSY

SEQ ID NO: 913 - protein, 85 aa, Homo sapiens
  variant (1)...(85): Xaa = Any amino acid
VASVXLPLLRRQAQIAAGRVLVVALFGGCGGLHSRLDGAAICLPGHCHGSRVEVTYETHQCGLVGLKLLRGGREQSDRGGSLGLT

SEQ ID NO: 914 - protein, 111 aa, Homo sapiens
  variant (1)...(111): Xaa = Any amino acid
ADYYCXVWDXNNDHVVFGGGTKLAVLGQPKAAPSVTLFPPSSEELQANKATLVCLISDFYPGAVTVAWKADSSPVKAGVETTTPSKQSNNKYAASSYLSLTPEQWKXHRSY

SEQ ID NO: 915 - protein, 75 aa, Homo sapiens
  variant (1)...(75): Xaa = Any amino acid
VSPXLPPXXLMXXPSSEELQANKATLVCLIXDFYPGAVTVAWKAXSXPVKAXVXTXTXSKQSNNKYAXXSYLSPD

SEQ ID NO: 916 - protein, 54 aa, Homo sapiens
  variant (1)...(54): Xaa = Any amino acid
TLTINRVEAGDEADYYCQVWDRNNDHVVFGGXTKLAXLGQPXXAPXXTHXXALL

SEQ ID NO: 917 - protein, 109 aa, Homo sapiens
  variant (1)...(109): Xaa = Any amino acid
VRTQIAXXRVLVVALFGXCXGXHXRLDGXAXCLPGHCHGSRVEVXYETHQCGLVGLKLLRGGXXHEXXRGQXWADLXRPVWXXRRRRHGHYYDPTLDSNSRPHRRLRPC

SEQ ID NO: 918 - protein, 85 aa, Homo sapiens; identical to SEQ ID NO: 682

SEQ ID NO: 919 - protein, 52 aa, Homo sapiens
  variant (1)...(52): Xaa = Any amino acid
TINRXEAGDEXXYYCQVWDRNNDHXVFDGGTKTGRPRSAQGCPLGHSVPALL

SEQ ID NO: 920 - protein, 121 aa, Homo sapiens
  variant (1)...(121): Xaa = Any amino acid
PSTGXKPAMXPXITVKCGIVIMTMXSSTEGPKLAVLGQPKAAPSVTLFPPSSEELQANKATLVCLISDFYPGAVTVAWKADSSPVKAGVETTTPSKQSNNKYAASSYLSLTPEQWKSHRSY

SEQ ID NO: 921 - protein, 109 aa, Homo sapiens
  variant (1)...(109): Xaa = Any amino acid
VASVXLPLLRRXAQIAAGRVLVVALFGGCGGLHSRLDGAAICLPGHCHGSRVEVTYETHQCGLVGLKLLRGGREXSDRGGXLXLTXDGQFGPSAEDDMVIITIPHLTVI

SEQ ID NO: 922 - protein, 109 aa, Homo sapiens
  variant (1)...(109): Xaa = Any amino acid
YYCQVWDRNNDHVVFGGGTKLAVXGQXKXAPSVTXFPPSSEELQANKATLVCLISDFYPGAVTVAWKADSSPVKAGVETTTPSKQSNNKYAASSYLSXTPEQWKXHRSY

SEQ ID NO: 923 - protein, 83 aa, Homo sapiens
  variant (1)...(83): Xaa = Any amino acid
SVGLPLLRRXAXIAAGRVLVVAXXGGCGGXHSRLDGAAICLPGHCHGSRVEVTYETHXCGLVGLKLLXGGREQSDRGGSLGLT

SEQ ID NO: 924 - protein, 122 aa, Homo sapiens
  variant (1)...(122): Xaa = Any amino acid
ATLTINRVEAGDEADYYCQVWDRNNDHVVFGGGTKLAVLGQPKAAPSVTLFPPSXEELQANKATXVCLISDFYPGAVTVAWKADSSPVKAGVXTTTPSXXSNNKYAASSYXSXTPEQWKSHR

SEQ ID NO: 925 - protein, 84 aa, Homo sapiens
  variant (1)...(84): Xaa = Any amino acid
TLTINRVEAGDEADYYCQVWDRNNDHVXFXGGTKLAVLGQPKAAPSVTLFPPSSEELQANKATLVCLISDFYPGAVTVAWKADS

SEQ ID NO: 926 - protein, 121 aa, Homo sapiens
  variant (1)...(121): Xaa = Any amino acid
GHSMDMRVPAQLLGLLLLWLPGAKCDIQMTQSPSTLSASVGDTVTISXRASXNIDRWLAWHQQKPGKAPNVLIYATSSLEEGVSLRFTGSGSGTQFNLTITSLQPDDSATYYCQHYXASLX

SEQ ID NO: 927 - protein, 71 aa, Homo sapiens
  variant (1)...(71): Xaa = Any amino acid
DIRGFAWFLLMPGQPPIYIXRGPXTYCNCISDRCRQGGRRLGHLDVTFGTWEPEQQEPQELSGDPHVHAVS

SEQ ID NO: 928 - protein, 150 aa, Homo sapiens
KMESLNFIRAHTPYINIYNCEPANPSEKNSPSTQYCYSIQSLFLGILSVMLIFAFFQELVIAGIVENEWKRTCSRPKSNIVLLSAEEKKEQTIEIKEEVVGLTETSSQPKNEEDIEIIPIQEEEEEETETNFPEPPQDQESSPIENDSSP

SEQ ID NO: 929 - protein, 53 aa, Homo sapiens [sequence omitted]

SEQ ID NO: 930 - protein, 101 aa, Homo sapiens
SWGGSGKFVSVSSSSSSWIGIISMSSSFFGWEDVSVSPTTSSFISIVCSFFSSADRRTMLDLGLEHVLFHSFSTMPAITSSWKKAKISITDKMPKNRDCML

SEQ ID NO: 931 - protein, 123 aa, Homo sapiens
TLTINRVEAGDEADYYCQVWDRNYDHVVFGGGTKLAVLGQPKAAPSVTLFPPSSEELQANKATLVCLISDFYPGAVTVAWKADSSPVKAGVETTTPSKQSNNKYAASSYLSLTPEQWKSHRSY

SEQ ID NO: 932 - protein, 85 aa, Homo sapiens; identical to SEQ ID NO: 682

SEQ ID NO: 933 - protein, 150 aa, Homo sapiens; identical to SEQ ID NO: 928

SEQ ID NO: 934 - protein, 101 aa, Homo sapiens; identical to SEQ ID NO: 930

SEQ ID NO: 935 - protein, 61 aa, Homo sapiens [sequence omitted]

SEQ ID NO: 936 - protein, 114 aa, Homo sapiens
  variant (1)...(114): Xaa = Any amino acid
IPPKLCSRTCENLRDCTCQEKVVSFQFEVSIQQDICGPLGLRLIAGDTLRVYRLSGFCLGQQDKGFQKEYLSLGRQPLXHLFFXLFIYFFIYSYLCRLCDLLCVDSDTLSVSGP

SEQ ID NO: 937 - protein, 64 aa, Homo sapiens
  variant (1)...(64): Xaa = Any amino acid
GFTDSLDFVWDSRTRDFKRNTFHLEGNLSXIYSFXYLFIFLFILIFADSVTSYVLTQTPSVSVA

SEQ ID NO: 938 - protein, 82 aa, Homo sapiens [sequence omitted]

SEQ ID NO: 939 - protein, 88 aa, Homo sapiens
  variant (1)...(88): Xaa = Any amino acid
EPEGLHLPRESSEFSVRSLHTTGHLWATGATADCRGYPEGLQTLWILSGTAGQGISKGIPFTWKATSLXFILLXIYLFFYLFLSLQTL

SEQ ID NO: 940 - protein, 66 aa, Homo sapiens
KLTTFSWQVQSLRFSQVLEHSLGGIQPHQPPTLHQGHEHPAHHRKGPPELRIKDTLDPEALGWAGW

SEQ ID NO: 941 - protein, 136 aa, Homo sapiens
  variant (1)...(136): Xaa = Any amino acid
IXKRINXREVAFQVKGIPFEIPCPAVPDKIQRVCKPSGYPLQSAVAPVAHKCPVVWRLRTENSLLSLGRCSPSGSHKSLSTVWGEFSPTSLPPCTRVMSILPTTGRALLSSELRTRWTQKPWAGQVGETLGGSPVQ

SEQ ID NO: 942 - protein, 84 aa, Homo sapiens
  variant (1)...(84): Xaa = Any amino acid
TLTINRVEAGDEADYYCQVWDRNNDHVVFGGGTKLAVLGQPKAAPSVTLFPPSSEELQANKATLVCLISDFYPXAVTVAWKAXS

SEQ ID NO: 943 - protein, 85 aa, Homo sapiens
  variant (1)...(85): Xaa = Any amino acid
VASVGLPLLXRXAQIAAGRVLVVALFGGCGGLHSRLDGAAICLPGHCHGSRVEVTYETHQCGLVGLKLLIGGRXQXDRXGSLXLT

SEQ ID NO: 944 - protein, 121 aa, Homo sapiens
  variant (1)...(121): Xaa = Any amino acid
TINRVEAGXEADYYCQVWDRNNDHVVFGGGTKLAVLGQXKAAXSVXLXPPSYEELQANKATLVCLISDFYPGAVTVAWKADSSPVKAGVETTTPSKQSNNKYAASSYLSXTXEQWKSHRSY

SEQ ID NO: 945 - protein, 119 aa, Homo sapiens
  variant (1)...(119): Xaa = Any amino acid
VASVGLPLLRRQAQIAAGRVLVVALFGGCGGLHSRLDGAAICLPGHCHGSRVEVTYETHQCGLVGLKLLRGGREQSDRGGSLGLTXXGQFGPSAXDDMVHYYDPTLDSNSRPHRRLXPC

SEQ ID NO: 946 - protein, 121 aa, Homo sapiens
  variant (1)...(121): Xaa = Any amino acid
PSTGXKPAMRPTITVKCGIVIMNHVVXGGGTKLAXXGQPKAAPSVTLFPPSSEELQANKATLVCLISDFYPGAVTVAWKADSSPVKAGVETTTPSKQSNNKYAASSYLSLTPEQWKSHRSY

SEQ ID NO: 947 - protein, 56 aa, Homo sapiens
  variant (1)...(56): Xaa = Any amino acid
TATLTINRXEAGDEADYYCQVWDRNNEPCRLXRRDQTGRXRSAQGCPLGHSVPALL

SEQ ID NO: 948 - protein, 62 aa, Homo sapiens
  variant (1)...(62): Xaa = Any amino acid
TLTINRVEAGDEADYYCQVWDRNNDHVVFXGGTKLAVLGXPKAAPSVTLFPPSSXELQXNKA

SEQ ID NO: 949 - protein, 101 aa, Homo sapiens
  variant (1)...(101): Xaa = Any amino acid
VASVXLPLLXRQAQIAAGRVLVVALFGGCGGLHSRLDGAAICLPGHCHGSRVEVTYETHXCGLVGLKLLRGGREXXDRXGSLGLTXDGQFGSSAXXDMVNY

SEQ ID NO: 950 - protein, 102 aa, Homo sapiens
  variant (1)...(102): Xaa = Any amino acid
LIIDHVXXGGGTKLAVXGQPKAAXSVXXFPPSSEELQANKATXVCLISDFYPGAVTVAWKADSSPVKAGVETTTPSKQSNNKYAASSYLSLTXEQWKXHRSY

SEQ ID NO: 951 - protein, 67 aa, Homo sapiens
  variant (1)...(67): Xaa = Any amino acid
VASVXLPLLRRQAQIAAGRVLVVALFGGCGGLHSRLDGAAICLPGHCHGSRVEVTYETHQCGLXGLK

SEQ ID NO: 952 - protein, 67 aa, Homo sapiens
  variant (1)...(67): Xaa = Any amino acid
LQAXKATLVCLISDFYPGAVTVAWKADSSPVKAGVETTTPSKQSNNKYAASSYLSLTPEQWKXHRSY

SEQ ID NO: 953 - protein, 83 aa, Homo sapiens
  variant (1)...(83): Xaa = Any amino acid
TLTINRVEAGDEADYYCQVWDRNNDHVVFGGGTKLAVLGQPKAAPSVTLFPPSSEELQANKATLVCLISDFLPGSRDXGLXGX

SEQ ID NO: 954 - protein, 58 aa, Homo sapiens
  variant (1)...(58): Xaa = Any amino acid
LRKQHWWCLSHGLDRSPPRPPLSLHRLCDLLCVDSDTLSVSGPXKDGQDYLWGKQYWE

SEQ ID NO: 955 - protein, 77 aa, Homo sapiens
  variant (1)...(77): Xaa = Any amino acid
GSSTGGASAMAWTVLLLGLLSHCTDSVTSYVLTQTPSVSVAPXKTAKITCGGNNIGSNNVHWYYQKXGXAPVPNHLF

SEQ ID NO: 956 - protein, 55 aa, Homo sapiens
  variant (1)...(55): Xaa = Any amino acid
LRHPQCQWPXERRPRLPVGETILGVTMYTGITRSXAXPLFLIISFDNDRXSGISE

SEQ ID NO: 957 - protein, 69 aa, Homo sapiens
  variant (1)...(69): Xaa = Any amino acid
VASXGLPLLRRQAQIAAGRVLVVTLFGGCGGLHSRLDGAAICLPGHCHGSRVEVTYETHXCGLVGLKLL

SEQ ID NO: 958 - protein, 69 aa, Homo sapiens
  variant (1)...(69): Xaa = Any amino acid
EELQANKATXVCLISDFYPGAVTVAWKADSSPVKAGVETTTPSKQSNNKYAASSYLSLTPEQWKSXRSY

SEQ ID NO: 959 - protein, 97 aa, Homo sapiens; identical to SEQ ID NO: 725

SEQ ID NO: 960 - protein, 56 aa, Homo sapiens
KQHWWCLGHGLDRSPPRPPLSLHRLCDLLCVDSDTLSVSGPRKDGQDYLWGKQYWE

SEQ ID NO: 961 - protein, 87 aa, Homo sapiens
GSSTGGASAMAWTVLLPGLLSHCTDSVTSYVLTQTPSVSVAPGKTAKITCGGNNIGSYSVHWYYQKPGQAPVLIISFDNDRPPGQVQ

SEQ ID NO: 962 - protein, 63 aa, Homo sapiens
  variant (1)...(63): Xaa = Any amino acid
SSLLITTGRPGRSNEDTPQLYVACGRGPRSSLRVLRHGLEVSEMAVSELPGXPKRCLDSASTH

SEQ ID NO: 963 - protein, 76 aa, Homo sapiens
KQHWWCLSHGLDRSPPRPPLSLHRLCDLLCVDSDTLSVSGPRKDGQDYLWGKQYWELQCTLVLPKARPGPCPNHLF

SEQ ID NO: 964 - protein, 71 aa, Homo sapiens
  variant (1)...(71): Xaa = Any amino acid
CRHQTHLQCVDALSRQRLGXPGSSETAISDTSSPCLRTLRDDRGPLPQATYNCGVSSLDLPGRPVVIKRDD

SEQ ID NO: 965 - protein, 89 aa, Homo sapiens
  variant (1)...(89): Xaa = Any amino acid
GGIHERHNDVGIKLIFNVSTHCPDSVWGXQVAQKQPFLTPQVHVLGLSEMIGVPYHRPHTTVEYLHWTCPGGRSLSKEMIRTGAWPGFW

SEQ ID NO: 966 - protein, 66 aa, Homo sapiens
  variant (1)...(66): Xaa = Any amino acid
TLTINRVEAGDEADYYCQVWDRNNDHVVFGGXTKLAVLGQPKAAPSVTLFPPSSEELQANKATLVC

SEQ ID NO: 967 - protein, 51 aa, Homo sapiens
  variant (1)...(51): Xaa = Any amino acid
VAXAGLPLLRRQAQIAAGRVLVVALFGGCGGLHSRLDGAAICLPGHCHGSR

SEQ ID NO: 968 - protein, 51 aa, Homo sapiens
  variant (1)...(51): Xaa = Any amino acid
PGAVTVAWKADSSPVKAGVETTTPSKQSNNKYAASSYLSLTPEQWKSGXSY

SEQ ID NO: 969 - protein, 52 aa, Homo sapiens
  variant (1)...(52): Xaa = Any amino acid
TLTINRVEAGDEADYYCQVWDLNDDHVVFGGXTKLAVLGQPKAAPSVTLXPP

SEQ ID NO: 970 - protein, 66 aa, Homo sapiens
  variant (1)...(66): Xaa = Any amino acid
TLTINRVEAGDEADYYCQVWDRNNDHVVFGGXTKLAVLGQXKAXPSVTLFPPSXXELQANKATLVC

SEQ ID NO: 971 - protein, 56 aa, Homo sapiens
  variant (1)...(56): Xaa = Any amino acid
VASXXLPLLRRQAXIAAGRVLVVALFGGCGGLHSRLDGAAICLPGHCHGSRVEVTL

SEQ ID NO: 972 - protein, 55 aa, Homo sapiens
  variant (1)...(55): Xaa = Any amino acid
SDFYPGAVTVAWKADSSPVKAGVETTTPSKQSNNKYAASSYXSLTPEQWKXXRSY

SEQ ID NO: 973 - protein, 101 aa, Homo sapiens; identical to SEQ ID NO: 930

SEQ ID NO: 974 - protein, 150 aa, Homo sapiens; identical to SEQ ID NO: 928

SEQ ID NO: 975 - protein, 53 aa, Homo sapiens
  variant (1)...(53): Xaa = Any amino acid
VASXGLPLLRRQAQIAAGRVLVVALFGGCGGLHSRLDGAAICLPGHCHGSRVE

SEQ ID NO: 976 - protein, 53 aa, Homo sapiens
  variant (1)...(53): Xaa = Any amino acid
FYPGAVTVAWKADSSPVKAGVETTTPSKQSNNKYAASSYLSLTPEQWKSXRSY

SEQ ID NO: 977 - protein, 97 aa, Homo sapiens
  variant (1)...(97): Xaa = Any amino acid
TLTINRVEAGDEADYYCQVWDHNNDHVVFGGGTKLAVLGQPKAAPSVTLFPPSSEELQANKATLVCLISDFYPGAVTXXWKAXXSPVXAGVXTTTPS

SEQ ID NO: 978 - protein, 59 aa, Homo sapiens
  variant (1)...(59): Xaa = Any amino acid
GGCGGXHSRXDGAXXCLPXXCHGSRVEVTYETHQCGLVGLKLLRGGREQSDRGGSLGLT

SEQ ID NO: 979 - protein, 83 aa, Homo sapiens
  variant (1)...(83): Xaa = Any amino acid
TLTINRVXAGDEADYYCQVWDRNNDHVVFGGGTKLAVLGQPKAAPSVTLXPXSXXELQANKATLVCLISDFYPGAVTVAWKAX

SEQ ID NO: 980 - protein, 60 aa, Homo sapiens
  variant (1)...(60): Xaa = Any amino acid
LEGVVVSTPALTGLLXCLPGHCHGSRVEVTYETHQCGLVGLKLXXGXRXQSDRGGSLGLT

SEQ ID NO: 981 - protein, 123 aa, Homo sapiens
  variant (1)...(123): Xaa = Any amino acid
VASVGLPLFRRQAQIAAGRVLVVALFGGCGGLHSRLDGAAICLPGHCHGSRVEVTYETHQCGLVGLKLLRGGREQSDRGGSLGLTXDGQFGPSTEDDMVIITIPHLTVIVGLIAGFDPVDGQG

SEQ ID NO: 982 - protein, 123 aa, Homo sapiens
  variant (1)...(123): Xaa = Any amino acid
TLTINRVEAGDEADYYCQVWDRNNDHVVFGGGTKLAVXGQPKAAPSVTLFPPSSEELQANKATLVCLISDFYPGAVTVAWKADSSPVKAGVETTTPSKQSNNKYAASSYLSLTPEQWKSHRSY

SEQ ID NO: 983 - protein, 150 aa, Homo sapiens
  variant (1)...(150): Xaa = Any amino acid
KMESLNFIRAHTPYINIYNCEPANPSEKNSPSTQYCYSIQSLFLGILSVMLIFAFFQELVIAGIVENEWKRTCSRPKSNIVLLSAEEKKEQTIEIKEEVVGLTETSSQPKNEEDIEIIPIQEEEEEETETNFPEPPQDQESSXIENDSSP

SEQ ID NO: 984 - protein, 101 aa, Homo sapiens; identical to SEQ ID NO: 930

SEQ ID NO: 985 - protein, 122 aa, Homo sapiens
SMDMRVPAQLLGLLLLWLPGAKCDIQMTQSPSTLSASVGDTVTISCRASQNIDRWLAWHQQKPGKAPNVLIYATSSLEEGVSLRFTGSGSGTQFNLTITSLQPDDSATYYCATLFCISSQFW

SEQ ID NO: 986 - protein, 69 aa, Homo sapiens
DIRGFAWFLLMPGQPPIYILRGPTTYCNCISDRCRQGGRRLGHLDVTFGTWEPEQQEPQELSGDPHVHA

SEQ ID NO: 987 - protein, 118 aa, Homo sapiens
  variant (1)...(118): Xaa = Any amino acid
TLTINRVEAGDEADYYCQVWDRNNDHVVFGGGTKLAVLGQPKAAPSVTLFPPSSXXLXANKATLVCLISDFYPGAVTVAWKADSSPVKAGVETTTPSKQSNNKYXASXYLSLTPEQWK

SEQ ID NO: 988 - protein, 80 aa, Homo sapiens
  variant (1)...(80): Xaa = Any amino acid
LPLLRRQAQIXAGXVLVVALFGGCGGLHSRLDGAAICLPGHCHGSRVEVTYETHQCGLVGXKXXRGGREQSDRGGSLGLT

SEQ ID NO: 989 - protein, 63 aa, Homo sapiens
  variant (1)...(63): Xaa = Any amino acid
LLAAYLLLLCXEGVXVSTPALXGLLXXFQSHXHGSRVEVTYETHXCGLVXXKLLRGGREQSDR

SEQ ID NO: 990 - protein, 56 aa, Homo sapiens
  variant (1)...(56): Xaa = Any amino acid
VASVGLPLLRRQAQIAAGRVLVVALXXGCXXLHSRLXXAAIXLPEPXSRLPGRSHL

SEQ ID NO: 991 - protein, 123 aa, Homo sapiens
TLTINRVEAGDEANYYCQVWDRNNDHVVFGGGTKLAVLGQPKAAPSVTLFPPSSEELQANKATLVCLISDFYPGAVTVAWKADSSPVKAGVETTTPSKQSNNKYAASSYLSLTPEQWKSHRSY

SEQ ID NO: 992 - protein, 85 aa, Homo sapiens
VASVGLPLLRRQAQIAAGRVLVVALFGGCGGLHSRLDGAAICLPGHCHGSRVEVTYEAHQCGLVGLKLLRGGREQSDRGGSLGLT

SEQ ID NO: 993 - protein, 123 aa, Homo sapiens; identical to SEQ ID NO: 683

SEQ ID NO: 994 - protein, 85 aa, Homo sapiens; identical to SEQ ID NO: 682

SEQ ID NO: 995 - protein, 88 aa, Homo sapiens
TVINYRPHNMRPEDRMFHIRAVILRALSLAFLLSLRGAGAIKADHVSTYAAFVQTHRPTGEFMFEFDEDEMFYVDLDKKETVWHLEEF

SEQ ID NO: 996 - protein, 55 aa, Homo sapiens; identical to SEQ ID NO: 791

SEQ ID NO: 997 - protein, 83 aa, Homo sapiens
SVGLPLLRRQAQIAAGRVLVVALFGGCGGLHSRLDGAAICLPGHCHGSRVEVTYETHQCGLVGLKLLRGGREQSDRGGSLGLT

SEQ ID NO: 998 - protein, 121 aa, Homo sapiens
TLTINRVEAGDKADYYCQVWDLNNDHVVFGGGTKLAVLGQPKAAPSVTLFPPSSEELQANKATLVCLISDFYPGAVTVAWKADSSPVKAGVETTTPSKQSNNKYAASSYLSLTPEQWKSHR

SEQ ID NO: 999 - protein, 56 aa, Homo sapiens; identical to SEQ ID NO: 754

SEQ ID NO: 1000 - protein, 96 aa, Homo sapiens
SSTGGASAMAWTVLLLGLLSHCTDSVTSYVLTQTPSVSVAPGKTAKITCGGNNIGSNNVHWYYQKPGQAPVLIISFDNDRPSGISERFSGFNSGDM

SEQ ID NO: 1001 - protein, 81 aa, Homo sapiens
LGLLSHCTDSVTSYVLTQTPSVSVAPGKTAKITCGGNNIGSNNVHWYYQKPGRAPVLIISFDNDWPSGISERFSGFNSGDM

SEQ ID NO: 1002 - protein, 170 aa, Homo sapiens
QAFSFEAQGGLANIAILNNNLNTLIQRSNHTQATNDPPEVTVFPKEPVELGQPNTLICHIDKFFPPVLNVTWLCNGELVTEGVAESLFLPRTDYSFHKFHYLTFVPSAEDFYDCRVEHWGLDQPLLKHWEAQEPIQMPETTETVLCALGLVLGLVGIIVGTVLIIKSLRS

SEQ ID NO: 1003 - protein, 61 aa, Homo sapiens
PCFPRSLWSWASPTPSSATLTSSSHQCSTSRGCATGSWSLRVSLRASSCPEQITASTSSIT

SEQ ID NO: 1004 - protein, 51 aa, Homo sapiens [sequence omitted]

SEQ ID NO: 1005 - protein, 59 aa, Homo sapiens
PERRDFMMRTVPTMMPTRPSTRPRAQSTVSVVSGIWIGSWASQCLRSGWSKPQCSTLQS

SEQ ID NO: 1006 - protein, 61 aa, Homo sapiens
SVLGRKRLSATPSVTSSPLHSHVTLSTGGKNLSMWQMRVLGWPSSTGSLGNTVTSGGSLVA

SEQ ID NO: 1007 - protein, 106 aa, Homo sapiens
GHKGQVMELVEAVICSGQEEALSDTLSDQLPVAQPRDVEHWWEELVNVADEGVGLAQLHRLLGKHGHLRGIVGGLSVVGTLDQGIQVVVQYSNVSQPALSLKGKGL

SEQ ID NO: 1008 - protein, 59 aa, Homo sapiens
SVGLPLLRRQAQIAAGRVLVVALFGGCGGLHSRLDGAAICLPGHCHGSRVEVTYETHQC

SEQ ID NO: 1009 - protein, 59 aa, Homo sapiens
TLVCLISDFYPGAVTVAWKADSSPVKAGVETTTPSKQSNNKYAASSYLSLTPEQWKSHR

SEQ ID NO: 1010 - protein, 85 aa, Homo sapiens; identical to SEQ ID NO: 682

SEQ ID NO: 1011 - protein, 123 aa, Homo sapiens; identical to SEQ ID NO: 683

SEQ ID NO: 1012 - protein, 83 aa, Homo sapiens; identical to SEQ ID NO: 997

SEQ ID NO: 1013 - protein, 83 aa, Homo sapiens
GQPKAAPSVTLFPPSSEELQANKATLVCLISDFYPGAVTVAWKADSSPVKAGVETTTPSKQSNNKYAASSYLSLTPEQWKSHR

SEQ ID NO: 1014 - protein, 55 aa, Homo sapiens
PRMMKTVPTTMPTRPTDNPRAQTTVSVSSDIGAGISGSQCFRRGLSSPQCSTLQS

SEQ ID NO: 1015 - protein, 50 aa, Homo sapiens
  variant (1)...(50): Xaa = Any amino acid
PSVTGDLENTVTSGTSLVAAVELERLIRLFKLCFXTAMFVSANCGSNLNC

SEQ ID NO: 1016 - protein, 59 aa, Homo sapiens
  variant (1)...(59): Xaa = Any amino acid
HRGWNLRLPVFQKRLVQSPVLHLAVITLLSRREEGEVTDLEEGMITLGEEAGLXNTFCD

SEQ ID NO: 1017 - protein, 76 aa, Homo sapiens
  variant (1)...(76): Xaa = Any amino acid
VPIAXPCDVDHRRKDVVHKTDEDVGLTQCHGRLGKHCDLRNLIGSSGRVGAFNQTVQVMFXDSDVCQCKLRVKSKL

SEQ ID NO: 1018 - protein, 52 aa, Homo sapiens
  variant (1)...(52): Xaa = Any amino acid
AMGTQSQKVFXRPASSPRVIIPSSRSVTSPSSLLLRRVMTARWSTGDWTSLF

SEQ ID NO: 1019 - protein, 165 aa, Homo sapiens
  variant (1)...(165): Xaa = Any amino acid
QFRFDPQFALTNIAVXKHNLNSLIKRSNSTAATNEVPEVTVFSKSPVTLGQPNILICLVDNIFPPVVNITWXSNGHSVTEGVXETSFLSKSDHSFFKISYLTLLPSAEESYDCKVEHWGLDKPLLKHWEPEIPAPMSELTETVVCALGLSVGLVGIVVGTVFIIR

SEQ ID NO: 1020 - protein, 85 aa, Homo sapiens; identical to SEQ ID NO: 682

SEQ ID NO: 1021 - protein, 123 aa, Homo sapiens; identical to SEQ ID NO: 896

SEQ ID NO: 1022 - protein, 50 aa, Homo sapiens
  variant (1)...(50): Xaa = Any amino acid
LLAAYLLLLCLEGVXVSTPALTGLLSAFQATVXAPGXKSLXRHTXVALXA

SEQ ID NO: 1023 - protein, 80 aa, Homo sapiens
  variant (1)...(80): Xaa = Any amino acid
VASXGLPLLRRQAQIAAGRVLVVALFGGCXGLHSRLDGAAICLPGHCHXSRVXVTXETHXCGLXGLXLLIGGREQXDRGG

SEQ ID NO: 1024 - protein, 80 aa, Homo sapiens
  variant (1)...(80): Xaa = Any amino acid
APSVXLFPPSYEEXQAXKATXVCLXSDXYPGXVTVAWKADSSPVKAGVETXTPSKQSNNKYAASSYLSLTPEQWKSXRSY

SEQ ID NO: 1025 - protein, 101 aa, Homo sapiens
  variant (1)...(101): Xaa = Any amino acid
TLTINRVEAGDEADYYCQVWDRNNDHVVFGGGTKLAVLGQPKAAPSVTLFPPSSEELQANKATLVCLISDFYPGAVTVAWKADSXPVKAGVETTTPSKQXN

SEQ ID NO: 1026 - protein, 63 aa, Homo sapiens
  variant (1)...(63): Xaa = Any amino acid
VXLFGGCGGLHSRLDGXAICLPGHCHGSRVEVTYETHQCGLVGLKLLRGGREQSDRGGSLGLT

SEQ ID NO: 1027 - protein, 75 aa, Homo sapiens
GCLSQHIGGHRVTFSWQVQSLRFSQVLEHSLGGIQPHQPPTLHQGHEHPAHHRKGPPELRIKDTLDPEALGWAGW

SEQ ID NO: 1028 - protein, 77 aa, Homo sapiens
EVTELLSLGRCSPSGSHKSLSTVWGEFSPTSLPPCTRVMSILPTTGRALLSSELRTRWTQKPWAGQVGETLGGSPVQ

SEQ ID NO: 1029 - protein, 82 aa, Homo sapiens [sequence omitted]

SEQ ID NO: 1030 - protein, 84 aa, Homo sapiens
EPEGLHLPRESNSVTSYVLTQTPSVSVAPGKTAKITCGGNNIGSNNVHWYYQKPGQAPVLIISFDNDRPSGISERFSGFNSGDM

SEQ ID NO: 1031 - protein, 60 aa, Homo sapiens
EAALVVPQPWPGPFSSSASSLTAQVIPPGSHQPAQPKASGSSVSLILSSGGPFLWWAGCS

SEQ ID NO: 1032 - protein, 71 aa, Homo sapiens
GEVSRSAARGGCPEPQGWSWGLSVLPQAFQVQKALWGLGLCQGKESCLGGGREVREVTHVALEPAKSNVSM

SEQ ID NO: 1033 - protein, 77 aa, Homo sapiens
CPKRASPGALGLGLREERSVGQRPGVAALSPRAGPGVCQSFPRLSRSRRLCGVWGCVRVRKAALVEEEKSERSHMWP

SEQ ID NO: 1034 - protein, 54 aa, Homo sapiens
  variant (1)...(54): Xaa = Any amino acid
PESSRYPSLLASGSGSRGGGSSQSXVSSMPWGLCRTGRLEEPLCLDRFCRLPHL

SEQ ID NO: 1035 - protein, 50 aa, Homo sapiens
LLFLHQGSFPYPDTAPDPTKPSGPGKPGEGLTDPRTSPGAQGSHPGPLTD

SEQ ID NO: 1036 - protein, 69 aa, Homo sapiens
LEPPPRLPLPEARREGYLEDSGHLLLAQGLKDAGPPNLTLRLPATFSPGFCRLASLPLLSHADVGLSRF

SEQ ID NO: 1037 - protein, 61 aa, Homo sapiens
  variant (1)...(61): Xaa = Any amino acid
SGGACRTCPGTVAPQACLSCRVPMAWSLHXTDWSPLPDSHFQKLGGRDTWKTPVTSFLLRA

SEQ ID NO: 1038 - protein, 59 aa, Homo sapiens
KMLVLPTSLSDSLPPFPLGSAVLPHFPSCHMLTLDLAGSKATCVTSLTSLPPPRQLSLP

SEQ ID NO: 1039 - protein, 56 aa, Homo sapiens
HSPRPHKAFWTWKAWGRTDRPQDQPWGSGQPPRAADRLTSPHGGPAPKPQGWPVWD

SEQ ID NO: 1040 - protein, 85 aa, Homo sapiens; identical to SEQ ID NO: 682

SEQ ID NO: 1041 - protein, 123 aa, Homo sapiens; identical to SEQ ID NO: 683

SEQ ID NO: 1042 - protein, 96 aa, Homo sapiens
  variant (1)...(96): Xaa = Any amino acid
VASVGLPLLRRQAQIAAGRVLVVALFGGCGGLHSRLDGAAICLPGHCHGSRVEVTYETHQCGLVGLKLLRGGREQSDRGGSLGLTXDGQFXPSAED

SEQ ID NO: 1043 - protein, 96 aa, Homo sapiens
  variant (1)...(96): Xaa = Any amino acid
VFGGGXKLAVXGQPKAAPSVTLFPPSSEELQANKATLVCLISDFYPGAVTVAWKADSSPVKAGVETTTPSKQSNNKYAASSYLSLTPEQWKSHRSY

SEQ ID NO: 1044 - protein, 85 aa, Homo sapiens
  variant (1)...(85): Xaa = Any amino acid
VASVGLPLLRRQAQIAAGRVLVVALFGGCGGLHSRLDGAAICLPGHCHGSRVEVTYETHXCGLVGLKLLXGGREQSDRGGSLGLT

SEQ ID NO: 1045 - protein, 90 aa, Homo sapiens
  variant (1)...(90): Xaa = Any amino acid
KLAVLGQPKAAPSVTLFPPSXEELQANKATXVCLISDFYPGAVTVAWKADSSPVKAGVETTTPSKQSNNKYAASSYLSLTPEQWKSHRSY

SEQ ID NO: 1046 - protein, 124 aa, Homo sapiens; identical to SEQ ID NO: 814

SEQ ID NO: 1047 - protein, 71 aa, Homo sapiens [sequence omitted]

SEQ ID NO: 1048 - protein, 95 aa, Homo sapiens
  variant (1)...(95): Xaa = Any amino acid
TLTINRVEAGDEADYYCQVWDRNNDHVVFGGGTKLAVLGQPKAAPSVTLFPPSSEELQANKATLVCLISDFYPGAVTVAWKAXSXPXKAGVETTT

SEQ ID NO: 1049 - protein, 57 aa, Homo sapiens
  variant (1)...(57): Xaa = Any amino acid
CGGLHSRLXGXAXCLPGHCHGSRVEVTYETHQCGLVGLKLLRGGREQSDRGGSLGLT

SEQ ID NO: 1050 - protein, 98 aa, Homo sapiens
TLTINRVEAGDEADYYCQVWDRNNDHVVFGGGTKLAVLGQPKAAPSVTLFPPSSEELQANKATLACLISDFYPGAVTVAWKADSSPVKAGVETTTPSK

SEQ ID NO: 1051 - protein, 60 aa, Homo sapiens
FGGCGGLHSRLDGAAICLPGHCHGSRVEVTYETRQCGLVGLKLLRGGREQSDRGGSLGLT

SEQ ID NO: 1052 - protein, 60 aa, Homo sapiens
SWPSFLGPLTLRVSESTHRRSQTLCSERGGRGGERSRPWLRHHQCCFLRQSYPCLKWYLL

SEQ ID NO: 1053 - protein, 80 aa, Homo sapiens
LCLRKQHWWCLSHGLDRSPPRPPLSLHRVCDLLCVDSDTLSVSGPRKDGQDYLWGKQYWELQCTLVLPKARPGPCPNHLF

SEQ ID NO: 1054 - protein, 97 aa, Homo sapiens
GSSTGGASAMAWTVLLLGLLSHCTESVTSYVLTQTPSVSVAPGKTAKITCGGNNIGSYSVHWYYQKPGQAPVLIISFDNDRPSGISERFSGFNSGDM

SEQ ID NO: 1055 - protein, 97 aa, Homo sapiens; identical to SEQ ID NO: 725

SEQ ID NO: 1056 - protein, 56 aa, Homo sapiens; identical to SEQ ID NO: 754

SEQ ID NO: 1057 - protein, 64 aa, Homo sapiens
  variant (1)...(64): Xaa = Any amino acid
EPXPLRPIEEMTLRRRVLQETWXGVPSQSQWGAXHHXCHXQNXHAGTSREPXTHHAGXQDRTRG

SEQ ID NO: 1058 - protein, 53 aa, Homo sapiens
  variant (1)...(53): Xaa = Any amino acid
HSDVEYSKKRXLVSPAKASGELXTIXVTXRTXMQEPPGSXRHTMLXNRTGPGA

SEQ ID NO: 1059 - protein, 51 aa, Homo sapiens
  variant (1)...(51): Xaa = Any amino acid
GPWSCPVXQHGVSXAPWRFLHXSSXSDXDGXELPTGFGWGHQXTFLGVLYV

SEQ ID NO: 1060 - protein, 64 aa, Homo sapiens
  variant (1)...(64): Xaa = Any amino acid
APGPVLXSSMVCXRLPGGSCMXVLXVTXMVXSSPLALAGDTXPRFLEYSTSECHFFNGTERXRF

SEQ ID NO: 1061 - protein, 85 aa, Homo sapiens; identical to SEQ ID NO: 682

SEQ ID NO: 1062 - protein, 123 aa, Homo sapiens
  variant (1)...(123): Xaa = Any amino acid
TLTINRVEAGXEADYYCQVWDRNNDHVVFGGGTKLAVLGQPKAAPSVTLFPPSSEELQANKATLVCLISDFYPGAVTVAWKADSSPVKAGVETTTPSKQSNNKYAASSYLSLTPEQWKSHRSY

SEQ ID NO: 1063 - protein, 59 aa, Homo sapiens
PCLRSKVTRKRPCLPSMTLMEEMLREAFRCMTQGKTAKNLVLALLILLFVSFLGVLRAK

SEQ ID NO: 1064 - protein, 51 aa, Homo sapiens
EQNDNTQKFSKWDFPGRANERPYCYAIWSKTTLQEDVFTGGPHAKLLHEGI

SEQ ID NO: 1065 - protein, 120 aa, Homo sapiens
  variant (1)...(120): Xaa = Any amino acid
DCQKSCSCSPHFVICFIFRSFESKMTTPRNSVNGTFPAEPMKGPIAMQSGPKPLFRRMSSLVGPTQSFFMRESKTLGAVQIMNGLFHIALGGLLMIPAGIYAPICVTVWYPLWGXXGSIK

SEQ ID NO: 1066 - protein, 89 aa, Homo sapiens
IPAGIIRRPPRAMWKSPFIIWTAPKVLDSLMKKLCVGPTSEDILLKSGFGPDCIAIGPFIGSAGKVPFTEFLGVVILLSKLLKMKQITK

SEQ ID NO: 1067 - protein, 60 aa, Homo sapiens
  variant (1)...(60): Xaa = Any amino acid
LYASXXSPERVPHSHTDGCIDPCWDHQKTPQGNVEEPIHNLDSPQSLRFPHEEALRGAHQ

SEQ ID NO: 1068 - protein, 64 aa, Homo sapiens [sequence omitted]

SEQ ID NO: 1069 - protein, 59 aa, Homo sapiens
PCLRSKVTRKRPCLPSMTLMEEMLREAFRCMTQGKTAKNLVLALLILLFVLFLGVLRAK

SEQ ID NO: 1070 - protein, 51 aa, Homo sapiens; identical to SEQ ID NO: 1064

SEQ ID NO: 1071 - protein, 108 aa, Homo sapiens
DCQKSCSCSPHFVICFIFRSFESKMTTPRNSVNGTFPAEPMKGPIAMQSGPKPLFRRMSSLVGPTQSFFMRESKTLGAVQIMNGLFHIALGGLLMIPAGIYAPICVTV

SEQ ID NO: 1072 - protein, 64 aa, Homo sapiens
ISGCCHFALKTPKNKTNNKMRRARTRFLAVLPCVMHLNASLSISSMSVIEGRHGLFRVTLDLRQ

SEQ ID NO: 1073 - protein, 89 aa, Homo sapiens
IPAGIIRRPPRAMWKSPFIIWTAPKVLDSLMKKLCVGPTSEDILLKSGFGPDCIAIGPFIGSAGKVPFTEFLGVVILLSKLLKIKQITK

SEQ ID NO: 1074 - protein, 59 aa, Homo sapiens; identical to SEQ ID NO: 1069

SEQ ID NO: 1075 - protein, 51 aa, Homo sapiens
EQNDNTQKFSKWDFPGRANERPYCYAIWSKTTLQEDVFTGGPHARLLHEGI

SEQ ID NO: 1076 - protein, 76 aa, Homo sapiens
  variant (1)...(76): Xaa = Any amino acid
DFGGCPDYEWALPHCPGGSSDDPSRDLCTHLCDCVVPSLGRHYVYYFRITPGSNGEKLQEVFGQRKNDNEFIXPLC

SEQ ID NO: 1077 - protein, 149 aa, Homo sapiens
  variant (1)...(149): Xaa = Any amino acid
DCQKSCSCSPHFVICFIFRSFESKMTTPRNSVNGTFPAEPMKGPIAMQSGPKPLFRRMSSLVGPTQGFFMRESKTLGAVQIMNGLFHIALGGLLMIPAGIYAPICVTVWYPLWGGIMYIISGSLLAATEKNSRKCLVKGKMIMNSXXLF

SEQ ID NO: 1078 - protein, 89 aa, Homo sapiens
IPAGIIRRPPRAMWKSPFIIWTAPKVLDSLMKKPCVGPTSEDILLKSGFGPDCIAIGPFIGSAGKVPFTEFLGVVILLSKLLKIKQITK

SEQ ID NO: 1079 - protein, 62 aa, Homo sapiens; identical to SEQ ID NO: 880

SEQ ID NO: 1080 - protein, 64 aa, Homo sapiens; identical to SEQ ID NO: 1072

SEQ ID NO: 1081 - protein, 94 aa, Homo sapiens [sequence omitted]

SEQ ID NO: 1082 - protein, 61 aa, Homo sapiens [sequence omitted]

SEQ ID NO: 1083 - protein, 58 aa, Homo sapiens
  variant (1)...(58): Xaa = Any amino acid
GNPDPRPTDGGXGGXXVRLSGRNCPVDVIDHQYFLLEQRDLSERAHFKFIRCIGQNPV

SEQ ID NO: 1084 - protein, 139 aa, Homo sapiens
  variant (1)...(139): Xaa = Any amino acid
XTGAVSFXMXEETQTQDQPMEEXEVXTFAFQAEIAQLMSLIINTFYSNKEIFLRELISNSSDALDKIRYESLTDPSKLDSEKELHINLIPNKQDRTLTIVDTGIGMTKADLINNLGTIAKSGTKAFMEALQAGADISMI

SEQ ID NO: 1085 - protein, 66 aa, Homo sapiens
  variant (1)...(66): Xaa = Any amino acid
PCLXSXVTRKRPCLPSMTLMEEMLXEAFXCMTQGKTAKNLXLALLILLXVLXLGVXRAKXXHPEIQ

SEQ ID NO: 1086 - protein, 51 aa, Homo sapiens
  variant (1)...(51): Xaa = Any amino acid
EQNXXTQKFSKWDFPGRXNERPYCYAIWSKTTLQEDXFTGGPHAKLLHEGI

SEQ ID NO: 1087 - protein, 52 aa, Homo sapiens
  variant (1)...(52): Xaa = Any amino acid
DFGGCPDYEWALPHCPGGSSDDPXRDLCXHLCDCVVPSLGRHYVYYFRITPG

SEQ ID NO: 1088 - protein, 125 aa, Homo sapiens
  variant (1)...(125): Xaa = Any amino acid
DCQKSXSCSPHFVIXFXFRSXESKXTXPRNSVNGTFPAXPMKGPIAMQSGPKPLFRRMXSLVGPTQSFFMRESKTLGAVQIMNGLFHIALGGLLMIPXGIYXPICVTVWYPLWGGIMYIISGSLL

SEQ ID NO: 1089 - protein, 89 aa, Homo sapiens
  variant (1)...(89): Xaa = Any amino acid
IPXGIIRRPPRAMWKSPFIIWTAPKVLDSLMKKLCVGPTSEXILLKSGFGPDCIAIGPFIXSAGKVPFTEFLGXXILLSXLLKXKXITK

SEQ ID NO: 1090 - protein, 62 aa, Homo sapiens
  variant (1)...(62): Xaa = Any amino acid
SGNNIHNASPERVPHSHTDGXIDPXWDHQKTPQGNVEEPIHNLDSPQSLRFPHEEALRGAHQ

SEQ ID NO: 1091 - protein, 64 aa, Homo sapiens
  variant (1)...(64): Xaa = Any amino acid
ISGXCXFALXTPKXKXNNKMRRARXRFLAVLPCVMHXNASXSISSMSVIEGRHGLFRVTXDXRQ

SEQ ID NO: 1092 - protein, 123 aa, Homo sapiens
GHSMDMRVPAQLLGLLLLWLPGAKCDIQMTQSPSTLSASVGDTVTISCRASQNIDRWLAWHQQKPGKAPNVLIYATSSLEEGVSLRFTGSGSGTQFNLTITSLQPDDSATYYCQHYSASLRSF

SEQ ID NO: 1093 - protein, 71 aa, Homo sapiens; identical to SEQ ID NO: 813

SEQ ID NO: 1094 - protein, 85 aa, Homo sapiens
  variant (1)...(85): Xaa = Any amino acid
VASVGLPLLRRQAQIAAGRVLVVALFGGCGXLHSRLDGAAICLPGHCHGSRVEVTYETHQCGLVGLKLLRGGREQSDRGGSLGLT

SEQ ID NO: 1095 - protein, 123 aa, Homo sapiens
  variant (1)...(123): Xaa = Any amino acid
TLTINRVEAGDEADYYCQVWDRNNDHVVFGGGTKLAVLGQPKAAPSVTLFPPSSEELQANKATLVCLISDFYPGAVTVAWKADSSPVKAGVEXTTPSKQSNNKYAASSYLSLTPEQWKSHRSY

SEQ ID NO: 1096 - protein, 85 aa, Homo sapiens; identical to SEQ ID NO: 682

SEQ ID NO: 1097 - protein, 102 aa, Homo sapiens
TLTINRVEAGDEADYYCQVWDRNNDHVVFGGGTKLAVLSQPKAAPSVTLFPPSSEELQANKATLVCLISDFYPGAVTVAWKADSSPVKAGVETTTPSKQSNN

SEQ ID NO: 1098 - protein, 85 aa, Homo sapiens; identical to SEQ ID NO: 682

SEQ ID NO: 1099 - protein, 108 aa, Homo sapiens
  variant (1)...(108): Xaa = Any amino acid
YXQVWDRNYDHVVFGGGTKLAVLGQPKAAPSVTLFPPSSEELQANKATLVCLISDFYPGAVTVAWKADSSPVKAGVETTTPSKQSNNKYAASSYLSLTPEQWKSHRSY

SEQ ID NO: 1100 - protein, 56 aa, Homo sapiens
  variant (1)...(56): Xaa = Any amino acid
VASVGLPLLXRQAQIAAGRVLVVALFGGCGGLHSXLDGXXYLPSXPLXRLXGRSHL

SEQ ID NO: 1101 - protein, 54 aa, Homo sapiens
  variant (1)...(54): Xaa = Any amino acid
KATXVCLISDFYXGAVXVXWKADSXPRQXGSGDHHTLQTKQQQVRGQQLSEPDX

SEQ ID NO: 1102 - protein, 55 aa, Homo sapiens
  variant (1)...(55): Xaa = Any amino acid
VTSTXEPXQWXGRQIXXPVKXGVETTTPSKQSNNKYAASSYLSLTXEQWKSHRSY

SEQ ID NO: 1103 - protein, 56 aa, Homo sapiens
  variant (1)...(56): Xaa = Any amino acid
TLTINRVEAGDEADYYCQVWDRNNDHVXFGGGTKLAVLGXPKAAPSVTLFXPXSXE

SEQ ID NO: 1104 - protein, 85 aa, Homo sapiens; identical to SEQ ID NO: 682

SEQ ID NO: 1105 - protein, 123 aa, Homo sapiens
TLTINRVEAGDEADYYCQVWDLNNDHVVFGGGTKLAVLGQPKAAPSVTLFPPSSEELQANKATLVCLISDFYPGAVTVAWKADSSPVKAGVETTTPSKQSNNKYAASSYLSLTPEQWKSHRSY

SEQ ID NO: 1106 - protein, 194 aa, Homo sapiens
QYTHEFDGDEQFYVDLGRKETVWCLPVLRQFRFDPQFALTNIAVLKHNLNSLIKRSNSTAATNEVPEVTVFSKSPVTLGQPNILICLVDNIFPPVVNITWLSNGHSVTEGVSETSFLSKSDHSFFKISYLTLLPSAEESYDCKVEHWGLDKPLLKHWEPEIPAPMSELTETVVCALGLSVGLVGIVVGTVFIIR

SEQ ID NO: 1107 - protein, 52 aa, Homo sapiens
AMGTQSQKVFLRPASSPRVIIPSSRSVTSPSSLLLRRVMTARWSTGDWTSLF

SEQ ID NO: 1108 - protein, 55 aa, Homo sapiens; identical to SEQ ID NO: 1014

SEQ ID NO: 1109 - protein, 66 aa, Homo sapiens
PSVTGDLENTVTSGTSLVAAVELERLIRLFKLCFRTAMFVSANCGSNLNCLRTGKHQTVSFLPRST

SEQ ID NO: 1110 - protein, 59 aa, Homo sapiens
HRGWNLRLPVFQKRLVQSPVLHLAVITLLSRREEGEVTDLEEGMITLGEEAGLRNTFCD

SEQ ID NO: 1111 - protein, 60 aa, Homo sapiens
VPIAQPCDVDHRRKDVVHKTDEDVGLTQCHGRLGKHCDLRNLIGSSGRVGAFNQTVQVMF

SEQ ID NO: 1112 - protein, 51 aa, Homo sapiens
  variant (1)...(51): Xaa = Any amino acid
KQHWWCLSHGLDRSPXRXPLSPXRLCDLLCVDSDTXSXXGPRXXGQDYLWG

SEQ ID NO: 1113 - protein, 51 aa, Homo sapiens
  variant (1)...(51): Xaa = Any amino acid
SSTGGASAMAWTVLXLXLLSHXTDSVTSYVLTQTPXVXXAPGXTAKITCGG

SEQ ID NO: 1114 - protein, 79 aa, Homo sapiens
PTVTLFPPSSEELQANKATLVCLISDFYPGAVTVAWKADGSPVKAGVETTKPSKQSNNKYAASSYLSLTPEQWKSHRSY

SEQ ID NO: 1115 - protein, 54 aa, Homo sapiens; identical to SEQ ID NO: 840

SEQ ID NO: 1116 - protein, 59 aa, Homo sapiens
VASVGLPLLGRQAQVAAGRVLVVALFGGFGGLHSRLDGAAICLPGHCHSSRVEVTDQTH

SEQ ID NO: 1117 - protein, 85 aa, Homo sapiens
  variant (1)...(85): Xaa = Any amino acid
VASVGLPLLRRQAQIAAGRVLVVALFGGCGGLHSRLDGAAICLPGHCHGSRVEVTYETHQCGLVGLKLLXGGREQSDRGGSLGLT

SEQ ID NO: 1118 - protein, 93 aa, Homo sapiens
  variant (1)...(93): Xaa = Any amino acid
XGTKXAVLGQPKAAPSVTLFPPSXEELQANKATLVCLISDFYPGAVTVAWKADSSPVKAGVETTTPSKQSNNKYAASSYLSLTPEQWKSHRSY

SEQ ID NO: 1119 - protein, 194 aa, Homo sapiens; identical to SEQ ID NO: 1106

SEQ ID NO: 1120 - protein, 52 aa, Homo sapiens; identical to SEQ ID NO: 1107

SEQ ID NO: 1121 - protein, 55 aa, Homo sapiens; identical to SEQ ID NO: 1014

SEQ ID NO: 1122 - protein, 66 aa, Homo sapiens; identical to SEQ ID NO: 1109

SEQ ID NO: 1123 - protein, 59 aa, Homo sapiens; identical to SEQ ID NO: 1110

SEQ ID NO: 1124 - protein, 60 aa, Homo sapiens; identical to SEQ ID NO: 1111

SEQ ID NO: 1125 - protein, 94 aa, Homo sapiens
TGGASAMAWTVLLLGLLSHCTDSVTSYVLTQTPSVSVAPGKTAKITCGGNNIGSNNVHWYYQKPGQAPVLIISFDNDRPSGISERFSGFNSGDM

SEQ ID NO: 1126 - protein, 53 aa, Homo sapiens
WWCLSHGLDRSPPRPPLSLHRLCDLLCVDSDTLSVSGPRKDGQDYLWGKQYWE

SEQ ID NO: 1127 - protein, 71 aa, Homo sapiens; identical to SEQ ID NO: 813

SEQ ID NO: 1128 - protein, 124 aa, Homo sapiens; identical to SEQ ID NO: 814

SEQ ID NO: 1129 - protein, 63 aa, Homo sapiens
  variant (1)...(63): Xaa = Any amino acid
NNDHVVFGGGTKLAVLGQPKAAPSVTLFPPXXEXLQANKATLVCLISDFYPGAVTVAWKAXSS

SEQ ID NO: 1130 - protein, 73 aa, Homo sapiens
WWCLSHGLDRSPPRPPLSPHRFCDFLCVDSNTLSVSGPRKDGQDYLWGKQYWESQCTLVLPEARPGPCPNHLF

SEQ ID NO: 1131 - protein, 57 aa, Homo sapiens
GGASAMAWTVLLLGLLSHRTDSVTSYVLTQTPSVSVAPGKTAKITCGGNNIGSHNVH

SEQ ID NO: 1132 - protein, 85 aa, Homo sapiens
  variant (1)...(85): Xaa = Any amino acid
SQESVQEPFLTPVMDNKAXPEEDEPQHEASNATQHLALGRFRLSPPLHGDGVLEAGVLHVAGVDVSMLGSHFQHHQDLEXPVTXS

SEQ ID NO: 1133 - protein, 56 aa, Homo sapiens
DYFNWDWLSLFCNACLSLPRIPNCLCQPVPLRSESYSGCHAATRSSPFIPTPRRWL

SEQ ID NO: 1134 - protein, 70 aa, Homo sapiens
  variant (1)...(70): Xaa = Any amino acid
ICPEQDAEWHWRLRAGAHLPRXGPYYPSQESERAPALTPETILTGIGYHFSVTPACPCPEFPTACVSLSP

SEQ ID NO: 1135 - protein, 82 aa, Homo sapiens
  variant (1)...(82): Xaa = Any amino acid
LGXGDWXFQILVMLEMTPQHGDVYTCHVEHPSLQNPITVEWRAQSESAQSKMLSGIGGFVLGLIFLGXGLIIHHRSQKGLLH

SEQ ID NO: 1136 - protein, 56 aa, Homo sapiens
RLLVPAQNSQLPVSACPPEIRVLQWLSRSHQVISFHPHPKALAVTLLPALTQSLCL

SEQ ID NO: 1137 - protein, 85 aa, Homo sapiens; identical to SEQ ID NO: 682

SEQ ID NO: 1138 - protein, 123 aa, Homo sapiens; identical to SEQ ID NO: 683

SEQ ID NO: 1139 - protein, 123 aa, Homo sapiens
  variant (1)...(123): Xaa = Any amino acid
TLTINRVEAGDEADYYCQVWDRNNDHVVFGGGTKLXXLGXXKAAPSVTLFPPSSEELQANKATLVCLISDFYPGAATVAWKADSSPVKAGVETTTPSKQSNNKYAASSYLSLTPEQWKSHRSY

SEQ ID NO: 1140 - protein, 85 aa, Homo sapiens
  variant (1)...(85): Xaa = Any amino acid
VASVGLPLLRRQAQIAAGRVLVVALFGGCGGLHSRLDGAAICLPGHCRGSRVEVTYETHQCGLVGLKLLRGGREQSDRGGSLXXT

SEQ ID NO: 1141 - protein, 85 aa, Homo sapiens; identical to SEQ ID NO: 682

SEQ ID NO: 1142 - protein, 123 aa, Homo sapiens; identical to SEQ ID NO: 683

SEQ ID NO: 1143 - protein, 115 aa, Homo sapiens
TLPPDRMKFISTSLLLMLLVSSLSPVQGVLEVYYTSLRCRCVQESSVFIPRRFIDRIQILPRGNGCPRKEIIVWKKNKSIVCVDPQAEWIQRMMEVLRKRSSSTLPVPVFKRKIP

SEQ ID NO: 1144 - protein, 55 aa, Homo sapiens
EKEVLQLYQFQCLRERFPDADISTKNTCILPLSLLWILVLCLVKSFPGKRTSPYK

SEQ ID NO: 1145 - protein, 51 aa, Homo sapiens
SHAYLYGEVLFPGKDLTKHKTKIQSRDKGRMQVFLVEISASGNLSLKHWNW

SEQ ID NO: 1146 - protein, 60 aa, Homo sapiens
VRRSSSVAQVKAMIETKTGIIPETQIVTCNGKRLEDGKMMADYGIRKGNLLFLACYCIGG

SEQ ID NO: 1147 - protein, 74 aa, Homo sapiens
DPDCDLQWKETGRWEDDGRLRHQKGQLTLPGMLLYWRVTTLGMGCWQGSKSLFLLISYSTNTSSDDFPKLMRMR

SEQ ID NO: 1148 - protein, 74 aa, Homo sapiens [sequence omitted]

SEQ ID NO: 1149 - protein, 57 aa, Homo sapiens
SIPGGYNTDISRVFNGNNCTSCQQKLLPGPLEIYDIDAITFPFIDVLFHLEVKIGAT

SEQ ID NO: 1150 - protein, 78 aa, Homo sapiens
LDVLQMKEEDVLKFLAAGTHLGGTNLDFQMEQYIYKRKSDGIYIINLKRTWEKLLLAARAIVAIENPADVSVISSRNT

SEQ ID NO: 1151 - protein, 115 aa, Homo sapiens
TLSPDRMKFISTSLLLMLLVSSLSPVQGVLEVYYTSLRCRCVQESSVFIPRRFIDRIQILPRGNGCPRKEIIVWKKNKSIVCVDPQAEWIQRMMEVLRKRSSSTLPVPVFKRKIP

SEQ ID NO: 1152 - protein, 55 aa, Homo sapiens; identical to SEQ ID NO: 1144

SEQ ID NO: 1153 - protein, 51 aa, Homo sapiens
PHAYLYGEVLFPGKDLTKHKTKIQSRDKGRMQVFLVEISASGNLSLKHWNW

SEQ ID NO: 1154 - protein, 59 aa, Homo sapiens [sequence omitted]

SEQ ID NO: 1155 - protein, 110 aa, Homo sapiens
EQRDLHTETPSWAPGTMAPLKMLALVTLLLGASLQHIHAARGTNVGRECCLEYFKGAIPLRKLKTWYQTSEDCSRDAIVFVTVQGRAICSDPNNKRVKNAVKYLQSLERS

SEQ ID NO: 1156 - protein, 145 aa, Homo sapiens
PPLDPGAQGGGGEHRRWRSQVVPGDSQESGVRRLQDLSRLCRYLTAFFTLLLLGSEQMALPCTVTKTMASLEQSSDVWYHVFSFLRGMAPLKYSRQHSRPTLVPRAAWMCCREAPRRRVTRASIFSGAMVPGAQEGVSVCRSLCS

SEQ ID NO: 1157 - protein, 132 aa, Homo sapiens
TPTVEVPGSPGRQSGVWGEEASRPLKALQVFNCILHSLVVGVRTDGPALHSYKNDGIPGAVLRCLVPRLQLSKGNGSLEVLQAALPAHIGPSSCVDVLQRSPQEEGNQGQHLQWGHGARSPGGSLCVQVPLL

SEQ ID NO: 1158 - protein, 174 aa, Homo sapiens
ALAPGPVLFSSMVCLRLPGGSCMAVLTVTLMVLSSPLALAGDTRPRFLEYSTSECHFFNGTERVRFLDRYFYNQEEYVRFDSDVGEFRAVTELGRPDEEYWNSQKDFLEDRRAAVDTYCRHNYGVVESFTVQRRVHPKVTVYPSKTQPLQHHNLLVCSVSGFYPGSIEVRWFRN

SEQ ID NO: 1159 - protein, 56 aa, Homo sapiens; identical to SEQ ID NO: 794

SEQ ID NO: 1160 - protein, 52 aa, Homo sapiens
SGPWSCPVLQHGVSEAPWRLLHGSSDSDTDGAELPTGFGWGHQTTFLGVLYV

SEQ ID NO: 1161 - protein, 54 aa, Homo sapiens
HSDVEYSKKRGLVSPAKASGELSTISVTVRTAMQEPPGSLRHTMLENRTGPGAR

SEQ ID NO: 1162 - protein, 70 aa, Homo sapiens
SSPQPRSCVCSRCPPRPACLPGSPSGCSSTPHQAAPAPSPPGTPPRRCRSARTPLGYRSICPGTAPAPSH

SEQ ID NO: 1163 - protein, 50 aa, Homo sapiens
STPRNVVWCPQPKPVGSSAPSVSLSELPCRSLQGASDTPCWRTGQDQGPE

SEQ ID NO: 1164 - protein, 143 aa, Homo sapiens
RIHSHLRMDSPLHCEALHNPVVVSAVGVHRGPPVFQEVLLAVPVLLIRPPQLRHRPELPHVAVEAHVLLLVIEVSVQEPHPLRPIEEMTLRRRVLQETWSGVPSQSQWGAQHHQCHCQNCHAGASREPQTHHAGEQDRTRGQS

SEQ ID NO: 1165 - protein, 63 aa, Homo sapiens [sequence omitted]

SEQ ID NO: 1166 - protein, 50 aa, Homo sapiens
  variant (1)...(50): Xaa = Any amino acid
YICEYGLSFLADQISRRLLYTXEVHSYRKFKKSTLSFLSNSSEVMGSCSS

SEQ ID NO: 1167 - protein, 115 aa, Homo sapiens; identical to SEQ ID NO: 1143

SEQ ID NO: 1168 - protein, 55 aa, Homo sapiens; identical to SEQ ID NO: 1144

SEQ ID NO: 1169 - protein, 51 aa, Homo sapiens; identical to SEQ ID NO: 1145

SEQ ID NO: 1170 - protein, 117 aa, Homo sapiens
AAMARGPKKHLKRVAAPKHWMLDKLTGVFAPRPSTGPHKLRECLPLIIFLRNRLKYALTGDEVKKICMQRFIKIDGKVRTDITYPAGFMDVISIDKTGENFRLIYDTKGRFAVHRIT

SEQ ID NO: 1171 - protein, 117 aa, Homo sapiens
CNTMYSKATLGVIDQTEILSRLVNADDIHESSRVGYISSDLAIDFNEPLHANLLYFISCQGILKSVPQENDEGETLSQLVGTGGWTRSKHTGQFIQHPMLWSCHPLQMLLGTTSHGC

SEQ ID NO: 1172 - protein, 83 aa, Homo sapiens
VISVRTLPSILMNRCMQIFFTSSPVRAYLSLFLRKMMRGRHSLNLWGPVDGRGANTPVNLSSIQCFGAATRFRCFLGPRAMAA

SEQ ID NO: 1173 - protein, 170 aa, Homo sapiens
CYSFASMGMLEARIRILTNNSQTPILSPQEVVSCSQYAQGCDGGFPYLIAGKYAQDFGLVEEACFPYTGTDSPCKMKEDCFRYYSSEYHYVGGFYGGCNEALMKLELVHHGPMAVAFEVYDDFLHYKKGIYHHTGLRDPFNPFELTNHAVLLVGYGTDSASGMDYWIVKN

SEQ ID NO: 1174 - protein, 91 aa, Homo sapiens
KGLLDQCGGRSPFCSGGSHHILQKQLPWAHDGPTQASSGLHCSLHRNLLHSGTQRSNNESSLPSFCMENQCLCRGSKLLPPAQNLGRTFLQ

SEQ ID NO: 1175 - protein, 109 aa, Homo sapiens [sequence omitted]

SEQ ID NO: 1176 - protein, 51 aa, Homo sapiens; identical to SEQ ID NO: 1145

SEQ ID NO: 1177 - protein, 78 aa, Homo sapiens
RCRCVQESSVFIPRRFIDRIQILPRGSGCPRKEIIVWKKNKSIVCVGPQAEWIQRMMEVLRKRSSSTLPVPVFKRKIP

SEQ ID NO: 1178 - protein, 53 aa, Homo sapiens
IFSRKKNFPIQISMRLCKNNLVEADGANSSFFTHSTLYTLGVCILIHQGGKFL

SEQ ID NO: 1179 - protein, 55 aa, Homo sapiens; identical to SEQ ID NO: 1144

SEQ ID NO: 1180 - protein, 99 aa, Homo sapiens
LSFLEVLCTYAPHLYLAFAWSDHSSFSLTLNVENVAIVAACVVTLLLLSNFLTLKKGRMSASECDFLLTCSLDRLFSIVFFLSFSPSTTRETAPDGKDI

SEQ ID NO: 1181 - protein, 57 aa, Homo sapiens
YFFCHFLHQQPGRLHLMEKIYDCFMTFLNYLFFIPHLRFWWSPFCIIVLRMIKKNNN

SEQ ID NO: 1182 - protein, 87 aa, Homo sapiens
SSHISFPSGAVSLVVDGENDKKNTILKSLSKEQVSRKSHSEALILPFFSVRKLLKRRSVTTQAATMATFSTFNVREKELWSLHAKAR

SEQ ID NO: 1183 - protein, 53 aa, Homo sapiens
AMLFLQKTDGCWLFRASLMGCGNSKNVPQCQPCRKINGMGSVLSLVVIFFYHP

SEQ ID NO: 1184 - protein, 59 aa, Homo sapiens
STHSAFLQCKKVAQKKKRDNTSCYNGYILYIQCKREGAMVTPCKGQIEMWCVCAEYLKK

SEQ ID NO: 1185 - protein, 115 aa, Homo sapiens; identical to SEQ ID NO: 1143

SEQ ID NO: 1186 - protein, 55 aa, Homo sapiens; identical to SEQ ID NO: 1144

SEQ ID NO: 1187 - protein, 51 aa, Homo sapiens; identical to SEQ ID NO: 1145

SEQ ID NO: 1188 - protein, 98 aa, Homo sapiens
  variant (1)...(98): Xaa = Any amino acid
PNCLSNVCINCESQXXQLLSRIYSLTSNKQALRDTESQIQILPMGIKRLRLSPHLENYLHHKYIITGSLYEADTKCYRHSQNIILGNNVIKMPNLSQQ

SEQ ID NO: 1189 - protein, 142 aa, Homo sapiens
  variant (1)...(142): Xaa = Any amino acid
WTXLEGVEVQTDYVPLLNSLAAYGWQLTCVLPTPVVKTTSEGSVSTKQIVFLQRPCLPQKIKKKESKFQWRFSREEMHNRQMRKSKGKLSARDKQQAEENEKNLEDQSSKAGDMGNCVSGQQQEGGVSEEMKGPVQEDKGEQ

SEQ ID NO: 1190 - protein, 64 aa, Homo sapiens
TRWRPMAGSSPVCYQLPSSRLPARGVYPPSRLSFFRDLVYLRKSRRRNRSFSGDSPEKKCTTGR

SEQ ID NO: 1191 - protein, 86 aa, Homo sapiens
  variant (1)...(86): Xaa = Any amino acid
DXPGRCRSADRLRAPAELAGGLWLAAHLCATNSRRQDYQRGECIHQADCLSSETLSTSENQEEGIEVSVAILQRRNAQQADEEIKR

SEQ ID NO: 1192 - protein, 73 aa, Homo sapiens
CSPLSSWTGPFISSETPPSCCCPETQFPMSPALEDWSSKFFSFSSACCLSLALSLPFDFLICLLCISSLENRH

SEQ ID NO: 1193 - protein, 52 aa, Homo sapiens
VLPCPLGQGPSSPRRLHPPAAVLKHSFPCLQLWKTGLLSSSHFLLLVVCLWH

SEQ ID NO: 1194 - protein, 115 aa, Homo sapiens
  variant (1)...(115): Xaa = Any amino acid
TLPPDRMKFISTSLLLMLLVSSLSPVQGVLEVYYTSLRCRCVQXSSVFIPXRFIDRIQILPRGNGCPRKEIIVWKKNKSIVCVDPQAEWIQRMMEVLRKRSSSTLPVPVFKRKIP

SEQ ID NO: 1195 - protein, 70 aa, Homo sapiens
  variant (1)...(70): Xaa = Any amino acid
LPPFLSELFLLHITAATTAPVITAPRRTRPAMMPTMGMVGWEDSSHLXVRGLGRPSCCTWQVYLCSSPEG

SEQ ID NO: 1196 - protein, 63 aa, Homo sapiens
  variant (1)...(63): Xaa = Any amino acid
ALPPPHHGSDHSSSDHSSKENQASNDAHDGDGGLGRQLPSXGEGLGQTLMLHMAGVSLLLSRR

SEQ ID NO: 1197 - protein, 50 aa, Homo sapiens
  variant (1)...(50): Xaa = Any amino acid
GSAQAPHXEMGAVFPAHHPHRGHHCWPGSPWSCDHWSCGRCRDVEEEELR

SEQ ID NO: 1198 - protein, 92 aa, Homo sapiens
  variant (1)...(92): Xaa = Any amino acid
PSGEEQRYTCHVQHEGLPKPLTXRWELSSQPTIPIVGIIAGLVLLGAVITGAVVAAVMWRRKSSDRKGGSYTQAASSDSAQGSDVSLTACKV

SEQ ID NO: 1199 - protein, 55 aa, Homo sapiens
  variant (1)...(55): Xaa = Any amino acid
EKEVLQLYQFQCLRERFPDADISTKNTCILPLSLLWILVLXLVKSFPGKRTSPYK

SEQ ID NO: 1200 - protein, 115 aa, Homo sapiens; identical to SEQ ID NO: 1143

SEQ ID NO: 1201 - protein, 51 aa, Homo sapiens
  variant (1)...(51): Xaa = Any amino acid
SHAYLYGEVLFPGKDLTKXKTKIQSRDKGRMQVFLVEISASGNLSLKHWNW

SEQ ID NO: 1202 - protein, 115 aa, Homo sapiens; identical to SEQ ID NO: 1143

SEQ ID NO: 1203 - protein, 55 aa, Homo sapiens; identical to SEQ ID NO: 1144

SEQ ID NO: 1204 - protein, 51 aa, Homo sapiens; identical to SEQ ID NO: 1145

SEQ ID NO: 1205 - protein, 50 aa, Homo sapiens
RIGFSHQGYNCWWWCHSTHPQISDWEERTTEDCLKDAWIPCYLRTLNTLT

SEQ ID NO: 1206 - protein, 134 aa, Homo sapiens
ASAEFEMAGGKAGKDSGKAKTKAVSRSQRAGLQFPVGRIHRHLKSRTTSHGRVGATAAVYSAAILEYLTAEVLELAGNASKDLKVKRITPRHLQLAIRGDEELDSLIKATIAGGGVIPHIHKSLIGKKGQQKTV

SEQ ID NO: 1207 - protein, 67 aa, Homo sapiens
RCDEGVGGGISPWVRLAFSLPCLLELQRNSKWLAVRLERTPERPRQRRFPARREPACSSQWAVFIDT

SEQ ID NO: 1208 - protein, 60 aa, Homo sapiens
DNKESRHPLDSLLLSFLPNQRFVDVWNDTTTSNCSLDERIQFFISTNSKLQVTRGNTLYL

SEQ ID NO: 1209 - protein, 64 aa, Homo sapiens
IRPTGNCKPALCERETAFVLAFPESFPALPPAISNSAEAQASKAEKRLIGPTVRSHHLLLRRTA

SEQ ID NO: 1210 - protein, 53 aa, Homo sapiens
ILGVDEYGPLGTASRLSASGKPPLSWPFRSPFQPYRQPFRIPLKLKQARQRKG

SEQ ID NO: 1211 - protein, 99 aa, Homo sapiens
  variant (1)...(99): Xaa = Any amino acid
PPLDPGAQGGGGEHQRWRSQVVPGDSQESGVRRLQDLSRLCRYLTAFFTLLLLGSEQMALPCTVTKTMXSLEQXXDXWXHVFSFLXGMAPLKYSRXALP

SEQ ID NO: 1212 - protein, 86 aa, Homo sapiens
  variant (1)...(86): Xaa = Any amino acid
TPTVEVPGSPGRQSGVWGEEASRPLKALQVFNCILHSLVVGVRTDGPALHSYKNDGXPGAXXRXLXPRLQLSXGNGSLEVLQAXTP

SEQ ID NO: 1213 - protein, 64 aa, Homo sapiens
  variant (1)...(64): Xaa = Any amino acid
GSXCLEYFKGAIPXRKLKTWXQXSXXCSRXAIVFVTVQGRAICSDPNNKRVKNAVKYLQSLERS

SEQ ID NO: 1214 - protein, 84 aa, Homo sapiens
PPLDPGAQGGGGEHQRWRSQVVPGDSQESGVRRLQDLSRLCRYLTAFFTLLLLGSEQMALPCTVTKTMASLEQSSDVWYHVFSF

SEQ ID NO: 1215 - protein, 71 aa, Homo sapiens
TPTVEVPGSPGRQSGVWGEEASRPLKALQVFNCILHSLVVGVRTDGPALHSYKNDGIPGAVLRCLVPRLQL

SEQ ID NO: 1216 - protein, 199 aa, Homo sapiens
HLIYKCGGIDKRTIEKFGKEAAEMGKGSFKYAWVLDKLKAERERGITIDISLWKFETSKYYVTIIDAPGHRDFIKNMITGTSQADCAVLIVAAGVGEFEAGISKNGQTREHALLAYTLGVKQLIVGVNKMDSTEPPYSQKRYEEIVKEVSTYIKKIGYNPDTVAFVPISGWNGDNMLEPSANMPWFKGWKVTRKDGNAS

SEQ ID NO: 1217 - protein, 76 aa, Homo sapiens
TGIAILTGDFPSLEPRHVSTWLQHVVTIPTRNWHKCYCVGVVANFLNVSADFLNNFLISLLAVGWLSGIHFVNTDN

SEQ ID NO: 1218 - protein, 122 aa, Homo sapiens
LFHTQCVSQKGMLSGLPILGDTSFKFTNTSSNNQDSTVSLRCPCNHVFDKVSVSWGINDSHIVLAGLKFPQGDINGDTTFTLSFQFIQDPGILEGALSHLSSLLPKFFNGSFVDATAFIDQM

SEQ ID NO: 1219 - protein, 56 aa, Homo sapiens
YLLVSNFHKEISMVIPRSRSAFSLSKTQAYLKEPFPISAASFPNFSMVLLSMPPHL

SEQ ID NO: 1220 - protein, 62 aa, Homo sapiens
VFLSPWVKSESGSLCLSVLVYCWSESKFLIKAVDLALTVYADIGETIWLFQTSQDLSKKTWL

SEQ ID NO: 1221 - protein, 86 aa, Homo sapiens
EPSQQLLSRIYSLTSNKQALRDTESQIQILPMGIKRLRLSPHLENYLHHKYIITGSLYEADTKCYRHSQNIILGNNVIKMPNLSQQ

SEQ ID NO: 1222 - protein, 95 aa, Homo sapiens
  variant (1)...(95): Xaa = Any amino acid
PLXVALAQRKEERQAHLTNQYMQRMASVRAVPNPVINPYQPAPPSGYFMAAIPQTQNXAAYYPPSQIAQLRPSPRWTAQGARPHPFQNMPGAIRP

SEQ ID NO: 1223 - protein, 115 aa, Homo sapiens
TLPPDRMKFISTSLLLMLLVSSLSPVQGVLEVYYTSLGCRCVQESSVFIPRRFIDRIQILPRGNGCPRKEIIVWKKNKSIVCVDPQAEWIQRMMEVLRKRSFSTLPVPVFKRKIP

SEQ ID NO: 1224 - protein, 51 aa, Homo sapiens
IFSRKKNFPIQISMRLCKNNLAEADGANSSFFTHSTLYTLGVCILIHQGGK

SEQ ID NO: 1225 - protein, 64 aa, Homo sapiens
SSSRHLCFSCCWSAASLQSKVFWRSITQAWGVDVSKRAQSLSLDASLIEFKSCPVGMVVQEKKS

SEQ ID NO: 1226 - protein, 55 aa, Homo sapiens
EKEVFQLYQFQCLRERFPDADISTKNTCILPLSLLWILVLCLVKSFPGKRTSPYK

SEQ ID NO: 1227 - protein, 51 aa, Homo sapiens; identical to SEQ ID NO: 1145

SEQ ID NO: 1228 - protein, 73 aa, Homo sapiens
YSIFFCHFLHQQPGRLHLMEKIYDCFMTFLNYLFFIPHLRFWWSPFCIIVLRMIKKITTRDNTEPIPFIFLQG

SEQ ID NO: 1229 - protein, 70 aa, Homo sapiens
SFSLTLNVENVAIVAACVVTLLLLSNFLTLKKGRMSASECDFLLTCSLDRLFSIVFFFVIFSINNQGDCT

SEQ ID NO: 1230 - protein, 82 aa, Homo sapiens
ECHEAVIYLFHQVQSPWLLMEKMTKKNTILKSLSKEQVSRKSHSEALILPFFSVRKLLKRRSVTTQAATMATFSTFNVREKE

SEQ ID NO: 1231 - protein, 72 aa, Homo sapiens
AMLFLQKTDGCWLFRASLMGCGNSKNVPQCQPCRKINGMGSVLSLVVIFFIILKTMMQKGLHQKRRCGIKKR

SEQ ID NO: 1232 - protein, 50 aa, Homo sapiens
YSIFFCHFLHQQPGRLHLMEKIYDCFMTFLNYLFLFHIYVFGGVPFASLF

SEQ ID NO: 1233 - protein, 94 aa, Homo sapiens
LSFLEVLCTYAPHLYLAFAWSDHSSFSLTLNVENVAIVAACVVTLLLLSNFLTLKKGRMSASECDFLLTCSLDRLFSIVFFFVIFSINNQGDCT

SEQ ID NO: 1234 - protein, 53 aa, Homo sapiens
  variant (1)...(53): Xaa = Any amino acid
XMLFLQKTDGCWLFRASLMGCGNSKNVPQCQPCRKINGMGSVLSLVVIFFYHP

SEQ ID NO: 1235 - protein, 59 aa, Homo sapiens; identical to SEQ ID NO: 1184

SEQ ID NO: 1236 - protein, 91 aa, Homo sapiens
ECHEAVIYLFHQVQSPWLLMEKMTKKNTILKSLSKEQVSRKSHSEALILPFFSVRKLLKRRSVTTQAATMATFSTFNVREKELWSLHAKAR

SEQ ID NO: 1237 - protein, 55 aa, Homo sapiens
PRLLPAPPWRRATSCLTARSSPLAMSGSAALRHSSSLPSWAWSPVASTKLPSTPS

SEQ ID NO: 1238 - protein, 54 aa, Homo sapiens
RSRSLLLLSASTPCGSAAPSWPRCPPSSRCGSASRSMTSPAPPSSTANASRRTM

SEQ ID NO: 1239 - protein, 147 aa, Homo sapiens
TAASSSSLEKSYELPDGQVITIGNERFRCPEALFQPSFLGMESCGIHETTFNSIMKCDVDIRKDLYANTVLSGGTTMYPGIADRMQKEITALAPSTMKIKIIAPPERKYSVWIGGSILASLSTFQQMWISKQEYDESGPSIVHRKCF

SEQ ID NO: 1240 - protein, 135 aa, Homo sapiens
KHLRWTMEGPDSSYSCLLIHICWKVDSEARMEPPIHTEYLRSGGAMILIFIVLGARAVISFCILSAMPGYMVVPPDSTVLAYRSLRMSTSHFMMELKVVSWMPQDSMPRKEGWKSASGQRNRSLPMVMTWPSGSS

SEQ ID NO: 1241 - protein, 151 aa, Homo sapiens
IVRLEAFAVDDGGAGLVILLLADPHLLEGGQRGQDGAADPHGVLALRRSNDLDLHCAGCQGSDLLLHPVGNARVHGGAARQHCVGVQVFADVHVTLHDGVEGSFVDATGLHAQEGRLEECLRAAEPLIANGDDLAVRQLVALLQGGAGSSR

SEQ ID NO: 1242 - protein, 85 aa, Homo sapiens
  variant (1)...(85): Xaa = Any amino acid
PPLDPGAQGGGGEHQRWRSQVVPGDSQESGVRRLQDLSRLCRYLTAFFTLLLXGSEQMALPCXVTKTMASLEQSSDVWYHVFSFL

SEQ ID NO: 1243 - protein, 72 aa, Homo sapiens
  variant (1)...(72): Xaa = Any amino acid
TPTVEVPGSPGRQSGVWGEEASRPLKALQVFNCILHSLVXGVRTDGPALXSYKNDGIPGAVLRCLVPRLQLS

SEQ ID NO: 1244 - protein, 50 aa, Homo sapiens
  variant (1)...(50): Xaa = Any amino acid
RKLKTWYQTSEDCSRDAIVFVTXQGRAICSDPXNKRVKNAVKYLQSLERS

SEQ ID NO: 1245 - protein, 115 aa, Homo sapiens; identical to SEQ ID NO: 1143

SEQ ID NO: 1246 - protein, 55 aa, Homo sapiens; identical to SEQ ID NO: 1144

SEQ ID NO: 1247 - protein, 51 aa, Homo sapiens
  variant (1)...(51): Xaa = Any amino acid
XHAYLYGEVLFPGKDLTKHKTKIQSRDKGRMQVFLVEISASGNLSLKHWNW

SEQ ID NO: 1248 - protein, 62 aa, Homo sapiens
  variant (1)...(62): Xaa = Any amino acid
VFLSPWVKSESGSLCXSVLVYCWSESKFLIKAVDLALTVYAXIGETIWLFQTSQDXSKXTWL

SEQ ID NO: 1249 - protein, 86 aa, Homo sapiens
  variant (1)...(86): Xaa = Any amino acid
EPSQQLLSRIYSLTSNKQALXDTESQIQILPMGIKRLRLSPHLENYLHHKYIITGSLYEADTKCYRHSQNIILGNNVIKMPNLSQQ

SEQ ID NO: 1250 - protein, 69 aa, Homo sapiens [sequence omitted]

SEQ ID NO: 1251 - protein, 102 aa, Homo sapiens
LPTSPSALASYSPSTTDMAQSLALSLLILVLAFGIPRTQGSDGGAQDCCLKYSQRKIPAKVVRSYRKQEPSLGCSIPAILFLPRKRSQAELCADPKELWVQQ

SEQ ID NO: 1252 - protein, 77 aa, Homo sapiens [sequence omitted]

SEQ ID NO: 1253 - protein, 60 aa, Homo sapiens [sequence omitted]

SEQ ID NO: 1254 - protein, 115 aa, Homo sapiens; identical to SEQ ID NO: 1143

SEQ ID NO: 1255 - protein, 55 aa, Homo sapiens
  variant (1)...(55): Xaa = Any amino acid
EKEVLQLYQFQCLRERFPDADISTKNTCILPLSLLWILVLCLVKSFPGKRXSPYK

SEQ ID NO: 1256 - protein, 51 aa, Homo sapiens
  variant (1)...(51): Xaa = Any amino acid
SHAYLYGEXLFPGKDLTKHKTKIQSRDKGRMQVFLVEISASGNLSLKHWNW

SEQ ID NO: 1257 - protein, 64 aa, Homo sapiens
PNHFFFYFNSLFFFSSADRRTMLDLGLEHVLFHSFSTMPAITSSWKKAKISITDKMPKNRDCML

SEQ ID NO: 1258 - protein, 59 aa, Homo sapiens
SWGGSGKFVSVSSSSSSWIGIISMSSSFFGWEDVSVSPTTSSFISIVCSFFLLLTGELC

SEQ ID NO: 1259 - protein, 71 aa, Homo sapiens
HSSPVSRRKKEQTIEIKEEVVGLTETSSQPKNEEDIEIIPIQEEEEEETETNFPEPPQDQESSPIENDSSP

SEQ ID NO: 1260 - protein, 94 aa, Homo sapiens
  variant (1)...(94): Xaa = Any amino acid
KMESXNFIRAHTPYINIXNYEPANPXEKNSPSTQYCYSIQSLFLGILSVMLIFAFFQELVIAGIVENEWKRTCSRPKSNIVLLSAEEKKNRLLK

SEQ ID NO: 1261 - protein, 164 aa, Homo sapiens
LNMLGEKLLGPNASPDGLIPWTRFCKENINDKNFPFWLWIESILELIKKHLLPLWNDGCIMGFISKERERALLKDQQPGTFLLRFSESSREGAITFTWVERSQNGGEPDFHAVEPYTKKELSAVTFPDIIRNYKVMAAENIPENPLKYLYPNIDKDHAFGKYYS

SEQ ID NO: 1262 - protein, 72 aa, Homo sapiens
RTSSRGPSCCGSVRAPGKGPSHSHGWSGPRTEANLTSMRLNPTRRKNFLLLLSLTSFAITKSWLLRIFLRIP

SEQ ID NO: 1263 - protein, 120 aa, Homo sapiens
GVILSKGMVFVNIWIQILQGILRNILSSHDFVIANDVRESNSRKFFLRVGFNRMEVRFASVLGPLHPCECDGPFPGALTEPQQEGPRLLVLQQGTLSLLADEAHDAPIIPEREQVFFNEF

SEQ ID NO: 1264 - protein, 114 aa, Homo sapiens
GSTAWKSGSPPFWDRSTHVNVMAPSRELSLNRSRKVPGCWSFNRARSRSLLMKPMMHPSFQRGSRCFLMSSRMLSIQSQKGKFLSFIFSLQNLVHGMRPSGLALGPRSFSPNMF

SEQ ID NO: 1265 - protein, 88 aa, Homo sapiens
TLPPDRMKFISTSLLLMLLVSSLSPVQGVLEVYYTSLRCRCVQESSVFIPRRFIDRIQILPRGNGCPRKEIIVWKKNKSIVCVDPQAE

SEQ ID NO: 1266 - protein, 75 aa, Homo sapiens
CVQESSVFIPRRFIDRIQILPRGNGCPRKEIIVWKKNKSIVCVDPQAEWIQRMMEVLRKRSSSTLPVPVFKRKIP

SEQ ID NO: 1267 - protein, 53 aa, Homo sapiens
IFSRKKNFPIQISMRLCKNNLAEADGANSSFFTHSTLYTLGVCILIHQGGKFL

SEQ ID NO: 1268 - protein, 55 aa, Homo sapiens; identical to SEQ ID NO: 1144

SEQ ID NO: 1269 - protein, 52 aa, Homo sapiens
DYVKITLQKLMGQTQASSLTAPYIHLEFAFLFIREESFFENSYSVISNTGLF

SEQ ID NO: 1270 - protein, 51 aa, Homo sapiens; identical to SEQ ID NO: 1145

SEQ ID NO: 1271 - protein, 112 aa, Homo sapiens
LPEQRDLHTETPSWAPGTMAPLKMLALVTLLLGASLQHIHAARGTNVGRECCLEYFKGAIPLRKLKTWYQTSEDCSRDAIVFVTVQGRAICSDPNNKRVKNAVKYLQSLERS

SEQ ID NO: 1272 - protein, 59 aa, Homo sapiens
AEGPAHRDSLLGSWHHGPTEDAGPGHPPPGGFSAAHPRSSRDQCGPGVLPGVLQGSHSP

SEQ ID NO: 1273 - protein, 146 aa, Homo sapiens
PPLDPGAQGGGGEHQRWRSQVVPGDSQESGVRRLQDLSRLCRYLTAFFTLLLLGSEQMALPCTVTKTMASLEQSSDVWYHVFSFLRGMAPLKYSRQHSRPTLVPRAAWMCCREAPRRRVTRASIFSGAMVPGAQEGVSVCRSLCSG

SEQ ID NO: 1274 - protein, 134 aa, Homo sapiens
TPTVEVPGSPGRQSGVWGEEASRPLKALQVFNCILHSLVVGVRTDGPALHSYKNDGIPGAVLRCLVPRLQLSKGNGSLEVLQAALPAHIGPSSCVDVLQRSPQEEGDQGQHLQWGHGARSPGGSLCVQVPLLRE

SEQ ID NO: 1275 - protein, 115 aa, Homo sapiens
  variant (1)...(115): Xaa = Any amino acid
PPLDPGAQGGGGEHQRWRSQVVPGDSQESGVRRLQDLSRLCRYLTAFFTLLXLGSEQMALPCTVTKTMASLEQSSDVWYHVFSFLRGMAPLKYSRQHSRPTLVPRAAWMCCXXXP

SEQ ID NO: 1276 - protein, 102 aa, Homo sapiens
  variant (1)...(102): Xaa = Any amino acid
TPTVEVPGSPGRQSGVWGEEASRPLKALQVFNCILHSLXVGVRTDGPALHSYKNDGIPGAVLRCLVPRLQLSKGNGSLEVLQAALPAHIGPSSCVDVLXXXP

SEQ ID NO: 1277 - protein, 80 aa, Homo sapiens
  variant (1)...(80): Xaa = Any amino acid
GXXXQHIHAARGTNVGRECCLEYFKGAIPLRKLKTWYQTSEDCSRDAIVFVTVQGRAICSDPNXKRVKNAVKYLQSLERS

SEQ ID NO: 1278 - protein, 64 aa, Homo sapiens
  variant (1)...(64): Xaa = Any amino acid
MIITCVSXTXCXLWLLVIYXLPVXXKVXGXXTXKFXKHLXFSXKLXEGTREFHXXIKXSXGIST

SEQ ID NO: 1279 - protein, 79 aa, Homo sapiens
  variant (1)...(79): Xaa = Any amino acid
QXKXFKLQGXQXNTXLXXKXICFESXCMYIYMINDYNVCVXDXMXSLVVSYILXTCXXQGKXXTXXXIYXTLXFFXEVX

SEQ ID NO: 1280 - protein, 78 aa, Homo sapiens
  variant (1)...(78): Xaa = Any amino acid
NSLVPSXNFXEKXKCXINXXXCXXLTLXXTGXQYITNNQRXHXVXDTHVIIIYHIYIHAXTFKANXFXXQXSIXLXTL

SEQ ID NO: 1281 - protein, 191 aa, Homo sapiens
PKEVRQLAEDFLKDYIHINIGALELSANHNILQIVDVCHDVEKDEKLIRLMEEIMSEKENKTIVFVETKRRCDELTRKMRRDGWPAMGIHGDKSQQERDWVLNEFKHGKAPILIATDVASRGLDVEDVKFVINYDYPNSSEDYIHRIGRTARSTKTGTAYTFFTPNNIKQVSDLISVLREANQAINPKLLQ

SEQ ID NO: 1282 - protein, 51 aa, Homo sapiens
LKQLGINCLISFTKHRDKVAHLLYVIRCKESVCCACFGTASSSSNSMNIIL

SEQ ID NO: 1283 - protein, 51 aa, Homo sapiens
NPVTLLLTLVTMDTHGRPPISPHFSGKLITSSFGFHKNNGFILLLTHDLFH

SEQ ID NO: 1284 - protein, 55 aa, Homo sapiens
LLSPWIPMAGHPSLLIFLVSSSHLLLVSTKTMVLFSFSLMISSIRRISFSSFSTS

SEQ ID NO: 1285 - protein, 107 aa, Homo sapiens
DLHTETPSWAPGTMALLKMLALVTLLLGASLQHIHAARGTNVGRECCLEYFKGAIPLRKLKTWYQTSEDCSRDAIVFVTVQGRAICSDPNNKRVKNAVKYLQSLERS

SEQ ID NO: 1286 - protein, 56 aa, Homo sapiens
PAHRDSLLGSWHHGPTEDAGPGHPPPGGFSAAHPRSSRDQCGPGVLPGVLQGSHSP

SEQ ID NO: 1287 - protein, 141 aa, Homo sapiens
PPLDPGAQGGGGEHQRWRSQVVPGDSQESGVRRLQDLSRLCRYLTAFFTLLLLGSEQMALPCTVTKTMASLEQSSDVWYHVFSFLRGMAPLKYSRQHSRPTLVPRAAWMCCREAPRRRVTRASIFSRAMVPGAQEGVSVCR

SEQ ID NO: 1288 - protein, 113 aa, Homo sapiens
TPTVEVPGSPGRQSGVWGEEASRPLKALQVFNCILHSLVVGVRTDGPALHSYKNDGIPGAVLRCLVPRLQLSKGNGSLEVLQAALPAHIGPSSCVDVLQRSPQEEGDQGQHLQ

SEQ ID NO: 1289 - protein, 106 aa, Homo sapiens
ISTSLLLMLLVSSLSPVQGVLEVYYTSLRCRCVQESSVFIPRRFIDRIQILPRGNGCPRKEIIVWKKNKSIVCVDPQAEWIQRMMEVLRKRSSSTLPVPVFKRKIP

SEQ ID NO: 1290 - protein, 53 aa, Homo sapiens
IFSRKKNFPIQISMRLCKNNLAEADGANSSFFTHSTLYTLGVCILIHRGGKFL

SEQ ID NO: 1291 - protein, 55 aa, Homo sapiens; identical to SEQ ID NO: 1144

SEQ ID NO: 1292 - protein, 51 aa, Homo sapiens
DYVKITLQKLMGQTQASSLTAPYIHLEFAFLFIGEESFFENSYSVISNTGL

SEQ ID NO: 1293 - protein, 51 aa, Homo sapiens; identical to SEQ ID NO: 1145

SEQ ID NO: 1294 - protein, 74 aa, Homo sapiens
DPDCDLQWKETGRWEDDGRLRHQKGQLTLPGILLYWRVTTLGMGCWQGSKSLFLLISYSTNTSSDDFPKLMRMR

SEQ ID NO: 1295 - protein, 56 aa, Homo sapiens
SSVAQVKAMIETKTGIIPETQIVTCNGKRLEDGKMMADYGIRKGNLLFLASYCIGG

SEQ ID NO: 1296 - protein, 74 aa, Homo sapiens
LIVLESKKHRVGQYTSSYPSHPNLTLLISFSLILGNHQKMCSLSKRLKEISFLTPANTPCPGWSPSNTIRCQEE

SEQ ID NO: 1297 - protein, 115 aa, Homo sapiens
TLPPDRMKFISTSLLLMLLVSSLSPVQGVLEVYYTSLRCRCVQESSVFIPRRFIDRIQILPRGNGCPRKEIIVWKKNKSIACVDPQAEWIQRMMEVLRKRSSSTPPVPVFKRKIP

SEQ ID NO: 1298 - protein, 53 aa, Homo sapiens; identical to SEQ ID NO: 1267

SEQ ID NO: 1299 - protein, 55 aa, Homo sapiens
EKEVLQLHQFQCLRERFPDADISTKNTCILPLSLLWILVLCLVKSFPGKRTSPYK

SEQ ID NO: 1300 - protein, 53 aa, Homo sapiens [sequence omitted]

SEQ ID NO: 1301 - protein, 125 aa, Homo sapiens
RYQWVRCNPDSNSANCLEEKGPMFELLPGESNKIPRLRTDLFPKTRIQDLNRIFPLSEDYSGSGFGSGSGSGSGSGSGFLTEMEQDYQLVDESDAFHDNLRSLDRNLPSDSQDLGQHGLEEDFML

SEQ ID NO: 1302 - protein, 59 aa, Homo sapiens
SSESGKIRFKSWILVFGKRSVLRRGILLDSPGSSSNIGPFSSRQFAELLSGLQRTHWYL

SEQ ID NO: 1303 - protein, 100 aa, Homo sapiens
GCHGKHHFRLLVGNPVPFPLGSHSQILIQSRSRSRSLIQSSPQKVGRYDSSPGFSSLEKGQSSDGGSCWIHLEVVRTLVLFLQGSLQNYCLDCSAPIGTW

SEQ ID NO: 1304 - protein, 50 aa, Homo sapiens
SWEPGQVSVGTSLSRWQHSDWPCRRGWLSPLETKTGWLETVTTQVLRWSL

SEQ ID NO: 1305 - protein, 131 aa, Homo sapiens
PDSTGELVLSQSPATLSLSPGERATLSCRASQSVATYLGWSQQKPGQAPRIIIYDTSYRAAGIPARFTGSGSGTDFTLTVSSLEPEDFAVYYCHGRAKWPPSLTFGGGTKVEIKRTVAAPSVFIFPPSDEQ

SEQ ID NO: 1306 - protein, 53 aa, Homo sapiens
RLHRRTCVVTVSSHPVFVSRGESHPLLQGQSECCHLLRLVPTETWPGSQDHHL

SEQ ID NO: 1307 - protein, 78 aa, Homo sapiens
CPRWGTPRYWLGALYRNQQSSPTAPPGLLPLEYFPAAPHCSHSRQWRCSQTHRIHHHPQMLGPCRQEICGEIQGCGWF

SEQ ID NO: 1308 - protein, 134 aa, Homo sapiens [sequence omitted]

SEQ ID NO: 1309 - protein, 66 aa, Homo sapiens
ASSSPRIRLTSSFAFSVACLLWCMMPKVGNTQVLAGGTISESAKLTHCTTWAAASGVLPRSSSLLT

SEQ ID NO: 1310 - protein, 141 aa, Homo sapiens
QTNRTPEFLRKFPAGKVPAFEGDDGFCVFESNAIAYYVSNEELRGSTPEAAAQVVQWVSFADSDIVPPASTWVFPTLGIMHHNKQATENAKEEVRRILGLLDAYLKTRTFLVGERVTLVDITVVCTLLWLYKQVLEPSFHQ

SEQ ID NO: 1311 - protein, 61 aa, Homo sapiens
CHKRSLPICTYSQEEHLYGKDGSPVSLPYTLQGLSEASLMRCLKPGHGYKQLHGSKKFCPF

SEQ ID NO: 1312 - protein, 51 aa, Homo sapiens
SIFWGYDGLTFIRKYGFILIVASSSGGVNHFIFTLTWFEFLSHYCIYFAFP

SEQ ID NO: 1313 - protein, 101 aa, Homo sapiens; identical to SEQ ID NO: 930

SEQ ID NO: 1314 - protein, 150 aa, Homo sapiens; identical to SEQ ID NO: 928

SEQ ID NO: 1315 - protein, 115 aa, Homo sapiens; identical to SEQ ID NO: 1143

SEQ ID NO: 1316 - protein, 55 aa, Homo sapiens; identical to SEQ ID NO: 1144

SEQ ID NO: 1317 - protein, 51 aa, Homo sapiens; identical to SEQ ID NO: 1145

SEQ ID NO: 1318 - protein, 68 aa, Homo sapiens
PPAYAACHTGDRFSRRARRCWCGWKKGNRKQKKSLKESCHFLLVRIPDLGEVLESSSLFLLLPLLGLE

SEQ ID NO: 1319 - protein, 101 aa, Homo sapiens; identical to SEQ ID NO: 930

SEQ ID NO: 1320 - protein, 137 aa, Homo sapiens
YINIYNCEPANPSEKNSPSTQYCYSIQSLFLGILSVMLIFAFFQELVIAGIVENEWKRTCSRPKSNIVLLSAEEKKEQTIEIKEEVVGLTETSSQPKNEEDIEIIPIQEEEEEETETNFPEPPQDQESSPIENDSSP

SEQ ID NO: 1321 - protein, 59 aa, Homo sapiens
NKKAMLVECTVHIGGARLITIRLLASPVQSFLWKAVDFSLASLSSSVSTYRISRSQPYR

SEQ ID NO: 1322 - protein, 64 aa, Homo sapiens
TAKRSKIRRQCLWNVQCILAAHASLRFACLLLLFNRFFGRQWIFLLRLCLLQFRLIEFLDLSHI

SEQ ID NO: 1323 - protein, 57 aa, Homo sapiens
EGNACGMYSAYWRRTPHYDSPACFSCSIVSLEGSGFFSCVSVFFSFDLSNFSISAIS

SEQ ID NO: 1324 - protein, 51 aa, Homo sapiens
RRQRRKRKIHCLPKKRLNRRSKQANRNEACAANMHCTFHKHCLLILLLLAV

SEQ ID NO: 1325 - protein, 64 aa, Homo sapiens
  variant (1)...(64): Xaa = Any amino acid
LNILNXALLSVELLYFTFSAFGDHYLIEFVEIDFPDRSLFFNEQMIRNNLTPYMTMELNKLTLI

SEQ ID NO: 1326 - protein, 100 aa, Homo sapiens
LNKRGTNFQFVKLQSRKYWCLLPCEFFLRHAEKMYARDQKDGSKLCHVTCNKIFSSRFFLCWQIISPCSFHSLILAFRVTMIILPMWFLRKKDQFFVCSR

SEQ ID NO: 1327 - protein, 52 aa, Homo sapiens
NSKAESIGACYLVNSSLDMQRKCMQETKKMAPSYVMLPVIKSFLLDSFYVGR

SEQ ID NO: 1328 - protein, 59 aa, Homo sapiens; identical to SEQ ID NO: 1321

SEQ ID NO: 1329 - protein, 64 aa, Homo sapiens; identical to SEQ ID NO: 1322

SEQ ID NO: 1330 - protein, 57 aa, Homo sapiens; identical to SEQ ID NO: 1323

SEQ ID NO: 1331 - protein, 51 aa, Homo sapiens; identical to SEQ ID NO: 1324

SEQ ID NO: 1332 - protein, 50 aa, Homo sapiens
DRYWYSFIIETKRSALLDFPLFVLKGIKDCRFPALSSRGHYEQIKWKDKF

SEQ ID NO: 1333 - protein, 51 aa, Homo sapiens
WPREDRAGNLQSLIPFRTKSGKSSKADLLVSIIKEYQYRSQKRSVSLQGYF

SEQ ID NO: 1334 - protein, 90 aa, Homo sapiens
PKEVRQLAEDFLKDYIHINIGALELSANHNILQIVDVCHDVEKDEKLIRLMEEIMSEKENKTIVFVETKRRCDELTRKMRRDGWPAMGIH

SEQ ID NO: 1335 - protein, 52 aa, Homo sapiens
PWIPMAGHPSLLIFLVSSSHLLLVSTKTMVLFSFSLMISSIRRISFSSFSTS

SEQ ID NO: 1336 - protein, 166 aa, Homo sapiens
  variant (1)...(166): Xaa = Any amino acid
RQFVTATDVVRGNPKLNLAFIANLFNRYPALHKPENQDIDWGALEGETREERTFRNWMNSLGVNPRVNHLYSDLSDALVIFQLYEKIKVPVDWNRVNKPPYPKLGGNMKKLENCNYAVELGKNQAKFSLVGIGGQDLNEGNRTLTLALIWQLMRRYTLNILXEIGG

SEQ ID NO: 1337 - protein, 76 aa, Homo sapiens
LPNQGQCESAVSFIEILSTDANQGELRLILPQFYRVVTILKLLHIASQFGVWRFVYSVPVNRNFDLFIELEDDQGI

SEQ ID NO: 1338 - protein, 73 aa, Homo sapiens
VTVQMIDSRVNTQGVHPVPKCPLFSRLTFKSPPVNVLVLWFVQGRVSVKEVGNKSQVQLGVPSDNICGCDKLP

SEQ ID NO: 1339 - protein, 68 aa, Homo sapiens
LTRGLTPREFIQFLNVRSSLVSPSRAPQSMSWFSGLCRAGYLLKRLAIKAKFNLGFPRTTSVAVTNCR

SEQ ID NO: 1340 - protein, 60 aa, Homo sapiens
WRGSGLLPQVQPKEDSRQGCPQLPEAGTKLRLLHPSYPVLAPQALSGRAMCRPKGALGAA

SEQ ID NO: 1341 - protein, 95 aa, Homo sapiens
LASYSPSTTDMAQSLALSLLTLVLAFGIPRTQGSDGGAQDCCLKYSQRKIPAKVVRSYRKQEPSLGCSIPAILFLPRKRSQAELCADPKELWVQQ

SEQ ID NO: 1342 - protein, 50 aa, Homo sapiens
AWFLLPVAADNLGGNLPLAVLEATVLSPSITALGPGDAKGQNQGKEAQSQ

SEQ ID NO: 1343 - protein, 102 aa, Homo sapiens [sequence omitted]

SEQ ID NO: 1344 - protein, 60 aa, Homo sapiens; identical to SEQ ID NO: 1340

SEQ ID NO: 1345 - protein, 50 aa, Homo sapiens
AWFLLPVAADNLGGNLPLAVLEATVLSPSITALGPGDAKGQNQDKEAQSQ

SEQ ID NO: 1346 - protein, 76 aa, Homo sapiens
TKLVMMQKLLKCSRLVLALALILVLESSVQGYPTQRARYQWVRCNPDSNSANCLEEKGPMFELLPGESNKIPRLRT

SEQ ID NO: 1347 - protein, 68 aa, Homo sapiens
CRSYSNAVGLSWLLPSSWFWNPQFKVILRREPGTNGCAAIQTVILQTALKKKDQCSNYFQVNPTRSPV

SEQ ID NO: 1348 - protein, 87 aa, Homo sapiens
ILTLYSEPSFNTMVSFLRASRSPVRSMVIGPGALSQTRVSRVTTTLGAFGSVTTGPSPSSVFLYLIRLSSSLSISCSSFRDFCGGGL

SEQ ID NO: 1349 - protein, 55 aa, Homo sapiens
HNGFLFEGFQISSKVHGDWSRGTLTNQGEPGDNDIGGFRICHHRTISQQRFLVLN

SEQ ID NO: 1350 - protein, 120 aa, Homo sapiens
LKKPQSPHVEEDDDDELDSKLNYKPPPQKSLKELQEMDKDDESLIKYKKTLLGDGPVVTDPKAPNVVVTRLTLVCESAPGPITMDLTGDLEALKKETIVLKEGSEYRVKIHFKVNRDIVS

SEQ ID NO: 1351 - protein, 124 aa, Homo sapiens
IMHLSFVDNLNVEVLSVSLVHLILEKALDQSGLMILYATGNESALWNCKHQGWGKHNCDHAEDAGVICSKGADLSLRLVDGVTECSGRLEVRFQGEWGTICDDGWDSYDAAVACKQLGCPTAVP

SEQ ID NO: 1352 - protein, 69 aa, Homo sapiens
RGGNMCSGRIEIKFQGRWGTVCDDNFNIDHASVICRQLECGSAVSFSGSSNFGEGSGPIWFDDLICNRK

SEQ ID NO: 1353 - protein, 80 aa, Homo sapiens
LHLPVSGSDLLPLSKSLQHPQHDHSYAFPILDVCSSRELTHFRLHIRSSNQIGPEPSPKLDEPEKLTALPHSSCLQMTDA

SEQ ID NO: 1354 - protein, 59 aa, Homo sapiens
ESNKIPRLRTDLFPKTRIQDLNRIFPLSEDYSGSGFGSGSGSGSGSGSGFLTEMDKDSN

SEQ ID NO: 1355 - protein, 68 aa, Homo sapiens
SWKASLSSTSWNPCPFPLGSHSQILIQSRSRSRSLIQSSPQKVGRYDSSPGFSSLEKGQSSDGGSCWI

SEQ ID NO: 1356 - protein, 158 aa, Homo sapiens
  variant (1)...(158): Xaa = Any amino acid
MMQKLLKCSRVVLALALILVLESSVQGYPTQRARYQWVRCNPDSNSANCLEEKGPMFXLLPGESNKIPRLRTDLFPKTRIQDLNRIFXLSEDYSGSGFGSGSXSGSGSGSGFLTEMEQDYQLVDQSDAFHDNLRSLDRNLPSXSXDLGQHGLEEDFML

SEQ ID NO: 1357 - protein, 68 aa, Homo sapiens
  variant (1)...(68): Xaa = Any amino acid
CRSYSNAVGLSWLLPSSWFWNPQFKVILRREPGTNGCAAIQTVILQTALKKKDQCXNYFQVNPTRSPV

SEQ ID NO: 1358 - protein, 64 aa, Homo sapiens
  variant (1)...(64): Xaa = Any amino acid
SSEXGKIRFKSWILVFGKRSVLRRGILLDSPGSSXNIGPFSSRQFAELLSGLQRTHWYLALCVG

SEQ ID NO: 1359 - protein, 103 aa, Homo sapiens
  variant (1)...(103): Xaa = Any amino acid
GCHGKHHFGLLVGNPVPFPLGSHSQILIQXRSRSRSLIQSSPQKXGRYDSSPGFWSLEKGQSSDGGSCWIHLEVVXTLVLFLQGSLQNYCLDCSAPIGTWLSA

SEQ ID NO: 1360 - protein, 123 aa, Homo sapiens
  variant (1)...(123): Xaa = Any amino acid
VMMQKLLKCSRLVLALALILVLESSVQGYPTQRARYQWVRCNPDSNSANCLEEKGPMFELLPGESNKIPRLRTDLFPKTRIQDLNRIFXLSEDYSGSGFGSRSGSGSGSGSGFLTEMEXGLPN

SEQ ID NO: 1361 - protein, 68 aa, Homo sapiens; identical to SEQ ID NO: 1347

SEQ ID NO: 1362 - protein, 64 aa, Homo sapiens
  variant (1)...(64): Xaa = Any amino acid
SSEXGKIRFKSWILVFGKRSVLRRGILLDSPGSSSNIGPFSSRQFAELLSGLQRTHWYLALCVG

SEQ ID NO: 1363 - protein, 104 aa, Homo sapiens
  variant (1)...(104): Xaa = Any amino acid
GLSWKASLSSTSWVIXVPFPLGSHSQILIQSRSGSRSLIQSSPQKXGRYDSSPGFSSLEKGQSSDGGSCWIHLEVVRTLVLFLQGSLQNYCLDCSAPIGTWLSA

SEQ ID NO: 1364 - protein, 148 aa, Homo sapiens
  variant (1)...(148): Xaa = Any amino acid
TXXVMMQKLLKCSRLVLALALILVLESSVQGYPTQRARYQWVRCNPDSNSANCLEEKGPMXELLXGEXNXIPRLRTDLFPKTRIQDLNRIFPLSEDYSGSGFGSGSGSGSGSGSGFLTEMEQDYQLXDESDAFHDNLXSLDRNLPXDS

SEQ ID NO: 1365 - protein, 68 aa, Homo sapiens
  variant (1)...(68): Xaa = Any amino acid
CRSYSNAVGLSWLLPSSWFWNPQFKVILRREPGTNGCAAIQTVILQTALKKKDQCXNYXQVNXTXSPV

SEQ ID NO: 1366 - protein, 103 aa, Homo sapiens
  variant (1)...(103): Xaa = Any amino acid
GCHGKHHFRLXVGNPVPFPLGSHSQILIQSRSRSRSLIQSSPQKVGRYDSSPGFSSLEKGQSSDGGXCXIHLXVVXTLVLFLQGSLQNYCLDCSAPIGTWLSA

SEQ ID NO: 1367 - protein, 64 aa, Homo sapiens
  variant (1)...(64): Xaa = Any amino acid
SSESGKIRFKSWILVFGKRSVLRRGIXLXSPXSSXNIGPFSSRQFAELLSGLQRTHWYLALCVG

SEQ ID NO: 1368 - protein, 50 aa, Homo sapiens
LTLPGGIRVRRRGRGWRSGGDHGVSRPHCASHCDERVLGLRRLLGALVHP

SEQ ID NO: 1369 - protein, 93 aa, Homo sapiens
GDGVGVGAQAATMAYHGLTVPLIVMSVFWGFVGFLVPWFIPKGPNRGVIITMLVTCSVCCYLFWLIAILAQLNPLFGPQLKNETIWYLKYHWP

SEQ ID NO: 1370 - protein, 65 aa, Homo sapiens
TGHQHGNDNSPVRTLRDEPRHQEADEAPEHAHHNERHSEAVIRHGRRLSANPYPVASLGSHQEVS

SEQ ID NO: 1371 - protein, 68 aa, Homo sapiens
  variant (1)...(68): Xaa = Any amino acid
CXSYSNAVGLSWLLPSSWFWNPQFKVILRREPGTNGCAAIQTVILQTALKKKDQCSNYFXVNPTRSPV

SEQ ID NO: 1372 - protein, 143 aa, Homo sapiens
  variant (1)...(143): Xaa = Any amino acid
XMMXKLLKCSRLVLALALILVLESSVQGYPTQRARYQWVRCNPDSNSANCLEEKGPMFELLPXESNKIPRLRTDLFXKTRIQDLNRIFPLSEDYSGSGXXSGSGSGSXSGSGFLTEMEQDYQLXDESDAFHDNLRSLDRNLPS

SEQ ID NO: 1373 - protein, 64 aa, Homo sapiens
  variant (1)...(64): Xaa = Any amino acid
SSESGKIRFKSWILVFXKRSVLRRGILLDSXGSSSNIGPFSSRQFAELLSGLQRTHWYLALCVG

SEQ ID NO: 1374 - protein, 103 aa, Homo sapiens
  variant (1)...(103): Xaa = Any amino acid
GCHGKHHFRXLVGNPVPFPLGSHSQIXIQSRSRXXSLIQSSPQKVGRYDSSPGFSSLXKGQSSDGGSCWIHXEVVRTLVLFLQGSLQNYCLDCSAPIGTWLSA

SEQ ID NO: 1375 - protein, 73 aa, Homo sapiens
RMLSYSSMLPPSGLMLHYTLLGSNLPLRLKALEGRVFKMLDLVQAQILELKAEGFLVAEKKQNLMTFGTPVLR

SEQ ID NO: 1376 - protein, 52 aa, Homo sapiens
LHAAAEWLDAPLHPPWIQPSIKAEGSRGQSIQDVRSGPSPNSRVKSRGVLSG

SEQ ID NO: 1377 - protein, 64 aa, Homo sapiens
WKVGSKEGVMEHQATRRQHGAITKHPLGFCLSRHLALTLDLVTVVWLIPVNIWRQSYLAFASRA

SEQ ID NO: 1378 - protein, 55 aa, Homo sapiens
LKTGVPNVIRFCFFSATKNPSAFNSRIWAWTRSNILNTLPSRAFSLNGRLDPRRV

SEQ ID NO: 1379 - protein, 69 aa, Homo sapiens
KLLKCSRLVLALALILVLESSVQGYPTQRARYQWVRCNPDSNSANCLEEKGPMFELLPGESNKIPRLRT

SEQ ID NO: 1380 - protein, 66 aa, Homo sapiens
SYSNAVGLSWLLPSSWFWNPQFKVILRREPGTNGCAAIQTVILQTALKKKDQCSNYFQVNPTRSPV

SEQ ID NO: 1381 - protein, 58 aa, Homo sapiens [sequence omitted]

SEQ ID NO: 1382 - protein, 109 aa, Homo sapiens; identical to SEQ ID NO: 674

SEQ ID NO: 1383 - protein, 100 aa, Homo sapiens; identical to SEQ ID NO: 675

SEQ ID NO: 1384 - protein, 103 aa, Homo sapiens [sequence omitted]

SEQ ID NO: 1385 - protein, 55 aa, Homo sapiens
HMVRLDGPSSSETQQESQGEGSQDHSSDMEHSVFRAHVVGSIIDDCEHRNSDEEL

SEQ ID NO: 1386 - protein, 97 aa, Homo sapiens
QFLITVPVLTVINYRPHNMRPEDRMFHIRAVILRALSLAFLLSLRGAGAIKADHVSTYAAFVQTHRPTGEFMFEFDEDEMFYVDLDKKETVWHLEEF

SEQ ID NO: 1387 - protein, 55 aa, Homo sapiens; identical to SEQ ID NO: 791

SEQ ID NO: 1388 - protein, 89 aa, Homo sapiens; identical to SEQ ID NO: 677

SEQ ID NO: 1389 - protein, 89 aa, Homo sapiens; identical to SEQ ID NO: 678

SEQ ID NO: 1390 - protein, 59 aa, Homo sapiens; identical to SEQ ID NO: 679

SEQ ID NO: 1391 - protein, 136 aa, Homo sapiens
RSVKLCKHTDTPEPCVFNDLLHILCCVDVGDRVVGPLSHELWKSEALIWEGRIIYQMPVEHVQFIVRHDIQSVQDAREWQVMARCIQQQAPVRKAGKVLNLSLVDKELGELPRQSQRGVNTGHHLWSGYNSPLTPK

SEQ ID NO: 1392 - protein, 124 aa, Homo sapiens
MMTSVYSSLRLSGELSEFFINKTEIEDFPRFPHRGLLLDTSRHYLPLSSILDTLDVMAYNKLNVFHWHLVDDPSFPYESFTFPELMRKGSYNPVTHIYTAQDVKEVIEYARLRGIRVLTEFDTP

SEQ ID NO: 1393 - protein, 52 aa, Homo sapiens
DCLGSSPSSLSTRLRLRTFPAFLTGACCWIHLAITCHSLASWTLWMSWRTIN

SEQ ID NO: 1394 - protein, 59 aa, Homo sapiens
GNGHTLEKNVLVVSVVTPGCNQLPTLESVENYTLTINDDQCLLLSETVWGALRVLYQQD

SEQ ID NO: 1395 - protein, 88 aa, Homo sapiens
GQRRPRSIGERGGGTPGEPGAWTQPELITEAGVQSRVTCSRNKQPLWGHQVERQDDKEGARVLAKAGLLATSAGQRPPRSACPHHAVP

SEQ ID NO: 1396 - protein, 157 aa, Homo sapiens
  variant (1)...(157): Xaa = Any amino acid
LXXKAGDQVPGGQDSALVGPEDRGGPGASGREVEGHRESQERGHSQNSSQRLASSPGSRAAGTSSHSGGTRWRGKTTKRVPVFLRKRGCWPRVLDRGPHALLAPITPFRDCHAESAXRKGDSKRECGQACLRPSGRTPGLTXRRCHHFRFXXLFFFF

SEQ ID NO: 1397 - protein, 156 aa, Homo sapiens
  variant (1)...(156): Xaa = Any amino acid
XXXRLVTRSQAGKTQPWWGLRTEEAQEHRGERWRDTGRARSVDTARTHHRGWRPVPGHVQQEQAATLGAPGGEARRQRGCPCSCESGAAGHECWTEAPTLCLPPSRRSVTVTQNLXTGRETLSGSAAKPASARQGGLPGSLXGGATISALXSFSFS

SEQ ID NO: 1398 - protein, 75 aa, Homo sapiens
  variant (1)...(75): Xaa = Any amino acid
RAEAGLAALPLRVSLPXCRFCVTVTERRDGGKQSVGASVQHSWPAAPLSQEHGHPLCRLASPPGAPRVAACSCCT

SEQ ID NO: 1399 - protein, 111 aa, Homo sapiens
  variant (1)...(111): Xaa = Any amino acid
QSRNGVMGASRAWGPLSSTRGQQPRFRKNTGTLFVVLPLHLVPPEWLLVPAARDPGLDASLCDEFWLCPRSWLSRCPSTSLPDAPGPPLSSGPTKAESCPPGTWSPAFXXR

SEQ ID NO: 1400 - protein, 104 aa, Homo sapiens
  variant (1)...(104): Xaa = Any amino acid
WGQAERGGLCPALVASSPAFARTRAPSLSSCLSTWCPQSGCLFLLHVTRDWTPASVMSSGCVHAPGSPGVPPPLSPMLLGLLCPQAPPRLSLARLGPGHQPXXX

SEQ ID NO: 1401 - protein, 53 aa, Homo sapiens [sequence omitted]

SEQ ID NO: 1402 - protein, 67 aa, Homo sapiens
  variant (1)...(67): Xaa = Any amino acid
KPPFFXLLKRKGPQDTIFEWLMVFKXFRELPAFYLETEKARKILSFLACISRVGANDSKLVSKPIPL

SEQ ID NO: 1403 - protein, 120 aa, Homo sapiens; identical to SEQ ID NO: 715
  variant (1)...(120): Xaa = Any amino acid

SEQ ID NO: 1404 - protein, 52 aa, Homo sapiens; identical to SEQ ID NO: 716
  variant (1)...(52): Xaa = Any amino acid

SEQ ID NO: 1405 - protein, 60 aa, Homo sapiens; identical to SEQ ID NO: 717
  variant (1)...(60): Xaa = Any amino acid

SEQ ID NO: 1406 - protein, 52 aa, Homo sapiens [sequence omitted]

SEQ ID NO: 1407 - protein, 75 aa, Homo sapiens
SSHLLSYIHLGIPISNVSLEIRAPGGQVTEGQKLILLCSVAGGTGNVTFSWYREATGTSMGKKTQRSLSAELEIP

SEQ ID NO: 1408 - protein, 63 aa, Homo sapiens
DIQMSLSTFLKDNCYRFPTSIGMLIMDYLYNLHIPTFCIREWNQSNPVPRVSLRVLTCCLISI

SEQ ID NO: 1409 - protein, 68 aa, Homo sapiens
GISSSADRERWVFFPILVPVASLYQENVTFPVPPATEQSRISFCPSVTCPPGARISKLTLEMGIPRWI

SEQ ID NO: 1410 - protein, 56 aa, Homo sapiens; identical to SEQ ID NO: 729

SEQ ID NO: 1411 - protein, 50 aa, Homo sapiens; identical to SEQ ID NO: 730

SEQ ID NO: 1412 - protein, 70 aa, Homo sapiens; identical to SEQ ID NO: 731

SEQ ID NO: 1413 - protein, 53 aa, Homo sapiens; identical to SEQ ID NO: 732

SEQ ID NO: 1414 - protein, 69 aa, Homo sapiens
  variant (1)...(69): Xaa = Any amino acid
XHKICSIDVHESSCCXGAVSTDXWNNWPVRKLIKAANSTXECNRXXQGLISLSDGGLXICXPGXYCVIN

SEQ ID NO: 1415 - protein, 64 aa, Homo sapiens
  variant (1)...(64): Xaa = Any amino acid
XPXQQXSSPPSERLIRPCXXLLHSXVLFAALMSFLTGQLFXKSVDTAPXQQEDSWTSIEHILWX

SEQ ID NO: 1416 - protein, 92 aa, Homo sapiens
  variant (1)...(92): Xaa = Any amino acid
VERTRKPSLSEKKNNPSKWXVSSVYDTIXSWXTNXKSSIRKANKALXXSIAFXCTVCSFDELPHRPIIPXVCGYRSXTARGLMDVYRTYLVX

SEQ ID NO: 1417 - protein, 77 aa, Homo sapiens
  variant (1)...(77): Xaa = Any amino acid
GLEFRKAERFLIWQSSSSSRXLKGLSFCRRTCFSSSNSAVLFGIHPLQVFYVXNHHFNCFTNPAFLIDGSQHLSPTG

SEQ ID NO: 1418 - protein, 75 aa, Homo sapiens
  variant (1)...(75): Xaa = Any amino acid
PFLELHVNLCGQAAFAGVFTGRQRLQACLPAGSVCRRVYMQAXHHVRPLVQGFRGPAQVNRLCSHKFTELXGCAT

SEQ ID NO: 1419 - protein, 74 aa, Homo sapiens
  variant (1)...(74): Xaa = Any amino acid
AAREPVWAGSVCRRVYGQAAFAGVFTGRQRLQACLHAGVXPCETTGPGFQRSCSGESAVFSQVHGAXWVCNMKY

SEQ ID NO: 1420 - protein, 66 aa, Homo sapiens
  variant (1)...(66): Xaa = Any amino acid
LDXGLXPLSVPSVPHSTSISCCTPXQLRELVRTQPIHLSRTSETLDQWSHMVXRLHVNTPANAACR

SEQ ID NO: 1421 - protein, 127 aa, Homo sapiens
  variant (1)...(127): Xaa = Any amino acid
PPRLTSGRWGPTGPXASMPWKGRXWPRMSEPRATWSAQPLAIGEYSRCLSASSELPSTRPGDETEGGSSPSMSARSSKPQETSHNTYVCTPKTNGEREGREARKAWCFLWVHPKQRLLLDTVIDEAW

SEQ ID NO: 1422 - protein, 54 aa, Homo sapiens
VQDLLNPKRLHTTLMYAPQRLMGRGRAGKPGKLGVFSGYTPSSVSFWIQLLMRL

SEQ ID NO: 1423 - protein, 76 aa, Homo sapiens
  variant (1)...(76): Xaa = Any amino acid
TQTDQREMGPHRAXCVNAMEGKXLAQDVRAKGYLECSALSNRGVQQVFECVVRTAVNQARRRNRRRLFSINECKIF

SEQ ID NO: 1424 - protein, 138 aa, Homo sapiens; identical to SEQ ID NO: 778
  variant (1)...(138): Xaa = Any amino acid

SEQ ID NO: 1425 - protein, 60 aa, Homo sapiens; identical to SEQ ID NO: 779
  variant (1)...(60): Xaa = Any amino acid

SEQ ID NO: 1426 - protein, 66 aa, Homo sapiens; identical to SEQ ID NO: 780

SEQ ID NO: 1427 - protein, 55 aa, Homo sapiens
KLYNACIMKKDLPFPYILIELHRLAVHFVIHVIRILDSIAFEICFFLGTKSQLIV

SEQ ID NO: 1428 - protein, 52 aa, Homo sapiens; identical to SEQ ID NO: 787
  variant (1)...(52): Xaa = Any amino acid

SEQ ID NO: 1429 - protein, 56 aa, Homo sapiens; identical to SEQ ID NO: 792

SEQ ID NO: 1430 - protein, 177 aa, Homo sapiens; identical to SEQ ID NO: 793
  variant (1)...(177): Xaa = Any amino acid

SEQ ID NO: 1431 - protein, 56 aa, Homo sapiens; identical to SEQ ID NO: 794

SEQ ID NO: 1432 - protein, 70 aa, Homo sapiens [sequence omitted]

SEQ ID NO: 1433 - protein, 53 aa, Homo sapiens; identical to SEQ ID NO: 796

SEQ ID NO: 1434 - protein, 146 aa, Homo sapiens [sequence omitted]

SEQ ID NO: 1435 - protein, 58 aa, Homo sapiens; identical to SEQ ID NO: 798

SEQ ID NO: 1436 - protein, 69 aa, Homo sapiens
  variant (1)...(69): Xaa = Any amino acid
EGKLSDNRSSIRWVCPCIACQRLAHHQGSGVAVLPCVVCIASLSSACLSPSXPPSPLXLYQVCHGEQEY

SEQ ID NO: 1437 - protein, 50 aa, Homo sapiens
  variant (1)...(50): Xaa = Any amino acid
LWKRAPPGAXGKDCFSLSSPIPGYSRADQQGHFHLTSCCSLMFPWDKRGN

SEQ ID NO: 1438 - protein, 59 aa, Homo sapiens
  variant (1)...(59): Xaa = Any amino acid
VLLXHPLPXGSTRYATGSRNINPRILTLSGNTECTPGMLGETRGILLTINLGSKRPYLI

SEQ ID NO: 1439 - protein, 68 aa, Homo sapiens
  variant (1)...(68): Xaa = Any amino acid
QPQQHPLGLSLYRMPEACASPRVGRSCAALRCVHSLSLLCLLKSFLXTLSLXALPGMPRGAGILILES

SEQ ID NO: 1440 - protein, 54 aa, Homo sapiens
  variant (1)...(54): Xaa = Any amino acid
LSVAIQSVLQGCWVKPGEFYSPLTLGVRGHTSSETLPARAGRSKGXFPXPLRXY

SEQ ID NO: 1441 - protein, 100 aa, Homo sapiens
  variant (1)...(100): Xaa = Any amino acid
NSPGFTQHPWSTLCIATESQDSRINIPAPRGIPGRAXRERVXKKDLSKQRRERLCTQRRAAQLRPTLGDAQASGMRYRDRPSGCCCGCHLISPLIPREHQ

SEQ ID NO: 1442 - protein, 72 aa, Homo sapiens
  variant (1)...(72): Xaa = Any amino acid
YXGAKXGGXGLLNGPPGQVKFQMRYGLLLPRLMVSRIPRVSPSIPGVHSVLPLRVRILGLIFLLPVAYLVEX

SEQ ID NO: 1443 - protein, 115 aa, Homo sapiens
  variant (1)...(115): Xaa = Any amino acid
PMWLVFXLXLARFHTLTSLSQPQETMIGLLLLGEKRTQDTHSEWLSSWTVYLHTPRVFHSLMVLSRDPETICRLSEEKATLSTSLVWPTNRLVVVPVVRSQRRRVPSQEPERANW

SEQ ID NO: 1444 - protein, 50 aa, Homo sapiens
LDGFISRSRDNLPVVRGEGHTQHILGMAHKSPRGGARCEIPEAQGSIPGA

SEQ ID NO: 1445 - protein, 114 aa, Homo sapiens
  variant (1)...(114): Xaa = Any amino acid
QFALSGSWDGTLRLWDLTTGTTTRRFVGHTKDVLSVAFSSDNRQIVSGSRDKTIKLWNTLGVCKYTVQDESHSEWVSCVRFSPNSSNPIIVSCGWDKLVKVWNLAXCKXKTNHI

SEQ ID NO: 1446 - protein, 74 aa, Homo sapiens
  variant (1)...(74): Xaa = Any amino acid
VWPSPLTTGRLSLDLEIKPSSYGIPWVCANTLSRMRATQSGCLVSASRPTAATLSSSPVAGTSWSRYGTWLXAX

SEQ ID NO: 1447 - protein, 60 aa, Homo sapiens
  variant (1)...(60): Xaa = Any amino acid
HKICSRDVHESSCCVGAXSTDFWNNWPVRKPIKAANSTMNAIESQRALLAFXMEDLRFVA

SEQ ID NO: 1448 - protein, 60 aa, Homo sapiens
  variant (1)...(60): Xaa = Any amino acid
ATNLKSSIXKANKALWLSIAFIVLFAALMGFLTGQLFQKSVDXAPTQQEDSWTSLEHILW

SEQ ID NO: 1449 - protein, 58 aa, Homo sapiens
SNIKAIRRHPCHHLTQGGRCWSWVQLGRRSRSRKQGDYGSQSVSKWAGLPGRDYSEGQ

SEQ ID NO: 1450 - protein, 146 aa, Homo sapiens
ANGSAETSALDTGFSLNLSELREYTEGLTEAKEDDDGDHSSLQSGQSVISLLSSEELKKLIEEVKVLDEATLKQLDGIHVTILHKEEGAGLGFSLAGGADLENKVITVHRVFPNGLASQEGTIQKGNEVLSSTASLSRGPRTMMPW

SEQ ID NO: 1451 - protein, 62 aa, Homo sapiens
TVITLFSRSAPPAKLNPRPAPSSLCKMVTWMPSNCFNVASSRTFTSSMSFFNSSELSREITD

SEQ ID NO: 1452 - protein, 109 aa, Homo sapiens
  variant (1)...(109): Xaa = Any amino acid
SPARPLIRSDKMKETIMNQEKLAKLQAQVRIGGKGTARRKKKVVHRTATADDKKLQFSLKKLXVNNISGIEEVNMFTNQGTVIHFNNPKVQASLAANTFTITGHAETKQ

SEQ ID NO: 1453 - protein, 81 aa, Homo sapiens
GELKFFVICCGCSMNHLLLSASSSFPTNAHLCLQFGEFFLVHDCFFHLVGANKGPRGGLGLVLKGSRVDHLRLGAHTRGRK

SEQ ID NO: 1454 - protein, 59 aa, Homo sapiens
  variant (1)...(59): Xaa = Any amino acid
TYSPLQYQRYCLPXTSLRRTEVFCHLLWLFYEPPSSFCEQFLSHQCALVPAVWRVFPGS

SEQ ID NO: 1455 - protein, 153 aa, Homo sapiens
LRDSRDCVTSFVSFDLESLSRTMRHSKRTYCPDWDDKDWDYGKWRSSSSHKRRKRSHSSAQENKRCKYNHSKMCDSHYLESRSINEKDYHSRRYIDEYRNDYTQGCEPGHRQRDHESRYQNHSSKSSGRSGRSSYKSKHRIHHSTSHRRSHGV

SEQ ID NO: 1456 - protein, 60 aa, Homo sapiens [sequence omitted]

SEQ ID NO: 1457 - protein, 98 aa, Homo sapiens
  variant (1)...(98): Xaa = Any amino acid
MRKIIIVDATLMSTEMTTLKDVNLDIAKETMKAGIRTIVASLLVEVEEVVIKANTGFTTVLHIVVHMGYEPFLPARAGAXGEFQHTXRRSRGSELGPX

SEQ ID NO: 1458 - protein, 73 aa, Homo sapiens [sequence omitted]

SEQ ID NO: 1459 - protein, 62 aa, Homo sapiens [sequence omitted]

SEQ ID NO: 1460 - protein, 89 aa, Homo sapiens
STVVNPVFAFITTSSTSTRRLATMVLIPAFMVSLAMSRFTSLSVVISVLINVASTMIIFLIYRPAFQIMAITHFRVIVFAALVLLGTAM

SEQ ID NO: 1461 - protein, 74 aa, Homo sapiens [sequence omitted]

SEQ ID NO: 1462 - protein, 66 aa, Homo sapiens; identical to SEQ ID NO: 822

SEQ ID NO: 1463 - protein, 75 aa, Homo sapiens; identical to SEQ ID NO: 823

SEQ ID NO: 1464 - protein, 59 aa, Homo sapiens; identical to SEQ ID NO: 824

SEQ ID NO: 1465 - protein, 59 aa, Homo sapiens; identical to SEQ ID NO: 825
  variant (1)...(59): Xaa = Any amino acid

SEQ ID NO: 1466 - protein, 63 aa, Homo sapiens; identical to SEQ ID NO: 826
  variant (1)...(63): Xaa = Any amino acid

SEQ ID NO: 1467 - protein, 65 aa, Homo sapiens
KSGVGIPFHMHIDYFLSFFKTCFSGFLNVPDDSLSCRTVNVNLSRGLWLDVNLIKLLCPRNSAPP

SEQ ID NO: 1468 - protein, 107 aa, Homo sapiens
KMEHSDENIQFWMACETYKKIASRWSRISRAKKLYKIYIQPQSPREINIDSSTRETIIRNIQEPTETCFEEAQKIVYMHMERDSYPRFLKSEMYQKLLKTMQSNNSF

SEQ ID NO: 1469 - protein, 74 aa, Homo sapiens
KWSTVTRIFNSGWHVKPIRKLPHGGAEFLGQRSFIRFTSSHSPLERLTLTVRQERLSSGTFRNPLKHVLKKLRK

SEQ ID NO: 1470 - protein, 63 aa, Homo sapiens
LLPLYPEILEMQEWWLGWKIMIDSVEGQAVGVFWGQSRVNTVPHYLDLLAPIPGQMLKKKNVN

SEQ ID NO: 1471 - protein, 181 aa, Homo sapiens
SRAEMLGAINQESRVSKAVEVMIQHVENLKRMYAKEHAELEELKQVLLQNERSFNPLEDDDDCQIKKRSASLNSKPSSLRRVTIASLPRNIGNAGMVAGMENNDRFSRRSSSWRILGSKQSEHRPSLPRFISTYSWADAEEEKCELKTKDDSEPSGEETVERTRKPSLSEKKNNPSKWDVS

SEQ ID NO: 1472 - protein, 109 aa, Homo sapiens
VLINRGNEGRCSLCFDPKIRQLLDLLLNRSLFSIPATIPAFPIFLGKEAIVTLRREDGLEFREAERFLIWQSSSSSRGLKDLSFCRRTCFSSSNSACSLAYILFKFSTC

SEQ ID NO: 1473 - protein, 100 aa, Homo sapiens [sequence omitted]

SEQ ID NO: 1474 - protein, 103 aa, Homo sapiens [sequence omitted]

SEQ ID NO: 1475 - protein, 58 aa, Homo sapiens [sequence omitted]

SEQ ID NO: 1476 - protein, 109 aa, Homo sapiens
HTAPALDIAWCPHNDNVIASGSEDCTVMVWEIPDGGLMLPLREPVVTLEGHTKRVGIVAWHTTAQNVLLSAGCDNVIMVWDVGTGAAMLTLGPEVHPDTIYSVDWSRDG

SEQ ID NO: 1477 - protein, 94 aa, Homo sapiens; identical to SEQ ID NO: 844
  variant (1)...(94): Xaa = Any amino acid

SEQ ID NO: 1478 - protein, 57 aa, Homo sapiens; identical to SEQ ID NO: 845

SEQ ID NO: 1479 - protein, 93 aa, Homo sapiens; identical to SEQ ID NO: 846
  variant (1)...(93): Xaa = Any amino acid

SEQ ID NO: 1480 - protein, 121 aa, Homo sapiens; identical to SEQ ID NO: 847
  variant (1)...(121): Xaa = Any amino acid

SEQ ID NO: 1481 - protein, 54 aa, Homo sapiens; identical to SEQ ID NO: 848
  variant (1)...(54): Xaa = Any amino acid

SEQ ID NO: 1482 - protein, 59 aa, Homo sapiens; identical to SEQ ID NO: 849

SEQ ID NO: 1483 - protein, 67 aa, Homo sapiens; identical to SEQ ID NO: 850
  variant (1)...(67): Xaa = Any amino acid

SEQ ID NO: 1484 - protein, 55 aa, Homo sapiens; identical to SEQ ID NO: 851
  variant (1)...(55): Xaa = Any amino acid

SEQ ID NO: 1485 - protein, 80 aa, Homo sapiens
  variant (1)...(80): Xaa = Any amino acid
QTIYNISSLKSSFKDHRQTSSPLYFSWGDKGKKRKCKLSYSHSENLWFHAILSQLKVTNLRSSDLKLKNQXPYIRMSCCH

SEQ ID NO: 1486 - protein, 76 aa, Homo sapiens
  variant (1)...(76): Xaa = Any amino acid
VLPGTLIPLCQVMHSQILGTRVWTSLGGIILPAIIELXGRLNNIIYMTYVXARLAPGKYSGCTNHCSYTXQXLKES

SEQ ID NO: 1487 - protein, 67 aa, Homo sapiens
  variant (1)...(67): Xaa = Any amino acid
EQWLVHPEYFPGAKRXSTYVMYIMLFNLXNNSIMAGRIMPPKDVHTLVPRICECITWQRGIKVPGRT

SEQ ID NO: 1488 - protein, 67 aa, Homo sapiens
KISNLKMGHNYTFTVQARCLFGNQICGEPAILLYDELGSGADASATQAARSTDVAAVVVPILFLILL

SEQ ID NO: 1489 - protein, 58 aa, Homo sapiens
RWVIITRSPSKQDAFLATRSVGSLPSCCTMSWGLVQMHLQRRLPDLRMLLLWWCPSYS

SEQ ID NO: 1490 - protein, 61 aa, Homo sapiens
DGHHHSSNIRRSGSLRCRCICTRPQLIVQQDGRLPTDLVAKKASCLDGERVIMTHLQVGNF

SEQ ID NO: 1491 - protein, 56 aa, Homo sapiens
SSIRNKMGTTTAATSVDLAACVADASAPDPSSSYSRMAGSPQIWLPKRHLAWTVNV

SEQ ID NO: 1492 - protein, 67 aa, Homo sapiens; identical to SEQ ID NO: 871
  variant (1)...(67): Xaa = Any amino acid

SEQ ID NO: 1493 - protein, 66 aa, Homo sapiens; identical to SEQ ID NO: 872
  variant (1)...(66): Xaa = Any amino acid

SEQ ID NO: 1494 - protein, 60 aa, Homo sapiens
  variant (1)...(60): Xaa = Any amino acid
TSSPAAPTSACASRPPGPSWTWGRAPRTESSQPRGSSSCSARWCLGRCCCXGNDGKNXNX

SEQ ID NO: 1495 - protein, 60 aa, Homo sapiens
  variant (1)...(60): Xaa = Any amino acid
PAVLRHLPPRAPAAPQALPGHGGGHQEPNHHSRGDHPPVLRGGAWDAAAVXETMARTXTX

SEQ ID NO: 1496 - protein, 60 aa, Homo sapiens
  variant (1)...(60): Xaa = Any amino acid
QQSCGTYLRVRQPPPRPFLDMGEGTKNRIITAEGIILLFCAVVPGTLLLXRKRWQERXLX

SEQ ID NO: 1497 - protein, 60 aa, Homo sapiens
  variant (1)...(60): Xaa = Any amino acid
XEXSFLPSFPXQQQRPRHHRAEQEDDPLGCDDSVLGALPHVQEGPGGRLAHAEVGAAGLL

SEQ ID NO: 1498 - protein, 53 aa, Homo sapiens
  variant (1)...(53): Xaa = Any amino acid
XSXRSCHRFXNSSSVPGTTAQNRRMIPSAVMIRFLVPSPMSRKGLGGGWRTRR

SEQ ID NO: 1499 - protein, 51 aa, Homo sapiens
PAYNGDVVFLFTFVYYACVFSTTLGSGRNGQTEDELYPGPAGPACSPLCSP

SEQ ID NO: 1500 - protein, 79 aa, Homo sapiens
QPTMGMLCFCSPSFTMPVSSPPRWGLGGMDRQRMSSTQGLQDLPVAHSARLSTTTPAKEDSIWQSFFQVPSYTCASAFS

SEQ ID NO: 1501 - protein, 71 aa, Homo sapiens
LGTWKKLCQMESSLAGVVVLRRAEWATGRSCRPWVELILCLSIPPRPQRGGEDTGIVNEGEQKHNIPIVGW

SEQ ID NO: 1502 - protein, 67 aa, Homo sapiens
KSRGTGIAGHLEEALPNGILLGRSGSAKASRVGYRQVLQALGRAHPLSVHSSQTPAWWRRHRHSKRR

SEQ ID NO: 1503 - protein, 71 aa, Homo sapiens [sequence omitted]

SEQ ID NO: 1504 - protein, 73 aa, Homo sapiens; identical to SEQ ID NO: 882

SEQ ID NO: 1505 - protein, 74 aa, Homo sapiens
AAREPVWAGSVCRRVYGQAAFAGVFTGRQRLQACLHAGVAPCETTGPGFQRSCSGESAVFSQVHGAEWVCNMKY

SEQ ID NO: 1506 - protein, 66 aa, Homo sapiens
LDDGLQPLSVPSVPHSTSISCCTPTQLRELVRTQPIHLSRTSETLDQWSHMVLRLHVNTPANAACR

SEQ ID NO: 1507 - protein, 98 aa, Homo sapiens
IAGTLKFNPETDYLTGTDGKKFRLEAPDADELPKGEFDPGQDTYQHPPKDSSGQHVDVSPTSQRLQLLEPFDKWDGKDLEDLQILIKVKGKCTTDHIS

SEQ ID NO: 1508 - protein, 62 aa, Homo sapiens
GSAGPPGPCHPTCQKAPGAAGAGWWGSRPHAARCCPWVGAGRCPALGQTPLWEAHLHPEPPA

SEQ ID NO: 1509 - protein, 97 aa, Homo sapiens
DVVSGTLPFDLDEDLQVLQVLAIPLVKRLQELQALAGGAHVHMLPAAVLGWVLVGVLPWVKLPFGKLICIRSLQPELLAIRARQVVGLWVELEGSRN

SEQ ID NO: 1510 - protein, 54 aa, Homo sapiens
EMWSVVHFPLTLMRICRSSRSLPSHLSKGSRSCRRWLVGLTSTCCPLLSLGGCW

SEQ ID NO: 1511 - protein, 137 aa, Homo sapiens
  variant (1)...(137): Xaa = Any amino acid
PCLXSXVTRKRPCLPSMTLMEEMLREAFRCMTQEPMKGPIAMQSGPKPLFRRMSSLVGPTQSFFMRESKTLGAVQIMNGLFHIALGGLLMIPARDLCTHLCDCVVPSLGEALCILFSGSLLAXTEKKLXEVVWSKEK

SEQ ID NO: 1512 - protein, 67 aa, Homo sapiens
  variant (1)...(67): Xaa = Any amino acid
LPXIXGHSEEAMSTLNDTHGGNAERSIQMHDTRANERPYCYAIWSKTTLQEDVFTGGPHAKLLHEGI

SEQ ID NO: 1513 - protein, 137 aa, Homo sapiens
  variant (1)...(137): Xaa = Any amino acid
HFSFDQTTXWSFFSVXARSDPENNIHNASPREGTTQSHRWVHRSLAGIIRRPPRAMWKSPFIIWTAPKVLDSLMKKLCVGPTSEDILLKSGFGPDCIAIGPFIGSCVMHLNASLSISSMSVIEGRHGLFRVTXDXRQ

SEQ ID NO: 1514 - protein, 61 aa, Homo sapiens
  variant (1)...(61): Xaa = Any amino acid
IFPLTKQLXGVFSPXLPGVIRKIIYIMPPPERVPHSHTDGCIDPLLGSSEDPPGQCGRAHS

SEQ ID NO: 1515 - protein, 87 aa, Homo sapiens
LGGPGKGLGHEPGSSEAVTEAREPAPRSWGDLALTPGLGAHLQTTSLPLSAASLCPHRWLSGQCPGPRRCDLPPCQPCCHPCPAAGR

SEQ ID NO: 1516 - protein, 113 aa, Homo sapiens [sequence omitted]

SEQ ID NO: 1517 - protein, 79 aa, Homo sapiens
LKQRNTLKDGIIMIQTLLIILFIIVPIFLLLDKDDSKAGMEEDHTYEGLDIDQTATYEDIVTLRTGEVKWSVGEHPGQE

SEQ ID NO: 1518 - protein, 51 aa, Homo sapiens; identical to SEQ ID NO: 1499

SEQ ID NO: 1519 - protein, 79 aa, Homo sapiens
QPTMGMLCFCSPSFTMPVSSPPRWGLGGMDRQRMSSTQGLQDLPVAHSARLSTTTPAKEDSIWQSFFQVPSYTCASAFL

SEQ ID NO: 1520 - protein, 71 aa, Homo sapiens; identical to SEQ ID NO: 1501

SEQ ID NO: 1521 - protein, 68 aa, Homo sapiens
EKSRGTGIAGHLEEALPNGILLGRSGSAKASRVGYRQVLQALGRAHPLSVHSSQTPAWWRRHRHSKRR

SEQ ID NO: 1522 - protein, 117 aa, Homo sapiens
KKQRRRSHKAIEMEHPLGELRQGAPETDFQDSFFEVLCGVKYSSAKRVTGKGPVKQQFLISSLSSLRIIYPKILCIYKMYTSLQFTKHSLLPNTYPCCMANEMSNPTGYMAVELHSK

SEQ ID NO: 1523 - protein, 68 aa, Homo sapiens
MQSILGYIILREDKDDIKNCCFTGPLPVTLFAEEYLTPHSTSKKLSWKSVSGAPCLNSPSGCSISIAL

SEQ ID NO: 1524 - protein, 88 aa, Homo sapiens; identical to SEQ ID NO: 995

SEQ ID NO: 1525 - protein, 55 aa, Homo sapiens; identical to SEQ ID NO: 791

SEQ ID NO: 1526 - protein, 52 aa, Homo sapiens
GQPGVLLLVQIHELLPGPQAVRVVGDCLPECRALGHGVLGPPKKQEPEPLKA

SEQ ID NO: 1527 - protein, 75 aa, Homo sapiens
LPRTTSSRRKSTRNCNLSFISMVKGSQACCFSSKYTNFSQAHRRSGWSVTASPSVGHSAMASSGRLRSKSQSLSR

SEQ ID NO: 1528 - protein, 76 aa, Homo sapiens
GLERLWLLLLRRPEDAMAECPTLGEAVTDHPDRLWAWEKFVYLDEKQHAWLPLTIEIKDRLQLRVLLRREDVVLGR

SEQ ID NO: 1529 - protein, 52 aa, Homo sapiens
ALRGSGSCFLGGPRTPWPSARHSGRQSPTTRTACGPGRSSCIWTRSSTPGCP

SEQ ID NO: 1530 - protein, 96 aa, Homo sapiens [sequence omitted]

SEQ ID NO: 1531 - protein, 54 aa, Homo sapiens [sequence omitted]

SEQ ID NO: 1532 - protein, 59 aa, Homo sapiens
VSFGGILPGGSHHLLLRTYPFTYLLSCWTSAFQGPEKMGTPMQAQDYHPEDRSCPCCFL

SEQ ID NO: 1533 - protein, 55 aa, Homo sapiens [sequence omitted]

SEQ ID NO: 1534 - protein, 66 aa, Homo sapiens
QGLMSEPQPDLEPPQHGLYMLFLLVLVFFLMGLAGFMICHVLKKKGYRCRTSRGSEPDDAQLQPRE

SEQ ID NO: 1535 - protein, 54 aa, Homo sapiens
  variant (1)...(54): Xaa = Any amino acid
TVICWFSLKNDLWCEAQISGNIRKTWSGGGSSGACITXPAPQLFPASSASCRTY

SEQ ID NO: 1536 - protein, 55 aa, Homo sapiens
  variant (1)...(55): Xaa = Any amino acid
LYVRQLAEEAGKSCGAXSVMQAPEEPPPDQVFRMFPDICASHQRSFFRENQQITV

SEQ ID NO: 1537 - protein, 61 aa, Homo sapiens
CRPPRSRRQTRSSGCFQIFVPHTRDHFSEKTNRSPSKCVAWAPHPVCVLHPSPCYSGPHHD

SEQ ID NO: 1538 - protein, 96 aa, Homo sapiens
  variant (1)...(96): Xaa = Any amino acid
VCPATGRRGWEELWSRXCDAGPRGAAARPGLPDVSRYLCLTPEIIFQRKPTDHRLSASLGRPTPSASCIHLPVTVARIMIKECGSLCLGWDALLCT

SEQ ID NO: 1539 - protein, 115 aa, Homo sapiens [sequence omitted]

SEQ ID NO: 1540 - protein, 50 aa, Homo sapiens; identical to SEQ ID NO: 1444

SEQ ID NO: 1541 - protein, 114 aa, Homo sapiens
QFALSGSWDGTLRLWDLTTGTTTRRFVGHTKDVLSVAFSSDNRQIVSGSRDKTIKLWNTLGVCKYTVQDESHSEWVSCVRFSPNSSNPIIVSRGWDKLVKVWNLANCKLKTNHI

SEQ ID NO: 1542 - protein, 74 aa, Homo sapiens
VWPSPLTTGRLSLDLEIKPSSYGIPWVCANTLSRMRATQSGCLVSASRPTAATLSSSPVAGTSWSRYGTWLTAS

SEQ ID NO: 1543 - protein, 55 aa, Homo sapiens
LYVRQLAEEAGKSCGAGSVMQAPEEPPPDQVFRMFPDTCASHQRSFFRENQQITV

SEQ ID NO: 1544 - protein, 61 aa, Homo sapiens [sequence omitted]

SEQ ID NO: 1545 - protein, 96 aa, Homo sapiens
VCPATGRRGWEELWSRLCDAGPRGAAARPGLPDVSRYLCLTPEIIFQRKPTDHRLSASLGRPTPSASCIHLPVTVARIMIKECGSLCLGWDALLCT

SEQ ID NO: 1546 - protein, 54 aa, Homo sapiens [sequence omitted]

SEQ ID NO: 1547 - protein, 52 aa, Homo sapiens
SPAESLTLSSCALSFTVPPTQDPNFFYSILFPLVNRRAQYDLFSKEPAGIWF

SEQ ID NO: 1548 - protein, 62 aa, Homo sapiens
KKLGSWVGGTVKLRAHELKVSDSAGLHRESCAHHSVQVLSLPRQHRTPAPLLTWIIEFPPKI

SEQ ID NO: 1549 - protein, 62 aa, Homo sapiens
SEVGAALKKLPRRTNRHRSDRDFVIRTRFLPAPLKTGHIVLFCLQEETRWNKRNWDLGLEGQ

SEQ ID NO: 1550 - protein, 62 aa, Homo sapiens
SLEHMNSRLVTLQDFTERAVPIIQSKCFLCPDSTELQPRYLHGSSSFHLKYDSIYFESLLPN

SEQ ID NO: 1551 - protein, 64 aa, Homo sapiens; identical to SEQ ID NO: 1057
  variant (1)...(64): Xaa = Any amino acid

SEQ ID NO: 1552 - protein, 53 aa, Homo sapiens; identical to SEQ ID NO: 1058
  variant (1)...(53): Xaa = Any amino acid

SEQ ID NO: 1553 - protein, 51 aa, Homo sapiens; identical to SEQ ID NO: 1059
  variant (1)...(51): Xaa = Any amino acid

SEQ ID NO: 1554 - protein, 64 aa, Homo sapiens; identical to SEQ ID NO: 1060
  variant (1)...(64): Xaa = Any amino acid

SEQ ID NO: 1555 - protein, 94 aa, Homo sapiens [sequence omitted]

SEQ ID NO: 1556 - protein, 61 aa, Homo sapiens [sequence omitted]

SEQ ID NO: 1557 - protein, 58 aa, Homo sapiens; identical to SEQ ID NO: 1083
  variant (1)...(58): Xaa = Any amino acid

SEQ ID NO: 1558 - protein, 139 aa, Homo sapiens; identical to SEQ ID NO: 1084
  variant (1)...(139): Xaa = Any amino acid

SEQ ID NO: 1559 - protein, 66 aa, Homo sapiens; identical to SEQ ID NO: 1085
  variant (1)...(66): Xaa = Any amino acid

SEQ ID NO: 1560 - protein, 51 aa, Homo sapiens; identical to SEQ ID NO: 1086
  variant (1)...(51): Xaa = Any amino acid

SEQ ID NO: 1561 - protein, 52 aa, Homo sapiens; identical to SEQ ID NO: 1087
  variant (1)...(52): Xaa = Any amino acid

SEQ ID NO: 1562 - protein, 125 aa, Homo sapiens; identical to SEQ ID NO: 1088
  variant (1)...(125): Xaa = Any amino acid

SEQ ID NO: 1563 - protein, 89 aa, Homo sapiens; identical to SEQ ID NO: 1089
  variant (1)...(89): Xaa = Any amino acid

SEQ ID NO: 1564 - protein, 62 aa, Homo sapiens; identical to SEQ ID NO: 1090
  variant (1)...(62): Xaa = Any amino acid

SEQ ID NO: 1565 - protein, 64 aa, Homo sapiens; identical to SEQ ID NO: 1091
  variant (1)...(64): Xaa = Any amino acid

SEQ ID NO: 1566 - protein, 131 aa, Homo sapiens
  variant (1)...(131): Xaa = Any amino acid
LEKXKXXLKNVDENIRXLXGRDPNDXRPIQARLLALSGPXGXRGRGSXLLRRGFXXSXGGPXAXQRDLEGAVXXLGGERXTRRESRQESDPXDDDVKKPXLQXSVVATXKERTRXDXIQXQNMDEKGKQRN

SEQ ID NO: 1567 - protein, 55 aa, Homo sapiens
  variant (1)...(55): Xaa = Any amino acid
GVDSXIVXEDXQXNRETLKGQSXXWAGSXGPEENHARKATRXMMMLKSXHCXLQL

SEQ ID NO: 1568 - protein, 119 aa, Homo sapiens
  variant (1)...(119): Xaa = Any amino acid
XWIXSXRVRSLXVATTEXCNXGFLTSSXSGSLSWRDSLLVXRSPPSXXTAPSRSLCXAXGPPXLXXNPRLSNXLPRPXPXPGPERASNLAWMGLXSFGSRXVSXRMFSSTFLXLXXAFS

SEQ ID NO: 1569 - protein, 53 aa, Homo sapiens
  variant (1)...(53): Xaa = Any amino acid
LPLQGLSVXLXVLXHYXRIHASVIXYHVLXLXQDQKGPAIWLGWASXHSDPAX

SEQ ID NO: 1570 - protein, 73 aa, Homo sapiens [sequence omitted]

SEQ ID NO: 1571 - protein, 56 aa, Homo sapiens [sequence omitted]

SEQ ID NO: 1572 - protein, 194 aa, Homo sapiens; identical to SEQ ID NO: 1106

SEQ ID NO: 1573 - protein, 52 aa, Homo sapiens; identical to SEQ ID NO: 1107

SEQ ID NO: 1574 - protein, 55 aa, Homo sapiens; identical to SEQ ID NO: 1014

SEQ ID NO: 1575 - protein, 66 aa, Homo sapiens; identical to SEQ ID NO: 1109

SEQ ID NO: 1576 - protein, 59 aa, Homo sapiens; identical to SEQ ID NO: 1110

SEQ ID NO: 1577 - protein, 60 aa, Homo sapiens; identical to SEQ ID NO: 1111

SEQ ID NO: 1578 - protein, 85 aa, Homo sapiens
KVSNIKVRILIQLILILTTEKTNSREQQKNKKDLLFSQPKFSSLKVSTRRGVYSSNTFHFSVNIHKLKKKTSWSHLAHTFMQCSL

SEQ ID NO: 1579 - protein, 52 aa, Homo sapiens
TPLLVDTFREENLGWEKRRSFLFFCCSLLFVFSVVNININCINILTLILETF

SEQ ID NO: 1580 - protein, 54 aa, Homo sapiens [sequence omitted]

SEQ ID NO: 1581 - protein, 87 aa, Homo sapiens
QIQCVTLVLCSRQGFLNERHRLPAYGKVSSKGIEVRDRVELWVFIVFHAKPTKSKIEFKLNKLLLQNGRGKRLRKVYENELTYLVKS

SEQ ID NO: 1582 - protein, 85 aa, Homo sapiens; identical to SEQ ID NO: 1132
  variant (1)...(85): Xaa = Any amino acid

SEQ ID NO: 1583 - protein, 56 aa, Homo sapiens; identical to SEQ ID NO: 1133

SEQ ID NO: 1584 - protein, 70 aa, Homo sapiens; identical to SEQ ID NO: 1134
  variant (1)...(70): Xaa = Any amino acid

SEQ ID NO: 1585 - protein, 82 aa, Homo sapiens; identical to SEQ ID NO: 1135
  variant (1)...(82): Xaa = Any amino acid

SEQ ID NO: 1586 - protein, 56 aa, Homo sapiens; identical to SEQ ID NO: 1136

SEQ ID NO: 1587 - protein, 52 aa, Homo sapiens
SYRPAAGRWSPRTACPCPHSPPERGSCSREGNRHTQIVAEGRSTGRVCHRRS

SEQ ID NO: 1588 - protein, 99 aa, Homo sapiens
SVAAEDLFVHYGRDGQAVEAVSEGFPQFDVVASLALIVETIDAVDAGTLVVPTEQEEVLGVLDLIGQQQADGLQGLLAPVHIVPQKEVVALGRETAILK

SEQ ID NO: 1589 - protein, 145 aa, Homo sapiens
  variant (1)...(145): Xaa = Any amino acid
LTENEIRGLCLKSREIFLSQPILXELEAPLKICGDIHGQYYDLLRLFEYGGFPPESNYLFLGDYVDRGKQSLETICLLLAYKIKYPENFFLLRGNHECASINRIYGFYDECKRRYNIKLWKTFTDCFNCLPIAAIVDEKIFCCHG

SEQ ID NO: 1590 - protein, 116 aa, Homo sapiens
  variant (1)...(116): Xaa = Any amino acid
ASPFXWSWRHPSRSAVTYTASTTTFCDYLSMAVSLPRATTSFWGTMWTGASSPWRPSACCWPIRSSTPRTSSCSVGTTSVPASTASMVSTMSARDATTSNCGKPSLTASTACPSRP

SEQ ID NO: 1591 - protein, 62 aa, Homo sapiens; identical to SEQ ID NO: 1220

SEQ ID NO: 1592 - protein, 86 aa, Homo sapiens; identical to SEQ ID NO: 1221

SEQ ID NO: 1593 - protein, 97 aa, Homo sapiens
TKPLYVALAQRKEERQAHLTNQYMQRMASVRAVPNPVINPYQPAPPSGYFMAAIPQTQNRAAYYPPSQIAQLRPSPRWTAQGARPHPFQNMPGAIRP

SEQ ID NO: 1594 - protein, 57 aa, Homo sapiens; identical to SEQ ID NO: 1149

SEQ ID NO: 1595 - protein, 78 aa, Homo sapiens; identical to SEQ ID NO: 1150

SEQ ID NO: 1596 - protein, 130 aa, Homo sapiens
  variant (1)...(130): Xaa = Any amino acid
YKLFFFFFFFFFSTKVYXXETITSCCPXWHTXSPRRVFNSXPXIIFIPKXXPXTIXWLQHXPXNEVPQXAKFYIGXTGKFKXXDGXTIGSXIMSGGXKXWXGMVPSLSXNLLLTWXGSCRILPLGNXXSX

SEQ ID NO: 1597 - protein, 73 aa, Homo sapiens
  variant (1)...(73): Xaa = Any amino acid
TSFFFFFFFFFFPPKFIXXKQSPVAVXXGTLXAPGGSLTXFLXLYSSQKXXXGQXFGYSIXPXMRSPKXLSFT

SEQ ID NO: 1598 - protein, 57 aa, Homo sapiens
  variant (1)...(57): Xaa = Any amino acid
PXYCXRXXFWDEYNXRXGVKDPPGAXSVPXRTATGDCFXXINFGGKKKKKKKKKKLV

SEQ ID NO: 1599 - protein, 69 aa, Homo sapiens
  variant (1)...(69): Xaa = Any amino acid
LVXLXXLXPIIXXXGXFPRGRILQLXLQVRRRFXLNDGTMPXQXFXPPDIXLDPMVXPSXXLNFPXSPM

SEQ ID NO: 1600 - protein, 65 aa, Homo sapiens
MLQYLNMLCQTIPLCNRLHIVFMILIKLYVETECEVKSEHKKIMHDEIAYHFIGYLLCIYTLRPL

SEQ ID NO: 1601 - protein, 64 aa, Homo sapiens
LTHLFLLKRYCPLGGEWESLLHCCSHSERTFPCTYLSTCFNLINATFCIFQTSINSAIKRCSFF

SEQ ID NO: 1602 - protein, 174 aa, Homo sapiens; identical to SEQ ID NO: 1158

SEQ ID NO: 1603 - protein, 56 aa, Homo sapiens; identical to SEQ ID NO: 794

SEQ ID NO: 1604 - protein, 52 aa, Homo sapiens; identical to SEQ ID NO: 1160

SEQ ID NO: 1605 - protein, 54 aa, Homo sapiens; identical to SEQ ID NO: 1161

SEQ ID NO: 1606 - protein, 70 aa, Homo sapiens; identical to SEQ ID NO: 1162

SEQ ID NO: 1607 - protein, 50 aa, Homo sapiens; identical to SEQ ID NO: 1163

SEQ ID NO: 1608 - protein, 143 aa, Homo sapiens; identical to SEQ ID NO: 1164

SEQ ID NO: 1609 - protein, 79 aa, Homo sapiens
  variant (1)...(79): Xaa = Any amino acid
LKQRNTLKDGIIMIXTLLIIXXXIVPIFLLLDKDDSKAGMEEDHTYEGLDIDQTATYEDIVTLRTGEVKWSVGEHPGQE

SEQ ID NO: 1610 - protein, 87 aa, Homo sapiens; identical to SEQ ID NO: 1515

SEQ ID NO: 1611 - protein, 113 aa, Homo sapiens
  variant (1)...(113): Xaa = Any amino acid
WGVRERGWAMSQAAPKQSLRPGSLHPGHGATWLSLLAWVLTYRPLHFPCPQRHYVLIGGCLVNVQALVGVIFLHASLAVILVQQQEDRHDXXXDDQQRXDHDDTILQRVPLLQ

SEQ ID NO: 1612 - protein, 115 aa, Homo sapiens; identical to SEQ ID NO: 1143

SEQ ID NO: 1613 - protein, 55 aa, Homo sapiens; identical to SEQ ID NO: 1144

SEQ ID NO: 1614 - protein, 51 aa, Homo sapiens; identical to SEQ ID NO: 1145

SEQ ID NO: 1615 - protein, 136 aa, Homo sapiens
YLKVIVALGMPGQEDEGALWTQQSAEFRSGKPMVAGTPCFLPLLSACVTHINGNNFFQLLAEVGEAGSLHREGLSSLLLPASFCFGCREWFIHTLIPSPPLVDGGLAFSIPVFWCLPLSATLNHLPWSCCVMGTCL

SEQ ID NO: 1616 - protein, 79 aa, Homo sapiens
TRPTKARSMSPQVSSQSRLTLSSGRVYIAVFNTSRSLWLWGCRGRRTRVRCGHSSPRNSVLGSQWSPAPLASSLCCLPV

SEQ ID NO: 1617 - protein, 73 aa, Homo sapiens
HTSMAITSSNSSQKWERPAACTERGFPLSCSPLRSVLAAESGSSILSFPRLPLWTGVLPFQFLCFGVFPYLLP

SEQ ID NO: 1618 - protein, 57 aa, Homo sapiens
LYLIPQGHCGSGDAGAGGRGCAVDTAVRGIPFWEANGRRHPLLPPSVVCLCDTHQWQ

SEQ ID NO: 1619 - protein, 89 aa, Homo sapiens
LLPTPRRSGRGRQPAPRGAFLSLAPRFVLFWLQRVVHPYSHSLASPCGRGSCLFNSCVLVSSLICYPESPALVLLCDGNMLVNCVTNLL

SEQ ID NO: 1620 - protein, 124 aa, Homo sapiens
KGKTPVHKGRRGNESMDEPLSAAKTERSGEQERGKPLSVQAAGLSHFCEELEEVIAIDVCHTGRQQREEARGAGDHWLPRTEFRGLLCPQRTLVLLPRHPQSHNDLEVLNTAIYTRPELRVNLD

SEQ ID NO: 1621 - protein, 123 aa, Homo sapiens
FRVADKGRHQNTGIEKARPPSTRGGEGMRVWMNHSLQPKQNEAGSKREESPSRCRLPASPTSARSWKKLLPLMCVTQADNRGRKQGVPATIGFPERNSADCCVHSAPSSSCPGIPRATMTLRY

SEQ ID NO: 1622 - protein, 117 aa, Homo sapiens; identical to SEQ ID NO: 1170

SEQ ID NO: 1623 - protein, 117 aa, Homo sapiens; identical to SEQ ID NO: 1171

SEQ ID NO: 1624 - protein, 83 aa, Homo sapiens; identical to SEQ ID NO: 1172

SEQ ID NO: 1625 - protein, 67 aa, Homo sapiens
  variant (1)...(67): Xaa = Any amino acid
LKQRNTLKDGIIMIXTLLIILFIIVPIFLLLDKDDSKAGMEEDHXYEGLDIDQTATYEDIVTLRTGE

SEQ ID NO: 1626 - protein, 52 aa, Homo sapiens
  variant (1)...(52): Xaa = Any amino acid
ITNWVTLNELIKFQAIVHATNSQRPRKLLAEKVVYVGXWIPALLLTIXDFIF

SEQ ID NO: 1627 - protein, 102 aa, Homo sapiens
  variant (1)...(102): Xaa = Any amino acid
LQVLQDAFCXXXYYIHLIINFLLRLCRLGIFXXKEKIWPLLKVCACQNFKKIPHVKVPSASAGDSVLVLLSLDWRSLFPSSLVPVLQLLFLANRCANELPTG

SEQ ID NO: 1628 - protein, 86 aa, Homo sapiens
  variant (1)...(86): Xaa = Any amino acid
ISFSDSVGWAFSXSRKKFGPCSRSVHVKTLRRFPMLRYLQPVLVILSLSFYPWIGVPSFLVHLFQSFNFCFLLTGVQMNYQLGNLE

SEQ ID NO: 1629 - protein, 62 aa, Homo sapiens
  variant (1)...(62): Xaa = Any amino acid
RYLNMGNLLKVLTCTDLEQGPNFFLXXENAQPTESEKEIYNQVNVVXXXAEGILEDLQSYXG

SEQ ID NO: 1630 - protein, 99 aa, Homo sapiens; identical to SEQ ID NO: 1180

SEQ ID NO: 1631 - protein, 57 aa, Homo sapiens; identical to SEQ ID NO: 1181

SEQ ID NO: 1632 - protein, 87 aa, Homo sapiens; identical to SEQ ID NO: 1182

SEQ ID NO: 1633 - protein, 53 aa, Homo sapiens; identical to SEQ ID NO: 1183

SEQ ID NO: 1634 - protein, 59 aa, Homo sapiens; identical to SEQ ID NO: 1184

SEQ ID NO: 1635 - protein, 98 aa, Homo sapiens; identical to SEQ ID NO: 1188
  variant (1)...(98): Xaa = Any amino acid

SEQ ID NO: 1636 - protein, 66 aa, Homo sapiens
KDGIIMIQTLLIILFIIVPIFLLLDKDDSKAGMEEDHTYEGLDIDQTATYEDIVTLRTGEVKWFCR

SEQ ID NO: 1637 - protein, 84 aa, Homo sapiens
  variant (1)...(84): Xaa = Any amino acid
PAPRSWGDLALTPGLGXSPTEPLHFPCPQRHYVLIGGCLVNVQALVGVIFLHASLAVILVQQQEDRHDDEEDDQQRLDHDDTIL

SEQ ID NO: 1638 - protein, 64 aa, Homo sapiens
  variant (1)...(64): Xaa = Any amino acid
CTQVMGRPGSHSWPGCXTYRTTSLPLSAASLCPHRWLSGQCPGPRRCDLPPCQPCCHPCPAAGR

SEQ ID NO: 1639 - protein, 59 aa, Homo sapiens; identical to SEQ ID NO: 1069

SEQ ID NO: 1640 - protein, 51 aa, Homo sapiens
EQNDNTQKFSKWDFPGRANERPYCYAIWSKTTLQEDVFTGGPRAKLLHEGI

SEQ ID NO: 1641 - protein, 82 aa, Homo sapiens
  variant (1)...(82): Xaa = Any amino acid
DFGGCPDYEWALPHCPGGSSDDSSRDLCTHLCDCVVPSLGRHYVYYFRITPGSNGEKLQEVLGQRKNDNEFIXPXCCHFWND

SEQ ID NO: 1642 - protein, 155 aa, Homo sapiens
  variant (1)...(155): Xaa = Any amino acid
DCQKSCSCSPHFVICFIFRSFESKMTTPRNSVNGTFPAEPMKGPIAMQSGPKPLFRRMSSLVGPAQSFFMRESKTLGAVQIMNGLFHIALGGLLMIPAGIYAPICVTVWYPLWGGIMYIISGSLLAATEKNSRKCWVKGKMIMNSLXXFAAISGM

SEQ ID NO: 1643 - protein, 55 aa, Homo sapiens
  variant (1)...(55): Xaa = Any amino acid
IIPEMAAXRXNEFIIIFPLTQHFLEFFSVAARSDPEIIYIMPPQRGYHTVTQMGA

SEQ ID NO: 1644 - protein, 89 aa, Homo sapiens
IPAGIIRRPPRAMWKSPFIIWTAPKVLDSLMKKLCAGPTSEDILLKSGFGPDCIAIGPFIGSAGKVPFTEFLGVVILLSKLLKIKQITK

SEQ ID NO: 1645 - protein, 62 aa, Homo sapiens
SGNNIHNASPERVPHSHTDGCIDPCWNHQKTPQGNVEEPIHNLDSPQSLRFPHEEALRGAHQ

SEQ ID NO: 1646 - protein, 64 aa, Homo sapiens; identical to SEQ ID NO: 1072

SEQ ID NO: 1647 - protein, 58 aa, Homo sapiens
CPSAITIQQLQAGLADREYGRRTRSDENMHATIFTTEHTVFCDRNCRPCWGTRYSRPH

SEQ ID NO: 1648 - protein, 71 aa, Homo sapiens
KSRPTCSHWTDVQVQSPYSSYRQGWLIGSMGEGHAQMKTCMQRFSPLNTLFSVIETVGPAGGQDIHGLTSQ

SEQ ID NO: 1649 - protein, 73 aa, Homo sapiens
GREYLVPQQGRQFLSQKTVCSVVKIVACMFSSERVLLPYSLSASPACSCCMVIALGHQSNDCKSAWIFTCRGY

SEQ ID NO: 1650 - protein, 88 aa, Homo sapiens [sequence omitted]

SEQ ID NO: 1651 - protein, 69 aa, Homo sapiens
  variant (1)...(69): Xaa = Any amino acid
LLLPDTLHRLVDFGMSGLRLHARGCNTMYSKATLGVIDQTEILSRLXNADDIHESSXGRXYQFGPCHXF

SEQ ID NO: 1652 - protein, 57 aa, Homo sapiens [sequence omitted]

SEQ ID NO: 1653 - protein, 66 aa, Homo sapiens
  variant (1)...(66): Xaa = Any amino acid
IRRKFSPVLXMLMTSMNPAXVGXISSDLAIXFNEPLHANLLYFIXXQGILKSVPQENDEGETLSXL

SEQ ID NO: 1654 - protein, 67 aa, Homo sapiens
  variant (1)...(67): Xaa = Any amino acid
KXRECLPLIIFLRNRLKYALXXDEVKKICMQRFIKXDGKVRTDXTYXCWIHGCHQHXQDGREFPSDL

SEQ ID NO: 1655 - protein, 99 aa, Homo sapiens
  variant (1)...(99): Xaa = Any amino acid
RRFACSGSLKXMARSELIXPTXAGFMDVISIXKTGENFRLIYDTKGRFAVHRITPTSMKSEPRHSKIDKAMECVWKQKLYEPVVIPVGRLFRPNEKQVA

SEQ ID NO: 1656 - protein, 115 aa, Homo sapiens; identical to SEQ ID NO: 1194
  variant (1)...(115): Xaa = Any amino acid

SEQ ID NO: 1657 - protein, 70 aa, Homo sapiens; identical to SEQ ID NO: 1195
  variant (1)...(70): Xaa = Any amino acid

SEQ ID NO: 1658 - protein, 63 aa, Homo sapiens; identical to SEQ ID NO: 1196
  variant (1)...(63): Xaa = Any amino acid

SEQ ID NO: 1659 - protein, 50 aa, Homo sapiens; identical to SEQ ID NO: 1197
  variant (1)...(50): Xaa = Any amino acid

SEQ ID NO: 1660 - protein, 92 aa, Homo sapiens; identical to SEQ ID NO: 1198
  variant (1)...(92): Xaa = Any amino acid

SEQ ID NO: 1661 - protein, 55 aa, Homo sapiens; identical to SEQ ID NO: 1199
  variant (1)...(55): Xaa = Any amino acid

SEQ ID NO: 1662 - protein, 115 aa, Homo sapiens; identical to SEQ ID NO: 1143

SEQ ID NO: 1663 - protein, 51 aa, Homo sapiens; identical to SEQ ID NO: 1201
  variant (1)...(51): Xaa = Any amino acid

SEQ ID NO: 1664 - protein, 115 aa, Homo sapiens; identical to SEQ ID NO: 1143

SEQ ID NO: 1665 - protein, 55 aa, Homo sapiens; identical to SEQ ID NO: 1144

SEQ ID NO: 1666 - protein, 51 aa, Homo sapiens; identical to SEQ ID NO: 1145

SEQ ID NO: 1667 - protein, 62 aa, Homo sapiens
  variant (1)...(62): Xaa = Any amino acid
VFLSPWVKSESGSLCLSVLVYCWSESKFLIKXVDLALTVYADIGETIWLFQTSQDLSKKTWL

SEQ ID NO: 1668 - protein, 86 aa, Homo sapiens
  variant (1)...(86): Xaa = Any amino acid
EPSQQXLSRIYSLTSNKQALRDTESQIQILPMGIKRLRLXPHLEXYLHHKYIITGSLYEADTKCYRHSQNIILGNNVIKMPNXSQQ

SEQ ID NO: 1669 - protein, 70 aa, Homo sapiens
RDNVICTPYDISTFLATTSGRHSPKLEKKEIEDFCLCKVLKICSKLIKLSLCSFLQQMIQKKKKKKKKSL

SEQ ID NO: 1670 - protein, 50 aa, Homo sapiens
IICCRKEHKDSFINLEQILRTLHRQKSSISFFSNFGECLPLVVAKNVEIS

SEQ ID NO: 1671 - protein, 115 aa, Homo sapiens
YDEDRLFFFDFSQNTRVPCLPEFADWAQEQGDAPAILFDKEFCEWMIQQIGPKLDGKIPVSRGFPIAEVFTLKPLEFGKPNTLVCFVSNLFPPMLTVNWQHHSVPVEGFGPTFVS

SEQ ID NO: 1672 - protein, 65 aa, Homo sapiens [sequence omitted]

SEQ ID NO: 1673 - protein, 77 aa, Homo sapiens
DKSRPKSFHRDGMMLPVHCQHGWEEITDKTDQSVGLAKLQGLQREHFSDRKPSGHRDFPIKFWPYLLDHPLAELFVK

SEQ ID NO: 1674 - protein, 73 aa, Homo sapiens
CCQFTVSMGGKRLLTKQTKVLGLPNSRGFSVNTSAIGNPLDTGIFPSSFGPICWIIHSQNSLSNKMAGASPCS

SEQ ID NO: 1675 - protein, 199 aa, Homo sapiens; identical to SEQ ID NO: 1216

SEQ ID NO: 1676 - protein, 76 aa, Homo sapiens; identical to SEQ ID NO: 1217

SEQ ID NO: 1677 - protein, 122 aa, Homo sapiens; identical to SEQ ID NO: 1218

SEQ ID NO: 1678 - protein, 56 aa, Homo sapiens; identical to SEQ ID NO: 1219

SEQ ID NO: 1679 - protein, 87 aa, Homo sapiens; identical to SEQ ID NO: 1348

SEQ ID NO: 1680 - protein, 55 aa, Homo sapiens; identical to SEQ ID NO: 1349

SEQ ID NO: 1681 - protein, 123 aa, Homo sapiens
IRMTEKAPEPHVEEDDDDELDSKLNYKPPPQKSLKELQEMDKDDESLIKYKKTLLGDGPVVTDPKAPNVVVTRLTLVCESAPGPITMDLTGDLEALKKETIVLKEGSEYRVKIHFKVNRDIVS

SEQ ID NO: 1682 - protein, 191 aa, Homo sapiens; identical to SEQ ID NO: 1281

SEQ ID NO: 1683 - protein, 51 aa, Homo sapiens; identical to SEQ ID NO: 1282

SEQ ID NO: 1684 - protein, 51 aa, Homo sapiens; identical to SEQ ID NO: 1283

SEQ ID NO: 1685 - protein, 55 aa, Homo sapiens; identical to SEQ ID NO: 1284

SEQ ID NO: 1686 - protein, 62 aa, Homo sapiens; identical to SEQ ID NO: 1220

SEQ ID NO: 1687 - protein, 86 aa, Homo sapiens; identical to SEQ ID NO: 1221

SEQ ID NO: 1688 - protein, 95 aa, Homo sapiens; identical to SEQ ID NO: 1222
  variant (1)...(95): Xaa = Any amino acid

SEQ ID NO: 1689 - protein, 50 aa, Homo sapiens; identical to SEQ ID NO: 1232

SEQ ID NO: 1690 - protein, 94 aa, Homo sapiens; identical to SEQ ID NO: 1233

SEQ ID NO: 1691 - protein, 53 aa, Homo sapiens; identical to SEQ ID NO: 1234
  variant (1)...(53): Xaa = Any amino acid

SEQ ID NO: 1692 - protein, 59 aa, Homo sapiens; identical to SEQ ID NO: 1184

SEQ ID NO: 1693 - protein, 91 aa, Homo sapiens; identical to SEQ ID NO: 1236

SEQ ID NO: 1694 - protein, 55 aa, Homo sapiens; identical to SEQ ID NO: 1237

SEQ ID NO: 1695 - protein, 54 aa, Homo sapiens; identical to SEQ ID NO: 1238

SEQ ID NO: 1696 - protein, 147 aa, Homo sapiens; identical to SEQ ID NO: 1239

SEQ ID NO: 1697 - protein, 135 aa, Homo sapiens; identical to SEQ ID NO: 1240

SEQ ID NO: 1698 - protein, 151 aa, Homo sapiens; identical to SEQ ID NO: 1241

SEQ ID NO: 1699 - protein, 60 aa, Homo sapiens
PGFPLWEVLFLAGQLGREWRTEKRVEITCSLELSWGTSPHSVHKSLPLEMECSFYHGKRI

SEQ ID NO: 1700 - protein, 57 aa, Homo sapiens
VGHDSEQDRPKEVQGLWSGMETSSERTHGRSRCRRYTSSRITHRMDPLEVKTCGKTV

SEQ ID NO: 1701 - protein, 50 aa, Homo sapiens [sequence omitted]

SEQ ID NO: 1702 - protein, 53 aa, Homo sapiens
KWSVHFIMGKESEWDMIQNRTGPRKCRGCGVGWRQALKGHMGDLDVEGTQVVG

SEQ ID NO: 1703 - protein, 65 aa, Homo sapiens
HPGFQVLSNTVGPLKASSFLPLPQSHPYQDKGLLTVLSIAPTVTMFASLLSPTEQLPITLSYHMS

SEQ ID NO: 1704 - protein, 64 aa, Homo sapiens [sequence omitted]

SEQ ID NO: 1705 - protein, 52 aa, Homo sapiens
AWGIHLPRISILASRSSLIQWGLSRHPLSFLYLKATLIRIKGSSLSSPLPPR

SEQ ID NO: 1706 - protein, 67 aa, Homo sapiens
QCLLPYFLQLSSFLLHCLTTCLNLQWIHPVSYPTTCVPSTSRSPMCPFRACLHPTPQPLHFLGPVLF

SEQ ID NO: 1707 - protein, 115 aa, Homo sapiens; identical to SEQ ID NO: 1143

SEQ ID NO: 1708 - protein, 55 aa, Homo sapiens; identical to SEQ ID NO: 1144

SEQ ID NO: 1709 - protein, 51 aa, Homo sapiens; identical to SEQ ID NO: 1247
  variant (1)...(51): Xaa = Any amino acid

SEQ ID NO: 1710 - protein, 58 aa, Homo sapiens
LTRGLTPREFIQFLNVRSSLVSPSRAPQSMSWFSGLCRAGYLLKRLAIKAKFNLGFPR

SEQ ID NO: 1711 - protein, 76 aa, Homo sapiens; identical to SEQ ID NO: 1337

SEQ ID NO: 1712 - protein, 63 aa, Homo sapiens
VTVQMIDSRVNTQGVHPVPKCPLFSRLTFKSPPVNVLVLWFVQGRVSVKEVGNKSQVQLGVPS

SEQ ID NO: 1713 - protein, 156 aa, Homo sapiens
RGNPKLNLAFIANLFNRYPALHKPENQDIDWGALEGETREERTFRNWMNSLGVNPRVNHLYSDLSDALVIFQLYEKIKVPVDWNRVNKPPYPKLGGNMKKLENCNYAVELGKNQAKFSLVGIGGQDLNEGNRTLTLALIWQLMRRYTLNILEEIGG

SEQ ID NO: 1714 - protein, 62 aa, Homo sapiens; identical to SEQ ID NO: 1248
  variant (1)...(62): Xaa = Any amino acid

SEQ ID NO: 1715 - protein, 86 aa, Homo sapiens; identical to SEQ ID NO: 1249
  variant (1)...(86): Xaa = Any amino acid

SEQ ID NO: 1716 - protein, 69 aa, Homo sapiens [sequence omitted]

SEQ ID NO: 1717 - protein, 102 aa, Homo sapiens; identical to SEQ ID NO: 1251

SEQ ID NO: 1718 - protein, 77 aa, Homo sapiens [sequence omitted]

SEQ ID NO: 1719 - protein, 60 aa, Homo sapiens [sequence omitted]

SEQ ID NO: 1720 - protein, 115 aa, Homo sapiens; identical to SEQ ID NO: 1143

SEQ ID NO: 1721 - protein, 55 aa, Homo sapiens; identical to SEQ ID NO: 1255
  variant (1)...(55): Xaa = Any amino acid

SEQ ID NO: 1722 - protein, 51 aa, Homo sapiens; identical to SEQ ID NO: 1256
  variant (1)...(51): Xaa = Any amino acid

SEQ ID NO: 1723 - protein, 62 aa, Homo sapiens [sequence omitted]

SEQ ID NO: 1724 - protein, 62 aa, Homo sapiens
LKLEKGRMEESQNESLATLTIQGIRFEDNGIYFCQQKCNNTSEVYQGCGTELRVMGFSTLAQ

SEQ ID NO: 1725 - protein, 60 aa, Homo sapiens [sequence omitted]

SEQ ID NO: 1726 - protein, 88 aa, Homo sapiens; identical to SEQ ID NO: 1265

SEQ ID NO: 1727 - protein, 57 aa, Homo sapiens
  variant (1)...(57): Xaa = Any amino acid
IQGQNQQQXLQSSADIKYKLQGQFLFEGLFXFXEASMRCXHLPGANFYSQLTHAXNA

SEQ ID NO: 1728 - protein, 65 aa, Homo sapiens
RDNVICTPYDISTFLATTSGRHSPKLEKKEIEDFCLCKVLKICSKLIKLSLCSFLQKKKKKKKKR

SEQ ID NO: 1729 - protein, 56 aa, Homo sapiens
LFFFFFFFFCRKEHKDSFINLEQILRTLHRQKSSISFFSNFGECLPLVVAKNVEIS

SEQ ID NO: 1730 - protein, 73 aa, Homo sapiens
  variant (1)...(73): Xaa = Any amino acid
RSVLEPDANETQQMLFLRHNSLFXELRNPVYAXPXXTFLLLLCMKMPTPXMMSPSXKPPAPVNVLLRAXSDXA

SEQ ID NO: 1731 - protein, 52 aa, Homo sapiens
  variant (1)...(52): Xaa = Any amino acid
SFQXAQEPCLCXSSXNFLAPPVHEDAHSTXDEPQHXAPSSRQCLTPGXIRLX

SEQ ID NO: 1732 - protein, 64 aa, Homo sapiens
  variant (1)...(64): Xaa = Any amino acid
HLAPGQTFNFQIGYCCQXVAXKSVSIIXLFDSXHCXSHWASNHVPXFLXXQIXKTXKKKKKKKK

SEQ ID NO: 1733 - protein, 52 aa, Homo sapiens
  variant (1)...(52): Xaa = Any amino acid
TGFLSXLKRLLCLRKSICCVSLASGSRTDLQLPNWILLPXSCXEVSFYHXAL

SEQ ID NO: 1734 - protein, 59 aa, Homo sapiens
  variant (1)...(59): Xaa = Any amino acid
PCLXSKVTRKRPCLPSMTLMEEMLXXAFRCMTQGKTAKNLVLALLILLFVLFLGVXRAK

SEQ ID NO: 1735 - protein, 54 aa, Homo sapiens
  variant (1)...(54): Xaa = Any amino acid
EFXEQNDXTQKFSKWDFPGRTNERPYCYAIWXKTTLXEDVFTGGPHXKLLXEGI

SEQ ID NO: 1736 - protein, 119 aa, Homo sapiens
  variant (1)...(119): Xaa = Any amino acid
DCQKSCSCSPHFVICFIFRSXESKMXTPRNSVNGTFPAEPMKGPIAMQSGXKPLXXRMSSLVGPXQSFFXRESXTLGAXQIXNGLFHIALGGLXMIPXGIYAPICVTVWXPLWGGIMYI

SEQ ID NO: 1737 - protein, 59 aa, Homo sapiens
  variant (1)...(59): Xaa = Any amino acid
NIHNASPERXPHSHTDGCIDPXWDHXKTPQGNVEEPIXNLXSPQSXRFPXEEALXGAHQ

SEQ ID NO: 1738 - protein, 64 aa, Homo sapiens
  variant (1)...(64): Xaa = Any amino acid
ISGCXHFALXTPKNKTNNKMRRARTRFLAVLPCVMHLNXSXSISSMSVIEGRHGLFRVTLDXRQ

SEQ ID NO: 1739 - protein, 89 aa, Homo sapiens
  variant (1)...(89): Xaa = Any amino acid
IXXGIIXRPPRAMWKSPXIIWXAPKXLDSLXKKLXVGPTSEDILXKSGFXPDCIAIGPFIGSAGKVPFTEFLGXVILLXKLLKIKQITK

SEQ ID NO: 1740 - protein, 58 aa, Homo sapiens
  variant (1)...(58): Xaa = Any amino acid
LVHFLNFPHSEFQSLLLHHVCRNLVLFSVYLHITLKTLLFENFSISQINIHFHNLPLX

SEQ ID NO: 1741 - protein, 94 aa, Homo sapiens
  variant (1)...(94): Xaa = Any amino acid
QQKQNFRFQNLLLAKFILIIPASYGYITIKTEYHRVIALFENSXILQCTSPMKQXISILKIKRKQHREVKCGVAKLWGLLEGTNLNRLFLLSLE

SEQ ID NO: 1742 - protein, 93 aa, Homo sapiens
  variant (1)...(93): Xaa = Any amino acid
VNLYFHGYSKERRNNLLRLVPSSRPHNFATPHLTSLCCFLLIFKMEIXCFIGEVHCKMXEFSNNAITLWYSVLIVIYPYEAGIMRINFANNKF

SEQ ID NO: 1743 - protein, 62 aa, Homo sapiens
VFLSPWVKSESGSLCLSVLVYCWSESKFLIKAVDLAPTVYADIGETIWLFQTSQDLSKKTWL

SEQ ID NO: 1744 - protein, 116 aa, Homo sapiens
EPCFITRSSYSNPVMFEITKLSLQCLHKLWEPSQQLLSRIYSLTSNKQALRDTESQIQILPMGIKRLRLSPHLENYLHHKYIITGSLYEADTKCYRHSQNIILGNNVIKMPNLSQQ

SEQ ID NO: 1745 - protein, 87 aa, Homo sapiens; identical to SEQ ID NO: 1515

SEQ ID NO: 1746 - protein, 113 aa, Homo sapiens [sequence omitted]

SEQ ID NO: 1747 - protein, 79 aa, Homo sapiens; identical to SEQ ID NO: 1517

SEQ ID NO: 1748 - protein, 52 aa, Homo sapiens
RTIGGCRHVLLEQLPRTTLLRSGFQRPPNFVSFNSFRPDLLFGSVTGRQVST

SEQ ID NO: 1749 - protein, 115 aa, Homo sapiens
HMPDWLFATHLKDTTQSMEAFNRTALPISGLLADADMFYSSSYQGPLYCDQDSNDHLISYLSTLFDRTSYSEALQEDRSQLRDQITLSTLWDRCNLALQGSAPITSRPANTDLEV

SEQ ID NO: 1750 - protein, 52 aa, Homo sapiens
VETCLPVTLPNKRSGRKELKDTKLGGRWNPDRSKVVLGNCSSRTCLHPPIVR

SEQ ID NO: 1751 - protein, 56 aa, Homo sapiens
NMSASANSPLIGRAVRLKASIDWVVSFKWVAKSQSGICHEGFSDRLMVCCLTSLGK

SEQ ID NO: 1752 - protein, 86 aa, Homo sapiens; identical to SEQ ID NO: 1221

SEQ ID NO: 1753 - protein, 62 aa, Homo sapiens; identical to SEQ ID NO: 1220

SEQ ID NO: 1754 - protein, 191 aa, Homo sapiens; identical to SEQ ID NO: 1281

SEQ ID NO: 1755 - protein, 51 aa, Homo sapiens; identical to SEQ ID NO: 1282

SEQ ID NO: 1756 - protein, 51 aa, Homo sapiens; identical to SEQ ID NO: 1283

SEQ ID NO: 1757 - protein, 55 aa, Homo sapiens; identical to SEQ ID NO: 1284

SEQ ID NO: 1758 - protein, 87 aa, Homo sapiens; identical to SEQ ID NO: 1515

SEQ ID NO: 1759 - protein, 113 aa, Homo sapiens [sequence omitted]

SEQ ID NO: 1760 - protein, 79 aa, Homo sapiens; identical to SEQ ID NO: 1517

SEQ ID NO: 1761 - protein, 106 aa, Homo sapiens; identical to SEQ ID NO: 1289

SEQ ID NO: 1762 - protein, 53 aa, Homo sapiens; identical to SEQ ID NO: 1290

SEQ ID NO: 1763 - protein, 55 aa, Homo sapiens; identical to SEQ ID NO: 1144

SEQ ID NO: 1764 - protein, 51 aa, Homo sapiens; identical to SEQ ID NO: 1292

SEQ ID NO: 1765 - protein, 51 aa, Homo sapiens; identical to SEQ ID NO: 1145

SEQ ID NO: 1766 - protein, 101 aa, Homo sapiens
SHLLEGGQRGQDGAADPHGVLALRRSNDLDLHCAGCQGSDLLLHPVGNARVHGGAARQHCVGVQVFADVHVTLHDGVEGSFVDATGLHAQEGRLEECLRAA

SEQ ID NO: 1767 - protein, 124 aa, Homo sapiens
VIVRLEAFAVDDGGAGLVILLLADHICWKVDSEARMEPPIHTEYLRSGGAMILIFIVLGARAVISFCILSAMPGYMVVPPDSTVLAYRSLRMSTSHFMMELKVVSWMPQDSMPRKEGWKSASGQ

SEQ ID NO: 1768 - protein, 100 aa, Homo sapiens
RCPEALFQPSFLGMESCGIHETTFNSIMKCDVDIRKDLYANTVLSGGTTMYPGIADRMQKEITALAPSTMKIKIIAPPERKYSVWIGGSILASLSTFQQM

SEQ ID NO: 1769 - protein, 115 aa, Homo sapiens; identical to SEQ ID NO: 1297

SEQ ID NO: 1770 - protein, 53 aa, Homo sapiens; identical to SEQ ID NO: 1267

SEQ ID NO: 1771 - protein, 55 aa, Homo sapiens; identical to SEQ ID NO: 1299

SEQ ID NO: 1772 - protein, 53 aa, Homo sapiens [sequence omitted]

SEQ ID NO: 1773 - protein, 54 aa, Homo sapiens
LGQELCPVPAAFISTHVHSLLRPRPPGICPGLPHPTSIRSCPRCMSSIGRIARW

SEQ ID NO: 1774 - protein, 63 aa, Homo sapiens [sequence omitted]

SEQ ID NO: 1775 - protein, 68 aa, Homo sapiens
GERPRVGTGNLRRAGNGSLRFRKLLCKLRGWLGPKGCSARRASCELSKALGSQHPKSLWLQSCVCTTH

SEQ ID NO: 1776 - protein, 72 aa, Homo sapiens
GIRSQLSLNSQSPPWASLPNDLVALGAPEVNPEILPPSTLGSDLCPSLCHKEISVKRVGTGGFRPCSKATAR

SEQ ID NO: 1777 - protein, 52 aa, Homo sapiens
VLRQILSLLIQSEPDLTFSPPSNPAYAGHASWATPDGGGMREPGADTRRSGP

SEQ ID NO: 1778 - protein, 60 aa, Homo sapiens
SHRLLGCCEPRALLSSQLARRAEQPFGPSHPRSLHRSFLNLRDPFPALLKFPVPTLGLSP

SEQ ID NO: 1779 - protein, 52 aa, Homo sapiens
NTPSVNSGLRPLPFSVSQGNFGQEGGNRWFQTVQQSHCQVSFKANFISSYSV

SEQ ID NO: 1780 - protein, 78 aa, Homo sapiens; identical to SEQ ID NO: 1307

SEQ ID NO: 1781 - protein, 134 aa, Homo sapiens [sequence omitted]

SEQ ID NO: 1782 - protein, 66 aa, Homo sapiens; identical to SEQ ID NO: 1309

SEQ ID NO: 1783 - protein, 141 aa, Homo sapiens; identical to SEQ ID NO: 1310

SEQ ID NO: 1784 - protein, 53 aa, Homo sapiens
FFFLHRIGRGGRFGRKGVAINFVTEEDKRILRDIETFYNTTVEEMPMNVADLI

SEQ ID NO: 1785 - protein, 51 aa, Homo sapiens
  variant (1)...(51): Xaa = Any amino acid
KMGSVKSFFLRNLFPSSVEMXXLDVLYHLIIYLXTKRYKCXIKSANYVKLA

SEQ ID NO: 1786 - protein, 67 aa, Homo sapiens
SPIQQQRALHPKLSSQELNKVSHIHGHLLHCSIVESLNVTKNPLVFFSNKVYSHTFPPKSTPSANSV

SEQ ID NO: 1787 - protein, 58 aa, Homo sapiens
KVSMSRRILLSSSVTKFIATPFLPNRPPLPILCKKKNQNVTSHIMYKLLNMTIHLLTT

SEQ ID NO: 1788 - protein, 61 aa, Homo sapiens; identical to SEQ ID NO: 1311

SEQ ID NO: 1789 - protein, 51 aa, Homo sapiens; identical to SEQ ID NO: 1312

SEQ ID NO: 1790 - protein, 192 aa, Homo sapiens
LLWKGSFKPSEHVKPRAPGNLTVHTNVSDTLLLTWSNPYPPDNYLYNHLTYAVNIWSENDPADFRIYNVTYLEPSLRIAASTLKSGISYRARVRAWAQCYNTTWSEWSPSTKWHNSYREPFEQHLLLGVSASCIVILAVCLLCYVSITKIKKEWWDQIPNPARSRLVAIIIQDAQGSQWEKRSRGQEPAKCP

SEQ ID NO: 1791 - protein, 75 aa, Homo sapiens [sequence omitted]

SEQ ID NO: 1792 - protein, 64 aa, Homo sapiens
RPAGGAARRAPCRSCATWCWGSTHSRWCYSTEPRPSPVPCRKSQTSGCWLRCGGRVLGRSRYRF

SEQ ID NO: 1793 - protein, 104 aa, Homo sapiens [sequence omitted]

SEQ ID NO: 1794 - protein, 71 aa, Homo sapiens
VGHVIDSEICRVVFTPNVDCIGEMIIQVIVRGIRVAPGQQQSVGDIGVNCQVSWGPGFHMLAGLEGALPQQ

SEQ ID NO: 1795 - protein, 115 aa, Homo sapiens; identical to SEQ ID NO: 1143

SEQ ID NO: 1796 - protein, 55 aa, Homo sapiens; identical to SEQ ID NO: 1144

SEQ ID NO: 1797 - protein, 51 aa, Homo sapiens; identical to SEQ ID NO: 1145

SEQ ID NO: 1798 - protein, 54 aa, Homo sapiens
PVLRQIWGWGEHFGLKAQSSLPCFFCAYHSPLASTSVRWGGDKKRSKVKKKVEN

SEQ ID NO: 1799 - protein, 56 aa, Homo sapiens
DGGGTKREVKLRRKWKIKKKMSKFLHAYISAYAEDLPVCCTLNHTFRTPQKPSLSP

SEQ ID NO: 1800 - protein, 59 aa, Homo sapiens; identical to SEQ ID NO: 1321

SEQ ID NO: 1801 - protein, 64 aa, Homo sapiens; identical to SEQ ID NO: 1322

SEQ ID NO: 1802 - protein, 57 aa, Homo sapiens; identical to SEQ ID NO: 1323

SEQ ID NO: 1803 - protein, 51 aa, Homo sapiens; identical to SEQ ID NO: 1324

SEQ ID NO: 1804 - protein, 74 aa, Homo sapiens
MDRGPKRKRYLKTNGRNLEAHDPEPRKDRSLKTWGNPKMRTLNPTSFLLFTLLTLRYFQFSCLSLSLILLRCTF

SEQ ID NO: 1805 - protein, 77 aa, Homo sapiens
GSHLGISPGLQASILPGFWVMGLQIPAVSLEIPFSLGSSIHLGRLCDRGLPSLGCRSSSYNPGLILGRWPCVTSLSS

SEQ ID NO: 1806 - protein, 85 aa, Homo sapiens
YCQSKGNRQHQKVHLKRIRLKDKQENWKYLRVRSVNNRKEVGFRVLILGFPQVFKLLSFLGSGSWASRFRPLVLRYLFRLGPLSI

SEQ ID NO: 1807 - protein, 50 aa, Homo sapiens; identical to SEQ ID NO: 1332

SEQ ID NO: 1808 - protein, 51 aa, Homo sapiens; identical to SEQ ID NO: 1333

SEQ ID NO: 1809 - protein, 92 aa, Homo sapiens [sequence omitted]

SEQ ID NO: 1810 - protein, 50 aa, Homo sapiens
GVLNFNLRGPTVPSKTETTELLGWRLEAGAEGLIPVVGKLRQPPKVEVGE

SEQ ID NO: 1811 - protein, 66 aa, Homo sapiens
VTPFPFPEIGTSYSKGERRAQRDLYRTSLAHGDWRQRVGSWRGVQSLQQILRASKSSSWTFLLIWI

SEQ ID NO: 1812 - protein, 83 aa, Homo sapiens
KSRLRETSRKSSLKPSIFVGGTGLLSSSPPSASSHHVQERSCTDLSGLSFLLWNNLFLFQEREMVSLRPWTASPARLGPQVPL

SEQ ID NO: 1813 - protein, 82 aa, Homo sapiens
SPQYLLEGLDSSPAPHPLPPVTMCKRGPVQISLGSPFSFGITCSYFRKGKWCHSGPGLLLQPGWGHRSHSSEGQCLRIKAVF

SEQ ID NO: 1814 - protein, 53 aa, Homo sapiens
IQIKRNVQEELFEALNICWRDWTPLQLPTLCLQSPCAREVLYRSLWALLSPLE

SEQ ID NO: 1815 - protein, 116 aa, Homo sapiens
  variant (1)...(116): Xaa = Any amino acid
PKEVRQLAEDFLKDYIHINIGALELSANHNILQIVDVCHDXXKDEKLIXLMEEIMSEKENKTIVFVETKRRCDELTRKMRRDGWPAMGIHXDKSQQERDWALNESKHGKAPILIXT

SEQ ID NO: 1816 - protein, 51 aa, Homo sapiens
  variant (1)...(51): Xaa = Any amino acid
SPVTLLLTLVXMDTHGRPPISPHFSGKLITSSFGFHKNNGFILLLTHDLFH

SEQ ID NO: 1817 - protein, 55 aa, Homo sapiens
  variant (1)...(55): Xaa = Any amino acid
LLXPWIPMAGHPSLLIFLVSSSHLLLVSTKTMVLFSFSLMISSIRXISFSSFXXS

SEQ ID NO: 1818 - protein, 63 aa, Homo sapiens
  variant (1)...(63): Xaa = Any amino acid
GGKMAVQISKKRKFVADGIFKAELNEFLTRELAEDGYSGVEGASYTNQDRNHYLXHQNTXCSW

SEQ ID NO: 1819 - protein, 70 aa, Homo sapiens
  variant (1)...(70): Xaa = Any amino acid
MSFLLGSWLKMATLELRVRVTPTRTEIIILXTRTXNVLGEKGRRIRELTAVVQKRFGFPEGSVELYAXKV

SEQ ID NO: 1820 - protein, 76 aa, Homo sapiens
  variant (1)...(76): Xaa = Any amino acid
TTAVSSRIRRPFSPRTXCVLVXKIMISVLVGVTRTLNSRVAIFSQLPSKKLIQFSFEDAISDKLPLLGYLHCHLAA

SEQ ID NO: 1821 - protein, 70 aa, Homo sapiens
PMWLVFSLQLARFHTLTSLSQPQETMIGLLLLGEKRTQDTHSEWLSSWTVYLHTPRVFHSLMVLSRDPKT

SEQ ID NO: 1822 - protein, 70 aa, Homo sapiens
IVFGSRDKTIKLWNTLGVCKYTVQDESHSEWVSCVRFSPNSSNPIIVSCGWDKLVKVWNLANCKLKTNHI

SEQ ID NO: 1823 - protein, 64 aa, Homo sapiens
LFLDLEIKPSSYGIPWVCANTLSRMRATQSGCLVSASRPTAATLSSSPVAGTSWSRYGTWLTAS

SEQ ID NO: 1824 - protein, 74 aa, Homo sapiens; identical to SEQ ID NO: 1505

SEQ ID NO: 1825 - protein, 66 aa, Homo sapiens
LDDGLQPLSVLSVPHSTSISCCTPTQLRELVRTQPIHLSRTSETLDQWSHMVLRLHVNTPANAACR

SEQ ID NO: 1826 - protein, 76 aa, Homo sapiens
YGDSLWKSSFPSFVSLPTMQEASLAVLFYYHYISPICNKVLYRQVRSMLSSSLSPRRLRLRYRGNSPVQSLFMLTQ

SEQ ID NO: 1827 - protein, 60 aa, Homo sapiens; identical to SEQ ID NO: 1340

SEQ ID NO: 1828 - protein, 95 aa, Homo sapiens; identical to SEQ ID NO: 1341

SEQ ID NO: 1829 - protein, 50 aa, Homo sapiens; identical to SEQ ID NO: 1342

SEQ ID NO: 1830 - protein, 62 aa, Homo sapiens
VAVSSLRHGVCSPTDIGVLRKGGVIWQKCHFACCIQGSYSTRYCELCSHQLAQKQQTALCCQ

SEQ ID NO: 1831 - protein, 94 aa, Homo sapiens
WLSPLSAMACARPLISVYSEKGESSGKNVTLPAVFKAPIRPDIVNFVHTNLRKNNRQPYAVSELAGHQTSAESWGTGRAVARIPRVRGGGTHRS

SEQ ID NO: 1832 - protein, 102 aa, Homo sapiens [sequence omitted]

SEQ ID NO: 1833 - protein, 60 aa, Homo sapiens; identical to SEQ ID NO: 1340

SEQ ID NO: 1834 - protein, 50 aa, Homo sapiens; identical to SEQ ID NO: 1345

SEQ ID NO: 1835 - protein, 76 aa, Homo sapiens; identical to SEQ ID NO: 1346

SEQ ID NO: 1836 - protein, 68 aa, Homo sapiens; identical to SEQ ID NO: 1347

SEQ ID NO: 1837 - protein, 87 aa, Homo sapiens; identical to SEQ ID NO: 1348

SEQ ID NO: 1838 - protein, 55 aa, Homo sapiens; identical to SEQ ID NO: 1349

SEQ ID NO: 1839 - protein, 120 aa, Homo sapiens; identical to SEQ ID NO: 1350

SEQ ID NO: 1840 - protein, 75 aa, Homo sapiens [sequence omitted]

SEQ ID NO: 1841 - protein, 59 aa, Homo sapiens
VFSSVTHNIKNKNPVSLAKFGLKSEMFLWSCQQAGMYLIQFNLLLFLWLSSKPLSSCNS

SEQ ID NO: 1842 - protein, 51 aa, Homo sapiens [sequence omitted]

SEQ ID NO: 1843 - protein, 74 aa, Homo sapiens [sequence omitted]

SEQ ID NO: 1844 - protein, 50 aa, Homo sapiens [sequence omitted]

SEQ ID NO: 1845 - protein, 93 aa, Homo sapiens
  variant (1)...(93): Xaa = Any amino acid
GDXVGXGAQAATMAYHGLTVPLIVMSVFWGFVGFLVPWFIPKGPNRGVIITMLVTCSVCCYLFWLIAILAQLNPLFGPQLKNETIWYLKYHWP

SEQ ID NO: 1846 - protein, 56 aa, Homo sapiens
  variant (1)...(56): Xaa = Any amino acid
TGHQHGNDNSPVRTLRDEPRHQEADEAPEHAHHNERHSEAVIRHGRRLSAXPYXVA

SEQ ID NO: 1847 - protein, 64 aa, Homo sapiens
  variant (1)...(64): Xaa = Any amino acid
FXXFFXKXRILGXFXETKADIKSYKDFXFSFTKKVIHILHYTRYDINTGKYYVHCKEKGKIETY

SEQ ID NO: 1848 - protein, 53 aa, Homo sapiens
  variant (1)...(53): Xaa = Any amino acid
AKGGFIKXNQYWANPFXPFFSFSMXILFFXYSSSSCSKLKLGKESHFXLXVFL

SEQ ID NO: 1849 - protein, 54 aa, Homo sapiens
  variant (1)...(54): Xaa = Any amino acid
NXHRKREKGXKGIGPILIXFYKTSFGLEGMTLATIIXSMFKQVPLVVALNVIXL

SEQ ID NO: 1850 - protein, 188 aa, Homo sapiens
QVLDINLAAEPKVNRGKAGVKRSAAEMYGSVTEHPSPSPLLSSSFDLDYDFQRDYYDRMYSYPARVPPPPPIARAVVPSKRQRVSGNTSRRGKSGFNSKSGQRGSSKSGKLKGDDLQAIKKELTQIKQKVDSLLENLEKIEKEQSKQAVEMKNDKSEEEQSSSSVKKDETNVKMESEGGADDSAEEGD

SEQ ID NO: 1851 - protein, 50 aa, Homo sapiens
SHLSSRSCCSAPLLTYHSSSLLLVCSVPFQFFPGFPGENPLFVLSGSAPS

SEQ ID NO: 1852 - protein, 66 aa, Homo sapiens
LIILHLYCLFALFLFNFFQVFQERIHFLFYLGQLLLNGLKVISFQLSRLGRSPLSTLRIEATFAPS

SEQ ID NO: 1853 - protein, 71 aa, Homo sapiens
SPSSAESSAPPSDSIFTLVSSFFTELLLCSSSDLSFFISTACLLCSFSIFSRFSRRESTFCFIWVSSFLMA

SEQ ID NO: 1854 - protein, 80 aa, Homo sapiens
HRGRQEAIAGGHLSLDGSSLVHTVPKKGLPLGPRNPSQPSQAEPHPGFSQRGAQEDPSCPKSEEQQETASEVRHSSVLLP

SEQ ID NO: 1855 - protein, 112 aa, Homo sapiens
  variant (1)...(112): Xaa = Any amino acid
MEAPWSTQSQRKVCLWAHETHPSPHRLNLTLGFPREVPKKTQAAPSQRSSRKQPQKSVTLQYSSLRMSTSCLVTMATKRQWQCSACGMGELHLPWVHGEETPVTXRSGESHG

SEQ ID NO: 1856 - protein, 127 aa, Homo sapiens
  variant (1)...(127): Xaa = Any amino acid
PMALPASXGHWSLLPMYPRKMELPHPTRTALPLSFGCHGHQTGSGHSKGGVLKSDGLLRLFPAAPLTWGSLGLLGHLSGKTQGEVQPVRAGMGFVGPKADLSLGLCGPRSFHLVTSDPQLSPLAFPC

SEQ ID NO: 1857 - protein, 51 aa, Homo sapiens
  variant (1)...(51): Xaa = Any amino acid
PWLSPLLXVTGVSSPCTQGRWSSPIPHALHCHCLLVAMVTKQEVDILREEY

SEQ ID NO: 1858 - protein, 53 aa, Homo sapiens
TKDYLFKKSFEVKYFVYVIHRCTYKHTHIESQYFNTSLGSCTNSLTLRKKLRN

SEQ ID NO: 1859 - protein, 57 aa, Homo sapiens
YSVKLTDNLESLSSFIFLTLQKGKEDKHSLPFYLTNRRGTQFFSRLGTVRERWGKPF

SEQ ID NO: 1860 - protein, 62 aa, Homo sapiens; identical to SEQ ID NO: 1220

SEQ ID NO: 1861 - protein, 86 aa, Homo sapiens; identical to SEQ ID NO: 1221

SEQ ID NO: 1862 - protein, 58 aa, Homo sapiens [sequence omitted]

SEQ ID NO: 1863 - protein, 109 aa, Homo sapiens; identical to SEQ ID NO: 674

SEQ ID NO: 1864 - protein, 100 aa, Homo sapiens; identical to SEQ ID NO: 675

SEQ ID NO: 1865 - protein, 103 aa, Homo sapiens [sequence omitted]

SEQ ID NO: 1866 - protein, 88 aa, Homo sapiens; identical to SEQ ID NO: 1395

SEQ ID NO: 1867 - protein, 157 aa, Homo sapiens; identical to SEQ ID NO: 1396
  variant (1)...(157): Xaa = Any amino acid

SEQ ID NO: 1868 - protein, 156 aa, Homo sapiens; identical to SEQ ID NO: 1397
  variant (1)...(156): Xaa = Any amino acid

SEQ ID NO: 1869 - protein, 75 aa, Homo sapiens; identical to SEQ ID NO: 1398
  variant (1)...(75): Xaa = Any amino acid

SEQ ID NO: 1870 - protein, 111 aa, Homo sapiens; identical to SEQ ID NO: 1399
  variant (1)...(111): Xaa = Any amino acid

SEQ ID NO: 1871 - protein, 104 aa, Homo sapiens; identical to SEQ ID NO: 1400
  variant (1)...(104): Xaa = Any amino acid

SEQ ID NO: 1872 - protein, 53 aa, Homo sapiens [sequence omitted]

SEQ ID NO: 1873 - protein, 67 aa, Homo sapiens; identical to SEQ ID NO: 1402
  variant (1)...(67): Xaa = Any amino acid

SEQ ID NO: 1874 - protein, 56 aa, Homo sapiens; identical to SEQ ID NO: 712

SEQ ID NO: 1875 - protein, 56 aa, Homo sapiens; identical to SEQ ID NO: 713

SEQ ID NO: 1876 - protein, 56 aa, Homo sapiens; identical to SEQ ID NO: 714

SEQ ID NO: 1877 - protein, 51 aa, Homo sapiens
  variant (1)...(51): Xaa = Any amino acid
TNQSLLRNCYSLNWSIKTSHGSGYGVIWCPCFSPXGHLIXEPPXEFCGRHL

SEQ ID NO: 1878 - protein, 56 aa, Homo sapiens; identical to SEQ ID NO: 729

SEQ ID NO: 1879 - protein, 50 aa, Homo sapiens; identical to SEQ ID NO: 730

SEQ ID NO: 1880 - protein, 70 aa, Homo sapiens; identical to SEQ ID NO: 731

SEQ ID NO: 1881 - protein, 53 aa, Homo sapiens; identical to SEQ ID NO: 732

SEQ ID NO: 1882 - protein, 69 aa, Homo sapiens; identical to SEQ ID NO: 1414
  variant (1)...(69): Xaa = Any amino acid

SEQ ID NO: 1883 - protein, 64 aa, Homo sapiens; identical to SEQ ID NO: 1415
  variant (1)...(64): Xaa = Any amino acid

SEQ ID NO: 1884 - protein, 92 aa, Homo sapiens; identical to SEQ ID NO: 1416
  variant (1)...(92): Xaa = Any amino acid

SEQ ID NO: 1885 - protein, 77 aa, Homo sapiens; identical to SEQ ID NO: 1417
  variant (1)...(77): Xaa = Any amino acid

SEQ ID NO: 1886 - protein, 97 aa, Homo sapiens; identical to SEQ ID NO: 725

SEQ ID NO: 1887 - protein, 56 aa, Homo sapiens; identical to SEQ ID NO: 754

SEQ ID NO: 1888 - protein, 75 aa, Homo sapiens; identical to SEQ ID NO: 1418
  variant (1)...(75): Xaa = Any amino acid

SEQ ID NO: 1889 - protein, 74 aa, Homo sapiens; identical to SEQ ID NO: 1419
  variant (1)...(74): Xaa = Any amino acid

SEQ ID NO: 1890 - protein, 66 aa, Homo sapiens; identical to SEQ ID NO: 1420
  variant (1)...(66): Xaa = Any amino acid

SEQ ID NO: 1891 - protein, 55 aa, Homo sapiens; identical to SEQ ID NO: 1427

SEQ ID NO: 1892 - protein, 52 aa, Homo sapiens; identical to SEQ ID NO: 787
  variant (1)...(52): Xaa = Any amino acid

SEQ ID NO: 1893 - protein, 115 aa, Homo sapiens; identical to SEQ ID NO: 1443
  variant (1)...(115): Xaa = Any amino acid

SEQ ID NO: 1894 - protein, 50 aa, Homo sapiens; identical to SEQ ID NO: 1444

SEQ ID NO: 1895 - protein, 114 aa, Homo sapiens; identical to SEQ ID NO: 1445
  variant (1)...(114): Xaa = Any amino acid

SEQ ID NO: 1896 - protein, 74 aa, Homo sapiens; identical to SEQ ID NO: 1446
  variant (1)...(74): Xaa = Any amino acid

SEQ ID NO: 1897 - protein, 60 aa, Homo sapiens; identical to SEQ ID NO: 1447
  variant (1)...(60): Xaa = Any amino acid

SEQ ID NO: 1898 - protein, 60 aa, Homo sapiens; identical to SEQ ID NO: 1448
  variant (1)...(60): Xaa = Any amino acid

SEQ ID NO: 1899 - protein, 58 aa, Homo sapiens; identical to SEQ ID NO: 1449

SEQ ID NO: 1900 - protein, 146 aa, Homo sapiens; identical to SEQ ID NO: 1450

SEQ ID NO: 1901 - protein, 62 aa, Homo sapiens; identical to SEQ ID NO: 1451

SEQ ID NO: 1902 - protein, 109 aa, Homo sapiens; identical to SEQ ID NO: 1452
  variant (1)...(109): Xaa = Any amino acid

SEQ ID NO: 1903 - protein, 81 aa, Homo sapiens; identical to SEQ ID NO: 1453

SEQ ID NO: 1904 - protein, 59 aa, Homo sapiens; identical to SEQ ID NO: 1454
  variant (1)...(59): Xaa = Any amino acid

SEQ ID NO: 1905 - protein, 74 aa, Homo sapiens [sequence omitted]

SEQ ID NO: 1906 - protein, 66 aa, Homo sapiens; identical to SEQ ID NO: 822

SEQ ID NO: 1907 - protein, 75 aa, Homo sapiens; identical to SEQ ID NO: 823

SEQ ID NO: 1908 - protein, 59 aa, Homo sapiens; identical to SEQ ID NO: 824

SEQ ID NO: 1909 - protein, 65 aa, Homo sapiens; identical to SEQ ID NO: 1467

SEQ ID NO: 1910 - protein, 107 aa, Homo sapiens; identical to SEQ ID NO: 1468

SEQ ID NO: 1911 - protein, 74 aa, Homo sapiens; identical to SEQ ID NO: 1469

SEQ ID NO: 1912 - protein, 63 aa, Homo sapiens; identical to SEQ ID NO: 1470

SEQ ID NO: 1913 - protein, 181 aa, Homo sapiens; identical to SEQ ID NO: 1471

SEQ ID NO: 1914 - protein, 109 aa, Homo sapiens; identical to SEQ ID NO: 1472

SEQ ID NO: 1915 - protein, 100 aa, Homo sapiens [sequence omitted]

SEQ ID NO: 1916 - protein, 103 aa, Homo sapiens [sequence omitted]

SEQ ID NO: 1917 - protein, 58 aa, Homo sapiens [sequence omitted]

SEQ ID NO: 1918 - protein, 109 aa, Homo sapiens; identical to SEQ ID NO: 1476

SEQ ID NO: 1919 - protein, 78 aa, Homo sapiens
  variant (1)...(78): Xaa = Any amino acid
RGCMPXSTLELEELKQVLLHNERSFNPLEDDDDCQIKKRPASLNSKPSSLRRVTIASLPXNIGNAGMVAGMENNDPIX

SEQ ID NO: 1920 - protein, 103 aa, Homo sapiens
  variant (1)...(103): Xaa = Any amino acid
XIGSLFSIPATIPAFPIFXGKEAIVTLRREDGLEFREAGRFLIWQSSSSSRGLKDLSLCRRTCFSSSNSSVXFGIHPLQVXYVLNHHFNCFTNPAFLIDGSQH

SEQ ID NO: 1921 - protein, 60 aa, Homo sapiens; identical to SEQ ID NO: 1494
  variant (1)...(60): Xaa = Any amino acid

SEQ ID NO: 1922 - protein, 60 aa, Homo sapiens; identical to SEQ ID NO: 1495
  variant (1)...(60): Xaa = Any amino acid

SEQ ID NO: 1923 - protein, 60 aa, Homo sapiens; identical to SEQ ID NO: 1496
  variant (1)...(60): Xaa = Any amino acid

SEQ ID NO: 1924 - protein, 60 aa, Homo sapiens; identical to SEQ ID NO: 1497
  variant (1)...(60): Xaa = Any amino acid

SEQ ID NO: 1925 - protein, 53 aa, Homo sapiens; identical to SEQ ID NO: 1498
  variant (1)...(53): Xaa = Any amino acid

SEQ ID NO: 1926 - protein, 71 aa, Homo sapiens [sequence omitted]

SEQ ID NO: 1927 - protein, 73 aa, Homo sapiens; identical to SEQ ID NO: 882

SEQ ID NO: 1928 - protein, 63 aa, Homo sapiens; identical to SEQ ID NO: 1470

SEQ ID NO: 1929 - protein, 181 aa, Homo sapiens; identical to SEQ ID NO: 1471

SEQ ID NO: 1930 - protein, 109 aa, Homo sapiens; identical to SEQ ID NO: 1472

SEQ ID NO: 1931 - protein, 74 aa, Homo sapiens; identical to SEQ ID NO: 1505

SEQ ID NO: 1932 - protein, 66 aa, Homo sapiens; identical to SEQ ID NO: 1506

SEQ ID NO: 1933 - protein, 63 aa, Homo sapiens; identical to SEQ ID NO: 1470

SEQ ID NO: 1934 - protein, 169 aa, Homo sapiens
SRAEMLGAINQESRVSKAVEVMIQHVENLKRMYAKEHAELEELKQVLLQNERSFNPLEDDDDCQIKKRSASLNSKPSSLRRVTIASLPRNIGNAGMVAGMENNDRFSRRSSSWRILGSKQSEHRPSLPRFISTYSWADAEEEKCELKTKDDSEPSGEETVERTRKPSLS

SEQ ID NO: 1935 - protein, 109 aa, Homo sapiens; identical to SEQ ID NO: 1472

SEQ ID NO: 1936 - protein, 56 aa, Homo sapiens
DKSRPKSFHRDGMMLPVHCQHGWEEITDKTDQSVGLAKLQGLQREHFSDRKPWWGD

SEQ ID NO: 1937 - protein, 79 aa, Homo sapiens
  variant (1)...(79): Xaa = Any amino acid
FRWYLCVWRGHGIWRGGQRRTQWVRLWETEMSEELGSEGRSSSRQGLXLDVEAEPDPGYSGPLHHDFLQHFLSRAHIDV

SEQ ID NO: 1938 - protein, 114 aa, Homo sapiens
  variant (1)...(114): Xaa = Any amino acid
XQSLPGRRPPFRAQLLAHLCLPKPDPLCSSLPSPPYAMAPPNTEIPSKLVSFSPYTSIPPPGFPIAEVFTLKPLEFGKPNTLVCFVSNLFPPMLTVNWQHHSIPVEGFGPTFVS

SEQ ID NO: 1939 - protein, 58 aa, Homo sapiens
  variant (1)...(58): Xaa = Any amino acid
PGSGSASTSXCSPCLEEDLPSEPSSSLISVSQSLTHCVLLCPPLHMPWPLQTQRYHLN

SEQ ID NO: 1940 - protein, 150 aa, Homo sapiens; identical to SEQ ID NO: 983
  variant (1)...(150): Xaa = Any amino acid

SEQ ID NO: 1941 - protein, 101 aa, Homo sapiens; identical to SEQ ID NO: 930

SEQ ID NO: 1942 - protein, 87 aa, Homo sapiens; identical to SEQ ID NO: 1515

SEQ ID NO: 1943 - protein, 113 aa, Homo sapiens [sequence omitted]

SEQ ID NO: 1944 - protein, 79 aa, Homo sapiens; identical to SEQ ID NO: 1517

SEQ ID NO: 1945 - protein, 54 aa, Homo sapiens; identical to SEQ ID NO: 1535
  variant (1)...(54): Xaa = Any amino acid

SEQ ID NO: 1946 - protein, 55 aa, Homo sapiens; identical to SEQ ID NO: 1536
  variant (1)...(55): Xaa = Any amino acid

SEQ ID NO: 1947 - protein, 61 aa, Homo sapiens; identical to SEQ ID NO: 1537

SEQ ID NO: 1948 - protein, 96 aa, Homo sapiens; identical to SEQ ID NO: 1538
  variant (1)...(96): Xaa = Any amino acid

SEQ ID NO: 1949 - protein, 65 aa, Homo sapiens; identical to SEQ ID NO: 1467

SEQ ID NO: 1950 - protein, 107 aa, Homo sapiens; identical to SEQ ID NO: 1468

SEQ ID NO: 1951 - protein, 74 aa, Homo sapiens; identical to SEQ ID NO: 1469

SEQ ID NO: 1952 - protein, 94 aa, Homo sapiens [sequence omitted]

SEQ ID NO: 1953 - protein, 61 aa, Homo sapiens [sequence omitted]

SEQ ID NO: 1954 - protein, 58 aa, Homo sapiens; identical to SEQ ID NO: 1083
  variant (1)...(58): Xaa = Any amino acid

SEQ ID NO: 1955 - protein, 139 aa, Homo sapiens; identical to SEQ ID NO: 1084
  variant (1)...(139): Xaa = Any amino acid

SEQ ID NO: 1956 - protein, 62 aa, Homo sapiens; identical to SEQ ID NO: 1220

SEQ ID NO: 1957 - protein, 86 aa, Homo sapiens; identical to SEQ ID NO: 1221

SEQ ID NO: 1958 - protein, 97 aa, Homo sapiens; identical to SEQ ID NO: 1593

SEQ ID NO: 1959 - protein, 57 aa, Homo sapiens; identical to SEQ ID NO: 1149

SEQ ID NO: 1960 - protein, 78 aa, Homo sapiens; identical to SEQ ID NO: 1150

SEQ ID NO: 1961 - protein, 65 aa, Homo sapiens; identical to SEQ ID NO: 1600

SEQ ID NO: 1962 - protein, 64 aa, Homo sapiens; identical to SEQ ID NO: 1601

SEQ ID NO: 1963 - protein, 79 aa, Homo sapiens; identical to SEQ ID NO: 1609
  variant (1)...(79): Xaa = Any amino acid

SEQ ID NO: 1964 - protein, 87 aa, Homo sapiens; identical to SEQ ID NO: 1515

SEQ ID NO: 1965 - protein, 113 aa, Homo sapiens; identical to SEQ ID NO: 1611
  variant (1)...(113): Xaa = Any amino acid

SEQ ID NO: 1966 - protein, 117 aa, Homo sapiens; identical to SEQ ID NO: 1170

SEQ ID NO: 1967 - protein, 117 aa, Homo sapiens; identical to SEQ ID NO: 1171

SEQ ID NO: 1968 - protein, 83 aa, Homo sapiens; identical to SEQ ID NO: 1172

SEQ ID NO: 1969 - protein, 67 aa, Homo sapiens; identical to SEQ ID NO: 1625
  variant (1)...(67): Xaa = Any amino acid

SEQ ID NO: 1970 - protein, 74 aa, Homo sapiens
IYDSLAYWNWSASKTGWLHRRTRQSRLFLCTDSETVLSGRSSGLPGPDTCPRESPEAWTVLLCFHRSGRGESPW

SEQ ID NO: 1971 - protein, 101 aa, Homo sapiens
KTIYRQFFTSLIFTDSTSYGMAYGLPPKYTILWHIGIGQPQRPAGYIVARDSPAYSSARTRRRSSAGGAQVSLGQTRAPESPQKHGQFCSVSIAQAGERVR

SEQ ID NO: 1972 - protein, 101 aa, Homo sapiens
KQSTGSSLQVSYLQIAQAMAWRMASLLNIRFFGILELVSLKDRLATSSHETVPLIPLHGLGDGPQREELRSPWARHVPQRVPRSMDSSALFPSLRQGRESV

SEQ ID NO: 1973 - protein, 74 aa, Homo sapiens
HGLSPLPERWKQSRTVHASGDSLGHVSGPGRPELLPLRTVSESVQRNKRDCLVRRCSQPVFEADQFQYAKESYI

SEQ ID NO: 1974 - protein, 64 aa, Homo sapiens
GPSPSPCRGISGTVSCDDVASRSLRLTNSNMPKNRIFRREAIRHAIACAICKYETCKELPVDCF

SEQ ID NO: 1975 - protein, 98 aa, Homo sapiens; identical to SEQ ID NO: 1188
  variant (1)...(98): Xaa = Any amino acid

SEQ ID NO: 1976 - protein, 66 aa, Homo sapiens; identical to SEQ ID NO: 1636

SEQ ID NO: 1977 - protein, 84 aa, Homo sapiens; identical to SEQ ID NO: 1637
  variant (1)...(84): Xaa = Any amino acid

SEQ ID NO: 1978 - protein, 64 aa, Homo sapiens; identical to SEQ ID NO: 1638
  variant (1)...(64): Xaa = Any amino acid

SEQ ID NO: 1979 - protein, 69 aa, Homo sapiens; identical to SEQ ID NO: 1651
  variant (1)...(69): Xaa = Any amino acid

SEQ ID NO: 1980 - protein, 57 aa, Homo sapiens [sequence omitted]

SEQ ID NO: 1981 - protein, 66 aa, Homo sapiens; identical to SEQ ID NO: 1653
  variant (1)...(66): Xaa = Any amino acid

SEQ ID NO: 1982 - protein, 67 aa, Homo sapiens; identical to SEQ ID NO: 1654
  variant (1)...(67): Xaa = Any amino acid

SEQ ID NO: 1983 - protein, 99 aa, Homo sapiens; identical to SEQ ID NO: 1655
  variant (1)...(99): Xaa = Any amino acid

SEQ ID NO: 1984 - protein, 50 aa, Homo sapiens; identical to SEQ ID NO: 1205

SEQ ID NO: 1985 - protein, 134 aa, Homo sapiens; identical to SEQ ID NO: 1206

SEQ ID NO: 1986 - protein, 67 aa, Homo sapiens; identical to SEQ ID NO: 1207

SEQ ID NO: 1987 - protein, 60 aa, Homo sapiens; identical to SEQ ID NO: 1208

SEQ ID NO: 1988 - protein, 64 aa, Homo sapiens; identical to SEQ ID NO: 1209

SEQ ID NO: 1989 - protein, 53 aa, Homo sapiens; identical to SEQ ID NO: 1210

SEQ ID NO: 1990 - protein, 62 aa, Homo sapiens; identical to SEQ ID NO: 1667
  variant (1)...(62): Xaa = Any amino acid

SEQ ID NO: 1991 - protein, 86 aa, Homo sapiens; identical to SEQ ID NO: 1668
  variant (1)...(86): Xaa = Any amino acid

SEQ ID NO: 1992 - protein, 185 aa, Homo sapiens
FDDRRGRPVGFPMRGRGGFDRMPPGRGGRPMPPSRRDYDDMSPRRGPPPPPPGRGGRGGSRARNLPLPPPPPPRGGDLMAYDRRGRPGDRYDGMVGFSADETWDSAIDTWSPSEWQMAYEPQGGSGYDYSYAGGRGSYGDLGGPIITTQVTIPKDLAGSIIGKGGQRIKQIRHESGASIKIDEPL

SEQ ID NO: 1993 - protein, 65 aa, Homo sapiens
ALVEDHLPLLPDEAAGVVAELGIFLFLHHHHLEGETSWPMTEEGDLETVTTAWLVSVLMKLGTLQ

SEQ ID NO: 1994 - protein, 112 aa, Homo sapiens
WAPCIYCRVPSFISTETNHAVVTVSRSPSSVIGHEVSPSRWWWWRKRKIPSSATTPAASSGRRGRWSSTRAHIIIISSRWRHGTPTPTRRHSVKTTSSPHGKSHWASATVIK

SEQ ID NO: 1995 - protein, 87 aa, Homo sapiens; identical to SEQ ID NO: 1348

SEQ ID NO: 1996 - protein, 55 aa, Homo sapiens; identical to SEQ ID NO: 1349

SEQ ID NO: 1997 - protein, 123 aa, Homo sapiens; identical to SEQ ID NO: 1681

SEQ ID NO: 1998 - protein, 191 aa, Homo sapiens; identical to SEQ ID NO: 1281

SEQ ID NO: 1999 - protein, 51 aa, Homo sapiens; identical to SEQ ID NO: 1282

SEQ ID NO: 2000 - protein, 51 aa, Homo sapiens; identical to SEQ ID NO: 1283

SEQ ID NO: 2001 - protein, 55 aa, Homo sapiens; identical to SEQ ID NO: 1284

SEQ ID NO: 2002 - protein, 95 aa, Homo sapiens; identical to SEQ ID NO: 1222
  variant (1)...(95): Xaa = Any amino acid

SEQ ID NO: 2003 - protein, 60 aa, Homo sapiens; identical to SEQ ID NO: 1699

SEQ ID NO: 2004 - protein, 57 aa, Homo sapiens; identical to SEQ ID NO: 1700

SEQ ID NO: 2005 - protein, 50 aa, Homo sapiens [sequence omitted]

SEQ ID NO: 2006 - protein, 53 aa, Homo sapiens; identical to SEQ ID NO: 1702

SEQ ID NO: 2007 - protein, 65 aa, Homo sapiens; identical to SEQ ID NO: 1703

SEQ ID NO: 2008 - protein, 64 aa, Homo sapiens [sequence omitted]

SEQ ID NO: 2009 - protein, 52 aa, Homo sapiens; identical to SEQ ID NO: 1705

SEQ ID NO: 2010 - protein, 67 aa, Homo sapiens; identical to SEQ ID NO: 1706

SEQ ID NO: 2011 - protein, 58 aa, Homo sapiens; identical to SEQ ID NO: 1710

SEQ ID NO: 2012 - protein, 76 aa, Homo sapiens; identical to SEQ ID NO: 1337

SEQ ID NO: 2013 - protein, 63 aa, Homo sapiens; identical to SEQ ID NO: 1712

SEQ ID NO: 2014 - protein, 156 aa, Homo sapiens; identical to SEQ ID NO: 1713

SEQ ID NO: 2015 - protein, 62 aa, Homo sapiens; identical to SEQ ID NO: 1248
  variant (1)...(62): Xaa = Any amino acid

SEQ ID NO: 2016 - protein, 86 aa, Homo sapiens; identical to SEQ ID NO: 1249
  variant (1)...(86): Xaa = Any amino acid

SEQ ID NO: 2017 - protein, 69 aa, Homo sapiens [sequence omitted]

SEQ ID NO: 2018 - protein, 102 aa, Homo sapiens; identical to SEQ ID NO: 1251

SEQ ID NO: 2019 - protein, 77 aa, Homo sapiens [sequence omitted]

SEQ ID NO: 2020 - protein, 60 aa, Homo sapiens [sequence omitted]

SEQ ID NO: 2021 - protein, 115 aa, Homo sapiens
  variant (1)...(115): Xaa = Any amino acid
PMWLVFSLQLARFHTLTSLSQPQETMIGLLLLGEKRTQDTHSEWLSSWTVYLHTPRVFHSLMVLSRDPXTICRLSEEKATLXTSLAWPTNXXVVVPVVRSQRRRVPSQEPERANW

SEQ ID NO: 2022 - protein, 50 aa, Homo sapiens
  variant (1)...(50): Xaa = Any amino acid
LDGFISRSXDNLPVVRGEGHTXHILGMAHKSXXGGARCEIPEAQGSIPGA

SEQ ID NO: 2023 - protein, 114 aa, Homo sapiens
  variant (1)...(114): Xaa = Any amino acid
QFALSGSWDGTLRLWDLTTGTTXXRFVGHAKDVXSVAFSSDNRQIVXGSRDKTIKLWNTLGVCKYTVQDESHSEWVSCVRFSPNSSNPIIVSCGWDKLVKVWNLANCKLKTNHI

SEQ ID NO: 2024 - protein, 74 aa, Homo sapiens
  variant (1)...(74): Xaa = Any amino acid
VWPSPLTTGRLSXDLEIKPSSYGIPWVCANTLSRMRATQSGCLVSASRPTAATLSSSPVAGTSWSRYGTWLTAS

SEQ ID NO: 2025 - protein, 62 aa, Homo sapiens; identical to SEQ ID NO: 1743

SEQ ID NO: 2026 - protein, 116 aa, Homo sapiens; identical to SEQ ID NO: 1744

SEQ ID NO: 2027 - protein, 87 aa, Homo sapiens; identical to SEQ ID NO: 1515

SEQ ID NO: 2028 - protein, 113 aa, Homo sapiens [sequence omitted]

SEQ ID NO: 2029 - protein, 79 aa, Homo sapiens; identical to SEQ ID NO: 1517

SEQ ID NO: 2030 - protein, 52 aa, Homo sapiens; identical to SEQ ID NO: 1748

SEQ ID NO: 2031 - protein, 115 aa, Homo sapiens; identical to SEQ ID NO: 1749

SEQ ID NO: 2032 - protein, 52 aa, Homo sapiens; identical to SEQ ID NO: 1750

SEQ ID NO: 2033 - protein, 56 aa, Homo sapiens; identical to SEQ ID NO: 1751

SEQ ID NO: 2034 - protein, 86 aa, Homo sapiens; identical to SEQ ID NO: 1221

SEQ ID NO: 2035 - protein, 62 aa, Homo sapiens; identical to SEQ ID NO: 1220

SEQ ID NO: 2036 - protein, 191 aa, Homo sapiens; identical to SEQ ID NO: 1281

SEQ ID NO: 2037 - protein, 51 aa, Homo sapiens; identical to SEQ ID NO: 1282

SEQ ID NO: 2038 - protein, 51 aa, Homo sapiens; identical to SEQ ID NO: 1283

SEQ ID NO: 2039 - protein, 55 aa, Homo sapiens; identical to SEQ ID NO: 1284

SEQ ID NO: 2040 - protein, 87 aa, Homo sapiens; identical to SEQ ID NO: 1515

SEQ ID NO: 2041 - protein, 113 aa, Homo sapiens [sequence omitted]

SEQ ID NO: 2042 - protein, 79 aa, Homo sapiens; identical to SEQ ID NO: 1517

SEQ ID NO: 2043 - protein, 106 aa, Homo sapiens; identical to SEQ ID NO: 1289

SEQ ID NO: 2044 - protein, 53 aa, Homo sapiens; identical to SEQ ID NO: 1290

SEQ ID NO: 2045 - protein, 55 aa, Homo sapiens; identical to SEQ ID NO: 1144

SEQ ID NO: 2046 - protein, 51 aa, Homo sapiens; identical to SEQ ID NO: 1292

SEQ ID NO: 2047 - protein, 51 aa, Homo sapiens; identical to SEQ ID NO: 1145

SEQ ID NO: 2048 - protein, 78 aa, Homo sapiens; identical to SEQ ID NO: 1307

SEQ ID NO: 2049 - protein, 134 aa, Homo sapiens [sequence omitted]

SEQ ID NO: 2050 - protein, 66 aa, Homo sapiens; identical to SEQ ID NO: 1309

SEQ ID NO: 2051 - protein, 141 aa, Homo sapiens; identical to SEQ ID NO: 1310

SEQ ID NO: 2052 - protein, 61 aa, Homo sapiens; identical to SEQ ID NO: 1311

SEQ ID NO: 2053 - protein, 51 aa, Homo sapiens; identical to SEQ ID NO: 1312

SEQ ID NO: 2054 - protein, 192 aa, Homo sapiens; identical to SEQ ID NO: 1790

SEQ ID NO: 2055 - protein, 75 aa, Homo sapiens [sequence omitted]

SEQ ID NO: 2056 - protein, 64 aa, Homo sapiens; identical to SEQ ID NO: 1792

SEQ ID NO: 2057 - protein, 104 aa, Homo sapiens [sequence omitted]

SEQ ID NO: 2058 - protein, 71 aa, Homo sapiens; identical to SEQ ID NO: 1794

SEQ ID NO: 2059 - protein, 115 aa, Homo sapiens; identical to SEQ ID NO: 1143

SEQ ID NO: 2060 - protein, 55 aa, Homo sapiens; identical to SEQ ID NO: 1144

SEQ ID NO: 2061 - protein, 51 aa, Homo sapiens; identical to SEQ ID NO: 1145

SEQ ID NO: 2062 - protein, 59 aa, Homo sapiens; identical to SEQ ID NO: 1321

SEQ ID NO: 2063 - protein, 64 aa, Homo sapiens; identical to SEQ ID NO: 1322

SEQ ID NO: 2064 - protein, 57 aa, Homo sapiens; identical to SEQ ID NO: 1323

SEQ ID NO: 2065 - protein, 51 aa, Homo sapiens; identical to SEQ ID NO: 1324

SEQ ID NO: 2066 - protein, 50 aa, Homo sapiens; identical to SEQ ID NO: 1332

SEQ ID NO: 2067 - protein, 51 aa, Homo sapiens; identical to SEQ ID NO: 1333

SEQ ID NO: 2068 - protein, 66 aa, Homo sapiens; identical to SEQ ID NO: 1811

SEQ ID NO: 2069 - protein, 83 aa, Homo sapiens; identical to SEQ ID NO: 1812

SEQ ID NO: 2070 - protein, 82 aa, Homo sapiens; identical to SEQ ID NO: 1813

SEQ ID NO: 2071 - protein, 53 aa, Homo sapiens; identical to SEQ ID NO: 1814

SEQ ID NO: 2072 - protein, 63 aa, Homo sapiens; identical to SEQ ID NO: 1818
  variant (1)...(63): Xaa = Any amino acid

SEQ ID NO: 2073 - protein, 70 aa, Homo sapiens; identical to SEQ ID NO: 1819
  variant (1)...(70): Xaa = Any amino acid

SEQ ID NO: 2074 - protein, 76 aa, Homo sapiens; identical to SEQ ID NO: 1820
  variant (1)...(76): Xaa = Any amino acid

SEQ ID NO: 2075 - protein, 67 aa, Homo sapiens
  variant (1)...(67): Xaa = Any amino acid
EXSSQPTVPIVGIIAGLVLLGAVITGAVVAAVMWRRNSSDRKGGSYSQAASSDSAQGSDVSLTACKV

SEQ ID NO: 2076 - protein, 70 aa, Homo sapiens; identical to SEQ ID NO: 1821

SEQ ID NO: 2077 - protein, 70 aa, Homo sapiens; identical to SEQ ID NO: 1822

SEQ ID NO: 2078 - protein, 64 aa, Homo sapiens; identical to SEQ ID NO: 1823

SEQ ID NO: 2079 - protein, 90 aa, Homo sapiens; identical to SEQ ID NO: 1334

SEQ ID NO: 2080 - protein, 52 aa, Homo sapiens; identical to SEQ ID NO: 1335

SEQ ID NO: 2081 - protein, 74 aa, Homo sapiens; identical to SEQ ID NO: 1505

SEQ ID NO: 2082 - protein, 66 aa, Homo sapiens; identical to SEQ ID NO: 1825

SEQ ID NO: 2083 - protein, 60 aa, Homo sapiens; identical to SEQ ID NO: 1340

SEQ ID NO: 2084 - protein, 95 aa, Homo sapiens; identical to SEQ ID NO: 1341

SEQ ID NO: 2085 - protein, 50 aa, Homo sapiens; identical to SEQ ID NO: 1342

SEQ ID NO: 2086 - protein, 62 aa, Homo sapiens; identical to SEQ ID NO: 1830

SEQ ID NO: 2087 - protein, 94 aa, Homo sapiens; identical to SEQ ID NO: 1831

SEQ ID NO: 2088 - protein, 76 aa, Homo sapiens; identical to SEQ ID NO: 1346

SEQ ID NO: 2089 - protein, 68 aa, Homo sapiens; identical to SEQ ID NO: 1347

SEQ ID NO: 2090 - protein, 87 aa, Homo sapiens; identical to SEQ ID NO: 1348

SEQ ID NO: 2091 - protein, 55 aa, Homo sapiens; identical to SEQ ID NO: 1349

SEQ ID NO: 2092 - protein, 120 aa, Homo sapiens; identical to SEQ ID NO: 1350

SEQ ID NO: 2093 - protein, 50 aa, Homo sapiens; identical to SEQ ID NO: 1368

SEQ ID NO: 2094 - protein, 93 aa, Homo sapiens; identical to SEQ ID NO: 1369

SEQ ID NO: 2095 - protein, 65 aa, Homo sapiens; identical to SEQ ID NO: 1370

SEQ ID NO: 2096 - protein, 73 aa, Homo sapiens; identical to SEQ ID NO: 1375

SEQ ID NO: 2097 - protein, 52 aa, Homo sapiens; identical to SEQ ID NO: 1376

SEQ ID NO: 2098 - protein, 64 aa, Homo sapiens; identical to SEQ ID NO: 1377

SEQ ID NO: 2099 - protein, 55 aa, Homo sapiens; identical to SEQ ID NO: 1378

SEQ ID NO: 2100 - protein, 87 aa, Homo sapiens; identical to SEQ ID NO: 1348

SEQ ID NO: 2101 - protein, 55 aa, Homo sapiens; identical to SEQ ID NO: 1349

SEQ ID NO: 2102 - protein, 50 aa, Homo sapiens
TLIIFVHFLQLFQGLLWWRLIIELAVQLIIVILLHMWLWGFFSHSDLFIQ

SEQ ID NO: 2103 - protein, 123 aa, Homo sapiens; identical to SEQ ID NO: 1681

SEQ ID NO: 2104 - protein, 69 aa, Homo sapiens; identical to SEQ ID NO: 1379

SEQ ID NO: 2105 - protein, 66 aa, Homo sapiens; identical to SEQ ID NO: 1380

SEQ ID NO: 2106 - protein, 58 aa, Homo sapiens [sequence omitted]

SEQ ID NO: 2107 - protein, 109 aa, Homo sapiens; identical to SEQ ID NO: 674

SEQ ID NO: 2108 - protein, 100 aa, Homo sapiens; identical to SEQ ID NO: 675

SEQ ID NO: 2109 - protein, 103 aa, Homo sapiens [sequence omitted]

SEQ ID NO: 2110 - protein, 55 aa, Homo sapiens; identical to SEQ ID NO: 1385

SEQ ID NO: 2111 - protein, 97 aa, Homo sapiens; identical to SEQ ID NO: 1386

SEQ ID NO: 2112 - protein, 55 aa, Homo sapiens; identical to SEQ ID NO: 791

SEQ ID NO: 2113 - protein, 89 aa, Homo sapiens; identical to SEQ ID NO: 677

SEQ ID NO: 2114 - protein, 89 aa, Homo sapiens; identical to SEQ ID NO: 678

SEQ ID NO: 2115 - protein, 59 aa, Homo sapiens; identical to SEQ ID NO: 679

SEQ ID NO: 2116 - protein, 71 aa, Homo sapiens; identical to SEQ ID NO: 696
  variant (1)...(71): Xaa = Any amino acid

SEQ ID NO: 2117 - protein, 97 aa, Homo sapiens; identical to SEQ ID NO: 697
  variant (1)...(97): Xaa = Any amino acid

SEQ ID NO: 2118 - protein, 52 aa, Homo sapiens; identical to SEQ ID NO: 698
  variant (1)...(52): Xaa = Any amino acid

SEQ ID NO: 2119 - protein, 70 aa, Homo sapiens; identical to SEQ ID NO: 699

SEQ ID NO: 2120 - protein, 97 aa, Homo sapiens; identical to SEQ ID NO: 700
  variant (1)...(97): Xaa = Any amino acid

SEQ ID NO: 2121 - protein, 72 aa, Homo sapiens [sequence omitted]

SEQ ID NO: 2122 - protein, 51 aa, Homo sapiens; identical to SEQ ID NO: 702

SEQ ID NO: 2123 - protein, 53 aa, Homo sapiens [sequence omitted]

SEQ ID NO: 2124 - protein, 67 aa, Homo sapiens; identical to SEQ ID NO: 1402
  variant (1)...(67): Xaa = Any amino acid

SEQ ID NO: 2125 - protein, 56 aa, Homo sapiens; identical to SEQ ID NO: 712

SEQ ID NO: 2126 - protein, 56 aa, Homo sapiens; identical to SEQ ID NO: 713

SEQ ID NO: 2127 - protein, 56 aa, Homo sapiens; identical to SEQ ID NO: 714

SEQ ID NO: 2128 - protein, 56 aa, Homo sapiens; identical to SEQ ID NO: 729

SEQ ID NO: 2129 - protein, 50 aa, Homo sapiens; identical to SEQ ID NO: 730

SEQ ID NO: 2130 - protein, 70 aa, Homo sapiens; identical to SEQ ID NO: 731

SEQ ID NO: 2131 - protein, 53 aa, Homo sapiens; identical to SEQ ID NO: 732

SEQ ID NO: 2132 - protein, 56 aa, Homo sapiens; identical to SEQ ID NO: 792

SEQ ID NO: 2133 - protein, 177 aa, Homo sapiens; identical to SEQ ID NO: 793
  variant (1)...(177): Xaa = Any amino acid

SEQ ID NO: 2134 - protein, 56 aa, Homo sapiens; identical to SEQ ID NO: 794

SEQ ID NO: 2135 - protein, 70 aa, Homo sapiens [sequence omitted]

SEQ ID NO: 2136 - protein, 53 aa, Homo sapiens; identical to SEQ ID NO: 796

SEQ ID NO: 2137 - protein, 146 aa, Homo sapiens [sequence omitted]

SEQ ID NO: 2138 - protein, 58 aa, Homo sapiens; identical to SEQ ID NO: 798

SEQ ID NO: 2139 - protein, 110 aa, Homo sapiens; identical to SEQ ID NO: 799

SEQ ID NO: 2140 - protein, 110 aa, Homo sapiens; identical to SEQ ID NO: 800

SEQ ID NO: 2141 - protein, 70 aa, Homo sapiens; identical to SEQ ID NO: 801

SEQ ID NO: 2142 - protein, 71 aa, Homo sapiens; identical to SEQ ID NO: 813

SEQ ID NO: 2143 - protein, 124 aa, Homo sapiens; identical to SEQ ID NO: 814

SEQ ID NO: 2144 - protein, 51 aa, Homo sapiens [sequence omitted]

SEQ ID NO: 2145 - protein, 51 aa, Homo sapiens
PRLIASRGSPSADQLNTNFFLLFSTWFGKSHSFQAPSVWRKYILKHPQFTF

SEQ ID NO: 2146 - protein, 66 aa, Homo sapiens; identical to SEQ ID NO: 822

SEQ ID NO: 2147 - protein, 75 aa, Homo sapiens; identical to SEQ ID NO: 823

SEQ ID NO: 2148 - protein, 59 aa, Homo sapiens; identical to SEQ ID NO: 824

SEQ ID NO: 2149 - protein, 94 aa, Homo sapiens; identical to SEQ ID NO: 844
  variant (1)...(94): Xaa = Any amino acid

SEQ ID NO: 2150 - protein, 57 aa, Homo sapiens; identical to SEQ ID NO: 845

SEQ ID NO: 2151 - protein, 93 aa, Homo sapiens; identical to SEQ ID NO: 846
  variant (1)...(93): Xaa = Any amino acid

SEQ ID NO: 2152 - protein, 121 aa, Homo sapiens; identical to SEQ ID NO: 847
  variant (1)...(121): Xaa = Any amino acid

SEQ ID NO: 2153 - protein, 54 aa, Homo sapiens; identical to SEQ ID NO: 848
  variant (1)...(54): Xaa = Any amino acid

SEQ ID NO: 2154 - protein, 59 aa, Homo sapiens; identical to SEQ ID NO: 849

SEQ ID NO: 2155 - protein, 67 aa, Homo sapiens; identical to SEQ ID NO: 850
  variant (1)...(67): Xaa = Any amino acid

SEQ ID NO: 2156 - protein, 55 aa, Homo sapiens; identical to SEQ ID NO: 851
  variant (1)...(55): Xaa = Any amino acid

SEQ ID NO: 2157 - protein, 123 aa, Homo sapiens; identical to SEQ ID NO: 860

SEQ ID NO: 2158 - protein, 71 aa, Homo sapiens; identical to SEQ ID NO: 861

SEQ ID NO: 2159 - protein, 62 aa, Homo sapiens
  variant (1)...(62): Xaa = Any amino acid
DLLGGMAPPGSSTVFLLALTIIASTWALTPTHYLTKHDXERLKASLDPPFHKVGSXVFYSIX

SEQ ID NO: 2160 - protein, 53 aa, Homo sapiens
PWDGSSDHWGPGQARPGLGQQGPGQRGRASFGGVEGYILGWCLHPGVQQDLFQ

SEQ ID NO: 2161 - protein, 83 aa, Homo sapiens [sequence omitted]

SEQ ID NO: 2162 - protein, 115 aa, Homo sapiens [sequence omitted]

SEQ ID NO: 2163 - protein, 165 aa, Homo sapiens
  variant (1)...(165): Xaa = Any amino acid
WQPSSTAISRXVVHRDIKDEXILIDLRRGCAKLIDFGSGALLHDEPYTDFDGTRVYSPPEWISRHQYHALPATVWSLGILLYDMVCGDIPFERDQEILEAELHFPSPCFPQDCCALIRRCLAPKPSSRPSLEEILLDPWMQTPAEDVPLNPSKGGPAPLAWSLLP

SEQ ID NO: 2164 - protein, 91 aa, Homo sapiens [sequence omitted]

SEQ ID NO: 2165 - protein, 66 aa, Homo sapiens [sequence omitted]

SEQ ID NO: 2166 - protein, 82 aa, Homo sapiens [sequence omitted]

SEQ ID NO: 2167 - protein, 118 aa, Homo sapiens; identical to SEQ ID NO: 883

SEQ ID NO: 2168 - protein, 66 aa, Homo sapiens; identical to SEQ ID NO: 884

SEQ ID NO: 2169 - protein, 86 aa, Homo sapiens
  variant (1)...(86): Xaa = Any amino acid
QVVAXIQHCHSRGVVHRDIKDENILIDLRRGCAKLIDFGSGALLHDEPYTDFDGTRVYSPPEWISRHQYHALPATVWSLGIXLYDM

SEQ ID NO: 2170 - protein, 60 aa, Homo sapiens
  variant (1)...(60): Xaa = Any amino acid
TYAVAVPNSLILVLVPCFMMNPTLTLMGQGCTAPQSGSLDTSTMHSRPLSGHWASXSMTW

SEQ ID NO: 2171 - protein, 51 aa, Homo sapiens
  variant (1)...(51): Xaa = Any amino acid
PCHRXGCPVTRQWPGVHGTGVERSTLGGCTPLSHQSQCRVHHEAGHQNQNQ

SEQ ID NO: 2172 - protein, 121 aa, Homo sapiens; identical to SEQ ID NO: 926
  variant (1)...(121): Xaa = Any amino acid

SEQ ID NO: 2173 - protein, 71 aa, Homo sapiens; identical to SEQ ID NO: 927
  variant (1)...(71): Xaa = Any amino acid

SEQ ID NO: 2174 - protein, 122 aa, Homo sapiens; identical to SEQ ID NO: 985

SEQ ID NO: 2175 - protein, 69 aa, Homo sapiens; identical to SEQ ID NO: 986

SEQ ID NO: 2176 - protein, 64 aa, Homo sapiens
ETTWAPPVTPVSGAPTCVLRCRNCRWKLPTSSWVPLAVCLICLTGDTCPPNTSRCLYWMKLTKC

SEQ ID NO: 2177 - protein, 179 aa, Homo sapiens
LVLAPTRELAQQIQKVVMALGDYMGASCHACIGGTNVRAEVQKLQMEAPHIIVGTPGRVFDMLNRRYLSPKYIKMFVLDEADEMLSRGFKDQIYDIFQKLNSNTQVVLLSATMPSDVLEVTKKFMRDPIRILVKKEELTLEGIRQFYINVEREEWKLDTLCDLYETLTITQAVIFINTR

SEQ ID NO: 2178 - protein, 64 aa, Homo sapiens
HFVSFIQYKHLDVFGGQVSPVKHIKHTARGTHDDVGSFHLQFLHLSTHVGAPDTGVTGGAHVVS

SEQ ID NO: 2179 - protein, 52 aa, Homo sapiens
NWRIPSRVNSSFLTRIRMGSLMNFLVTSSTSEGIVADSKTTWVLLLSFWNMS

SEQ ID NO: 2180 - protein, 64 aa, Homo sapiens
IWSLNPRLNISSASSSTNILMYLGDRYLRLSISNTRPGVPTMMWGASICSFCTSARTLVPPIQA

SEQ ID NO: 2181 - protein, 134 aa, Homo sapiens
  variant (1)...(134): Xaa = Any amino acid
VIVRLEAFAVDDGGAGLVILLLADPHLLEGGQRGQDGAADPHGVLALRRSNDLDLHXAGCQGXDLLLHPVXNARVHGGAARQHXVGVQVFADVHVTLHDGVEGSFVDATGLHAQEGRLXXCLRAAEPLIANGDD

SEQ ID NO: 2182 - protein, 129 aa, Homo sapiens
  variant (1)...(129): Xaa = Any amino acid
KHLRWTMEGPDSSYSCLLIHICWKVDSEARMEPPIHTEYLRSGGAMILIFIXLGARAXISFCILSXMPGYMVVPPDSTXLAYRSLRMSTSHFMMELKVVSWMPQDSMPRKEGXXSASGQRNRSLPMVMT

SEQ ID NO: 2183 - protein, 129 aa, Homo sapiens
  variant (1)...(129): Xaa = Any amino acid
VITIGNERFRCPEAXXQPSFLGMESCGIHETTFNSIMKCDVDIRKDLYANXVLSGGTTMYPGIXDRMQKEIXALAPSXMKIKIIAPPERKYSVWIGGSILASLSTFQQMWISKQEYDESGPSIVHRKCF

SEQ ID NO: 2184 - protein, 55 aa, Homo sapiens
RSRSLLLLSASTPCGSAAPSWPRCPPSSRCGSASRSMTSPAPPSSTANASRRTMT

SEQ ID NO: 2185 - protein, 124 aa, Homo sapiens; identical to SEQ ID NO: 814

SEQ ID NO: 2186 - protein, 71 aa, Homo sapiens [sequence omitted]

SEQ ID NO: 2187 - protein, 64 aa, Homo sapiens; identical to SEQ ID NO: 1057
  variant (1)...(64): Xaa = Any amino acid

SEQ ID NO: 2188 - protein, 53 aa, Homo sapiens; identical to SEQ ID NO: 1058
  variant (1)...(53): Xaa = Any amino acid

SEQ ID NO: 2189 - protein, 51 aa, Homo sapiens; identical to SEQ ID NO: 1059
  variant (1)...(51): Xaa = Any amino acid

SEQ ID NO: 2190 - protein, 64 aa, Homo sapiens; identical to SEQ ID NO: 1060
  variant (1)...(64): Xaa = Any amino acid

SEQ ID NO: 2191 - protein, 94 aa, Homo sapiens [sequence omitted]

SEQ ID NO: 2192 - protein, 61 aa, Homo sapiens [sequence omitted]

SEQ ID NO: 2193 - protein, 58 aa, Homo sapiens; identical to SEQ ID NO: 1083
  variant (1)...(58): Xaa = Any amino acid

SEQ ID NO: 2194 - protein, 139 aa, Homo sapiens; identical to SEQ ID NO: 1084
  variant (1)...(139): Xaa = Any amino acid

SEQ ID NO: 2195 - protein, 123 aa, Homo sapiens; identical to SEQ ID NO: 1092

SEQ ID NO: 2196 - protein, 71 aa, Homo sapiens; identical to SEQ ID NO: 813

SEQ ID NO: 2197 - protein, 71 aa, Homo sapiens; identical to SEQ ID NO: 813

SEQ ID NO: 2198 - protein, 124 aa, Homo sapiens; identical to SEQ ID NO: 814

SEQ ID NO: 2199 - protein, 85 aa, Homo sapiens; identical to SEQ ID NO: 1132
  variant (1)...(85): Xaa = Any amino acid

SEQ ID NO: 2200 - protein, 56 aa, Homo sapiens; identical to SEQ ID NO: 1133

SEQ ID NO: 2201 - protein, 70 aa, Homo sapiens; identical to SEQ ID NO: 1134
  variant (1)...(70): Xaa = Any amino acid

SEQ ID NO: 2202 - protein, 82 aa, Homo sapiens; identical to SEQ ID NO: 1135
  variant (1)...(82): Xaa = Any amino acid

SEQ ID NO: 2203 - protein, 56 aa, Homo sapiens; identical to SEQ ID NO: 1136

SEQ ID NO: 2204 - protein, 57 aa, Homo sapiens; identical to SEQ ID NO: 1149

SEQ ID NO: 2205 - protein, 78 aa, Homo sapiens; identical to SEQ ID NO: 1150

SEQ ID NO: 2206 - protein, 63 aa, Homo sapiens
YCKGPLEFLKWLHRIEIISNNCKGTENLHRDEVGFPLGALKFDNKSSTSTGQYIDFGCLRPQD

SEQ ID NO: 2207 - protein, 87 aa, Homo sapiens
TLKYFIIGGNLWRLVASNLGASDTQNLYIDQWKLMICYQISKHLMETPLHLCEDFQFLYSYLKLFQFCGATSETPMGLCNIKMWRMH

SEQ ID NO: 2208 - protein, 174 aa, Homo sapiens; identical to SEQ ID NO: 1158

SEQ ID NO: 2209 - protein, 56 aa, Homo sapiens; identical to SEQ ID NO: 794

SEQ ID NO: 2210 - protein, 52 aa, Homo sapiens; identical to SEQ ID NO: 1160

SEQ ID NO: 2211 - protein, 54 aa, Homo sapiens; identical to SEQ ID NO: 1161

SEQ ID NO: 2212 - protein, 70 aa, Homo sapiens; identical to SEQ ID NO: 1162

SEQ ID NO: 2213 - protein, 50 aa, Homo sapiens; identical to SEQ ID NO: 1163

SEQ ID NO: 2214 - protein, 143 aa, Homo sapiens; identical to SEQ ID NO: 1164

SEQ ID NO: 2215 - protein, 115 aa, Homo sapiens; identical to SEQ ID NO: 1143

SEQ ID NO: 2216 - protein, 55 aa, Homo sapiens; identical to SEQ ID NO: 1144

SEQ ID NO: 2217 - protein, 51 aa, Homo sapiens; identical to SEQ ID NO: 1145

SEQ ID NO: 2218 - protein, 117 aa, Homo sapiens; identical to SEQ ID NO: 1170

SEQ ID NO: 2219 - protein, 117 aa, Homo sapiens; identical to SEQ ID NO: 1171

SEQ ID NO: 2220 - protein, 83 aa, Homo sapiens; identical to SEQ ID NO: 1172

SEQ ID NO: 2221 - protein, 70 aa, Homo sapiens; identical to SEQ ID NO: 1195
  variant (1)...(70): Xaa = Any amino acid

SEQ ID NO: 2222 - protein, 63 aa, Homo sapiens; identical to SEQ ID NO: 1196
  variant (1)...(63): Xaa = Any amino acid

SEQ ID NO: 2223 - protein, 50 aa, Homo sapiens; identical to SEQ ID NO: 1197
  variant (1)...(50): Xaa = Any amino acid

SEQ ID NO: 2224 - protein, 92 aa, Homo sapiens; identical to SEQ ID NO: 1198
  variant (1)...(92): Xaa = Any amino acid

SEQ ID NO: 2225 - protein, 50 aa, Homo sapiens; identical to SEQ ID NO: 1205

SEQ ID NO: 2226 - protein, 134 aa, Homo sapiens; identical to SEQ ID NO: 1206

SEQ ID NO: 2227 - protein, 67 aa, Homo sapiens; identical to SEQ ID NO: 1207

SEQ ID NO: 2228 - protein, 60 aa, Homo sapiens; identical to SEQ ID NO: 1208

SEQ ID NO: 2229 - protein, 64 aa, Homo sapiens; identical to SEQ ID NO: 1209

SEQ ID NO: 2230 - protein, 53 aa, Homo sapiens; identical to SEQ ID NO: 1210

SEQ ID NO: 2231 - protein, 185 aa, Homo sapiens; identical to SEQ ID NO: 1992

SEQ ID NO: 2232 - protein, 65 aa, Homo sapiens; identical to SEQ ID NO: 1993

SEQ ID NO: 2233 - protein, 112 aa, Homo sapiens; identical to SEQ ID NO: 1994

SEQ ID NO: 2234 - protein, 199 aa, Homo sapiens; identical to SEQ ID NO: 1216

SEQ ID NO: 2235 - protein, 76 aa, Homo sapiens; identical to SEQ ID NO: 1217

SEQ ID NO: 2236 - protein, 122 aa, Homo sapiens; identical to SEQ ID NO: 1218

SEQ ID NO: 2237 - protein, 56 aa, Homo sapiens; identical to SEQ ID NO: 1219

SEQ ID NO: 2238 - protein, 50 aa, Homo sapiens
LREGSGWVRGDGEGKGGVSIFILRIGVQSTSGVSAPPCPPVGLRRTGKRT

SEQ ID NO: 2239 - protein, 50 aa, Homo sapiens
RALTESSRNSGTVSRGPALHGPGPPPSPSPRPEPRATRSAAAAAWPGTIS

SEQ ID NO: 2240 - protein, 55 aa, Homo sapiens
  variant (1)...(55): Xaa = Any amino acid
SRPPALPGSTSPVHVLILHFAFYHKIFLWPGAFGPSASSCHQRGPSGSTWRPXVQ

SEQ ID NO: 2241 - protein, 75 aa, Homo sapiens
QRAAETLELFPEGLHCMDQGHHLLLHPGQNPVPPGLQPLQHGLEPSHDLVTKALPRLLGCGILNIRDRGSVASAP

SEQ ID NO: 2242 - protein, 103 aa, Homo sapiens
DWKEDMKSSDREQQKLWNCFQRACTAWTRATTFSFTQARTPCHQVCSRCSMAWNHLMTLSQKLSPGSSVAGSSTSGTGDLLPRHRNPSLSFSSRGVSSRCCSS

SEQ ID NO: 2243 - protein, 76 aa, Homo sapiens
QGHEMVPGHAAAAADLVARGSGLGEGEGGGPGPCSAGPLETVPEFLLLSVRALHVLFPVLRSPTGGQGGADTPEVL

SEQ ID NO: 2244 - protein, 194 aa, Homo sapiens
  variant (1)...(194): Xaa = Any amino acid
LEXLAAMCFPKVLSDDMKKLKARMHQAIERFYDKMQNAESGRGQVMSSLAELEDDFKEGYLETVAAYYEEQHLELTPLLEKERDGLRCRGNRSPVPDVEDPATEEPGESFCDKVMRWFQAMLQRLQTWWHGVLAWVKEKVVALVHAVQALWKQFQSFCCSLSELFMSSFQSYGAPRGDKEELTPQKCSEPQSSK

SEQ ID NO: 2245 - protein, 87 aa, Homo sapiens; identical to SEQ ID NO: 1348

SEQ ID NO: 2246 - protein, 55 aa, Homo sapiens; identical to SEQ ID NO: 1349

SEQ ID NO: 2247 - protein, 119 aa, Homo sapiens
EKAPEPHVEEDDDDELDSKLNYKPPPQKSLKELQEMDKDDESLIKYKKTLLGDGPVVTDPKAPNVVVTRLTLVCESAPGPITMDLTGDLEALKKETIVLKEGSEYRVKIHFKVNRDIVS

SEQ ID NO: 2248 - protein, 55 aa, Homo sapiens; identical to SEQ ID NO: 1237

SEQ ID NO: 2249 - protein, 54 aa, Homo sapiens; identical to SEQ ID NO: 1238

SEQ ID NO: 2250 - protein, 147 aa, Homo sapiens; identical to SEQ ID NO: 1239

SEQ ID NO: 2251 - protein, 135 aa, Homo sapiens; identical to SEQ ID NO: 1240

SEQ ID NO: 2252 - protein, 151 aa, Homo sapiens; identical to SEQ ID NO: 1241

SEQ ID NO: 2253 - protein, 60 aa, Homo sapiens [sequence omitted]

SEQ ID NO: 2254 - protein, 70 aa, Homo sapiens
  variant (1)...(70): Xaa = Any amino acid
GIRSQLSLNSQSPPWASLPNDLVALGASEVNPEILPPSTLGSDLCPSLXHKEISVKXVGTGGFRPCSKAT

SEQ ID NO: 2255 - protein, 77 aa, Homo sapiens
GERPRVGTGNLRRAGNGSLRFRKLLYKLRGWLGPKGCSARRASCELSKALGSQHPKSLWLQSCVCTTQSKGSFCFVF

SEQ ID NO: 2256 - protein, 115 aa, Homo sapiens; identical to SEQ ID NO: 1143

SEQ ID NO: 2257 - protein, 55 aa, Homo sapiens; identical to SEQ ID NO: 1144

SEQ ID NO: 2258 - protein, 51 aa, Homo sapiens; identical to SEQ ID NO: 1247
  variant (1)...(51): Xaa = Any amino acid

SEQ ID NO: 2259 - protein, 69 aa, Homo sapiens [sequence omitted]

SEQ ID NO: 2260 - protein, 102 aa, Homo sapiens; identical to SEQ ID NO: 1251

SEQ ID NO: 2261 - protein, 77 aa, Homo sapiens [sequence omitted]

SEQ ID NO: 2262 - protein, 60 aa, Homo sapiens [sequence omitted]

SEQ ID NO: 2263 - protein, 60 aa, Homo sapiens; identical to SEQ ID NO: 1778

SEQ ID NO: 2264 - protein, 55 aa, Homo sapiens
  variant (1)...(55): Xaa = Any amino acid
GIRSQLSLNSQSPPWASLPNDLVALGAPEXNPEILPPSTLGSDLCPSLCHKEISV

SEQ ID NO: 2265 - protein, 77 aa, Homo sapiens
  variant (1)...(77): Xaa = Any amino acid
GERPRVGTGNLRRAGNGSLRFRKLLCKLRGWLGPKGCSARRASCELSKALGSQHPKSLWLQSCVCXTHSKGSFCFVF

SEQ ID NO: 2266 - protein, 115 aa, Homo sapiens; identical to SEQ ID NO: 1143

SEQ ID NO: 2267 - protein, 55 aa, Homo sapiens; identical to SEQ ID NO: 1255
  variant (1)...(55): Xaa = Any amino acid

SEQ ID NO: 2268 - protein, 51 aa, Homo sapiens; identical to SEQ ID NO: 1256
  variant (1)...(51): Xaa = Any amino acid

SEQ ID NO: 2269 - protein, 101 aa, Homo sapiens; identical to SEQ ID NO: 1766

SEQ ID NO: 2270 - protein, 124 aa, Homo sapiens; identical to SEQ ID NO: 1767

SEQ ID NO: 2271 - protein, 100 aa, Homo sapiens; identical to SEQ ID NO: 1768

SEQ ID NO: 2272 - protein, 54 aa, Homo sapiens
RRTSQTDGTQAGWVLYPRSQEGRVSCTVVNRRAAWRQWLSQKVTQSSCLERESL

SEQ ID NO: 2273 - protein, 72 aa, Homo sapiens
LRIQRCWGEKSSIDSTFQDVHFGERSRWDPQENDGEHPRQMGLKQDGCYIQEAKKGEFRALWLTGGLPGGSG

SEQ ID NO: 2274 - protein, 55 aa, Homo sapiens
VPSVWDVLRHFLEGPTCSSPRNGHPGRWSLYCFSLPSNVESGVSLGSANNGCHLQ

SEQ ID NO: 2275 - protein, 74 aa, Homo sapiens
PQCTKLSLLGFLDIAPILLESHLSGMFSVIFLRVPPAPLPEMDILEGGVYTAFLSPATLNPESAWAPQTTAAIS

SEQ ID NO: 2276 - protein, 69 aa, Homo sapiens
  variant (1)...(69): Xaa = Any amino acid
SRWMEQKINLXLVRTPFWGCPLPSAKLVPLRRGSPCTATSLTWLATLKSSCQSRRSMSSMAVLMLATSW

SEQ ID NO: 2277 - protein, 120 aa, Homo sapiens
  variant (1)...(120): Xaa = Any amino acid
YEALELRDNDKTRYMGKGVSKAVEHINKTIAPALVSKKLNVTEQEKIDKLMIEMDGTENKSXFGANAILGVSLAVCKAGAVEKGVPLYRHIADLAGNSEVILPVPAFNVINGGSHAGNKL

SEQ ID NO: 2278 - protein, 100 aa, Homo sapiens
  variant (1)...(100): Xaa = Any amino acid
QLVASMRTAIDDIERRDWQDDFRVASQVSDVAVQGDPLLNGTSFADGKGHPQNGVRTKXRFIFCSIHLDHQFVNLLLFCDVQFLANQGRRNSFIDVLNSL

SEQ ID NO: 2279 - protein, 100 aa, Homo sapiens
  variant (1)...(100): Xaa = Any amino acid
EPPLMTLNAGTGRMTSELPAKSAMWRYRGTPFSTAPALQTARDTPRMAFAPXLDLFSVPSISIISLSIFSCSVTFSFLLTRAGAIVLLMCSTAFETPFPI

SEQ ID NO: 2280 - protein, 75 aa, Homo sapiens
LDNPGSGGGCKNLQKLEGAPQENKQQALFPLAHPPKNHPSHPSVWWCPVVSIFHSFPNYGSKVLLTRIRALGITE

SEQ ID NO: 2281 - protein, 51 aa, Homo sapiens
  variant (1)...(51): Xaa = Any amino acid
GPLTQKKKKKXSLGVTTGHYLPQNKESWAEAGKQLDPIWDPRLGERVPLLK

SEQ ID NO: 2282 - protein, 57 aa, Homo sapiens
NNPGRRREEGTLGTPLPTIRDYLHFSNWTIPAQEEVARICKSWRERPRRTNSKPYFP

SEQ ID NO: 2283 - protein, 68 aa, Homo sapiens
IIQAGEERRAHLELPSPQYVIIYILVIGQSRLRRRLQESAKVGGSAPGEQTASLISPSPSPKKPSIPS

SEQ ID NO: 2284 - protein, 66 aa, Homo sapiens
  variant (1)...(66): Xaa = Any amino acid
CVTPHWXLLLXPXKLSSYALTWARVLSFQYPSSFYFSKGTLSPSLGSHIGSSCLPASAQDSLFWGR

SEQ ID NO: 2285 - protein, 59 aa, Homo sapiens
FGKEWKMDTTGHHQTLGWDGWFFGGWARGNKACCLFSWGAPSNFCRFLQPPPEPGLSNY

SEQ ID NO: 2286 - protein, 50 aa, Homo sapiens
  variant (1)...(50): Xaa = Any amino acid
DSYSDDVSPHIGXSYYXHXNLVHMLLLGQGCFPSNTPVAFILVKGPFPLA

SEQ ID NO: 2287 - protein, 87 aa, Homo sapiens
  variant (1)...(87): Xaa = Any amino acid
PRVPYWVKLLTCLSPGFFILGEVMPCCYPKAXFFFFFLGEGTLLCYPKCSYSGEKNLTSIIWEGMEDGHHRTPPDTRMGWMVFWGMG

SEQ ID NO: 2288 - protein, 88 aa, Homo sapiens
TSVEPLSRGPWVPNTKIPTAERAADHLVRIPVAFISKINSPFLRLSESWVYALKKAELLDSLTSCHRVLNVSDHKGLHTFAVCSGATY

SEQ ID NO: 2289 - protein, 53 aa, Homo sapiens
VFLYWEPKVLCLVAQRLSTFPRLNACGALSTSTCSQGPPSLSSNAQDRVDLIG

SEQ ID NO: 2290 - protein, 51 aa, Homo sapiens
FSFFQGIDPRLRQPQERGVYFGYKGNRNPDQMVSSPLSSRYFCIGNPRSSA

SEQ ID NO: 2291 - protein, 81 aa, Homo sapiens
TQDSDNLKKGEFILDIKATGILTKWSAALSAVGIFVLGTQGPLLSGSTLVYLSKAQRLWSLVHKHLLPRASLPEFKRPRQS

SEQ ID NO: 2292 - protein, 125 aa, Homo sapiens; identical to SEQ ID NO: 1301

SEQ ID NO: 2293 - protein, 59 aa, Homo sapiens; identical to SEQ ID NO: 1302

SEQ ID NO: 2294 - protein, 100 aa, Homo sapiens; identical to SEQ ID NO: 1303

SEQ ID NO: 2295 - protein, 50 aa, Homo sapiens; identical to SEQ ID NO: 1304

SEQ ID NO: 2296 - protein, 131 aa, Homo sapiens; identical to SEQ ID NO: 1305

SEQ ID NO: 2297 - protein, 53 aa, Homo sapiens; identical to SEQ ID NO: 1306

SEQ ID NO: 2298 - protein, 78 aa, Homo sapiens; identical to SEQ ID NO: 1307

SEQ ID NO: 2299 - protein, 134 aa, Homo sapiens [sequence omitted]

SEQ ID NO: 2300 - protein, 66 aa, Homo sapiens; identical to SEQ ID NO: 1309

SEQ ID NO: 2301 - protein, 141 aa, Homo sapiens; identical to SEQ ID NO: 1310

SEQ ID NO: 2302 - protein, 50 aa, Homo sapiens; identical to SEQ ID NO: 2238

SEQ ID NO: 2303 - protein, 50 aa, Homo sapiens
RALTESSRNSGTVSRGPALHGPGPPPSPSPRPEPRATRPAAAAAWPGTIS

SEQ ID NO: 2304 - protein, 75 aa, Homo sapiens; identical to SEQ ID NO: 2241

SEQ ID NO: 2305 - protein, 60 aa, Homo sapiens [sequence omitted]

SEQ ID NO: 2306 - protein, 103 aa, Homo sapiens [sequence omitted]

SEQ ID NO: 2307 - protein, 177 aa, Homo sapiens
PWLLELLAAMCFPKVLSDDMKKLKARMVMSSLAELEDDFKEGYLETVAAYYEEQHPELTPLLEKERDGLRCRGNRSPVPDVEDPATEEPGESFCDKVMRWFQAMLQRLQAWWHGVLAWVKEKVVALVHAVQALWKQFQSFCCSLSELFMSSFQSYGAPRGDKEELTPQKCSEPQSSK

SEQ ID NO: 2308 - protein, 69 aa, Homo sapiens
CRAWQSWRTTSKRATWRQWRLIMRSSTQSSLLYLKKKEMDYGAEATDPLSRMLRIPQPRSLGRAFVTRS

SEQ ID NO: 2309 - protein, 76 aa, Homo sapiens
QGHEMVPGHAAAAAGLVARGSGLGEGEGGGPGPCSAGPLETVPEFLLLSVRALHVLFPVLRSPTGGQGGADTPEVL

SEQ ID NO: 2310 - protein, 50 aa, Homo sapiens; identical to SEQ ID NO: 1332

SEQ ID NO: 2311 - protein, 51 aa, Homo sapiens; identical to SEQ ID NO: 1333

SEQ ID NO: 2312 - protein, 63 aa, Homo sapiens; identical to SEQ ID NO: 1818
  variant (1)...(63): Xaa = Any amino acid

SEQ ID NO: 2313 - protein, 70 aa, Homo sapiens; identical to SEQ ID NO: 1819
  variant (1)...(70): Xaa = Any amino acid

SEQ ID NO: 2314 - protein, 76 aa, Homo sapiens; identical to SEQ ID NO: 1820
  variant (1)...(76): Xaa = Any amino acid

SEQ ID NO: 2315 - protein, 67 aa, Homo sapiens; identical to SEQ ID NO: 2075
  variant (1)...(67): Xaa = Any amino acid

SEQ ID NO: 2316 - protein, 62 aa, Homo sapiens; identical to SEQ ID NO: 1830

SEQ ID NO: 2317 - protein, 94 aa, Homo sapiens; identical to SEQ ID NO: 1831

SEQ ID NO: 2318 - protein, 76 aa, Homo sapiens; identical to SEQ ID NO: 1346

SEQ ID NO: 2319 - protein, 68 aa, Homo sapiens; identical to SEQ ID NO: 1347

SEQ ID NO: 2320 - protein, 59 aa, Homo sapiens; identical to SEQ ID NO: 1354

SEQ ID NO: 2321 - protein, 68 aa, Homo sapiens; identical to SEQ ID NO: 1355

SEQ ID NO: 2322 - protein, 58 aa, Homo sapiens
  variant (1)...(58): Xaa = Any amino acid
SATYGXQAGVVPWLSPXTSERPTLSSSPXINPETQAALIRGQDSTIAASEQQVAXXNS

SEQ ID NO: 2323 - protein, 60 aa, Homo sapiens
  variant (1)...(60): Xaa = Any amino acid
QHQNSKWXXRILDSXDXATVNPVEFNTEVATPPFSLLXTSNETXFLIGINEEXLEGXAIY

SEQ ID NO: 2324 - protein, 67 aa, Homo sapiens
  variant (1)...(67): Xaa = Any amino acid
IDCXAFQXLFINANQEXCFIRSXQKGKWWCCNLSIKFHRVYCCXIXGIKNSXXPLAVLMLLSWNPAL

SEQ ID NO: 2325 - protein, 158 aa, Homo sapiens; identical to SEQ ID NO: 1356
  variant (1)...(158): Xaa = Any amino acid

SEQ ID NO: 2326 - protein, 68 aa, Homo sapiens; identical to SEQ ID NO: 1357
  variant (1)...(68): Xaa = Any amino acid

SEQ ID NO: 2327 - protein, 64 aa, Homo sapiens; identical to SEQ ID NO: 1358
  variant (1)...(64): Xaa = Any amino acid

SEQ ID NO: 2328 - protein, 103 aa, Homo sapiens; identical to SEQ ID NO: 1359
  variant (1)...(103): Xaa = Any amino acid

SEQ ID NO: 2329 - protein, 123 aa, Homo sapiens; identical to SEQ ID NO: 1360
  variant (1)...(123): Xaa = Any amino acid

SEQ ID NO: 2330 - protein, 68 aa, Homo sapiens; identical to SEQ ID NO: 1347

SEQ ID NO: 2331 - protein, 64 aa, Homo sapiens; identical to SEQ ID NO: 1362
  variant (1)...(64): Xaa = Any amino acid

SEQ ID NO: 2332 - protein, 104 aa, Homo sapiens; identical to SEQ ID NO: 1363
  variant (1)...(104): Xaa = Any amino acid

SEQ ID NO: 2333 - protein, 73 aa, Homo sapiens [sequence omitted]

SEQ ID NO: 2334 - protein, 66 aa, Homo sapiens [sequence omitted]

SEQ ID NO: 2335 - protein, 59 aa, Homo sapiens
ALWADLPLTYYSRSAVTSWDLPLPASIPKSSPAITVGMSTQKLSQPHQDSCEKRGYVHT

SEQ ID NO: 2336 - protein, 68 aa, Homo sapiens
  variant (1)...(68): Xaa = Any amino acid
VEDXTPIPCRSIGRSKVSSMGRSTPYLLFQICSHFVGSAPPCFNTQILSSYNSRDEYPKAQPAPSGLL

SEQ ID NO: 2337 - protein, 58 aa, Homo sapiens
AQLGSECKKLSMVREACALIQVYSTLSGDQNPLLITPLQRGDWALPLFDKPLTQVLTP

SEQ ID NO: 2338 - protein, 68 aa, Homo sapiens; identical to SEQ ID NO: 1371
  variant (1)...(68): Xaa = Any amino acid

SEQ ID NO: 2339 - protein, 143 aa, Homo sapiens; identical to SEQ ID NO: 1372
  variant (1)...(143): Xaa = Any amino acid

SEQ ID NO: 2340 - protein, 64 aa, Homo sapiens; identical to SEQ ID NO: 1373
  variant (1)...(64): Xaa = Any amino acid

SEQ ID NO: 2341 - protein, 103 aa, Homo sapiens; identical to SEQ ID NO: 1374
  variant (1)...(103): Xaa = Any amino acid

SEQ ID NO: 2342 - protein, 162 aa, Homo sapiens
  variant (1)...(162): Xaa = Any amino acid
QMHLWAGGDLGLCWNWISELLLHLFSSHPGLFRAAVPSGASTGIYEALELRDNDKTRYMGKGVSKAVEHXNKTIAPALVSKKLNVTEQEKIDKLMIEMDGTENKSKFGANAILGVSLAVCKAGAVEKGVPLYRHIADLAGNSEVILPVPAFNVINGXSHAGN

SEQ ID NO: 2343 - protein, 55 aa, Homo sapiens
RKKQLPNDKCICGREGTWDCAGTGFLNCYYIFFPLIQVSSELLCPVVLQLVSMRP

SEQ ID NO: 2344 - protein, 66 aa, Homo sapiens
  variant (1)...(66): Xaa = Any amino acid
SRWMEQKINLSLVRTPFWGCPLPSAKLVPLRRGSPCTATSLTWLATLKSSCQSRRSMSSMAXLMLA

SEQ ID NO: 2345 - protein, 98 aa, Homo sapiens
  variant (1)...(98): Xaa = Any amino acid
VASMRXAIDDIERRDWQDDFRVASQVSDVAVQGDPLLNGTSFADGKGHPQNGVRTKLRFIFCSIHLDHQFVNLLLFCDVQFLANQGRRNSFIXVLNSL

SEQ ID NO: 2346 - protein, 100 aa, Homo sapiens
  variant (1)...(100): Xaa = Any amino acid
XPPLMTLNAGTGRMTSELPAKSAMWRYRGTPFSTAPALQTARDTPRMAFAPNLDLFSVPSISIISLSIFSCSVTFSFLLTRAGAIVLXMCSTAFETPFPI

SEQ ID NO: 2347 - protein, 73 aa, Homo sapiens; identical to SEQ ID NO: 1375

SEQ ID NO: 2348 - protein, 52 aa, Homo sapiens; identical to SEQ ID NO: 1376

SEQ ID NO: 2349 - protein, 64 aa, Homo sapiens; identical to SEQ ID NO: 1377

SEQ ID NO: 2350 - protein, 55 aa, Homo sapiens; identical to SEQ ID NO: 1378

SEQ ID NO: 2351 - protein, 87 aa, Homo sapiens; identical to SEQ ID NO: 1348

SEQ ID NO: 2352 - protein, 55 aa, Homo sapiens; identical to SEQ ID NO: 1349

SEQ ID NO: 2353 - protein, 50 aa, Homo sapiens; identical to SEQ ID NO: 2102

SEQ ID NO: 2354 - protein, 123 aa, Homo sapiens; identical to SEQ ID NO: 1681

SEQ ID NO: 2355 - protein, 69 aa, Homo sapiens; identical to SEQ ID NO: 1379

SEQ ID NO: 2356 - protein, 66 aa, Homo sapiens; identical to SEQ ID NO: 1380

SEQ ID NO: 2357 - protein, 156 aa, Homo sapiens
  variant (1)...(156): Xaa = Any amino acid
QKLLKCXRLVLALALILVLESSVQGYPTQRARYQWVRCNPDSNSANCLEEKGPMFELLPGESNKIPRLRTDLFPKTRIQDLNRIFPLSEDYSGSGFGSGSGSGSGSGSGFLTEMEQDYQLVDESDAFHDNLRSLDRNLPSDSQDLGQHGLEEDFML

SEQ ID NO: 2358 - protein, 67 aa, Homo sapiens
  variant (1)...(67): Xaa = Any amino acid
RSYSNXVGLSWLLPSSWFWNPQFKVILRREPGTNGCAAIQTVILQTALKKKDQCSNYFQVNPTRSPV

SEQ ID NO: 2359 - protein, 64 aa, Homo sapiens
SSESGKIRFKSWILVFGKRSVLRRGILLDSPGSSSNIGPFSSRQFAELLSGLQRTHWYLALCVG

SEQ ID NO: 2360 - protein, 103 aa, Homo sapiens
GCHGKHHFRLLVGNPVPFPLGSHSQILIQSRSRSRSLIQSSPQKVGRYDSSPGFSSLEKGQSSDGGSCWIHLEVVRTLVLFLQGSLQNYCLDCSAPIGTWLSA

SEQ ID NO: 2361 - protein, 180 aa, Homo sapiens
GNDGAQRSFCQSCFNELNDLFKAACLPLPGYRVREITENLMATGDLDQDGRISFDEFIKIFHGLKSTDVAKTFRKAINKKEGICAIGGTSEQSSVGTQHSYSEEEKYAFVNWINKALENDPDCRHVIPMNPNTNDLFNAVGDGIVLCKMINLSVPDTIDERTINKKKLTPFTIQENLNLA

SEQ ID NO: 2362 - protein, 72 aa, Homo sapiens
MVKGVSFFLLIVLSSIVSGTDRLIILQRTMPSPTALKRSFVFGFIGMTCRQSGSFSRALFIQLTKAYFSSSE

SEQ ID NO: 2363 - protein, 94 aa, Homo sapiens
ECWVPTLDCSEVPPIAQIPSFLLIAFLKVLATSVLFRPWKILINSSKLILPSWSRSPVAIRFSVISRTLYPGKGKQAALNKSFNSLKQLWQKLL

SEQ ID NO: 2364 - protein, 50 aa, Homo sapiens
QVDHFTKDNAISNSIKEIIRVWVHWDDMPTIRIIFQGFVYPVDKGILFFL

SEQ ID NO: 2365 - protein, 70 aa, Homo sapiens
AMENLDKLIKADPSILVQITCSHQVFCNFSYSIPRQRQASSLEQVIQLIEATLAKASLSSIISSSDTDPL

SEQ ID NO: 2366 - protein, 54 aa, Homo sapiens
NPDHHPGSHLHQHPEEGGLAHREDACSRFHCIRHAWRYGPKGTRRDYEGVSFWL

SEQ ID NO: 2367 - protein, 187 aa, Homo sapiens
QMEAPHIIVGTPGRVFDMLNRRYLSPKYIKMFVLDEADEMLSRGFKDQIYDIFQKLNSNTQVVLLSATMPSDVLEVTKKFMRDPIRILVKKEELTLEGIRQFYINVEREEWKLDTLCDLYETLTITQAVIFINTRRKVDWLTEKMHARDFTVSAMHGDMDQKERDVIMREFRSGSSRVLITTDLLDL

SEQ ID NO: 2368 - protein, 71 aa, Homo sapiens [sequence omitted]

SEQ ID NO: 2369 - protein, 84 aa, Homo sapiens
RSSRSVVIKTLLEPERNSLIITSRSFWSISPCMADTVKSRACIFSVSQSTFLRVLMKMTAWVMVRVSYKSHSVSSFHSSRSTLM

SEQ ID NO: 2370 - protein, 52 aa, Homo sapiens; identical to SEQ ID NO: 2179

SEQ ID NO: 2371 - protein, 54 aa, Homo sapiens [sequence omitted]

SEQ ID NO: 2372 - protein, 161 aa, Homo sapiens
QMPSDKTIGGGDDSFNTFFSETGAGKHVPRAVFVDLEPTVIDEVRTGTYRQLFHPEQLITGKEDAANNYARGHYTIGKEIIDLVLDRIRKLADQCTGLQGFLVFHSFGGGTGSGFTSLLMERLSVDYGKKSKLEFSIYPAPQVSTGEETRVCLECRLGGGR

SEQ ID NO: 2373 - protein, 132 aa, Homo sapiens
TWNPQSLMKFALALTASSSTLSNSSQARKMLPITMPEGTTPLARRSLTSCWTEFASWLTSAPVFRASWFSTALVGELVLGSPRCSWNVSQLIMARSPSWSSPFTRRPRFPQERRPESAWSADWEGADDWGGA

SEQ ID NO: 2374 - protein, 123 aa, Homo sapiens
ETFHEQRGEPRTSSPTKAVENQEALKTGALVSQLANSVQHEVNDLLANGVVPSGIVIGSIFLACDELLRVEELAVSASANFINDCGFQVYKHCPGYMLASTRFTEEGVEGIISSPNGLVTWHL

SEQ ID NO: 2375 - protein, 57 aa, Homo sapiens
DRIITPEISSCSTPVICPLPVCTPGRLWSPLLWKPGAPGKWRTPAWTSCHNQLRDVP

SEQ ID NO: 2376 - protein, 53 aa, Homo sapiens [sequence omitted]

SEQ ID NO: 2377 - protein, 67 aa, Homo sapiens; identical to SEQ ID NO: 1402
  variant (1)...(67): Xaa = Any amino acid

SEQ ID NO: 2378 - protein, 51 aa, Homo sapiens; identical to SEQ ID NO: 1877
  variant (1)...(51): Xaa = Any amino acid

SEQ ID NO: 2379 - protein, 60 aa, Homo sapiens; identical to SEQ ID NO: 767

SEQ ID NO: 2380 - protein, 51 aa, Homo sapiens; identical to SEQ ID NO: 783
  variant (1)...(51): Xaa = Any amino acid

SEQ ID NO: 2381 - protein, 59 aa, Homo sapiens; identical to SEQ ID NO: 784
  variant (1)...(59): Xaa = Any amino acid

SEQ ID NO: 2382 - protein, 59 aa, Homo sapiens; identical to SEQ ID NO: 785
  variant (1)...(59): Xaa = Any amino acid

SEQ ID NO: 2383 - protein, 58 aa, Homo sapiens; identical to SEQ ID NO: 786
  variant (1)...(58): Xaa = Any amino acid

SEQ ID NO: 2384 - protein, 135 aa, Homo sapiens
  variant (1)...(135): Xaa = Any amino acid
XRSSPKPVLCHQSKERKPSAEMNRITTKEATSSCPPKSPLGETRQKLWRSLKMLPERGQRVRQQLKSHLATVNLSSLLDVRRSTVISGPGTGKGSQDHSGDPTSGDRGYTDPCAATSXKSPSQPQAPKXXKVPTR

SEQ ID NO: 2385 - protein, 50 aa, Homo sapiens
  variant (1)...(50): Xaa = Any amino acid
SQALGPEKAAKITQGIPPRGTEATRIPVRPHXXKAPHSPRHQXTXRSPPG

SEQ ID NO: 2386 - protein, 134 aa, Homo sapiens
  variant (1)...(134): Xaa = Any amino acid
EVLPKASPVSPIKGKEAVSRDEQNNHQGSHFLLPPKIPSWRDPPETLEEPQNAPRERPEGPAAAKKPPRHCELVVTLGCPEIHGDLRPWDRKRQPRSLRGSHLGGQRLHGSLCGHIXXKPLTAPGTKXXKGPHQ

SEQ ID NO: 2387 - protein, 84 aa, Homo sapiens
  variant (1)...(84): Xaa = Any amino acid
SWWGPXCXLVPGAVRGFXXMWPHRDPCSLCPPRWDPLSDLGCLFRSQGLRSPWISGHPRVTTSSQWRGGFLAAAGPSGLSRGAF

SEQ ID NO: 2388 - protein, 50 aa, Homo sapiens [sequence omitted]

SEQ ID NO: 2389 - protein, 86 aa, Homo sapiens
SWLPFPVPGPEITVDLRTSKSDDKFTVARWLFSCCRTLWPLSGSILRLLQSFWRVSPRGDFGGQEEVASLVVILFISADGFLSFDW

SEQ ID NO: 2390 - protein, 78 aa, Homo sapiens [sequence omitted]

SEQ ID NO: 2391 - protein, 51 aa, Homo sapiens
EPIRNNRFSNQDHCSSWRNPWIPLSLYLHYHSLGSSLLSQVANLDSIHRCR

SEQ ID NO: 2392 - protein, 50 aa, Homo sapiens [sequence omitted]

SEQ ID NO: 2393 - protein, 82 aa, Homo sapiens
AKWQIWTVSIDADEPHPGTGEVEDIEQLNQCLIQHFHLIKTSLIFLCFLFHGIHENLLTVGVSKEAYLMTSVNGKNKTKMLY

SEQ ID NO: 2394 - protein, 78 aa, Homo sapiens [sequence omitted]

SEQ ID NO: 2395 - protein, 64 aa, Homo sapiens
KFILFYNTFRFIEKLGRWYKEFPYIPYPVSPNNILHWYIMVVTIKWANIDTLVLTKVHTLFRFH

SEQ ID NO: 2396 - protein, 57 aa, Homo sapiens
NLNKVWTLVNTNVSILAHLIVTTIIYQCKMLLGETGYGIYGNSLYHLPNFSINLKVL

SEQ ID NO: 2397 - protein, 74 aa, Homo sapiens
  variant (1)...(74): Xaa = Any amino acid
KSRRTAASIGSGLKKKICSQSVLEVTSPTKLTPYAVLRRWRHQAQKRKFXISHWESKVPPSQNDNCTVAEQTPP

SEQ ID NO: 2398 - protein, 57 aa, Homo sapiens
  variant (1)...(57): Xaa = Any amino acid
LKVKKDSSKHRLRIKEKNLLTVCSGGHITNKAHALCSSEKVEAPGSKEEIXNFSLGE

SEQ ID NO: 2399 - protein, 58 aa, Homo sapiens
  variant (1)...(58): Xaa = Any amino acid
LQQTGWGPPTLGWSLFCHCAVIILGWGYLTLPMRNXKFPLLSLVPPPSQNCIGRELCW

SEQ ID NO: 2400 - protein, 59 aa, Homo sapiens
  variant (1)...(59): Xaa = Any amino acid
LQDSREXANIQLADDFAGKQRKXVKACLPARKLDTKXRFGARKQTQKAHSKRRKKPQNL

SEQ ID NO: 2401 - protein, 50 aa, Homo sapiens
DLELGNKPKRLTASGEKNPKICNLYHKAFISFRYKELLDINKKNANTPEK

SEQ ID NO: 2402 - protein, 50 aa, Homo sapiens
  variant (1)...(50): Xaa = Any amino acid
YRLQILGFFSPLAVSLLGLFPSSKSXLGVKFPGWETSFYXLPLLASKVIC

SEQ ID NO: 2403 - protein, 60 aa, Homo sapiens
LHLVHVGTPSPFQSTTSSSNQYFLESLGNVLHAFKQSPFLEIHYRVTINSATLRFHHYGS

SEQ ID NO: 2404 - protein, 75 aa, Homo sapiens; identical to SEQ ID NO: 1407

SEQ ID NO: 2405 - protein, 63 aa, Homo sapiens; identical to SEQ ID NO: 1408

SEQ ID NO: 2406 - protein, 68 aa, Homo sapiens; identical to SEQ ID NO: 1409

SEQ ID NO: 2407 - protein, 69 aa, Homo sapiens; identical to SEQ ID NO: 1436
  variant (1)...(69): Xaa = Any amino acid

SEQ ID NO: 2408 - protein, 50 aa, Homo sapiens; identical to SEQ ID NO: 1437
  variant (1)...(50): Xaa = Any amino acid

SEQ ID NO: 2409 - protein, 59 aa, Homo sapiens; identical to SEQ ID NO: 1438
  variant (1)...(59): Xaa = Any amino acid

SEQ ID NO: 2410 - protein, 68 aa, Homo sapiens; identical to SEQ ID NO: 1439
  variant (1)...(68): Xaa = Any amino acid

SEQ ID NO: 2411 - protein, 54 aa, Homo sapiens; identical to SEQ ID NO: 1440
  variant (1)...(54): Xaa = Any amino acid

SEQ ID NO: 2412 - protein, 100 aa, Homo sapiens; identical to SEQ ID NO: 1441
  variant (1)...(100): Xaa = Any amino acid

SEQ ID NO: 2413 - protein, 72 aa, Homo sapiens; identical to SEQ ID NO: 1442
  variant (1)...(72): Xaa = Any amino acid

SEQ ID NO: 2414 - protein, 72 aa, Homo sapiens
PHFTIKKLRLKRIKEFFRGETALPYRRIPSNKCECSLSRRWHLIPLSWSLTSLSDWLLMNKMGKRKNSNSTV

SEQ ID NO: 2415 - protein, 76 aa, Homo sapiens
ELLWFFSRPAPSLKCKAVPLMGFWHSVSRPPFSSEGLSGEQRKNQPVSKLARLRDWGPLPPVKDADFTALQYSRVK

SEQ ID NO: 2416 - protein, 52 aa, Homo sapiens
VPPSGEGAFTFITWDPSVRKSCFSSKKLFNPFKPQFLNCEMGLIPVSNQGSS

SEQ ID NO: 2417 - protein, 79 aa, Homo sapiens
RSHLTLLYCSAVKSASFTGGKGPQSLRRASLETGWFFLCSPESPSDEKGGLETECQKPIKGTALHFREGAGLEKNQRSS

SEQ ID NO: 2418 - protein, 61 aa, Homo sapiens; identical to SEQ ID NO: 817

SEQ ID NO: 2419 - protein, 61 aa, Homo sapiens; identical to SEQ ID NO: 829

SEQ ID NO: 2420 - protein, 103 aa, Homo sapiens; identical to SEQ ID NO: 830

SEQ ID NO: 2421 - protein, 63 aa, Homo sapiens; identical to SEQ ID NO: 809
  variant (1)...(63): Xaa = Any amino acid

SEQ ID NO: 2422 - protein, 52 aa, Homo sapiens
  variant (1)...(52): Xaa = Any amino acid
CSRAAAXXXXKMLTTSPXIPAVVRPVLFLEVPVTLSVTTLLCWAPRPLSSLT

SEQ ID NO: 2423 - protein, 90 aa, Homo sapiens
  variant (1)...(90): Xaa = Any amino acid
GRXXXLTLTRTVTRCSSGRKSSWFPSGPGVMQQSSSXYXXXDVDHQPXDSRSGKACSVPGSSCNIECHHFTVLGPQAIVKPHMSSFQNXL

SEQ ID NO: 2424 - protein, 56 aa, Homo sapiens
  variant (1)...(56): Xaa = Any amino acid
SGDTQCYRNFQEQNRPYHCGNXGAGGQHLXXXXCCCSAALRQGPKETRRTFCHWNI

SEQ ID NO: 2425 - protein, 91 aa, Homo sapiens
  variant (1)...(91): Xaa = Any amino acid
LQXILETTHVRLDNGLGAQHSKVVTLNVTGTSRNRTGLTTAGIXGLVVNIXXXVXAAALLHYARARRKPGGLSATGTSSHSPSECQXXXSS

SEQ ID NO: 2426 - protein, 78 aa, Homo sapiens
  variant (1)...(78): Xaa = Any amino acid
SPLRNPGDVLGPGVGAPCHWIRKPASQGFNWETGDSPAGPCILVRLRMRTCETKASRYGLGQXKSSTSMLLLPKGNFA

SEQ ID NO: 2427 - protein, 64 aa, Homo sapiens
  variant (1)...(64): Xaa = Any amino acid
SGRFXLPQTISTGLCFTCPHSQSDQNAGPCWTVTCFPVKALTGRFSNPVARCSHSRAQHISWIP

SEQ ID NO: 2428 - protein, 51 aa, Homo sapiens
  variant (1)...(51): Xaa = Any amino acid
AKFPLGRSSIEVEDLXCPRPYLLAFVSHVLILSLTRMQGPAGLSPVSQLKP

SEQ ID NO: 2429 - protein, 79 aa, Homo sapiens
  variant (1)...(79): Xaa = Any amino acid
IXHWQGSLGAILGSCVNEQMNAQDRILAVTMMLEVTYPTVLLSFSPNPPLLPGKKPSSLCLITFSTQHLQGTYSAVGQC

SEQ ID NO: 2430 - protein, 67 aa, Homo sapiens [sequence omitted]

SEQ ID NO: 2431 - protein, 70 aa, Homo sapiens [sequence omitted]

SEQ ID NO: 2432 - protein, 56 aa, Homo sapiens
  variant (1)...(56): Xaa = Any amino acid
LHICSDDKCLQPCPLQGCTGLHTGSCLRCLVSSLKGWGSGVSPVYLGKXLTLGXMK

SEQ ID NO: 2433 - protein, 50 aa, Homo sapiens
KSGLGGNAFLLLHVYFSCISVVMTNASSLVLCKAALGCIQAPVSGVWFPP

SEQ ID NO: 2434 - protein, 58 aa, Homo sapiens
  variant (1)...(58): Xaa = Any amino acid
FHXSKCQXLAQIDRADSAAPTFQGGNQTPETGACMQPSAALQRTRLEAFVITTDMQLK

SEQ ID NO: 2435 - protein, 78 aa, Homo sapiens
YLPASLSFTAGISSSADRERWVFFPILVPVASLYQENVTFPVPPATEQSRISFCPSVTCPPGARISKLTLEMGIPRWI

SEQ ID NO: 2436 - protein, 50 aa, Homo sapiens
RTKTDPALLSGWGYRKCHILLVQRGHRNQYGKENPAFPVSRAGDPSCERE

SEQ ID NO: 2437 - protein, 117 aa, Homo sapiens
SSHLLSYIHLGIPISNVSLEIRAPGGQVTEGQKLILLCSVAGGTGNVTFSWYREATGTSMGKKTQRSLSAELEIPAVKESDAGKYYCRADNGHVPIQSKVVNIPVRRPDGYRRDLMT

SEQ ID NO: 2438 - protein, 54 aa, Homo sapiens [sequence omitted]

SEQ ID NO: 2439 - protein, 58 aa, Homo sapiens [sequence omitted]

SEQ ID NO: 2440 - protein, 70 aa, Homo sapiens
  variant (1)...(70): Xaa = Any amino acid
VRGEGGXTGLGISAVWEMRSISHHHHLCYXHVSACQRATLSLPQVGGFIXQSVFFMYRSFHSSTLXLXSL

SEQ ID NO: 2441 - protein, 111 aa, Homo sapiens
  variant (1)...(111): Xaa = Any amino acid
FGERVVXQGLGYRQCGKCEAFLIIIISATXMFLHVSERHCPCLRLEVLSXKVFFSCIVRSIHPLXXLXAFERLGCSQAAVLRDLKRDLVSLGAESIYLGTLFQERPCLHFH

SEQ ID NO: 2442 - protein, 53 aa, Homo sapiens
  variant (1)...(53): Xaa = Any amino acid
DNASCVCSGRSSKWNACCTXPXRVXAMRPXDHTWGTNHXLXHXALESPLDRVP

SEQ ID NO: 2443 - protein, 138 aa, Homo sapiens
  variant (1)...(138): Xaa = Any amino acid
SGRGWXHRAWDIGSVGNAKHFSSSSSLLQXCFCMSASDTVPASGWRFYXPKCFFHVSFVPFIHSXPXQPLKGLVAPRLLFSGTLKGTWLVLGQRVSTWALSSKKDLVSIFIRTMLLVCVLEDLLNGMLVALXPXEWXP

SEQ ID NO: 2444 - protein, 101 aa, Homo sapiens
  variant (1)...(101): Xaa = Any amino acid
GXVXKXMIGPPSVVXRSHGXHSXGXSATSIPFRRSSRTHTRSIVLMKMETRSFLEESAQVDTLCPKTNQVPFKVPENSSLGATKPFKGXQXXEWMNGTNDT

SEQ ID NO: 2445 - protein, 61 aa, Homo sapiens
  variant (1)...(61): Xaa = Any amino acid
MERTIHEKNTLXDKTSNLRQGQCRSLTCRNMXVAEMMMMRNASHFPHCRYPKPCXTTLSPN

SEQ ID NO: 2446 - protein, 196 aa, Homo sapiens
DNVHSPILSTWIRVTVRIPVSHPVLTFRAPRAHTVVGDLLELHCESLRGSPPILYRFYHEDVTLGNSSAPSGGGASFNLSLTAEHSGNYSCDADNGLGAQHSHGVSLRVTVPVSRPVLTLRAPGAQAVVGDPLELHCESLRGSFPILYWFYHEDDTLGNISAHSGGGASFNLSLTTEHSGNYSCEADNGLGPSTVK

SEQ ID NO: 2447 - protein, 114 aa, Homo sapiens [sequence omitted]

SEQ ID NO: 2448 - protein, 67 aa, Homo sapiens
AVPQGDILMIKSVQDRGRASQGLTVKLQQVPHHSVGPGSPEGEDRVRYRNSHGDSNPRAEDGAVNVI

SEQ ID NO: 2449 - protein, 65 aa, Homo sapiens
QSAGYIIGTKGLFQFLVNPLQQAPPDDVLIDALSGQSLAAHGKDIPLELRQLLFAAWLELAQHKR

SEQ ID NO: 2450 - protein, 50 aa, Homo sapiens
KDAETPASDEPPLRQPAVRFEFLQHAPPDSLQPLGSLVTVEGRRQTLVSQ

SEQ ID NO: 2451 - protein, 85 aa, Homo sapiens
MPSVVRAWLPTARTSPSNSGSSFLQPGSSWLSTKGKKMQRPQPRMNLLCANPLSDLNFFSTRPLTLSSLWAAWSQLRAVVRHWSA

SEQ ID NO: 2452 - protein, 116 aa, Homo sapiens
LADQCLTTALNCDQAAQRLERVRGRVLKKFKSDSGLAQRRFIRGWGLCIFLPFVLSQLEPGCKKELPEFEGDVLAVGSQALTTEGIYEDVIRGCLLQRIDQELKKTLGANDVSCTL

SEQ ID NO: 2453 - protein, 54 aa, Homo sapiens
PGCPEAGESQGARAEEIQIGQRVGAEEVHPRLGSLHLFTFCAEPTRARLQKGAA

SEQ ID NO: 2454 - protein, 50 aa, Homo sapiens
ISKSIVFEFVCSSLSLLVIVVFCFLFCFQCKCDVIFLFSLDQSWTGNCIV

SEQ ID NO: 2455 - protein, 53 aa, Homo sapiens
PLDGWGFTRETDTPGSILKTLSGFPGQQSSLILSSASEANLTSMCSSSSELVR

SEQ ID NO: 2456 - protein, 81 aa, Homo sapiens [sequence omitted]

SEQ ID NO: 2457 - protein, 50 aa, Homo sapiens
LCCQAVFRYWPQSVYVEQTGWYVAKVDSSLPHRWCNVRASAGVVCQSSSL

SEQ ID NO: 2458 - protein, 193 aa, Homo sapiens
  variant (1)...(193): Xaa = Any amino acid
PVAGPVNEVLIHSXQYLMEVTHDLRLRLKNYMMPAKGKKTDKQPLQKPSHCTIYVAKNYPPWQHTTLSVLRKHFEANNGKLPDNKVIASELSSMPELKKYMKKVMPFVAMIKENLEKMGPRILDLQLEFDEKAVLMENIVYLTNSLELEHIEVKFASEAEDKIREDCCPGKPLNVFRIEPGVSVSLVNPQPSN

SEQ ID NO: 2459 - protein, 58 aa, Homo sapiens
CQLKGRRLTNNPCRSPHIAPSMWQRTIHLGNIPPCLFYVNTLRPITENCLTTKSLLVN

SEQ ID NO: 2460 - protein, 109 aa, Homo sapiens
  variant (1)...(109): Xaa = Any amino acid
NGVAAKVASFSFFQNAQMHQFLNIHVKFENCTFGEIKFYIQLAIVQLCCSFSIKAKVFNMRKCDTFDTVWGGSGWAALGGTGPXTRLCPPRIHAGRREAEVSNXTSHQA

SEQ ID NO: 2461 - protein, 51 aa, Homo sapiens
  variant (1)...(51): Xaa = Any amino acid
PLGERXGLIPLPPSCQHGFWVDTALXKVQYHQELPIHSHPTLYQMYHIFSC

SEQ ID NO: 2462 - protein, 51 aa, Homo sapiens
LYIKFNLTECTVFKFHVYIKELMHLSILKERKRSYFSCHPILEKSLIFKLF

SEQ ID NO: 2463 - protein, 67 aa, Homo sapiens
  variant (1)...(67): Xaa = Any amino acid
EXWFDTSASLLPAWILGGHSLVXGPVPPRAAHPLPPHTVSNVSHFLMLNTLALIENEQQSWTIASCI

SEQ ID NO: 2464 - protein, 82 aa, Homo sapiens
  variant (1)...(82): Xaa = Any amino acid
ADSQNTFXIPEIRKINDKISVSQATNRCKIMKGVVGCAKFGKVVTASEKEAVRLNSWWLPSVTSRGSLQHRPRARRNTVAPM

SEQ ID NO: 2465 - protein, 65 aa, Homo sapiens
FLAFLSALLPSQEPGDAKHPECDGTRWGQGPHLPAEVRPGLLVPGQSPEPLCLVEQAPVCRIPTV

SEQ ID NO: 2466 - protein, 81 aa, Homo sapiens
HLCRKCVEFSVFFLCDFWPFYQHFSPPRSLGMPNIQNVMGQDGGRGLTSLQRSGQVSLSLDNLLSLSAWWSRHLCAEFPLW

SEQ ID NO: 2467 - protein, 79 aa, Homo sapiens
PQWEFCTQVPAPPSREAQEIVQGQGDLAGPLQGGEAPAPILSHHILDVWHPQAPGRGEVLIKRPKITQKEDRKLHALPT

SEQ ID NO: 2468 - protein, 50 aa, Homo sapiens
VLPYSYEHGACVEDSLWKLQKEATKSSASQPLSQMQSPLYQTWHIQPLLS

SEQ ID NO: 2469 - protein, 59 aa, Homo sapiens
HSGNSAHRCLLHQAERLRRLSRDKETWPDLCREVRPLPPSCPITFWMFGIPRLLGGEKC

SEQ ID NO: 2470 - protein, 107 aa, Homo sapiens
  variant (1)...(107): Xaa = Any amino acid
KGQKSHRKKTENSTHFLHRCYRIPTSTGPVLKTPSGSYRRKPPRVQPHSLFLRCSHHFTKLGTSNHSFHNFTPVCGLADRYFVIDLSNFRDXKCVLRICSALRDSVF

SEQ ID NO: 2471 - protein, 57 aa, Homo sapiens
GPCPHLVPSHSGCLASPGSWEGRSADKKAKNHTERRQKTPRTSYIGATVFLRARGLC

SEQ ID NO: 2472 - protein, 64 aa, Homo sapiens
  variant (1)...(64): Xaa = Any amino acid
RLPLEVTEGSHQEFSLTASFSDAVTTLPNLAHPTTPFIILHLFVAWLTDILSLIFLISGIXNVF

SEQ ID NO: 2473 - protein, 60 aa, Homo sapiens; identical to SEQ ID NO: 1146

SEQ ID NO: 2474 - protein, 74 aa, Homo sapiens; identical to SEQ ID NO: 1147

SEQ ID NO: 2475 - protein, 74 aa, Homo sapiens [sequence omitted]

SEQ ID NO: 2476 - protein, 60 aa, Homo sapiens
LLWPCPETTPNSWLVMRGGEYSAGLQMGRKREAAEALAQQCQAEGGRGDWGLSSAYRRNP

SEQ ID NO: 2477 - protein, 126 aa, Homo sapiens
SITTAWGPEGAITCCCLMEGPAWDTSQIIITGSQDGMVRVWKTEDVKMSVPGRPAGEEPLAQPPSPRGHKWEKNLALSRELDVSIALTGKPSKTSPAVTALAVSRNHTKLLVGDERGRIFCWSADG

SEQ ID NO: 2478 - protein, 97 aa, Homo sapiens
GGFFCRQSSGPSHLCHPQPGTVVPEPLLPLSSYPSADQQNILPLSSPTRSLVWFLDTARAVTAGLVLLGFPVKAMLTSSSRLKARFFSHLWPLGLGG

SEQ ID NO: 2479 - protein, 75 aa, Homo sapiens
GVSSVGRAQAPVTSATLSLALLCQSLCCLSLPTHLQTSRIFSPSHHQPGVWCGFWTRPEQSLRGWFCWASLSKQC

SEQ ID NO: 2480 - protein, 52 aa, Homo sapiens
RPALDSRPGSSPTCGLLGLEAEPGAPLLLAVQEQTSSHPQSSKPGPCRLDSR

SEQ ID NO: 2481 - protein, 153 aa, Homo sapiens
AELRPQSPLPPSAWHCCARASAASLFLPICRPAEYSPPLITNQEFGVVSGHGQSSHCGAGFAGLPCQSNANVQLSTQGQVLLPLVASWAWRLSQGLLSCWPSRNRHLHILSLPNPDHAVLTPGDDDLACVPCWALHQAATGYGSFWAPGCGDA

SEQ ID NO: 2482 - protein, 63 aa, Homo sapiens; identical to SEQ ID NO: 2206

SEQ ID NO: 2483 - protein, 87 aa, Homo sapiens; identical to SEQ ID NO: 2207

SEQ ID NO: 2484 - protein, 65 aa, Homo sapiens; identical to SEQ ID NO: 1600

SEQ ID NO: 2485 - protein, 64 aa, Homo sapiens; identical to SEQ ID NO: 1601

SEQ ID NO: 2486 - protein, 74 aa, Homo sapiens; identical to SEQ ID NO: 1970

SEQ ID NO: 2487 - protein, 101 aa, Homo sapiens; identical to SEQ ID NO: 1971

SEQ ID NO: 2488 - protein, 101 aa, Homo sapiens; identical to SEQ ID NO: 1972

SEQ ID NO: 2489 - protein, 74 aa, Homo sapiens; identical to SEQ ID NO: 1973

SEQ ID NO: 2490 - protein, 64 aa, Homo sapiens; identical to SEQ ID NO: 1974

SEQ ID NO: 2491 - protein, 136 aa, Homo sapiens; identical to SEQ ID NO: 1615

SEQ ID NO: 2492 - protein, 79 aa, Homo sapiens; identical to SEQ ID NO: 1616

SEQ ID NO: 2493 - protein, 73 aa, Homo sapiens; identical to SEQ ID NO: 1617

SEQ ID NO: 2494 - protein, 57 aa, Homo sapiens; identical to SEQ ID NO: 1618

SEQ ID NO: 2495 - protein, 89 aa, Homo sapiens; identical to SEQ ID NO: 1619

SEQ ID NO: 2496 - protein, 124 aa, Homo sapiens; identical to SEQ ID NO: 1620

SEQ ID NO: 2497 - protein, 123 aa, Homo sapiens; identical to SEQ ID NO: 1621

SEQ ID NO: 2498 - protein, 58 aa, Homo sapiens; identical to SEQ ID NO: 1647

SEQ ID NO: 2499 - protein, 71 aa, Homo sapiens; identical to SEQ ID NO: 1648

SEQ ID NO: 2500 - protein, 73 aa, Homo sapiens; identical to SEQ ID NO: 1649

SEQ ID NO: 2501 - protein, 88 aa, Homo sapiens [sequence omitted]

SEQ ID NO: 2502 - protein, 59 aa, Homo sapiens
SEVCSSGLSSPLLEQHKTNLIFYASGDICSANGKSGFNQPLPFLKTFCCTHRILSCTYL

SEQ ID NO: 2503 - protein, 171 aa, Homo sapiens
LLDSIWHQPIFNLLSIGQSLYAKAKELDRVKEIQEQLFHIKKLLKTCRFANSALKEFVGQVPGHLTDELHLFSLEDLVRIKKGLLAPLLKDILKASLAHVAGCELCQGKGFICEFCQNTTVIFPFQTATCRRCSACRACFHKQCFQSSECPRCARITARRKLLESVASAAT

SEQ ID NO: 2504 - protein, 100 aa, Homo sapiens
  variant (1)...(100): Xaa = Any amino acid
KLPLHMWLAVSCVKERALFVNFARIRLSSSHFRQQHVEDVQRAGLAFTNSASSPPSAPGVRGSQRGENFWKVWPLQQHDAPEYXEKDCSTCLMITPIXVY

SEQ ID NO: 2505 - protein, 55 aa, Homo sapiens
  variant (1)...(55): Xaa = Any amino acid
KMFSVQGLLSQTVLPVLRVPPVCEDHSEEKTSGKCGLCSNMMPLSTXKKTVQHAL

SEQ ID NO: 2506 - protein, 72 aa, Homo sapiens [sequence omitted]

SEQ ID NO: 2507 - protein, 58 aa, Homo sapiens
  variant (1)...(58): Xaa = Any amino acid
XQIGVIIRHVEQSFXQYSGASCCCRGHTFQKFSPRCDPRTPGALGGLEALFVKASPAR

SEQ ID NO: 2508 - protein, 53 aa, Homo sapiens
CTVSKPTGLQQLLDMEELLLNFLHSVQLLGFRIQALADAQQIENGLVPYAVEQ

SEQ ID NO: 2509 - protein, 52 aa, Homo sapiens; identical to SEQ ID NO: 1748

SEQ ID NO: 2510 - protein, 115 aa, Homo sapiens; identical to SEQ ID NO: 1749

SEQ ID NO: 2511 - protein, 52 aa, Homo sapiens; identical to SEQ ID NO: 1750

SEQ ID NO: 2512 - protein, 56 aa, Homo sapiens; identical to SEQ ID NO: 1751

SEQ ID NO: 2513 - protein, 57 aa, Homo sapiens
  variant (1)...(57): Xaa = Any amino acid
ATFINTDILELFTFLLFIFEFSVXYLVLIHCCIXNCTLISSSIKSIXLQFXGIIINL

SEQ ID NO: 2514 - protein, 75 aa, Homo sapiens
  variant (1)...(75): Xaa = Any amino acid
LIPPPVXHVYSRLADKALFGGPASVGSQKPNYCGLQRISRSFTKQTSLHPDCXFAXSGSQXMSXGAGSFWLLEKP

SEQ ID NO: 2515 - protein, 64 aa, Homo sapiens; identical to SEQ ID NO: 1325
  variant (1)...(64): Xaa = Any amino acid

SEQ ID NO: 2516 - protein, 100 aa, Homo sapiens; identical to SEQ ID NO: 1326

SEQ ID NO: 2517 - protein, 52 aa, Homo sapiens; identical to SEQ ID NO: 1327

SEQ ID NO: 2518 - protein, 50 aa, Homo sapiens; identical to SEQ ID NO: 1332

SEQ ID NO: 2519 - protein, 51 aa, Homo sapiens; identical to SEQ ID NO: 1333

SEQ ID NO: 2520 - protein, 87 aa, Homo sapiens; identical to SEQ ID NO: 1348

SEQ ID NO: 2521 - protein, 55 aa, Homo sapiens; identical to SEQ ID NO: 1349

SEQ ID NO: 2522 - protein, 120 aa, Homo sapiens; identical to SEQ ID NO: 1350

SEQ ID NO: 2523 - protein, 75 aa, Homo sapiens [sequence omitted]

SEQ ID NO: 2524 - protein, 59 aa, Homo sapiens; identical to SEQ ID NO: 1841

SEQ ID NO: 2525 - protein, 51 aa, Homo sapiens [sequence omitted]

SEQ ID NO: 2526 - protein, 72 aa, Homo sapiens
QMQKNKNKNTTQNATCKWWSMYLYITSPHTYIHSKQYYIIFLCEHTMSFWKNIQKLVTVANFRGESLIRVGR

SEQ ID NO: 2527 - protein, 52 aa, Homo sapiens
KDFSPFCKVGSTYLQKECISVLCVNIPLISKRFHEKIFEELHKHPLLCRQRW

SEQ ID NO: 2528 - protein, 75 aa, Homo sapiens
LLLPVFVCSSRRTLYVHIEKLYSIVLSVCMYVGMLCINTYSTIYMWHFVLCFCFCFFAFAIFICCSFKLCSVELE

SEQ ID NO: 2529 - protein, 93 aa, Homo sapiens
GFVPSHHLCLHSKGCLCNSSKIFSWNLLEINGIFTHNTEIHSFCKYVLPTLQKGLKSFHLPTLIKDSPLKLATVTSFCMFFQKDIVCSHRKII

SEQ ID NO: 2530 - protein, 53 aa, Homo sapiens
FFFLHRIGRGGRFGRKGVAINFVTEEDKRILRDIETFYNTTVEEMPMNVTDLI

SEQ ID NO: 2531 - protein, 58 aa, Homo sapiens; identical to SEQ ID NO: 1787

SEQ ID NO: 2532 - protein, 67 aa, Homo sapiens
  variant (1)...(67): Xaa = Any amino acid
XPIXQQRALHRKLSSQELNKVSHIHGHLLHCSIVESLNVTKNPLVFFSNKVYSHTFPPKSTPSANSV

SEQ ID NO: 2533 - DNA, 175 bp, Homo sapiens
  misc_feature (1)...(175): n = g, a, c or t
cctcgggaggagntnttnngattcagattacagtgtgataaggaagacataggcttttgtcctgcctcgccatcggagctctcatgggccccaggaagtccagggacagctcccttatacctggcccacgtccttctcagcctgccctcgacaacagtgaccaacagacaggcag

SEQ ID NO: 2534 - DNA, 393 bp, Homo sapiens
  misc_feature (1)...(393): n = g, a, c or t
ccaaggccccagtgaaagcagctaccacccctacccggaagagttctagcagngaggattcctccagtgacgaggaagaggagcaaaaaaaacccatgaaaaataaaccaggtccctacagttcagtccccccgccttctgctcccccaccaaagaagtctctgggaacccagcctcccaagaaggctgtggagaagcagcagcctgtggaaagcagtgaagacagcagtgatgagtctgattcaagttctgaagaagagaagaaacccccaactaaggcagtagtctctaaagcaaccactaaaccacctccagcaaagaaagcaacagagagctcttcagacagctcagactctgacagctctgaggatgatgaagctccttctaagccag

SEQ ID NO: 2535 - DNA, 284 bp, Homo sapiens
  misc_feature (1)...(284): n = g, a, c or t
ccgggcacgtaaggaagncgtgntggcccctaancctttgnttcatgctacagnactgaggggtatgtgtccccaatgcacacnnaccngcacacaactnaatgagcttcctgggaaacactattcccccacctccaccttaagtggctgccccagttttccaaccactggaatcagtccctnacctgctgcctctagtctccaccccaaaagttcagtcgtctctgtcttggagggcactgtcgggcccctcatgttgaagctcaacactcctcaatgagcag

SEQ ID NO: 2536 - DNA, 239 bp, Homo sapiens
  misc_feature (1)...(239): n = g, a, c or t
cccagaagttaagtggaaagnngccccattatctatngagtcagagaagaaatccagactccccaangggtctccactgataccacaggggtcagaggtgaggcgctgctntnaatacanccntctctgacaccaccctggtggaggggggctttgggacacttctttacagcttggtaacagtagacatctaggctctctactcagtcttcgctggnggaggtgggatagggccntag

SEQ ID NO: 2537 - DNA, 297 bp, Homo sapiens
  misc_feature (1)...(297): n = g, a, c or t
aaaaataatccattntctagcttcatgtatcaggaatagccctacattaatggtaccaggagcctgggcctctgttgctgaaaggtcctggaccttttacctctaaaatttcatgatacttattttaacatgaaaagcctttattgaattgtgcattctttaatccccaccccttttgcctttcagcattaaactgaagaaaagatgtccctgtacgatgacctaggagtggagaccagtgactcaaaaacagaaggctggtccaaaaacttcaaacttctgcagtctcagcttcag

SEQ ID NO: 2538 - DNA, 283 bp, Homo sapiens
  misc_feature (1)...(283): n = g, a, c or t
cctgcccacacgttttgtttgagcgctcggaagtgaaggatcgccacctggnggctaagagactgactgaacatgtgcaagataaaagcaagctgcctatcctcatcttcccagaaggaacctgcatcaataatacatcggtgatgatgttcaaaaagggaagttttgaaattggagccacagtttaccctgttgctatcaagtatgaccctcaatttggcgatgccttctggaacagcagcaaatacgggatggtgacgtacctgctgcgaatgatgaccag

SEQ ID NO: 2539 - DNA, 390 bp, Homo sapiens
  misc_feature (1)...(390): n = g, a, c or t
ctgtgtggatctnnagcccagctacagcagaatacattttaccagcaaacctaaggatgacaaacactatccacatctgaaaactaccacaccatatcagggatcataaattatgcatatctatgaattttccaacaaattcctacttcctgattggattggttttgccgctgatgttaaggcagccagcttcttagttcaaaaagaattctgagtttttcaaacactagtctagaggtggacattgtcaggggttctggaatgggaccaggggaccttttggtgcagtgggtgcctgtaactcattagacgtactgaggcagcacttctgcagggtgcataccctgattgttgtcatttgtaacaggtcacttccttttcactcagttt

SEQ ID NO: 2540 - DNA, 271 bp, Homo sapiens
  misc_feature (1)...(271): n = g, a, c or t
ggggaactggctgtnagccacagcagccccacacagacagtggtctctgaacttcaggaaagccatggacagaaaaaaaaataaaattcttttccatcattctattttcaaagaggtcttggcgttttcctacatcttttgtttagaggggaaaaaaaggtttcatttgctgccatttcagaaaggttatgctatcctgttttttccaagcagttgtgagtcaggaactgcctgggcagtgtgcatcaactttgtggccgaaccattacag

SEQ ID NO: 2541 - DNA, 297 bp, Homo sapiens
  misc_feature (1)...(297): n = g, a, c or t
ctcgcatgtgcaggtcaagtgtacagtagtgaaaacaacatgcaatgtcttcactgcagaatcataatacagctaggacattggtgttcttncnntcccaccccaaattaaaaactaattgctaaaaaaaattgcattgccaaacggcactggagtgaaagcttggcggtactctacgataaatgctcagtttccagtgcatgaaataaaactatagcaaatgggaggctttggtggcatccaaagaagaaaaaggcaaaccagggggaaagagctgcagtctaaagtttgatcttt

SEQ ID NO: 2542 - DNA, 273 bp, Homo sapiens
  misc_feature (1)...(273): n = g, a, c or t
atgccccaagttgttcaacnaaggttcccatttgtcaactgttacctcgtncccaattgctttaattttttccaaagcatcaagaaaccatttttcggctgttttccattctccattctgaaatgcaaccacgccgacctcatgcataacaaaagggtcttccggtgcaatgctcagagcttggctgaagaacctttcagctagttttgagttattggtcaaaccatattctaatccaatatacagcataggcaaatgacaccctttcatcag

SEQ ID NO: 2543 - DNA, 256 bp, Homo sapiens
  misc_feature (1)...(256): n = g, a, c or t
aatgtagtatcgttgtgcctgaaatgaccattcngggntgtttagaatccagaatcatcaaaagccatgtggtatgaggaagtaataaatatcctcttgaatcttcttaccctattttgcacaaatggatggctgcatgaacagctcttgtaaattgctctgagtccacaccaatagaaacctgcactcatnctatagctgcagagggnttgttggcttaaggcnnctntatcatctcagcattaatttccctttt

SEQ ID NO: 2544 - DNA, 271 bp, Homo sapiens
gatcggtcagacccttcaccagattgtggaagggcagacgaactcctcgcaggatctcagctatgactcctccagtctggcagttgtaccctaactcctcctgtattgcggcaccaatcttgggatccccaactcccaagagtactttcttctttttggacggcaggtgggtctccaagagcaggcggaggtcctcatgaacaacccctcaggggaaagaacacagttcccactaacaggctgaaggacgatcaactctaacatccctcag

SEQ ID NO: 2545 - DNA, 236 bp, Homo sapiens
ggtgtaaccacctctcgcaaggccacggcttctccaactttccccaaaacatctgagcggtttcagaaactatcacttcctccagagagcacgtggctgcccgatgagtaaacagcagctttcccgggcctgcctccaggcggtaagtccacgagtctccaggctgcccgcaactccaagactcatccttatccatcactcatttgcatacacgtctgaaggccctagggagtcag

SEQ ID NO: 2546 - DNA, 324 bp, Homo sapiens
  misc_feature (1)...(324): n = g, a, c or t
tctgtgccaaactagatatttcagatgaattgaggaaaaaaatctggacctgctttgaattctccataattcagtgtcctgaacttatgatggacagacatctggaccagttattaatgtgtgccatttatgtgatggcaaaggncacaaaagaagataagtccttccagaacattatgcgttgttataggactcagccgcaggcccggagccaggtgtatagaagtgttttgataaaagggaaaagaaaaagaagaaattctggcagcagngatagcagaagccatcagaattctccaacagaactaaacaaagatagaacca

SEQ ID NO: 2547 - DNA, 328 bp, Homo sapiens
  misc_feature (1)...(328): n = g, a, c or t
ctttacaacctccagccctatagtctaaggatanggggccctgggagacaccgagggaccaaggaaagaggccccctgtagaaagcaagcagaaattccttgtagacccactgaccagagttgctcgctgtccttgaccccaccgagaggggtgcaaccctgactcagcatcacctcctatctgtcatagcggggagagctttccccaaaggccagcaggggaaaacccaaccttacttggaggagccagggaagtatctcgcagatcccgcaaaaaggcacccacgtctacagctcggcgggctggaggtctgcgggccaagccagg

SEQ ID NO: 2548 - DNA, 158 bp, Homo sapiens
aaaccctggaccagtggtctcacatggtgctacgcctgcatgtaaacacgcctgcaaacgctgcctgccggtaaacacgcctgcaaacgctgcctgcccgtaaacacgcctgcaaacgctgcctgcccacacaggttcacgtgcagctcaaggaaagg

SEQ ID NO: 2549 - DNA, 191 bp, Homo sapiens
ggggccaccctgacctacacataccgccactgctagcctcacaagcccctggttactgcagatgaagctgggatggaggctctgaccccaccaccggccacccatctgtcacccttggacagcgcccacacccttctagcacctcctgacagcagtgagaagatctgcaccgtccagttggtgggtaacag

SEQ ID NO: 2550 - DNA, 413 bp, Homo sapiens
  misc_feature (1)...(413): n = g, a, c or t
gttttctcttcatgtaagtccttggaattaaagtgctaagaacatcaccttagaatcaattcctgncaaattttttgttctccccttctgccatcttaaatgtaagctgaaactggtctactgtgtctctagggttaagccaaaagacaaaaaaattttactacttttgagattgccccaatgtacaggattatataattctaacgcttaaatcatgtgaaagggttgctgctgtcagccttgcccactgtgacttcaaacccaaggaggaactcttgatcaagatgcccaaccctgtgatcagaacctccaaatactgccatgagaaactagagggcaggtcttcataaaagccctttgaacccccttcctgccctgtgttaggagatagggatattggcccctcactgcag

SEQ ID NO: 2551 - DNA, 286 bp, Homo sapiens
  misc_feature (1)...(286): n = g, a, c or t
caagcatgagctctgtgttactttctggctcagncactgcctccaggcagccctcctgttaaccacagtgcacgaaactctcccttcttggcttcttggatatagcacccatcctgcttgagtcccatctgtctgggatgttctccgtcattttcttgagggtcccacctgctcctctccccgaaatggacatcctggaaggnggagtctatactgcttttctctccccagcaacgttgaatccggagtcagcctgggctccgcaaacaatggctgccatctccag

SEQ ID NO: 2552 - DNA, 139 bp, Homo sapiens
  misc_feature (1)...(139): n = g, a, c or t
tatcaccatcccctcagtgcccagaattccagaggggaagtgataccgttttagagttaaaatnccnggcctcacgcgtgtaatcccagcactttgggaggccggatcacttgaagtcaggagcgtcagaccagcctgg

SEQ ID NO: 2553 - DNA, 303 bp, Homo sapiens
cctctaacctatgcaggtctccccattatgcatatagaaaatgctagtatgttttgttcacttcatatgtaacaggtgcccttatgttgtgctgtatcctgtgctttttctgtgggaccattccattcaggagcaaagagcaccatgattccaatcttgtgtgtgtttactaacccttccctgaggtttgcgtatgttggatattgtggtgttttagatcactgagtgtacagaagagagaaattcaaacaaaatattgctgttcttcagttttgtttgtggaatttgaaattactcaaattt

SEQ ID NO: 2554 - DNA, 274 bp, Homo sapiens
gcttcgcagccttgcttgttttctctgaacagcaacagaacagtgttcacagcgattcaaagggtggcattgggttggacgttctgggtacaagccaacctagtcccacgttgtacgtgaatgtttaatgtgctctcaaaacatggaaaataagtttagtgcacatagctaaatcacaaaacatccaatttctctgtttcctcaggaagtcattactgcgccaccacatcacatgaccttaacatgatcaatgtatttctctgccttgacattt

SEQ ID NO: 2555 - DNA, 152 bp, Homo sapiens
  misc_feature (1)...(152): n = g, a, c or t
gggcttcgcagccttgcttgttttctctgaacagcaacagaacagtgttcacagcgattcaaagggnggcattgggttggacgttctgggtacaagccaacctagtcccacgttgtacgtgaatgttnaatgngctctcaaaacatggaaaa

SEQ ID NO: 2556 - DNA, 439 bp, Homo sapiens
  misc_feature (1)...(439): n = g, a, c or t
cggccgcagtgtgctggaattcgcccttagcgtggtcgcggccgaggtaaatagaaccatgtttnccatttctgtaggtaaaaggacaaagaagaattacaaacactttgggtctttcccgaattctctcccctttctctggtcaactccacccaccttcactctcaaaggaaaggcacagggggaaggaagtgagtgagggggctcagaagagtctgtgtggctcctaccaccccaaacatattctggtttcccgaagataagaggcaaggcttgctctgatctttcccagttctcagagtccagcaggccgctgtgctggacacatacatggatccaccaacatacatcagtccttctgtgttctctcctgcatggtagaggctggaagcctaagagctatattcctcagaatttcctgccagccaggatttgcttt

SEQ ID NO: 2557 - DNA, 244 bp, Homo sapiens
  misc_feature (1)...(244): n = g, a, c or t
tacgcctgtctccttccacctccacgtatggtgacatcactttgatagcttgacgtcagccactgggggactatttacatcatggatatgggcaaaagacaccaatctgagcttttgtccttttcttttttttggagtgcctgcacacccgtgagcctttccaacctcgtaacctattattttcctgacgagatagttttttacagatgagaaagtngaggcacagagaattgaagggacttgg

SEQ ID NO: 2558 - DNA, 241 bp, Homo sapiens
  misc_feature (1)...(241): n = g, a, c or t
ccagggctctccccatgagagaatcagagggnnngcaggacgtggtctatggtgagccaacgacacagtgagaaggagcaggaagttgctgtttctcctctgaccagcccacactccaaaggaaacagacgccatcctacacctatcagccctgcctgccaggagaacagaacacactcctggtctggatggggctgctgcttgagtgcagagggctgcggtaggccctttgcaggagtca

SEQ ID NO: 2559 - DNA, 533 bp, Homo sapiens
cctcccacggtgaagctcctaatgctcctggtataaaaaattttgctagcttagtaaaacgaattggaaaacttgactatgatctggaacagataagcaagaaggaacacataagtaagctgctttgctgccaggaaaataaaaacgaagtagctactatcaggtctcctaactaccctagtctgtaaaggaaaaataaaagtctttataaaattaaaataaaaatgtaattgcctatatccttattgccttaacctattttatttttctatatttcctacagatataagtattattcatagttccaagcaatgaacataatgtattttctccaaataggaattgtttatattcataattattccgctctcttgctaaacacatagttccacttaggttttttcttcttgctacttgttttataaaaaatactatatttttgaagcaaaaaaaaaatttacaccagcagcattaggagccctggaaggaggctttgggagccaaggcccatttgggatgcatgcaggactggg

SEQ ID NO: 2560 - DNA, 494 bp, Homo sapiens
  misc_feature (1)...(494): n = g, a, c or t
ctgggcttcctttgtcgagtaggggttcagaaagctgtgaaacactcatttcccgcatcaggacttacttcggtcctggatgaagagtactgaagatacatgcctaaaatattcctaacaccaggatttgtgcatgtgtttccttccccaagaaagctataaacagcaaaaattctgctgtaagcttccctgtgtcctctctccctctcttccttccccctcccctaaaactaaaaggaatgttaaaagaccctttttctgtgaccagcggaccttatctatgctcccaattccaattccttgtgaacatactttgtaaagtcctgtaaaatcctgtctcttttgccatgctgctgcaaggtcataaagtagataaaattagataaaacctaagttgcaattctgtttttcctcaaaatctaagacatgtcacaaaataatttactggccnttgtttctctctctggnaacatcttcccaccaccatgtatttc

SEQ ID NO: 2561 - DNA, 282 bp, Homo sapiens
  misc_feature (1)...(282): n = g, a, c or t
ctgcagagncctctgtttgcgagcccactcagtcactgcacaggtgcttagccgagaggcggcacagtcggggttggcacctgcacccataccagccctgcctcctgttcgctgtgtggcctgagtggctggacctcactgtatctcctggtgggattgctcagaggtctcagcaaggcttggtgtggttaggatgagttattagagcagtgctgagctgtggcaagcacccgacatcagccactgcttgtgatatactgagcacctcctctagagagaaat

SEQ ID NO: 2562 - DNA, 167 bp, Homo sapiens
  misc_feature (1)...(167): n = g, a, c or t
gccatntctggggatgtaaaaaggttgtggaaaatagaatgcccagacccgtctacaaaaggtttttagagttgaaatatgaaatgtgatgtgggtatggaaattgactgttacttnctttacagatctacagacagncaatgtggatgagaactaatcgctgatcg

SEQ ID NO: 2563 - DNA, 285 bp, Homo sapiens
  misc_feature (1)...(285): n = g, a, c or t
ctgagacccctnccctgtgagcccttctatccccacaagttgtcaggacaatcccttgtggttagggggaggggcggggagagagctctatttctcagccagtgccaagctaccctccctcctgggctgtgatttcatttgtgcaatgggggtgtgcaggagtcactagcttctcggggcctgtcccgcacatacacgcacttatgcgacatccagacatttgctacattttccaaagggcttggcctctcccctccagccttcaaaagggagggcaggacacat

SEQ ID NO: 2564 - DNA, 382 bp, Homo sapiens
ctgcagaccgtccctcaccaacccagagaacctgccttactttgcccagggacttcctccccatgtgaacatggggaacttcgggccctgcctggagtccttgaccgctctctgtgggccccacccactctgtcctgggaaatgaagaagcatcttccttaggtctgccctgcttgcaaatccactagcaccgaccccaccacctggttccggctctgcaccctttggggtgtggatgtcgagaggcaccacggcctcacccaggcatctgctttactctggaccataggaaacaagaccgtttggaggtttcatcaggattttgggtttttcacatttcacgctaaggagtagtggccctgacttccggtcggctggccag

SEQ ID NO: 2565 - DNA, 230 bp, Homo sapiens
cctcagtttacccatctgtaaaatgggtaagcatagccactggtgggatattttgggatgtcaaggggtggaggcagagcacaagtcacaccagaaactgctttttatacattttgtataaggacaactctggaaacaagcctatttcctccagccagtttcactgaatgctgcaccacatgctacaccagttcagcgtgagaattttctaataaatcttttctgatact

SEQ ID NO: 2566 - DNA, 293 bp, Homo sapiens
  misc_feature (1)...(293): n = g, a, c or t
aaaagtcttannattgtgaaaacataaacaacaaacctggttgccacattctgttgaagtttgaatccccttggaaattcccatgattgtttggaccagattccattgtagacatatcttgtccatttggcatcattcctggtggttgttctaccatgctttgctgtcctgaagcttctctttgggcaatccaagcttgggccaatgcacccaatcaatctggcttggatcctgttggtgcttggaatgactgcatccattggtgctggttcaagggccactgctgcaagggc

SEQ ID NO: 2567 - DNA, 293 bp, Homo sapiens
aaaatctctggtatttaaggtcaacaggaagaaattgtcctgaaaccttccatccagctttaccaggccctaaccactctcgccaggcggcagcaggctcctgcccagccccaatccagcctcacagttatgatggagctgcagaaacacgagcccttttcaagggggcatttggagtggaaagccctgggaaggtaacgctcacactccaaggccacactcctccatctggacaaacacacaagcacccccaattgtattggaagtactgtcaagagctcaaaatgcccacc

SEQ ID NO: 2568 - DNA, 309 bp, Homo sapiens
  misc_feature (1)...(309): n = g, a, c or t
ctgctgctgccnttgaccatcctgaactctgggggagaggaggagtcagcctggcttgcagacggccgacccagaacatggctgtctgtggtcatttccttccttcacacccagtgggatgggcacagagcccagccttggtctcaccagctcccccaccctcctctgcatcagcatccagctcacacagctctccagaagagtttgatcttagctgcagccttggggtacatcactctacacccagtctcttccctgcgcttctttcaaccaacagaagcaaacatcaaaagcacccacacctactgg

SEQ ID NO: 2569 - DNA, 295 bp, Homo sapiens
  misc_feature (1)...(295): n = g, a, c or t
cctatgaggagtatgttttatctgttgggaatttagatgagcggatatttcttggagaggatgctgaggaggaaattgggactctctcaaggtgtctgaacgctggttcaggaacagagactgctgaaagggtgcagatgaaaaacatcttacagcagcattttgacaagtccaangcacttagaatctcccaccactaactggtgttaggtacattaaggagaatagcccttgtgtgactccagtttctacagctacgcatagcttgagtccgtcttcacaccatgctgacagg

SEQ ID NO: 2570 - DNA, 290 bp, Homo sapiens
cctttctactcaggctaatgacaaacacaataaaggcagatatgctagtttaacataattggctgattttatacagcacttatatcttttagtccacaagtatattattaaatgatagagaacatctaatacaaccatttctacagaactaggaaataaatttctaagaaagaaagattttacagaccccatcttttatacccaccccaacagtctaactctaaagaggataaagccaatgactttcctcacaagagctcacgactaacgtcggcttttgctatcaaaaa

SEQ ID NO: 2571 - DNA, 301 bp, Homo sapiens
ctgttaggtatgttaacctgtaattaaaaggctgtggcaacttcagttccatgacgacctccgactttaacacagtctcgaggaaatttgtccaattgttcatatgccagccgcccatcttctcccagagacaagagggtttctgagccacatttctgatttcttcagtatcagattgacacaatgtcaccagcattttaatgctttcagtagcctcaagggattttcagagcccagcaagcttgcttttcttggagcttggaggtttgtcttttgttagtgcttcacagtaatagaagca

SEQ ID NO: 2572 - DNA, 292 bp, Homo sapiens
  misc_feature (1)...(292): n = g, a, c or t
aaatgaacacnttccagacaatgtaagacagtcaaaagacaaactcaaatccctgagaatggctgggaagggaagatggtggtaaaaattccaaatgagtgaaacttacaaagggcagtctcccctgcctgggctctgtcctagacagaagtgacagtgatgacttttggtgatgttctccccagtgcagaagacttgctttcagaaattagacaacctcagtgggcgaagtntttctcctgcctgcgtaagctgcagcnctgtcnanaanagcttgaaccagagccagcag

SEQ ID NO: 2573 - DNA, 307 bp, Homo sapiens
  misc_feature (1)...(307): n = g, a, c or t
ctgcctctgtaacctaggccgagcatattgctgaggaacggggggtacaaggtgccanaggattgggtctggtggacaagaaacaagacttgtggtcacaattggcctctggccttggagaaagctgtaaatcttatctgaagcagagactataaagaagtttctccctgctgtcaagggtacattgttgacaagcaaatggtgtttcggttantaacggttctaagtgcaatgagttgtgttgaagcctccgtctcccatccttgcctgtagcccgtagtcacttgtgcagtgaggacatcttttt

SEQ ID NO: 2574 - DNA, 103 bp, Homo sapiens
  misc_feature (1)...(103): n = g, a, c or t
ctgttaattgcagttactctgcggaatttccacttctgctttgtacagttccttgtgtgaatttttacatcatgtattacttttgtagntggggaaaaagcaa

SEQ ID NO: 2575 - DNA, 306 bp, Homo sapiens
gagcttgaagaacagattgagggctgtacgcagcaccaggatcatgtgcacaggctgcaggtttgagtgggtgaaataggctgccatctcacagatgcgcttctgctgttctagagtctctttgggcagcttcttcctttctgtctccacggacaaacccacaatgtactcacggcaaatggtgatgagctgctgggcctctgcaatctcttgtttattgccacaacaagaagtggcacactgagaaggatggaacggaatttttccacagcctcctcaaatttgccaactgtggtgagctggtag

SEQ ID NO: 2576 - DNA, 311 bp, Homo sapiens
acttaatgtgtattttgcattgtgatatttaatcaagacattaacatgagtagaaggttgttgatttaagacaagtttgagatccactaaaattaattgttgtatgtttgtccttctggtggctgtggaagcttcatattttctttggacatcattagacgtcttagctcttgaagtacaactttaatgctatatgaattttgccattttgctaacactggtatgctccgggcatccaccatcccactggaattatttattccgttcatattaatttttgttacaaatctaactgacggaggagcttctgg

SEQ ID NO: 2577 - DNA, 263 bp, Homo sapiens
  misc_feature (1)...(263): n = g, a, c or t
aaaatgttcttantgctgtgttataagctttggtggatgtcactcctttaatcctcacaacaccctgtcgggtagtcatattttgcaagtatggaagctgaggcagggcaacatgaagtaacttacataactcatacagtaatttgtgcagttgggagatgttcagccttagtccctggctaattgcctgttcttttccagcctgattttttttcccacaggaagagcccacatgtagccctgaggtttccttcccaggacag

SEQ ID NO: 2578 - DNA, 217 bp, Homo sapiens
ctgcagattttcccacatgtcagagcgagacctgcaggagctgagcatccaggtggaggaggagaggcgagccagggagtggctactagatgctcctgagctccccgagggccatctggaggactggctggagaagagagccaagcggctgagctcagccccaagtagcagggctgaacccatcagaaccactgtcttccagtaccccgtgggctgg

SEQ ID NO: 2579 - DNA, 467 bp, Homo sapiens
ctggtacacggcagggtcagggttctggatatcaggtaaaacagtcaattgtgtcccagatccaaaggtcagttgccttgcagaaccagaagactccatgtcacccacgaggcagtagtacacagcagtgtcgctcagggaaacccggggcaggctcagagtgctggactttctgtcggcagggataaacagggaggccacttcgtttgtaacttttgtcttgtatccttgaataataaatcgtggtccttggctgggaaactgttggtaccacgtgatataatcatttgtagcaatgttgttgtggctacaggttatgttcacttcttgtccttcatatgagtccatggagatgggctgggtggtcttagcaaggctcaaagtactcagggtcaggaacacgatcactctcccacttgcctcatattctaggtgcaaactaggacccaggttctaggctcttttgc

SEQ ID NO: 2580 - DNA, 221 bp, Homo sapiens
ccatcttctggtgggtccacacagtcttctccatgtgtatccttccttcagtttcccttatagggacaccagtgatgtcagattagggatcgaacccaacaacctcatttgaagttactcacctgtttgaaaaccctatgtccaaatacagttatagtgtaaggaactaggacttagggcttacaaatatggagtggggcatcatccagaccataccattt

SEQ ID NO: 2581 - DNA, 231 bp, Homo sapiens
ctgggcctgcccggggaagtccttgcaggtgggaggccatacagagacccactgtgtgccactgagcgtcccactgctgctgggcaactggaggactgcagggggcgccaggtgactctctccttttatatcacagcagctcctgtgctgaccttcaagttacgttttggaactgtaatactaaaggaagaaataaactactaatttgtataatattctgcattgaaattc

SEQ ID NO: 2582 - DNA, 485 bp, Homo sapiens
gaatgaaccaactgcaacaaggaggtcacctgtgtgcactgctcatcgctcaggttggctctctcttgggtcaaactaggtgattcacttctgtctgccgccatgatgccagccatggtcacagcaccaataatcccaatgagcttgtacttgaatacggtgctagagagctgctttcttatcaccaagtgcatgtcatcctggatgtggctgctggcttcattctgtttgctaaatgccagtgtgctgagaacatagaagagttttcgtatttgctgaggggatatgttatccagataatctaaaatgccctttacaaagacagcattcatcatcatagcagatggatttaacactaccaactctagaagggacatctaaaggcagtatcaacttcagcttcattcccactgcagatatgggtcactaaggcaccaaccactttctgctggcagtacgtgtcaaaaaacttaaatgcatatttg

SEQ ID NO: 2583 - DNA, 247 bp, Homo sapiens
cctggaaggtgtgcaggagtttggtagaggagtgatctaggtgaggggaatggaaggtgcagagaccagagctgagagggcctgaggcactttccagagcgtggggaggggcctccaccaaggcgagaagggctgcaggtccagatcaccagcgtttgtagacagtagtgtggcgcttggagtttacctgagggccagtggagctccagggacctatcaggacggggacctgtggggactgggaagg

SEQ ID NO: 2584 - DNA, 234 bp, Homo sapiens
ccaggatggtctcaaactcctgacctcaagtgatccatctcagctcccaaagggctggggttataggtgtgagccactgcgcccagccagctattggtattgcctatctttttgacagacttccttgtggttttgatttgtatttccctgaagattaataattttgagaatcttcttgtgcttattggctgctaacttatctttttcagagaaatgtctgttcagatcctttgg

SEQ ID NO: 2585 - DNA, 237 bp, Homo sapiens
gcgtgggatggggattggggtgagatggatgggagccagctggagctcgtcttccctaacatagcctgggagaccaccccttgccacttgggccacttccgcctaccccacttttcattttgttccaaaatagttgcagatcctgacagaatcaaaactctctgcctcaaacacacatcctggcatcgcactgttagcatttaacttcttgttaggattcagggaaggaacagttgg

SEQ ID NO: 2586 - DNA, 138 bp, Homo sapiens
  misc_feature (1)...(138): n = g, a, c or t
ccatgttgaacaatacatgtaggttctttttccacncaatgtaagaacatgatatactgtacgttggaaagcatttaccttatttatatacctgaatgttcctactacacaaataaacatatattaaattctaaaaaa

SEQ ID NO: 2587 - DNA, 320 bp, Homo sapiens
ctgccacttcaggcacttacagtggtcacccaggattcaggagatgcatattataagtaactcagttctgtaagagctaggagttagttcacactgcttgggctctcactaagtaagcctgtgcaatgcaggcaggaagggggaaaatgcttacaaaaaagaaatgagtagattcttgccttaggaaagtcaacgggatacaattcctgatggaagagcagttgctattctaagagctaattaacaagaaacaatgctgcaaaaaacttgggagacaggacggcagaacacacccagatggcctgtgggaaattcccagg

SEQ ID NO: 2588 - DNA, 247 bp, Homo sapiens
ccttcccagtccccacaggtccccgtcctgataggtccctggagctccactggccctcaggtaaactccaagcgccacactactgtctacaaacgctggtgatctggacctgcagcccttctcgccttggtggaggcccctccccacgctctggaaagtgcctcaggccctctccgctctggtctctgcaccttccattcccctcacctagatcactcctctaccaaactcctgcacaccttccagg

SEQ ID NO: 2589 - DNA, 145 bp, Homo sapiens
  misc_feature (1)...(145): n = g, a, c or t
aaattgtgttttatttatccgtagaatttatatttatttcattcctttcatctcactgaaaactgtctgcaggccctttgatttggattanatgtgtgaagtactgtcttttgccaaaaacctcaaattacctgttcttttcaac

SEQ ID NO: 2590 - DNA, 174 bp, Homo sapiens
cctttccttgagctgcacgtgaacctgtgtgggcaggcagcgtttgcaggcgtgtttacgggcaggcagcgtttgcaggcgtgtttactggcaggcagcgtttgtaggcgtgtttacatgcaggcgtagcaccatgtgagaccactggtccagggtttcagaggtcctgctcag

SEQ ID NO: 2591 - DNA, 189 bp, Homo sapiens
ctgctggtggatcagatatacgagaacgccatgattgctgctggacttgttgacgaccctagggccatggtgggccgcttgaatgagctgcttgtcaaggccctggagcgacactgacagccggggggccagaaggactgacaccacagatgacagccccacctccttgagctttatttacctaaattt

SEQ ID NO: 2592 - DNA, 235 bp, Homo sapiens
ccggcttgcttgttctctctttcctagcccaggagtcgggtccttgggtctaaagcacagggccaagttctcaaggatcaacatcccagacagctcccatggtctggggcttggagctggtatgaagggtgaaccaggttccatcctggactgtttatggttggagggcctgggcccctggcaccaggacctcagctccctctcctagtaagagctgggatcacccacaggccag

SEQ ID NO: 2593 - DNA, 131 bp, Homo sapiens
atgaggacaccctcggcacgggaacccattcacttagcgtttgctccagtagctttccctctgctaccaatgcagataaacgcggcttgttttactcaggcaagagaatgtgaatagtgccaagaaaatcc

SEQ ID NO: 2594 - DNA, 271 bp, Homo sapiens
  misc_feature (1)...(271): n = g, a, c or t
ctggnggccagtggagccaggatgaggctgaggccatgagtaatggatggaaccatgcaggcaggtctggggcacaacatcccctgcaggagggtgggcagcagtggctggaagtttctcttgattttgggatggacaacagaaaaaaacaaaaagccagtcacagggacccagagagaaggaagggagatgtgggcaggagacagacacagagcatgtgtatgggcaaggaagacncagggagactatgtgtgagcttcagaactgcaga

SEQ ID NO: 2595 - DNA, 136 bp, Homo sapiens
  misc_feature (1)...(136): n = g, a, c or t
aggcagttcctaccatgtacccctctcaggctgcctgcctgacaaggtcagcatcatttgctctcctgaatttatgaggtttatttatttttctctttnctactcctattaaagaacctcgtcccagtgaaaaaaa

SEQ ID NO: 2596 - DNA, 101 bp, Homo sapiens
aaactaaaagccttaattaaagtggtgcaattttgtataacttagcatcagtagttcaataaatttggattgccatgcaagggcttgcattataaaaaaaa

SEQ ID NO: 2597 - DNA, 101 bp, Homo sapiens
  misc_feature (1)...(101): n = g, a, c or t
tggcttcatttcaggtttagttgatttctccaccaaatgcatgtcatgtattctcaataggctgtattcccagcagncaataaatnaacacccgtaaaaac

SEQ ID NO: 2598 - DNA, 109 bp, Homo sapiens
tgtttgctgatgggcagggacacccctgcagggtctcgggctctgagcccaggacattccctgccccttgctcaccttggctgtgggctgtgaacattccgggaccctg

SEQ ID NO: 2599 - DNA, 239 bp, Homo sapiens
ctggcctgtgggtgatcccagctcttactaggagagggagctgaggtcctggtgccaggggcccaggccctccaaccataaacagtccaggatggaacctggttcacccttcataccagctccaagccccagaccatgggagctgtctgggatgttgatccttgagaacttggccctgtgctttagacccaaggacccgactcctgggctaggaaagagagaacaagcaagccggggct

SEQ ID NO: 2600 - DNA, 96 bp, Homo sapiens
gagactccatctgccctgggcaggttcctgagccttgggggaccagttcaccctacatcccaggcttctgttgtcccttgcctgcctgtaaggaat

SEQ ID NO: 2601 - DNA, 506 bp, Homo sapiens
cctgaggagactgctcactgcaggaatgaaccaactgcaacaaggaggtcacctgtgtgcactgctcatcgctcaggttggctctctcttgggtcaaactaggtgattcacttctgtctgccgccatgatgccagccatggtcacagcaccaataatcccaatgagcttgtacttgaatacggtgctagagagctgctttcttatcaccaagtgcatgtcatcctggatgtggctgctggcttcattctgtttgctaaatgccagtgtgctgagaacatagaagagttttcgtatttgctgaggggatatgttatccagataatctaaaatgccctttacaaagacagcattcatcatcatagcagatggatttaacactaccaactctagaaggacatctaaggcagtatcaacttcagcttcattcccactgcagatatgggtcactaaggcaccaaccacttcctgctggcagtacgtgtcaaaaaacttaaatgcatatttg

SEQ ID NO: 2602 - DNA, 105 bp, Homo sapiens
ctgcggccactgcagcagccatgaagggcagtgggtagaggagtgcaggcaccctgaccagcagagattgctgcagaaataaagtctgcttggctcttgggaaaa

SEQ ID NO: 2603 - DNA, 190 bp, Homo sapiens
aaatttcaattaccatacattagtctattctaataatcttccaataatgcaaacttttactcaggatcttggtagaatatcaggaaaaccatttcctggtataatgattctctgtaatagagaaatcctatacatcgtgtagggtgaagggtagtttttatgtaatagttcactttgagctgtctagcag

SEQ ID NO: 2604 - DNA, 256 bp, Homo sapiens
ctgagagactctaaatccagtgacaagtctgtctgcctattcaccgattttgattctcaaacaaatgtgtcacaaagtaaggattctgatgtgtatatcacagacaaaactgtgctagacatgaggtctatggacttcaagagcaacagtgctgtggcctggagcaacaaatctgactttgcatgtgcaaacgccttcaacaacagcattattccagaagacaccttcttccccagcccagaaagttcctgtgatg

SEQ ID NO: 2605 - DNA, 349 bp, Homo sapiens
ctgcagatcctgcggaacgtcacccaccacgtttccgtgaccaagcagctcccaacctcagaagccgtggtgtctgctgtgagcgaggcgggggcgtctggaataacagaggcgcaagcacgtgccatcgtgaacagcgccttgaagctgtattcccaagataagaccgggatggtggactttgctctggaatctggtggtggcagcatcttgagtactcgctgttctgaaacttacgaaaccaaaacggcgctgatgaagtctgtttgggatcccgctgtggtacttctcgcagtccccgcgcgtggtcatccagcctgacatttaccccggtaactgctgggcattt

SEQ ID NO: 2606 - DNA, 463 bp, Homo sapiens
aaaacctgaactactgctggcaatagtctataaactgggctcaaacttttattgattttctgtgtctggttataaaaataggaagggtccaaggcaacaattttagaaaataaaaccagaaatcagttgggatattccagcccaaagactgccacctaatagactgttccccagtttttcaccattactaaagtgaatgcaaaactttcgtatcactgtattcttacctaaggcttcccactgcctataggataaagtataagccccattcagggagcatttacctactttcccagtcttatgacctgcaattccaagagtatcatcctcacagatactctttgctaacacctctccctttatctgctatgcagactcctctaaatcctaacactgctcaaaagttacctcttgtgtgaaatatccctggcttctctcctgtctcactgtgtcctctccttta

SEQ ID NO: 2607 - DNA, 218 bp, Homo sapiens
ccaacttccacctcaacgacctggaggcgccgcacgaggacgacgctgagggggagggggagtgggactgagcgtccgcagaggtgaccgaaaagccgtatgatgatgttcccgatttctctgttggtcggagtcggccagttgcctgaagtagggaagctgagtgtgtcgctccctggtccactgtttctcctataaatgtaaatgggtcaaaaaaa

SEQ ID NO: 2608 - DNA, 359 bp, Homo sapiens
  misc_feature (1)...(359): n = g, a, c or t
ccacgggaagnnatgataactgcgcggcattctttgagggacccccattcaagttcaagttcacaattggcgaccacagccgctttgtcaactgtgtgcgattctctcctgatgggaacagatttgccacagccagtgctgacggccagatatacatctatgacgggaagactggggagaaggtgcgcgcgctgggcggaagcaaggcccacgacggtgggatttacgcaattagttggagtcccgacagcacccatttgctttctgcttctggggacaaaacttccaagatttgggacgtcagcgtgaactccgtggtcagcacatttcccatgggctccacggttctggaccagcag

SEQ ID NO: 2609 - DNA, 227 bp, Homo sapiens
  misc_feature (1)...(227): n = g, a, c or t
cctctcctcctgctcgcnaagcctctccttttgcccacngttcaggagactgatgcactgattgttttccacctgagcctggagctctcctgccactctctccagctccttcctcaggtcttgcagctccacctcagaggacactgctggggcatccgggggcagtggctcanccatctggnttttgagtctggacaagctcctctccagctcctctacccgatgcg

SEQ ID NO: 2610 - DNA, 318 bp, Homo sapiens
  misc_feature (1)...(318): n = g, a, c or t
ctggctcanggaaagcacacggggagcgctcggtgctgcgagctgaaatagccgctgttttcacagaacgcccttttcacttgcaagagcgctggggaagctagttattcagtgttgggtatttggtagacgtctgattaaaaatgaatgatgtaagcctgtcacttcaaagaaaacaacacgactatttgctgccaatgatgccatctgagactttaagcaaaaatcagaattttggaaaacttacacttgccactgtgagcttgaaagagttctgatgctccaagccctccctgagagatcacaaatgcagatttt

SEQ ID NO: 2611 - DNA, 421 bp, Homo sapiens
ccaccaacagtcagaggccaaggaagctgttggctgaaaaggtggtctatgttggcgtctggatccctgccctcctgctgactattcccgacttcatctttgccaacgtcagtgaggcagatgacagatatatctgtgaccgcttctaccccaatgacttgtgggtggttgtgttccagtttcagcacatcatggttggccttatcctgcctggtattgtcatcctgtcctgctattgcattatcatctccaagctgtcacactccaagggccaccagaagcgcaaggccctcaagaccacagtcatcctcatcctggctttcttcgcctgttggctgccttactacattgggatcagcatcgactccttcatcctcctggaaatcatcaagcaagggtgtgagtttgagaacactgtgca

SEQ ID NO: 2612 - DNA, 323 bp, Homo sapiens
  misc_feature (1)...(323): n = g, a, c or t
aaaggaaaantnttttgacatttacatgtcaagacagtagaatcccctacgtaagagatcaatggcttgtttttcccatgaagttcagggactttgaaattaaatgttcccctttgttccttttcctctcgaaagaaacaagaataacttcccatttgtttgctattaatgatggtgaacctgtattgggtatacaaggtgcttcctgttgcactgacaagataattattctcaagttgttcaccatcttttttccaagtcacatttactgcattcaaatccccagatgttgtgaactggcatgtgagatttacattagaagg

SEQ ID NO: 2613 - DNA, 269 bp, Homo sapiens
ctgagctgcggctggagagccctttacagtgcttctgtcctgccacgcacagccagtactccccacctctcacatcctgcccacctccgcccagcctcctggacagatgtcctagagccacagaggagagatgcccagcgtctcatcagcgtttccctcgtcctcccaggggagcctgtggtgcaggctggtgggatgctgcctgatggggagtgtagccccttgagaaagtattgagaccctaataaccccacaccctcaggaggcag

SEQ ID NO: 2614 - DNA, 533 bp, Homo sapiens
gtgaatgttttactttccaaagtgctctcctctgcaccagcagtaataaatacaatgccataatcccttaggtttgcctagtgcttttgcaattttcaaagcacttccataagcattccttccacctccttgataggcatttatggaaagcctgctacatgtcaatcatactgttaggcacaggggacctaaagacacataaaaggatggcattctgcctcataaattgcaaaacctaatgaaagtgactgcttggtaaacaaattattattatattataaaatgctataaaagagccatattgaaagtgccctgttggagacagggcaaatgccacaaaaatgatgtaaatttacatggaggaaaagtagaatctgcctggtttgtaggcagcagaagacatttttcatcagtgggcaggtgttctttaccttttgtagaaatgggagtcaagtctcaaataggaggctccacaaaatctcatgccaggtctctgataccttattcacagaagttctttgaagtatttattg

SEQ ID NO: 2615 - DNA, 441 bp, Homo sapiens
ccaaggcatcatggtgcgtggtccccttgagagacttgccgttgatggaaagaacctcattgcccttctgaatagtcccttcctgggaggccagcccatttggaaacactctgtgaaccgtaatcaccttgttttctagatctgctcctcctgccaagctgaacccaagaccagcaccttcctccttgtgtaagatggtgacatggatgccgtctaattgctttaatgttgcttcatccagaaccttcacctcctcgatgagttttttaattcttctgagctcagcagggagataacggactgaccagactgaagggaactgtggtccccatcatcgtcttccttggcttccgtgagaccctctgtatattctctcagccctgaaaggttgagcgagaaccctgtgtccaaggcagatgtttcaagcagaaccatttgcag

SEQ ID NO: 2616 - DNA, 302 bp, Homo sapiens
  misc_feature (1)...(302): n = g, a, c or t
ctggaccacagccgcagcgtcatgagcagattaaacccggccactttcaggaggaggattcggaacccaatcactgacaggttttganagtttaggttcgtatctgtttcaaagcttttctcgaccagcttgacatcacaggaactttctgggctggggaagaaggtgtcttctggaataatgctgttgttgaaggcgtttgcacatgcaaagtcagatttgttgctccaggccacagcactgttgctcttgaagtccatagacctcatgtctagcacaagttttgtctgngatatacacat

SEQ ID NO: 2617 - DNA, 369 bp, Homo sapiens
cctgtggctgaccacagataccagccagcagtggggaaccaaacgctgtatctgtttgtgctcttatcaatcaactcaacatccacatttccttcaggccccagaaactgacgatttttataatcttcttcgatctcaaaacagactttagaagcataagaggaaactatttgattctcttctgagcaaatgtctcctgaatcttgtccctctgaagattcctgctcttctgatacactggaggttgggatccccatgttacaaaaagatgaaaaacatcaagaatcagttgatgaagatgaagacgatgttattgaaaactagagctgcactgtcccgtagagtagccgctacccggatatgctattt

SEQ ID NO: 2618 - DNA, 341 bp, Homo sapiens
cctggttcacccttgaaagaaaggatggctaggggtaaacaagacgagcaagtccctggaatgcagggagccaagaagggcagccgaggataaggctctgcctccccaccggcgagggtttcctttccttctggtcattaaaactgcacagcccccggggagatgttgaacatggcagggtcgaatcgctggcctcggaagggagaaccttcagcatcccaccccttcttcagcatctcatggactttcagctcatggctctgtggcttgccctgcagcttctggtggtaagtcaaaggtaagcctgtccaacaccgcctgttcctcctcatccacggtgg

SEQ ID NO: 2619 - DNA, 354 bp, Homo sapiens
ccatagtcattattctaactgatatgtctataaagttgcacccccagtccgttgagccttggtatttgttgtaaattctcctttcacagcgattgttaaatctattcgtgccctgagatgtatggctttatgctgaagattggctggatgcgtcctctgatgtgtgttgtaggaatttaatgtggttgtctcctgcttttattatactgtgacttgttaggaaaccctgggcctcatttggctctcccttgggagaggttgagggtgcacctttatgaacatggaaaggtttatcacagcaagttaacccccgcttgctcctcccctctataccaagctcttctggtttttcac

SEQ ID NO: 2620 - DNA, 211 bp, Homo sapiens
  misc_feature (1)...(211): n = g, a, c or t
ccagaggtcccggcccgtggatgcttctgtggatgaacccctcccagacnccccaggcccttttggaggaggactgtgtgcagctcangctcccggctccagccagccaccctcacgctnctatgctgtnaanacgtcctcagggtccaagctcaagtctttttgccccctactactctgtgccaggcatcattctaagtgcttgtttgtt

SEQ ID NO: 2621 - DNA, 358 bp, Homo sapiens
  misc_feature (1)...(358): n = g, a, c or t
ctgacagttctccatggcaactcantcctccagcagacccctgcatacataaaggtgcaaaccaacaagatggtgatgctgtcctgcgaggctaaaatctccctcagtaacatgcgcatctactggctgagacagcgccaggcaccgagcagtgacagtcaccacgagttcctggccctctgggattccgcaaaagggactatccacggtgaagaggtggaacaggagaagatagctgtgtttcgggatgcaagccggttcattctcaatctcacaagcgtgaagccggaagacagtggcatctacttctgcatgatcgtcgggagccccgagctgaccttcggggaagggaactcag

SEQ ID NO: 2622 - DNA, 352 bp, Homo sapiens
ccaggcacaccagtgtggccttttgggtgtgggagatctctgcttctgatggctcaaacacagcgacctcgggtgggaacacgtttttcaggtcctctgtgaccgtgagcctggtgcccggcccgaagtactgctcgtaccccgcgctggcacagaagtacacagatgtttgggagggagcagccgactccaaccccagcaggaaattctgtttttttaatctggagacattgtagccatcagggacctctcctttggcagttgtaccctcaccaactgagtaatgaatcagcctcagccccatgcctgggtcttgtcgataccagtacatgtattcatggttcatatcctg

SEQ ID NO: 2623 - DNA, 395 bp, Homo sapiens
ctgtcagcgtccagttgggaggagtgtgcagaatgatgggggaggtacttgaacagcctgacgtcgggcagggggagatacccggcgaagagcggcatcacttccatgtggaccctgtgagtggcccgagcagccactggcatggagatgacaccgcagcttttcccacacactgcccagttgctactgttgtcgacaacttcatacataagctttgtcgaaaaatgctcatcagattcagtcagtgcttcatctttatccacctccaagaggtctgagagccccgtgatcaaaacctccagggagcagagggagcctgttctgcaatactccattcccgaagggggaaagatctcagccttcacgttgtataatgtaaaaaaattttccacctt

SEQ ID NO: 2624 - DNA, 284 bp, Homo sapiens
ccatactctagccaaatgttaggacaaatgtaatccttcacggctttctcaaagaggtcatacacgtgctctctgtccaggccatcctgggccatgctgatctcgtcatgcagccactccagccagagctcttcagtcaagggaaagatttcactcatcttctggcgggccatcctcaccttggtaagctccccttccagcctgagcagtctgatcaagtccacatggcagttgtagtcatagacgttgatagacaactgctcctccagtctctcaatctccag

SEQ ID NO: 2625 - DNA, 326 bp, Homo sapiens
ccactgcatgaccagggctggcaagaagctgtgtaacagagggctgcctttagtttgtggcaggcgtcatcgttccatttgcctgcatctttgtttctcttgatatagatctccacgcagtcctccttgttcttcttgttgttgggctcaccatctccccagttctctgcttcttcagtaagagatttgttggttcccacccaccgtccatattcctcctatcttccggattcctatccaagtagtaagaacgactgaaaggcagagtcttctccagaaactcaatttccgccctgttttgtatggcaactaaatctgtgtaattg

SEQ ID NO: 2626 - DNA, 376 bp, Homo sapiens
aaatatcagtaatagttcattaagtaacatagtagctaagaacatggactatattttcacagcacagttcagcttaggcacacctttagtttggattattggcattctcttacgtaggaattatatcattgtagatatgtaattatggtaataagcaattttcataaccatgctcactcagactatatcatttgaaactaccatgtttccatttttgacaattcatgttcacaaaacaacaggaacaatttcctatttggtataaagagcaaaatttccaactttgccccaaaatgccatgggtggcatattgccatatgattatatcatatatttaatcatgtatgggaaagattttggattttttttcttattt

SEQ ID NO: 2627 - DNA, 266 bp, Homo sapiens
ttgacaacgacaacagtttgcaggtaaatgctcttgtctttcagtcttcctaatttctctaatattgccaaattttctttttcaattccttcatcctccaactttttcccactaatgggctctgctttcatctcgtagtgatctaagtcttctatatcctgtggagggggctggtgaaggagttttcagtcccgggcaccctgggctgtgctgaaagcctctgcgtcacactgccgtgagttagctgggaaagagagctcccactg

SEQ ID NO: 2628 - DNA, 179 bp, Homo sapiens
  misc_feature (1)...(179): n = g, a, c or t
cctgaaggacccagggccctctggntggatgcgtttgcctatcaggacccnccaattacttacagacctgtttagggctaggcttggcctctttcttgagctcatctggaggggngtggcaacactcattcttcatccttattctccctggctgtgggcaacactggncctcagtgtca

SEQ ID NO: 2629 - DNA, 160 bp, Homo sapiens
  misc_feature (1)...(160): n = g, a, c or t
atgagaccgngacttgccagccccacagagccccgcccttgtccatcactggcatctggactccagcctgggttggggcaaagagggaaatgagatcatgtcctaaccctgatcctcttgtcccacagatatccagaaccctgaccctgccgtgtaccag

SEQ ID NO: 2630 - DNA, 338 bp, Homo sapiens
  misc_feature (1)...(338): n = g, a, c or t
aaaagctaagcttaccagaaagcanagagatttaatatgtcaacttgtccacaataatgccaagatgaaaaatgacaatgagtcttaattattttgagtcaaatatttcagttcaagaaaatacaactacaggatttcctacaccacacaccaatgggattcatattcattatgcaaactatggtgacagacactcagggctgtaaagtaatttgccttgagtgtttcagtgactttcaccaagtttttggatcctggagtaatcagtgcaaacaagccataaagcttcagtagcaaattactgtctcacagaaagacattttcaacttctgctccag

SEQ ID NO: 2631 - DNA, 167 bp, Homo sapiens
aaagcagccgcaaacatggtttccacaactgcattcctgaagcgcatacccagagttacttcttgtaacagcactttcttccagatgactgagatgcgtctgctggtgataagatcagattaacctatttcaacttgatagctagattctgacacactgaagaaaaa

SEQ ID NO: 2632 - DNA, 201 bp, Homo sapiens
  misc_feature (1)...(201): n = g, a, c or t
ctggcgagcagnatctcttctgggaactgagatgccatttcaggaagaanccactttctttagtttgcatgtaacttacgagagtgtctctcaggctccactgagggcggaagcgctcctcggnttgggtttgggggttctttanttncaagattatcatttcgtgcagctctagcaggaaggcgtctaggccantctgat

SEQ ID NO: 2633 - DNA, 265 bp, Homo sapiens
ctgagcagcttttctccccccatatctgcgtgcacttcccagagcatcttgcatccaaacctgtaacctttcggcaaggacggtaacttggctgcatttgcctgtcatgcgcaactggagccagcaaccagcacatccatcagcaccccagtggaggagttcatggaagagttccctctttgtttctgcttcatttttctttcttttcttttctcctaaagcttttatttaacagtgcaaaaggatcgtttttttttgctttttt

SEQ ID NO: 2634 - DNA, 349 bp, Homo sapiens
ctgagatctgcaagattgtaagacagcctgtgctccctcgctccttcctctgcattgcccctcttctccctctccaaacagagggaactctcctacccccaaggaggtgaaagctgctaccacctctgtgcccccccggcaatgccaccaactggatcctacccgaatttatgattaagattgctgaagagctgccaaacactgctgccaccccctctgttcccttattgctgcttgtcactgcctgacattcacggcagaggcaaggctgctgcagcctcccctggctgtgcacattccctcctgctccccagagactgcctccgccatcccacagatgatggatctt

SEQ ID NO: 2635 - DNA, 283 bp, Homo sapiens
aaatttggattcaaagtacttagattttctggaatcccattctacaatcttctggtcgaaagtataaaaccaggttagttgtttgtagttctcaggcaggctctcagagatgttcagagtcacgttgctgccggagaccacggtcatatgtaccaagtgaccttgaatgctggtcaccaggagtgacagaggcagcagtagcaatcccagagccagacacgaatcccaacctctggagcacatgcttccttccagaacttcccagcaacgcaggagacagttg

SEQ ID NO: 2636 - DNA, 307 bp, Homo sapiens
cctgtcatgaataatcaccgttctcctttcgtctcgctcccctcgtacttctcgcctgtctgattctctaagttcatttcttggtggtggaggctcatttcttctggagtcactgaaatttttgggatatctttcgaagcttggatcttcccttcgtgcagtaggtcgtgcttttttcccctcactttgaccaacaaagcggtcccgcctttcaaaagatgaagactgtactgctgaactctcaggaaacctgcccctctctcggtgatcaaagtcattaaatctgttctgttggcgagagtagtcg

SEQ ID NO: 2637 - DNA, 177 bp, Homo sapiens
gaatacctttttcccctcagtttagtatattgactttgtactgtaaatttttctgcttttcttggataatctcaggattttcatgaggatagggggaactcaactttatttatgagacaaaatttccatacaaagctcaatctcctttatacacccacagacataatattagttttt

SEQ ID NO: 2638 - DNA, 233 bp, Homo sapiens
  misc_feature (1)...(233): n = g, a, c or t
ctgaagagccangagcccaggcnggactttgccttctttgacaaccagccccaggccccttggggtacttgatggccccctcaagacctttggaatccagccaagtgatgcacccaaatgatccacctttcgcccactgggataaatgactcaggaaagaagagcctcggcagggcgctctgcactccacccaggaggaaggataccgtgtgtcctgctgcagtcctcaggga

SEQ ID NO: 2639 - DNA, 455 bp, Homo sapiens
  misc_feature (1)...(455): n = g, a, c or t
ctgttaacacattattgattaaataagtatatgcctaaatctggaagaacaaacgaaattatcatgacttctcggtaacactgtgaaaggaaatatcctttttcattttacattctgcactgtaaaaaattcaaaccagcaatgtttaatagctttcacatttgttaaccataaacacaaatttatcaaggtttaatagccaccacccatggcatggtgaatatgtccctggagtctacagaaccagatttgaattttatctctaggccacatgcaagtcacatgatctctgaatcttgctttcctagtccacaaatctaagtgagataggtacggngtctaagccaatgcctagcatgcagattatttcagtacatgtaaccctcccttcaatttacatgaatatgagacatattgctaaagatcaagtaccaactgggtatgactacagagag

SEQ ID NO: 2640 - DNA, 184 bp, Homo sapiens
  misc_feature (1)...(184): n = g, a, c or t
ctggaccacagccgcagcgacatgagcagattaaacccggccactttcacgangaggattcggaacccaatcactgacaggtttngaaagtnnaggntcgtatctgnttcaaagcttttctcgaccagcttgacatcacaggaactttctgggctggggaagaaggtgtcttctggaataatgc

SEQ ID NO: 2641 - DNA, 172 bp, Homo sapiens
ccaggtagcggtccagactgatgaaggccaggatgaggacactgctgtagaggttgactgtgtagatgacatggactgccttgcataggaagttcccaaagtaccagtttgccacggcatcaactgcccagaagggaagcgtgatgacaaagaggaggtcggccactgacag

SEQ ID NO: 2642 - DNA, 230 bp, Homo sapiens
aaacagcatcttgctacagatttccaatccaataaataccaggaatgaaggacttttgccccaaagaagtatttcacatgaattctgaactttggatatggaaacttatagaaaaactgaagaccctgagacacatgcaagtaagagtcttctggcaaaaatacaatttaattttccagtttctctcctcccaaaaactccagaagatacctttagtaggcacagagttt

SEQ ID NO: 2643 - DNA, 389 bp, Homo sapiens
  misc_feature (1)...(389): n = g, a, c or t
ctggaccacagccgcagcgtcatgagcagattaaacccggccactttcaggaggaggattcggaacccaatcactgacaggttttgaaagtttaggttcgtatctgtttcaaagcttttctcgaccagcttgacatcacaggaactttctgggctggggaagaaggtgtcntctggaataatgctgttgttgaaggcgtttgcacatgcaaagtcagatttgttgctccaggccacagcactgttgctcttgaagtccatagacctcatgtctagcacanttttgtctgtgatatacacatcagaatccttactttgtgacacatttgtttgagaatcaaaatcggtgaatacgcanacagacttgtcactggattnacagnctctcaa

SEQ ID NO: 2644 - DNA, 186 bp, Homo sapiens
  misc_feature (1)...(186): n = g, a, c or t
ctgacagnccnccatggcaactngnggcctccagcagacccctgcatacnnaaaggcgcaaaccaacaagatggtgatgctgncctgcgaggctaaaanctccctcagnaacatgcgcatctactggcnganacagcnccaggcaccgagcagggacagtcaccacgagnccctggccctcnggga

SEQ ID NO: 2645 - DNA, 263 bp, Homo sapiens
cctgagcctgcctctctgccttctcagcagagcggccggccgctgtgaccactgctctcaggagagtgggggatgagaggccagaggtgatgcaggctcagaccccggcttcaggagctcggggtggggtcgtgggaccgtgcgcgatagcatcagcccacaggggcaggcagaggcggtgtggagatgccacggggaagccacctgcccacgggggtccacgggagtccaggctacaggcagaaagccttgaactcaggcca

SEQ ID NO: 2646 - DNA, 254 bp, Homo sapiens
  misc_feature (1)...(254): n = g, a, c or t
ccagtgtcangagggcaatgggctctggaaccccttgctgaagnntgncctcaatggccgttgcacccagcagcatcatgtngntctcaacctcctcatagatgctagccagcctgtcctcccggctgtcctgggccaggctggcctggaggcgtcgctcagcccactcctcgtagtactcttcatccagatccttgtaagccagcaccagggtcctcagcccttcccctgcgtactcattaaggtggtccatg

SEQ ID NO: 2647 - DNA, 195 bp, Homo sapiens
  misc_feature (1)...(195): n = g, a, c or t
ctggatcccagggaaatatcagncttgggcaactgcagtgaccaggggcaccggctgcccacagggaacacattcctttgctggggntcagcgcctctcctggggctggaagngccaaagcctggggcaaagctgtgtttcagccacactgaacccaattacacacagcgggagaacgcagtaaacagctttccc

SEQ ID NO: 2648 - DNA, 323 bp, Homo sapiens
  misc_feature (1)...(323): n = g, a, c or t
aaacttgacaatcattacactaaaacagatttgataatcttattcacagtngttattgtttacagaccatttaattaatatttcctctgtttattcctcctctccctcccattgcatggctcacacctctctgtctgttaaactgacgaccacggacaccttgtctcaatgttgtctgaagtcttactcgtctgaaaggctttggttgactactactagtatctacagatgagctggaaggaggatcctggctggtggaggggagatctgactcatcagatgcttgaaccggctcttcttcctgctggctatcgatttctagg

SEQ ID NO: 2649 - DNA, 441 bp, Homo sapiens
  misc_feature (1)...(441): n = g, a, c or t
ccaaggcatcatggtgcgtgggccccttgagagacttgccgttgatggaaagaacctcattgcccttctgaatagtcccttcctgggaggccagcccatttggaaacactctgtgaaccgtaatcaccttgttttctagatctgctcctcctgccaagctgaacccaagaccagcaccttcctccttgtgtaagatggtgacatggatgccgtctaattgctttaatgttgcttcatccagaacctttacctcctcgatgagtttttttaattcttctgagctcagcagggagataacggactgaccagactgaagggaactgtggnccccatcatcgncttccttggcttccgtgagaccctctgnatattcnctcagctctgaaaggntgagcgagaaccctgtgtccaaggcagatgtttcancagaaccatttgcag

SEQ ID NO: 2650 - DNA, 432 bp, Homo sapiens
  misc_feature (1)...(432): n = g, a, c or t
aaaaacgaaacaaagttatggggntaatctcctacacaattcatttacttcatttgaatgttagagctactcatgattatttgtgtttctaatttatagtttaagtttatttgtaaaaagttaaaagagagtgggtctctgtgcctctcactgatgttcactctggcatcctttagcatttttcttttttcatttcataattgtaggtcattagcatgcatatcgagtttgcccttacgtggtgggagttcaaacacacaaagacccattctttgcacaaaactgttctcgctggtttggaataggctcccgtgcttttttaatgntattgcagcatggatgttcattacagaattcagataaaatttgctaatgctctgctatgatgtttgatcncatcttaatcacagggagctcttccatagctcaata

SEQ ID NO: 2651 - DNA, 245 bp, Homo sapiens
ccttgcacgtggcagtgtctatcctgtcagatttgggaggtcagctattaattagatcagctattaatcagactgttctcctaacactttaacttcatggatgtaccttccttcctttcctaatgccaactctgtttcccgggtaggtgtttcactgcctgaatgaaatcctagatctctgtcacagtttttgttcgctggtcagtcagaacctaggcccactggatgagcgtggagccgcccag

SEQ ID NO: 2652 - DNA, 191 bp, Homo sapiens
  misc_feature (1)...(191): n = g, a, c or t
ccatagatttgccttgtggtgntggatcaggtactgtgtctgctcataagtacttgtgtcatccagaatgttttgttttttaagaaaattgaattacttgtttcctgaaatattctgaggttaatatgttagttttcatagaacattgagaggcccctgccactttcaataaaggcctgacttggaaaaaa

SEQ ID NO: 2653 - DNA, 420 bp, Homo sapiens
  misc_feature (1)...(420): n = g, a, c or t
aaatcttgaaacaaatcaagaaancttttgttaaccaaaccagaaaagnnccagcttactgggagacttctcaaatttgtcatttttccatgaattcagtttgtgctgtttaagaccttcctggtccacgaattcagtttgtgctgtttaagacctggntatttcccatgagccacacatgcttccaatctttcttgaagtagtgcacatgttccttcccagagctagtttctatttgcccatctcagttaagtccatatacatagaattgcattcattgacaccattccgnactttataaatgtataccaacttcaccatcctcagggcaatgttacatccctcttccagaattaaacattccggaggntgtctcccacacactcacacacacacaagccttgggacacaacgatcaaa

SEQ ID NO: 2654 - DNA, 226 bp, Homo sapiens
ccaagtaaactgtactgccaatagaattctggaattgtgagaaattgtatcattgaagttcagtaggatgtgtggcttaaaaatttatcaggaccacaaaaaagaaaacaaaaatatttggtactgaggttcattgccagggcaggaggtatttccagaaaatactcatgcctgtgttctgttccttgctttcccaaatactgcatgtgactttcctaagcggcag

SEQ ID NO: 2655 - DNA, 310 bp, Homo sapiens
  misc_feature (1)...(310): n = g, a, c or t
aaaaaaataataaaacgaacaaanctttacttgttgccacatcagataacacggaaaaagccttgaaattactccagatgtgcaccctccccttccctcagtgcctgagtctttttcttccagatcgaagtatttcagcccttttggggcgccgtttgcgaaacacagccccttttgagggacttcctcctcttgaaaagactcaccagttctcccttcctaggtgtttctgttcatgagaaattgtcagaatcaactggcacgttccagggtcttcctaaaggatggaaacctgtttggcttgcttttt

SEQ ID NO: 2656 - DNA, 389 bp, Homo sapiens
ctggaccacagccgcagcgtcatgagcagattaaacccggccactttcaggaggaggattcggaacccaatcactgacaggttttgaaagtttaggttcgtatctgtttcaaagcttttctcgaccagcttgacatcacaggaactttctgggctggggaagaaggtgtcttctggaataatgctgttgttgaaggcgtttgcacatgcaaagtcagatttgttgctccaggccacagcactgttgctcttgaagtccatagacctcatgtctagcacagttttgtctgtgatatacacatcagaatccttactttgtgacacatttgtttgagaatcaaaatcggtgaataggcagacagacttgtcactggatttagagtctctcag

SEQ ID NO: 2657 - DNA, 308 bp, Homo sapiens
  misc_feature (1)...(308): n = g, a, c or t
ctgagagactctaaatccagnganaagtctgtcngcctattcaccganncnnanacncaaacaaatgtgtcacaaagnaaggattctgatgtgtatatcacagacaaaactgngctagacatgangactatggactncaagagcaacagtgctgtggcctggagcaacaaatctgactttgcatgtgcaaacgccttcaacaacagcattattccagaagacaccttcttccccagcccanaaagtgcctgtgatgtcaagctggtccgagaaaagctttgaaacagatacgaacctaaactttcaaa

SEQ ID NO: 2658 - DNA, 123 bp, Homo sapiens
  misc_feature (1)...(123): n = g, a, c or t
aaaacctgcngactaaacagtaaggaatttatatttgtgaaaaatgccacccgncctagtgatttctgatgtaaataatgntgnttatatagtatgtattaaattttcctacattgtaaaaaa

SEQ ID NO: 2659 - DNA, 306 bp, Homo sapiens
ctgctgcacccagagctcctttgggtctgcacatagctctgcctgagagcgcttgcggggcaagaacaggatagctgggatggagcagcctaagcttggttcctgcttccggtagctgcggacaaccttggcgggaatcttcctttggctgtacttgaggcaacagtcctgagcccctccatcactgccttgggtcctggggatgccaaaggccagaaccaggataaggaggctcagagccagtgactgagccatgtctgtggtagagggtgagtcagaggccagagctgagggtgaggtgggcag

SEQ ID NO: 2660 - DNA, 240 bp, Homo sapiens
  misc_feature (1)...(240): n = g, a, c or t
cctgaaggacccagggccctctggggggatgcgtaagcctatcaggacccncanttacttacagacctgttnagggctaggcttggcctctttcttgagctcatctggaggggtgtggcaacactcattcttcatccttattctccctggctgngggcaacactggtcctcacngtcaccagatggncctcctctgggcccatgaccccncagcagccaaggctggccctgccagataaa

SEQ ID NO: 2661 - DNA, 280 bp, Homo sapiens
  misc_feature (1)...(280): n = g, a, c or t
ctggaccacagcctttncgtcatgagcagattaaacccggccactttcaggaggaggattcagaacccaatcactgacaggttttgaaagtttaggttcgtatctgnttcaaagcttttctcgaccagcttgacatcacaggaactttctgggctggggaagaaggngtcttctggaataatgctgttgttgaaggcgtttgcacatgcaaagtcangatttgttgctccaggccacngcactgtttgctcttgaagnccatagacctcatgtctagcac

SEQ ID NO: 2662 - DNA, 192 bp, Homo sapiens
  misc_feature (1)...(192): n = g, a, c or t
aaagcttcttgtttttattaaaaacaagcacatattaacagccacatgtgaatgccaaatgattaaaacaaaaaacaaaaacaagagccatctacactgcagctagggaaagcaaacttcttggcttaagagaagtgagggatgtgtgtacgtgtgtgtgtgtgtgtgtgtgtgtgtgtgtgtgtgtgngtg

SEQ ID NO: 2663 - DNA, 504 bp, Homo sapiens
  misc_feature (1)...(504): n = g, a, c or t
ccaggccacctcctnaggagttagatcacttatccgtctctccctggcccacccttctctgtcacatggcttctttgctgaccgtgatacacaccacacttgtcttctctacctggaagttgtattccccatacccacatggctcacttcttcacttcattcaagtctctgctcagatattaacctcttcagagagcccttccttcacacactgtcttgcatagcagcctctcctacaagttgtcttctttctccttaacttttgngatggttaattttaggtgtcagcttgacttggattaaagaatacctagagaactggaaaggcattatttggtagtgtgtctgtgagggtatttccagaagagattgatatatgactgattgggctaanaggaaccatncgccctcaacgtgcagttggcttggaaacaaaaacngaagaaaggcaaattggtcttactctcttggagctggaataaccccttccattcctggcccttg

SEQ ID NO: 2664 - DNA, 389 bp, Homo sapiens
ctggagggtcagccaccaagctgggagctgagccagaacaggagtgatgtctctgcccttcctctagcctcttgtcacatgtggtgcacaaacctcaacctgacagctttcagacagcattcttgcacttcttagcaacagagagagacatgagtaagacccagattgctatttttattgttatttttaacatgaatctaaagtttatggttccagggactttttatttgacccaacaacacagtatcccaggatatggaggcaaggggaacaaagagcatgagtctttttccaagaaaactggtgagttaagtaagattagagtgagtgtgctctgttgctgtgatgttgtcagccacagcttcctgccgtagagaatgatagagcag

SEQ ID NO: 2665 - DNA, 492 bp, Homo sapiens
  misc_feature (1)...(492): n = g, a, c or t
ctgcagtcaacagtttaaagaagtcatggcccaaatccagtgtgcacccctccccattcacagagcctttttcacaattccatttccagttcatctatggcagtccagccagctcctgggcagcttgagagggcaaacccaaaacctcatgacagccagagcctgtctttcagcattcagtccgcctggccggctccagtttccccatggggctgcgggacagaggaccattacaactagatcaaggagcccagaaaacctccagtagtggacaacaggttttcaccatagcctacgttaacccatttttgagccaagcttcaaccctcagccttgaaaaacaagtctttaatttaatttttgttttttgctaaatccaaagaaaaangggctgccgggccaggcgcggtggctcaccgcctgtaatcccagcactttggcanggccgangcaggtggatcacctgacgtcagtagtttgagaccagnctgg

SEQ ID NO: 2666 - DNA, 337 bp, Homo sapiens
  misc_feature (1)...(337): n = g, a, c or t
ctgcataatgctcnnacatctgtagatagagccgctctagttccattgtgtattgtttggtgttgaacagagggctagatattctttgcttccagactttgccacgaactttcttcaggtattctagatcagttcccagcttcacagctatgtcttcatattcttgtctgtttttagcaataagctcaagacaacctaagcaagtgagctgggatgctgcaactcgagaagcaagagtctctcctggcatagtcaccatgggggtccctgcccagaggacatccatccctgtggtgtgcccattacagagtggagtgtccaagcagacatcagccag

SEQ ID NO: 2667 - DNA, 405 bp, Homo sapiens
  misc_feature (1)...(405): n = g, a, c or t
aaaagtcgcannttctgacaatcaacaaataaactctaatgagaatcataaagcttgttcccagagaaccatgatacagggtgggacagtacgcaaataatgggctcctgttgtcagacttcatggtgattacgcttgtgctttctccagtatctttcttcctattgtactcctgaagcactcagaatgataaagataaatttctgatcattcctacaaagagtgcaggcaaagttaagatttaactgtgattgctggttgtttcatctcgaattcaaaatcctggatttccgaaacaatggagcttgatgtcacatttggctatcttgcctttgtctcctcttctggaaagaacaaatcatcttcctgaaaattacaggagacacttagtatgacaaaataagg

SEQ ID NO: 2668 - DNA, 332 bp, Homo sapiens
  misc_feature (1)...(332): n = g, a, c or t
cgcggncgtaaggnttgaggatttttggtccgcacgctcctgctcctgactcaccgctgttcgctctcgccgaggaacaagtcggtcaggaagcccgcgcgcaacagccatggcttttaaggataccggaaaaacacccgtggagccggaggtggcaattcaccgaattccaatcaccctaacaagccgcaacgtaaaatccttggaaaaggtgtgtgctgacttgataagaggcgcaaaagaaaagaatctcaaagtgaaaggaccagttcgaatgcctaccaagactttgagaatcactacaagaaaaactccttgtggtgaagggtcta

SEQ ID NO: 2669 - DNA, 302 bp, Homo sapiens
  misc_feature (1)...(302): n = g, a, c or t
ccacctcaccctttnntctggcctcttactcaccctctaccacagacatggntcagtcactggctctgagcctccttatcctggttctggcctttggcatccccaggacccaaggcagtgatggaggggctcaggactgttgcctcaagtacagccaaaggaagattcccgccaaggttgtccgcagctaccggaagcaggaaccaagcttaggctgctccatcccagctatcctgttcttgccccgcaagcgctctcaggcagagctatgtgcagacccaaaggagctctgggtgcagcag

SEQ ID NO: 2670 - DNA, 398 bp, Homo sapiens
  misc_feature (1)...(398): n = g, a, c or t
ccactctgtctgcangatgttttagtggaatgttgtagccaaagttagatctgaagttggaagcttcttctcttgctatgtctgctaaagaacgagcatctgccaacaaacctgctactgccattccaacatgccgatcaacattaaaaagtcttttgttggaaccttcttcataaagtttagaaaggactaatttttctaccccaaagacaacaccatctttgcatctgattccaatagctgtactactattttccacagccttcatagcatattcaacttgaaaaactcttccgtcaggagagaatgtagaggctgacaggtcatacccagtgccgattgagctcatcgtgctaaacccaaagggacgcgtagggattccaggcccggagcgcttc

SEQ ID NO: 2671 - DNA, 352 bp, Homo sapiens
  misc_feature (1)...(352): n = g, a, c or t
cctgtgaggtgcagagtgcccagaactggactcaggatgcccagggccactctgcctctgcctgcattctgccgtgtgccctcgggcgagtcactgcctctccctagccctcagtttccctatctcgaacatggaactcattcctgcctgtctcctttgcaggctcatagggaagacctgctgagggaccagccaagagggctgcaaaagtgagggcttgtcattactagacggttcaccagcctctcttggtttccttccttggaagagaatgtctgatctaaatgtggagaaactgtagtctcaggacctagggatgttctggccctcncccctgccctgggatgtccac

SEQ ID NO: 2672 - DNA, 423 bp, Homo sapiens
ctagaacctgggtcctagtttgcacctagaatatgaggtactttgagccttgctaagaccacccagcccatctccatggactcatatgaaggacaagaagtgaacataacctgtagccacaacaacattgctacaaatgattatatcacgtggtaccaacagtttcccagccaaggaccacgatttattattcaaggatacaagacaaaagttacaaacgaagtggcctccctgtttatccctgccgacagaaagtccagcactctgagcctgccccgggtttccctgagcgacactgctgtgtactactgcctcgtgggtgacatggagtcttctggttctgcaaggcaactgacctttggatctgggacacaattgactgttttacctgatatccagaaccctgaccctgccgtgtaccag

SEQ ID NO: 2673 - DNA, 188 bp, Homo sapiens
  misc_feature (1)...(188): n = g, a, c or t
ttggtgagggtacaactgccaaaggagaggtccctgatggctacaatgtctccagattaaaaaaacanaatttcctgctggggttggagtcggctgctccctcccaaacatctgtgtacttctgtgccagcgcggggtacgagcagtacttcnggccgggcaccangctcacggtcacagaggacctg

SEQ ID NO: 2674 - DNA, 242 bp, Homo sapiens
ccaacatggtgaaaccccatctactaaaaataccaaaaaaattagccaggcgtggtggcaggcgcctgtagtcccacctactctggaggctgttgcagaattgcttgaacccgggaggcggaggttgcagtgaaccaagatcgcgccactgcactccagcctggcgacagagcaagactccatctcaaaaaaaaaaaaaagacttgaatagctacagaaagtcccttacctctgatcaaagg

SEQ ID NO: 2675 - DNA, 376 bp, Homo sapiens
gttttggtggcggtacagacacttttaactcacagtaaaagcaaaagcaacagctcaagcagcctccttggagaaaacctgaaaattcaacttgttcaagagaaggtcttgtacgtgcctaagttctagagcctcctgacgtgagcatggctgagagtgaggaccgctccctgaggatcgttctggtagggaaaactggaagtgggaaaagtgcaacagcgaacaccatccttggagaggaaatctttgattctagaattgctgcccaagctgttaccaagaactgtcaaaaagcatcccgggaatggcaggggagagaccttcttgttgtggacactccagggctctttgacaccaaggagagcctggacaccac

SEQ ID NO: 2676 - DNA, 284 bp, Homo sapiens
ctgtccggaaccaggaagggcaggaaagccatggaggcctttcaggcatctgggcagggtagggaggggccgtaaggtgctcacctgtcacacgaggtccccgagcgccgaggaagatggtggcgggcagcgggcggcagcagtggcgtgatctccgaagcccacagtacactcatccataaagtaggaaacactacaccctccagtgctgttagtagtgctttctactttatgggtgactgcactgtctgtctgcccgtcggcgtgtactcttcaggctgccc

SEQ ID NO: 2677 - DNA, 284 bp, Homo sapiens
  misc_feature (1)...(284): n = g, a, c or t
cagaggacccctccatcctgcagttcctgccatgagcctcgggctcctgtgctgtggggccttttctctcctgtgggcaggtccagtgaatgctggtgtcactcanaccccaaaattccgggtcctgaagacaggacagagcatgacactgctgtgtgcccaggatatgaaccatgaatacatgtactggtatcgacaagacccaggcatggggctgaggctgattcattactcagttggtgagggtacaactgccaaangagaggtccctgatggctacaatg

SEQ ID NO: 2678 - DNA, 252 bp, Homo sapiens
cctggagccttcccctgcctcttccgacctgcatctcagcagccaccctacccagtgaccaggagtccttaggctacctggatgcaagtcttgcgggggtgacgggccacccccttccttcttctcccatccaatcccactggttcctggatcccaggccctcagctctgccctaaaggaactctgagcaatccatgatgagtgtgtgctacacacatcctttctctcttccaaataagggacttccccttt

SEQ ID NO: 2679 - DNA, 269 bp, Homo sapiens
ccaatttcttaacccccttcagcgtccgtttgtttgcacagtgaaatggaaacattaatacttaccttgccaggctggtgcgaggatgagatggggttgtgtatgagaagtcagcacagagctggcaggtggtgccatgcaggtgtcagcagagttaagggattgttgatgtagtagacgtggtccgctccactacaccttgccagaccacctgcagggcacctcagctccaattcacagacgcgcctacagcttcctgcaccaagcag

SEQ ID NO: 2680 - DNA, 322 bp, Homo sapiens
  misc_feature (1)...(322): n = g, a, c or t
tgctcatcttcagcagacggaaaccaagcgtgatgacccctactgagggcctggatacgggagagatgagtaatagcacatcctcactcaagcggcagagactcggatcagagagggcggcttcccatgttgctcaggctaatctcaaactcctggacgtgagcaagatcttcccaattgctgagattgcagaggaaagctccccanaggtagtaccggtggaactcttgtgcgtgccttctcctgcctctcaaggggacctgcatacnaagcctttggggactgacgatgacttctggggccccacggggcctgtggctac

SEQ ID NO: 2681 - DNA, 151 bp, Homo sapiens
  misc_feature (1)...(151): n = g, a, c or t
ggcagccatcaccagccacagttaagccaagccccccaacatgtattccatcgtgctggtagaagagtctttgctgttgctcccgaaagccgtgctctccagcctggctgccagggagggtgggcctcttggttccangctcttgaaatag

SEQ ID NO: 2682 - DNA, 254 bp, Homo sapiens
  misc_feature (1)...(254): n = g, a, c or t
ctgagagactctaaatccagtgacaagtctgtctgcctattcaccgattttgattctcaaacaaatgtgtcacaaagtaaggattctgatgtgtatatcacagacaaaactgtgctagacatgaggtctatggacttcaagagcaacagtgctgtggcctgnagcaacaaatctgactttgcatgtgcaaacgccttcaacaacagcattattccagaagacaccttcttccccagcccagaaagttcctgtga

SEQ ID NO: 2683 - DNA, 252 bp, Homo sapiens
  misc_feature (1)...(252): n = g, a, c or t
cctttctcccagggtcttattgaagtttgggttttggcataagagatctaagggttgccctaggaggcagaggatggttccctgatcttaaaggctctcaacctctcctctctcctcccttcccccacagtgtgccacagctgtgtggagctggatccagccaccgtggctggcatcattgtcactgatgtcattgccactctgctccttgctttgggagtcttctgctttgctggacatgagactggaang

SEQ ID NO: 2684 - DNA, 356 bp, Homo sapiens
ctgatacctgatcaacttcgacatttgggcaatgccatcaaacaggttactatgaaaaaggattatcaacagcaaaagatggagaaggtgttgagtcttccaaaacccaccattattctcagtgcctaccagcgaaagtgcattcagtccatcctgaaagaggagggtgaacatataagggaaatggtgaagcaaatcaatgatatccgcaatcatgtaaacttctgacaccaccaggagctgactcacacctgaactgaacaccattgaaggcttaaacccatattgtaaaacaggtagaattatctaatttataaaaaggtgttttgatgacctttggtgtggttcatcttttt

SEQ ID NO: 2685 - DNA, 375 bp, Homo sapiens
aaaaactaatgtccattgtttttcccaatctgaatatgtttccatacatgtatgtatttgcaatttctattttccaatatgtaaaaagttggtagacaatgaagtagtgtgcaaatttttaggagagaaaacaatccctactggtttactaccaaactctcacagttatatagaatctattagcactataaactaactcaaaatgcaggcttcagaaaaactgcttcaatagcctccctatcaatctgtcgccttctatgaagtcttcacctgctattattccacaggctgagaattacttctgaaagaaatggtcaattttttcaacagcttggtatgttgacagcttagcaacggtacttcaatcacctcttt

SEQ ID NO: 2686 - DNA, 309 bp, Homo sapiens
agtggatccaaagcacctgataaaagttaataatctcttgttaggaaagctgtccattaataaggccagtcttcagcaaaactaaaaccattttgttcgtttagctttcctagtctgacaacgcaatactgttgaaccacagtcaaatataatgacaacattggatggatagatcagtaccattggttacagctgttaaacaggttcgttcttggcgccacataaaaacaagccaataacatcgaataaatcatggcttttttttctttatcacaattcactaagtgatgttaattatggtccttgtca

SEQ ID NO: 2687 - DNA, 320 bp, Homo sapiens
ctgcaggaactcaagggcaacatccgtgtattctgccgggtccgccctgtcctgccgggggagcccactccaccccctggcctcctcctgtttccctctggccctggtgggccctctgatcctccaacccgccttagcctctcccggtctgacgagcggcgtgggaccctgagtggggcaccagctcccccaactcgccatgatttttcctttgaccgggtattcccaccaggaagtggacaggatgaagtgtttgaagagattgccatgcttgtccagtcagccctggatggctatccagtatgcatctttgcctatgg

SEQ ID NO: 2688 - DNA, 171 bp, Homo sapiens
  misc_feature (1)...(171): n = g, a, c or t
naaactcaacagtagtatttaccatggngtcaaattaancatttatcttgagttcacaaactgagttcactaattttgtctccgtttttcaaatttctagcatttatagactactataacaaccatactcttttaggctaagtgttggaaaanagtaatagatttctggct

SEQ ID NO: 2689 - DNA, 610 bp, Homo sapiens
aaaaaatgggaaattttaatattaagtatgtccatgattgaaagaatcattccagaaatggcagcaaagaggctcaatgaattcattatcatttttcctttgaccaaacacttcctggagtttttctccgttgctgccaggagtgatccggaaataatatacataatgcctccccagagagggtaccacacagtcacacagatgggtgcatagatccctgctgggatcatcagaagaccccccagggcaatgtggaagagcccattcataatctggacagcccccaaagtcttagattccctcatgaagaagctttgcgtggggcccaccagtgaagacatcctcctgaagagtggttttggaccagattgcatagcaatagggcctttcattggctctgccgggaaagtcccatttactgaatttctgggtgttgtcattttgctctcaaaactcctaaaaataaaacaaataacaaaatgaggagagcaagaacaagatttttggcagtcttaccttgtgtcatgcatctgaatgcttctctcagcatttcctccatgagtgtcattgagggtagacatggcctcttccgagtgaccttggatctgag

SEQ ID NO: 2690 - DNA, 357 bp, Homo sapiens
  misc_feature (1)...(357): n = g, a, c or t
aaagngcctnangggtcccctgaaactaattttctatttctggnatnccctgnattcattatatgaganggtgacatgattagaggaattcttttttagtatgaaaatngtcccttntcttcttcactacttgcctccttgctggcnttgaattaacacagggacaaaatttggttaatnntttatttctaactctcccaacaaacccctgntgcccantatttgtttggtggcctttaaccacctgagggaaaaaatgagcttattcaagctgccaatatttatctatgggctgtancacntacactgaattgtactgtgccagggatattgagatgctctgggggngaatngtat

SEQ ID NO: 2691 - DNA, 320 bp, Homo sapiens
ctggagtagttggttgtgaatattaaaacctagtactattttccctcagtaacatgtaattgctacattttttataagaaggtatggttagaaaaaaatgtgaaagatcacttaaaccaaagccagttacaaggagtaatctctcctgttggtttaccttcacctcagaactacaagaatattacaatacatagtgaatagttgtctgtgacatttctaccagttgtttcagtagcatattggtcttggcatttcttggcactgtggttctgctgtattatttgtgatgtcttattgtttgtgagcttttgttttttttt

SEQ ID NO: 2692 - DNA, 357 bp, Homo sapiens
  misc_feature (1)...(357): n = g, a, c or t
ctgctgccacatggggttggagcctccaacagcatcatccctgagtagacctggtccactgagtcccacaggtcggctctctgcagcctttccctgcaggtcaccaccctctacaggcaatggcaaggacgcgacatcacaggtagacagcccacatcctctcatccttccggtctcctggactggagttgtcccggtgccctggagacccagtcactgccgcctctcccctgcctggactcagcaggggaaagactggaggccctgctcctgccctttggctctgccagcacccccgaccagccctatatctcctcctccaccttcaagatcatccctganaanacctcnancccc

SEQ ID NO: 2693 - DNA, 197 bp, Homo sapiens
ctgtatccactttagcacaaagaaaaacaaggatgctaaatacgtatatactttatcaagcagtgatgtttcacaaagaatttcttaatgcctcttacactgaaggacaccataattcaatttatacaactggttaatagattcaagggaataaatcccaccttaggaaaatagtaccaatcgtgtcatttaagtgg

SEQ ID NO: 2694 - DNA, 223 bp, Homo sapiens
ctgagggtacagctctgagaattggcgctggaaacagttcttggactgtgatagccacaacagatgctgtttctgggatcccaggaccagggctctggaagatgccactgcagtggtagtgcccgctgtctgccttttgtaccacggtgatggagaattccctgttaggcccggggggacccagagctgagccgtctcggtagaaggtcacctgagtcagtgg

SEQ ID NO: 2695 - DNA, 484 bp, Homo sapiens
ctgccaggatgaccaccagcatgccacaggctgggcatattcaacaggacccagtcaccacaaacgtagtctgagaccactaagagaaacccaatatgcatacattgcaggcccaaaccttcctgctttcctgtagtggtgtacttttgacaggaggaaaaccacgtcaggcttagagatagcacacaaatagggaatgacaggaacagggccagaggtgacaaaccactggagatgagtcagaggccacgccgctggactggtctttgtggacttgggagtgcctactgatcaaaaaccccaaaacccacatgccacccgcttccccgcagccaggaacacaattgtttgtgactgtaatagcatttgtatccaataaatagtcttaaccataatggtggacttattttgcctcagagaccaaatgtgctgaattatggatgggagtgagcctcacctgcttccactcattgacacaaaaaat

SEQ ID NO: 2696 - DNA, 196 bp, Homo sapiens
  misc_feature (1)...(196): n = g, a, c or t
ctgctggctggctgggcccccgtanctggactggtttgacaaacccatgcctcctaacatttggctaccgnaagcaccaccgcttgctnctgctgtanaattcaagaanaattctacatatctgnggtgcatatttgntttgtcttttganatagctgncacaaacatcttcatgaattgccgaactcnanatctg

SEQ ID NO: 2697 - DNA, 342 bp, Homo sapiens
  misc_feature (1)...(342): n = g, a, c or t
aaatggatttcccaggcttcttcggcaaccaccttatctggccttncatctgcgtcttttaattgtatatatgggtttttcctaattctattcaaatcctcatgtaatccatctaataggaaagctaaccgttcttgacagtcttgctgctgatatccagagaactgaggtgcaaaacgtcctacctgtgtcttaaaggctcttggggtgacgtagctaaactttccagaccacatttgcttgatcagttcggcataagatttagctatttcacctctcattcctaagggattgtcaaaattcagttcttcttgatacttatcattgangaaatactcanta

SEQ ID NO: 2698 - DNA, 447 bp, Homo sapiens
  misc_feature (1)...(447): n = g, a, c or t
aaattcatgagcatggagtgcctttttacttatttgcgttgtctctattttttttcagcagttttgtagttcttgttgtagagatattttacctccttgatttaatgtattactaggtacatatttttttgtttgtagctattgtaaatagaaccatgttctttttttctcagcttgaatattattggtgcacagaaatgctactcatttgtgtatgttgattttgtatggtgagactttgctgaagtcattatttaggcttanaaatcttttggtgaaatctttttcggtgaagtttcccaggtagagaattatatcaccagtgaagataatttgacttcctctttttctatttgaatacattttattgctttatcttgttaaattgctgnggctacgactttcaggactatgttgaatagaagtgtttanagtggatacncttgt

SEQ ID NO: 2699 - DNA, 356 bp, Homo sapiens
  misc_feature (1)...(356): n = g, a, c or t
aaaaattggcttttttaggattctttttctccccctcccatcttagtcttaccttgagggaacagtcatatgagaaggaactttgtcacatctaagctgtggtgtcttccccatgtgtgtgtacaacactggtgactccaggaaccattttcacctattaccagtgttccctggggactcctcttaatgtttccaaatgggaaggacagttgatttccaacatgangttttttgttttttatccagaaatattttcagcaaaactttccaactgagtggagtctgattaaggatttatttgaaaatggtgggattcattggcccataggtacattggaaaatgtatatctcttcaa

SEQ ID NO: 2700 - DNA, 225 bp, Homo sapiens
ccatacgtcgtcataccttagacaaacggagaacgggatggcaggtccatgctagagcgcttctctggaaaggcagcttggctaacaaagtctgacgccctcagacggtgatggaagctggagacccccaagtgagatgatggcaggttccagccagtttactacagtccccagggaagggcagactgccatgatgagaagactccagattattatcatgcccag

SEQ ID NO: 2701 - DNA, 180 bp, Homo sapiens
ctgtttgatagctctactgagatgaagaaagaaagagaatacctgctcagctccagagacacgtaaagggacagagattgggggacagaaggaagtgcattaattccttccacgacccctgaagagcagcggtgggtctgagcatcctatctccaggaagcaggccagcaggcaagccag

SEQ ID NO: 2702 - DNA, 411 bp, Homo sapiens
  misc_feature (1)...(411): n = g, a, c or t
aaagtgcacatgtcacctaacgacaacgactgagatgactggaattganagaagacgcagtctccttccaggaagctcactcgattctggaaatctgggggctctggataggaactccatctttcccccaaaacttaagcacagtttcatgcacgtgatttctttagcttgatggataacatggtgtcccggcgtggaaacagtntggggaattcagtccgagtcaccccannaaaacaaccccttctcatgtnanatnaaccnagacagggccattagatccagcaactagagcactgtcaagggcatgagcaaaagcacaggcagccgccatcccaggtaaatccccaggacaggaacaaatccccctgnngacaacttccaaggggggaagagagatgacnaaggtct

SEQ ID NO: 2703 - DNA, 423 bp, Homo sapiens
  misc_feature (1)...(423): n = g, a, c or t
gtgatttaacaaatcaattgatgagccttacctaacaactcttgttctcatggtggtatttgtaggccacttatgctgaacagatttctgtaaacacccataaatatatctcaatgtcctgccaaaataacacaatcatctnaacacanaaagcaagtgaaaacactgatctcctagcagncaaaagcttaatttacccaaatataccacagntcaatanaactggccttttacccaaaaaagtattttgccacaggtaatgaggcatttancaaggggtaaggaaaactttatccactaagtttatcatcaattnattcagttaacctnctgacatttactttcagatatngngaacgaaccagaccntgcccgggccggacgctcnaatggtaaagttctgcacatatncatcacactnnc

SEQ ID NO: 2704 - DNA, 280 bp, Homo sapiens
  misc_feature (1)...(280): n = g, a, c or t
ccagcatcaggagccccgcgttgccggctctggtcatcgcctttctttttgtggcctgaaacgatgtcatcaattcgcagtagcagaactgccgtctccactgctgtcttataagtctgcagcttcacagccaatggctcccatatgcccaagtttccttcatgtccacccaaagnacccgtctcaccatttacaccccaggtctcacangttctccttgggtgtgcttgcccgaanggaggnaagtaatacngatggtgctggccccacattntctgga

SEQ ID NO: 2705 - DNA, 146 bp, Homo sapiens
ctgattgtggtggctgaaagtctgtgtgataagcttctctgccatcccttcttctcctccaatgaaaaagtctgttttgcgtcgaaggaagctgaagaaggtgttcacaagctcctgcacgccgccctcgtgctgctgagccatgg

SEQ ID NO: 2706 - DNA, 336 bp, Homo sapiens
  misc_feature (1)...(336): n = g, a, c or t
cacatagcgttcccctagggctctttccccggggagaatgtaggatacaggcccagcctcctggcctttctccatcagggactcagttgtctgggcccccccgtcactttatctgctagggtcccagaagtccagggtccccagctctgtcctnctcagggggcgntgaggtctccacagtctcctgatcccctanaacccaanagtccaggtacctcttcccttcctttctcctctagggcccaccanctctgagcagatcatgaagacaggggcccttttgcttnagggtttcatccatgatcgagcaggggcnaatgggggggggaggntccn

SEQ ID NO: 2707 - DNA, 347 bp, Homo sapiens
ccttgctgcgggggcactgctgctctactgctggctctcgagaaaagcagggagaaagcctgcctctgaccccgccaggagcccttcagactcggactcccaagagcccacctatcacaatgtaccagcctgggaagagctgcaaccagtgtacactaatgcaaatcctagaggagaaaatgtggtttactcagaagtacggatcatccaagagaaaaagaaacatgcagtggcctctgaccccaggcatctcaggaacaagggttcccctatcatctactctgaagttaaggtggcgtcaaccccggtttccggatccctgttcttggcttcctcagctcctcaca

SEQ ID NO: 2708 - DNA, 221 bp, Homo sapiens
  misc_feature (1)...(221): n = g, a, c or t
ctggtgctcccgagcttgggagagggcagcctgggcattcagagcgggattatctttatccacgtctgagtcgagttcctgacaagccacgcagtagattttccgctgtttgtcttggaggaggatcgtcccgcagtccgcacacgtctcgcccancatgcggtaaccgcgcagcagatagtcgcccatgagccgggagatgcgatcttgccgnatcccgt

SEQ ID NO: 2709 - DNA, 113 bp, Homo sapiens
ccactcgtgctgtacactggctaagaaactttatactcttctccagcttcttaatgatttcctgtgcctggttgtcatcttcacacagaggtgttaaagactctaatagtttt

SEQ ID NO: 2710 - DNA, 200 bp, Homo sapiens
ggcattaatactaacacagaatacttccttgaacattctgcaaaagtaggtgcagagacagaattacttcttcatttccagattaccagtatctataggactattttgagaaaagctgggaggcggagcacctcccctccccaatgtcattttctttgtcaaagcagaagagtcgaaggggtttaggtggaggagggcag

SEQ ID NO: 2711 - DNA, 254 bp, Homo sapiens
cttgaaaccttggaggaacccatgctacaatcaattgctaactaaaagcaattgtacatgtatttaacattttaccagtttctgcttctaaatttaatatagtaattccaaccaaaaaaatagtatctctgtaacattttatctatgtccactgcaagctgcagagtctctgttgccaagatttcttgacacatttaatgttttacctaaaattgtggtcagattgagcaatatcattatcctaaattatgttt

SEQ ID NO: 2712 - DNA, 243 bp, Homo sapiens
  misc_feature (1)...(243): n = g, a, c or t
ctgtagcttctgtnngacttccactgctcaggcgtcaggctcagatagctgctggccgcgtacttgttgttgctttgtttggagggtgtggtggtctccactcccgccttgacggggctgctatctgccttccaggccactgtcacggctcccgggtagaagtcacttatganacacaccagtgtggccttgttggcttgaagctcctcacaggagggcgggaacanagtgaccgangggggc

SEQ ID NO: 2713 - DNA, 344 bp, Homo sapiens
ggtgcaaagcacaagaagtcagtctaaactgcagtgaaaacacaaagattttagaaagggtttcctgaagatagatagatagatagatagttaaaccttggaaggttaccttctcttcccagttctactgaggaacatcagaaactcagcccataagccctacccagcatggtaggtctttctcatagatgagaaactcctaggttttctctccagatatgagttgagtagttagttgagtaaaaggagggggcaaaggttctgaaggcccagagagctgcccacctcacaagcccctgggctccagaaccagccagttctcagtgaccatctgcacatcctgg

SEQ ID NO: 2714 - DNA, 368 bp, Homo sapiens
aaaccattaaagtaaaatccataattttctacagagtacaacacaagttcacacaaaaaagacattttcttttgcaaatcaaaacaggaaagaaaggaaaagctcaaacaagataaaggaaaagcatttctacggctgaatcacgactgagttgattgaatcccgttgttgctgcagaacagactgtgcgtttggtcatagtggcaatttttttttctcttcacattgtgaaatcactttacattgttttctagtagaaaaggcaaaaaactgtacaaaacccctagtgttaaatacaacgtttgtaccaataaaaaactcacacaggtttgtctccaaaatgtaaagtttcttttttttttcttttt

SEQ ID NO: 2715 - DNA, 356 bp, Homo sapiens
  misc_feature (1)...(356): n = g, a, c or t
atgagggtccccnctcagctcctggggctcctgctgctctggctcccaggtgccaaatgtgacatccagatgacccaatctccttccaccctgtctgcatctgtcggagatacagttacaataagttgtcgggcctctcagaatatagatcggtggttggcctggcatcaacagaaaccaggcaaagcccctaatgtcctaatttatgcgacttccagtttagaagaaggggtctcattaagatttactggcagtggatctgggacacaattcaatttaaccatcaccagtctgcagcctgacgattcagcaacttattattgtcaacattattctgcatctcttcgcagttttgg

SEQ ID NO: 2716 - DNA, 396 bp, Homo sapiens
  misc_feature (1)...(396): n = g, a, c or t
ccaacaatttttttanaagtagcatcccaagcagcgtgcctaaacattacattgcatatggaaataaaagaatcaaacgtctaatgccttattatttctgatttcctttttcattttaagtggtgtggagattccagcactcccaggacagtggagtcagcagtaagccctgggacaggtggcaagggtgggtcccttgacctttgcacgcctcctcaggaaccccctttcccgggtgagcccctctctgaagagactgtccttgggcctcctctggaagcagcacccccagaggacagggctcctcctgcttgcctcagggctgcctgacttgaatggcgttggacctcggggattactggnagataatatgctctggtctcgcctggcggtgag

SEQ ID NO: 2717 - DNA, 352 bp, Homo sapiens
  misc_feature (1)...(352): n = g, a, c or t
ccttaggacaatgggggctgtggcatgcgtcaggttacctgccttgatatgggatcgtgacaggcccctccctatgtgcaggagacaagcagcccaaggaacaggagaaaaacccagtgttggtgtccccagagtttgtggatgaagctctgtgcgcntgcgaaggagnaccttagcaacttggcccacatggacatcgacaaggacctggaggccccgctgtacctcacccccgagggctggtccctcttcctccagcgctactaccaagtggtccacgaaggggcagaactcaggcacctcgacactcaggtccagcgctgtgaggacatcctgcagcanacctnggccn

SEQ ID NO: 2718 - DNA, 484 bp, Homo sapiens
  misc_feature (1)...(484): n = g, a, c or t
ctgagtaaatggattactgcagtttagacctggtgaatcaagaaggtggcattcagtagtgagacttttattatcaaatagttctgactgagaaattttagtttccccttcttctaagatgctattttgtgaagctgtatttttttcagggctactcatcaaaacatcctgtgatgtaattgaagaattcagttccattccttccacaacatctgaaattccttcttttttgttagtattaatatcatctgctactccaccagcaagaagaggcaaactcattctctcactggataaacaatccaccttcaagtctgtcttatttacaacatggntttcttcaattaaatctggtaatccaggacactgagcatcttctatgctgctcctgctttcaggaatactcaaaaacaaagtcttcttcacatgttcacttttcgtattctgaggaccggcattttctggnggatgtagtttgttgtgg

SEQ ID NO: 2719 - DNA, 244 bp, Homo sapiens
  misc_feature (1)...(244): n = g, a, c or t
nctgtgcgtgctgtncngaaagcctcccgccctccctgcagctccccgccctnngtggcccagggctttgttgaagtggaactccccacttccaacctggtatggctccttctgcgaagggaagctgatcccagcctcctgagctgaatccttcaaaggcacagcaggcagaatgagggccacaggcaggagtggtgtgggcacactgcttaggagtcaacatcttcatcattgggctttcttt

SEQ ID NO: 2720 - DNA, 287 bp, Homo sapiens
  misc_feature (1)...(287): n = g, a, c or t
ccatgtccccntntttgaagccagagaatcgctcagatatccctgagggccggtcgttatcaaaagagatgattaggacaggggcctggcctggcttctggtaataccagtgtacattgttactcccaatattgtttcccccacaggtaatcttggccgtctttcctggggccactgacactgagggtgtctgagtcaacacataggaggtcacagagtctgtgcagtgagagaggaggccgaggaggagaacggtccaggccatggctgaggcaccaccagtgctg

SEQ ID NO: 2721 - DNA, 523 bp, Homo sapiens
  misc_feature (1)...(523): n = g, a, c or t
ctgagtttccttccnagactcctcctacccccaggtgtgcccccttagcctccggaggcgggggctgggcctgtatctcagaagggaggggcacagctacacactcaccaaaggcccccctgcacattgtatctctgatcttgggctgtctgcactgtcacaggtgcacacactcgctcatgctcacactgcccctgctgagatcttccctgggcctctgccctggcctgcttcccagcacacacttctttggcctaagggcttctctctcaggacctctaatttgaccacaaccaacctgggcttcagccacatcagtgggcactggagctggggtgcacatggggcctgctcaccatgcccacacatctccagccagccagggccctgcccagcttcaatttacagacctgactctcctcaccttcccccctgctgtccagagctgaacatagacttgcacttggatgtcacctggagtgtcacatgggagtgttatggnagcatcataccaaggacctgc

SEQ ID NO: 2722 - DNA, 284 bp, Homo sapiens
ctgggcagactgtcgggaatccataggtgagctggggacccatgtacccatggctgctggggctggggcagggaaggtggcggtgaggagaaggaagggccagcctggaagaccacgcccactccatctcgggagcaagtcttggaagggcagcagttaagggagagaccttcgtgctgagtgtccaccctggggcttccaacaagggcaggaagtgctctcactactcctaaaaagtgctgggaagcaaaatggatatatcagggagaaaagctgaaaagcac

SEQ ID NO: 2723 - DNA, 423 bp, Homo sapiens
ctggtggaggaggaagaacctatgaatctctaaggctctggaaccatctgcccgcccaccatgcccttgggacctggttctcttctaacccctggcaatagcccccattcctgggtctttagagatcctgtgggcaagtagttggaaccagagaacagcctgcctgctttgacagttatcccagggagcgtgagaaaatccctgggtctagaatgggaactggagaggaccctgagaggagacgggctgggcggcgacccccacagggctctcgagaacagattctcccctccagtatgggccctggctgtggcccccattcctcaggactgcacagaggaggactggctccggctccgtcgggctcacccttaaccactattcctggctctgcaaaccccagactttgcacacagccccagg

SEQ ID NO: 2724 - DNA, 301 bp, Homo sapiens
  misc_feature (1)...(301): n = g, a, c or t
aaaggaagtctttntgaaggaatgaaagttgagcaggaatcttcgtctgatgataaccttgaagactttgatgtagaggaagaagatgaagaagccctaatagaacagagaagaatccaaaggcaggcaattgttcagaaatataaataccttgctgaagatagcaacatgtctgtgccatctgaaccaagcagcccccagagcagtacgagaacacgatcaccatctccagatgacattctggagcgagtagctgctgatgttaaagagtatgaacgggaaaatgttgatacatttgagg

SEQ ID NO: 2725 - DNA, 149 bp, Homo sapiens
cgaacttccgcttggtgaacgtcacctgccgattcctttggtccaggatgcgggagatctggatttttttcctccccatcgtcccaggctgagtggaatgatctttgtctgctcggcctgggccctgggacgctgggcgcacggacccg

SEQ ID NO: 2726 - DNA, 591 bp, Homo sapiens
ctgatggggtggtgccatgaagaaaaagagacgcttcaacagtattgataggttgatgagttgataacattctccagggcatgacttgatcagatgagccactatggtgacatggtgtgcacacagttcagcagtcccatatcgagcaaggaagcaccatgcatccatagctaacaaagaggtgatcatattagcactaagtacagcattcagcagagcagcatccagttcagcaaacagtgagggatgaaaggaagtaataaatgtacacagatgaacacaaacatgctgatacaaggtgacagccacctcagctttccccttactctttaatccctgtaaatgaacaggtagagagagttcaccagaacactgctcaaaactgtagaaaacggctttgagtagagatatcctggttgtccgtttctgagacctggctgtctgtgcaccacagggtttgcacttccttagctgagatggcagcttatccatgacaacaaccagaagaagacattgtggaaaccgcagttcacatggcaggtctaatttactgtccaaaaccacctgcatgaaaggctgaaatgtgagcag

SEQ ID NO: 2727 - DNA, 420 bp, Homo sapiens
ctgagaaccatgggttaagacccaaatagaaagtttaataaaatgttaaaataaacacctagccaaaccctgcattcagtattccagcaaagctatggtcatgctatcatcaatcctgcctgtccaacgtctcatgacatttctccctcttctgttaataacacaaacagattcaatacaaactgccaaaataccatttttagccacgagggctgagccctgtgctctttgccaatagcagcaataaagctgggcagaagctaagcccaggactgcatggaatattggctatctgtggtagtagcacaaaataagatgtataactgaatagtctatcattttgacaaatctggacttcaaaaaggatgctgggttttttttctcttaaaaagatttattatcaaaaagtttgctcccttt

SEQ ID NO: 2728 - DNA, 298 bp, Homo sapiens
  misc_feature (1)...(298): n = g, a, c or t
ccgatgagttacagnctgttagtaacatgaggggacattttggtgagaaatgggacttaactccttccagtgtccttagaacattttaattcatcccaactgtctttttttccctaccattcagtgattactgtcaaggctgcttagaatccaaacttggatttttgactctggcaaagcttttagaaatactgcaagaaaatgatgtgtacccaaacgtgagcataggaggcttctgttgacgtactccaacagaagaactgtgtttcaagttcaatcccacctgttttgtggtcag

SEQ ID NO: 2729 - DNA, 476 bp, Homo sapiens
ccatagctgtcacttcctgttgcatcgtgtaagcaggtacataatgtctgatggtcctcctttctgtgatcttaagattggttggtgggtccaggggtggtcagcctaatccctccattatgcagtccctgggtgccttattcttgatctgtaaaatgtgactagattaagcacaggggtctctactccacagggatcttatgtgaatgaaatggtataacagattagaaagcactttgttttaaggagcccatagcaatcagaccaattctggacttctgctatagagtcagatctgaagggcacaccttttcctctaaggtccacagctttttttcactgttgactttctaaccatcatcattttgggggtttggcttttagctgcagtgttgtggtataaatggcacgagtgattggaccaagtggcccaccagcatcttgcccctcagatcgaaaagtggaggtaattttgt

SEQ ID NO: 2730 - DNA, 196 bp, Homo sapiens
  misc_feature (1)...(196): n = g, a, c or t
ggtccaggctgtgttggnctatatcctncatactgntgaccttgtccctgtgggtagttaggatactgaggacctggaccaccctgtgaaggaccgtagccctgctgctgtcctgggtaaccttgctgccctgngtactgctgctgctggggtggatatcccatgttgtggaggtggtccctggtatgcatcttgc

SEQ ID NO: 2731 - DNA, 284 bp, Homo sapiens
ctgtggtagagtgctgatcttagcatgcttcgatgtggcatacttgttcttgacagtcatgtgctttgtaagtccttgatttaccatgactacattcttagccaggtgctgcataactggaagaagagattcttcagtatatgacaggtaatgttgtagagttggtgtccattcaccattatccagaattttcagtgctaagcaaaaagctcctgctgcaatttgagaaggaggaaagtgcaccatgtcatagtccaacatagttagttccatcaggtatttgg

SEQ ID NO: 2732 - DNA, 115 bp, Homo sapiens
aaaaacatcaaacatactcaaaaacaggcaagctggaaagataaacaacatgacaggattcccagtttaagtcaaattcctcaataaaacaataaatgcccacgtgtttaactgg

SEQ ID NO: 2733 - DNA, 144 bp, Homo sapiens
  misc_feature (1)...(144): n = g, a, c or t
gccgccgtggantccaaaatttcgggagctgtgaccctttcctcatgtaaaacgagtagtcttggacggtgagcggacagttgccttcaacttttgggaagagctgccggttcggtggaaaagctgtggctgggaatcaggagg

SEQ ID NO: 2734 - DNA, 202 bp, Homo sapiens
  misc_feature (1)...(202): n = g, a, c or t
ctcaactgtggttgatntntctgtgcccggaaagtttggcatcattcgtccaggctgtgccctggaaagtactacagccatcctccaacagaagtacggactgctcccctcacatgcgtcctacctgtgaaactctgggaagcaggaaggcccaagacctggtgctggatactatgtgtctgtccactgacgactgtcaagg

SEQ ID NO: 2735 - DNA, 356 bp, Homo sapiens
ccactcttcaggaggatgtcttcactggtgggccccacgcaaagcttcttcatgagggaatctaagactttgggggctgtccagattatgaatgggctcttccacattgccctggagggtcttctgatgatcccagcagggatctatgcacccatctgtgtgactgtgtggtaccctctctggggaggcattatgtatattatttccggatcactcctggcagcaacggagaaaaactccaggaagtgtttggtcaaaggaaaaatgataatgaattcattgagcctctttgctgccatttctggaatgattctttcaatcatggacatacttaatattaaaatttcccatttttt

SEQ ID NO: 2736 - DNA, 332 bp, Homo sapiens
aaagaactaatttgtaaattatgacacaaaattttattaacaaggaaatatccattaattgactactacagtaaaaactttataatgcttgtatcacgaagaaagaccttccttttccttatatattaattgaactacataggcttgctgtacattttgttattcatgttataagaattctagattccattgcttttgaaatatgtttctttttaggaactaaaagtcaacttatagtttgatttctgttttatttgtactgtgtttctgattttgtgggtttctaaataaaaagatcaaacccaccactttcaatatactgttttctattt

SEQ ID NO: 2737 - DNA, 354 bp, Homo sapiens
ctggctggcaagatcacgggcatgctgctggagattgacaactcagagctgttgctcatgctggagtctccaggatccctccatgccaagatagacgaggcagtggccgtgctgcaggcacaccaggctatggagcagccgaaggcgtacatgcactgaaaccagaaaaggaaatcctcgcttccatggctgccaaaaggacagtgtttctggctctcagccctaaggccctgcaaactctaacttatttcccaattagtctgtatctatacttgggctctgtatgtgaatgaaggttggtcacccatccagcctattaccttttgctttgtgtattaaaagtgctgcaaaatc

SEQ ID NO: 2738 - DNA, 119 bp, Homo sapiens
  misc_feature (1)...(119): n = g, a, c or t
ctgtatgctctggganccctcaaccaccttggggagctcaccacgtctggtcgaaagatggcagagctgccggtggaccccatgctgtccaaaatgatcttagcctctgagaagtacag

SEQ ID NO: 2739 - DNA, 438 bp, Homo sapiens
  misc_feature (1)...(438): n = g, a, c or t
cttctacaggcccaagggtcgagaggaggagagtgatcaaatccgggagaagttcgctgttcctgagagcgatcatttgacctacctgaatgtttacctgcagtggaagaacaataattactccaccatctggtgtaacgatcatttcatccatgctaaggccatgcggaaggtccgggaggtgcgagctcaactcaaggacatcatggtgcagcagcggatgagcctggcctcgtgtggcactgactgggacatcgtcaggaagtgcatctgtgctgcctatttccaccaagcagccaagctcaagggaatcggggagtacgtgaacatccgcacagggatgccctgtcacttgcaccccaccagctccctttttggaatgggctacaccccagattacatagtgtatcacgagttggtcatnaccaccaaggagta

SEQ ID NO: 2740 - DNA, 332 bp, Homo sapiens
aaaggtccactttcatgaattgttttaagtcctcactttattttcttcaataattaaagatcatatgcatatttattggtaaaatacagtttgggtagtcaataaactcaccctggagttcccaaatgacattaaattcaaatctattcaggaaagaatctgggaatacaaccttcccatattcagaggttcaactatgctagattaaggtctactagaagcatctctagtaacccaagtaaaatgctatcacaaacaccaatttctaataagtttattacaagaacataaattgatctgtgcatatgatctttaatttatatcccagattt

SEQ ID NO: 2741 - DNA, 492 bp, Homo sapiens
ccacaagatatgttctagagacgtccatgagtcctcttgctgtgtgggagcggcatccacagacttctggaataattggcctgtgaggaagctcatcaaagctgcaaacagtacaatgaatgcaatagagagccagagggccttattagcctttctgatggaggacttgagatttgttgcccaggaagctattgtgtcataaactgaagagacatcccactttgatggattatttttcttttcagaaagacttggcttccttgtcctttctactgtttcttctccagatggctctgagtcatctttagtttttagttcacatttttcttcttcagcatctgcccaggaataggtgctaataaatcgaggtaatgagggacggtgttcactctgctttgaccccaaaatacgccaactgcttgaccttctactgaatcgatcattattttccatcccagccaccattcctgcatttccaatatttctgggtaa

SEQ ID NO: 2742 - DNA, 495 bp, Homo sapiens
  misc_feature (1)...(495): n = g, a, c or t
ctgcgtttctgtggnctctaaccgaagggcaatgcagccctcgccataggattcgtcgctgtcagaggacttgatgctgatgaggatgtgctggtctagcaggtactcagggtcagagataatgggcttcagctttggaagagtctcaccaaacttcaccaccagctccccctcacttccttcttcattttctccttcctgactcttgacaaaactctccaagcagctcgagtggaactccaggtagaatttggtctgggacttggtcttcaatgtggcatagcacctgagaaactcaatctgtccttggctgtcaacagtcccgggaccgttcttggagacaaactgggaagtgactcctgcctcaaatgtggcaaagacagggctgtggtcactcgtcatgatgtcgctggtactgccataagactgacacaccacgtgcaccaggggataagacttccagangactcggtcacaccaggaaggcaagttgta

SEQ ID NO: 2743 - DNA, 275 bp, Homo sapiens
  misc_feature (1)...(275): n = g, a, c or t
ctggagggaagaantcttttgttgcctntgagtccctgcctccccttctgatggggtcctggctgtgaggctgtcaagctgcttctgcaacttgtaccttcgggcggctaacagaggtagctggatctgcgggtccaccaggccctgcagctccatgtagacttgagccgtgtcactgagtggagcctgggcccagccggagggagctgctgcgcctgggggtaacaggcccacanccccacagtagcccagggtgcccaggggctccaagaagg

SEQ ID NO: 2744 - DNA, 257 bp, Homo sapiens
  misc_feature (1)...(257): n = g, a, c or t
ctttcatactcacggcagcaagatggaaacgtgctgtgaatctgctccatgacctccgtgagatccgtgctggtgtcgtgcggtggggccagcaggtcctctcccgctgcctggtggaactgtgggccggaggcatctggatcaagcgagtagctcantgcagaatgctgaggagaagcccatggggaaacaccattgattcgggaatcagattcaggctgctccatcagacctgcccgggcgagcgctcggagccc

SEQ ID NO: 2745 - DNA, 288 bp, Homo sapiens
ctgctgggaggctctggccccactagtccctcatggccctactgaactggctgggaggctgctggaatggcccttggtccacagctctccacaggcaagaggtcaactgctgcttgaaagaggtagacaaaagttaggttgatggcgaaatgtctctgggttacccagtcttctggagcagcaagctgagctttaatgggctaagcattagggtgttacagaaaatttcaaatgcagccatctcccttggggcagatctacctagttcatgacagtatgtgcggctgg

SEQ ID NO: 2746 - DNA, 175 bp, Homo sapiens
  misc_feature (1)...(175): n = g, a, c or t
aaaaattgattcanaaaaacttgacacctgtcatgtaggccacaaaatagtagcgaactatactaagtggtatagcccactgtggagtgtggtcttttactcttccaaatagcccaagttggcaaaggttacttaaaaacctgccccccaaaaagctaacttttggtagattttt

SEQ ID NO: 2747 - DNA, 448 bp, Homo sapiens
aaataaaaagaaaacctctaaattggtaattgaattacctccctgtagctttatagtttgtgacatttcttgaccttgctagttctttcattagatctgcgcaagatctagtcatctggttaaggattttaagcagatgcaactataaacccaagaaactgtattactattactgttggtcatactaaacctgtctatttcctgaagtatatgacccacaaggatgtggaataactaggagaaactgtttttgtacactgtacatccttagtatttttacacgtatatgatagggatgaacatgattttccttcgtacagacagcttaaataaagcactatgtcaatctgctacttctctgtttattgttgttggatgtggttctataatccccccaaattaaatcttctttaatgaaaacatgatttttaatagccccagacctcgc

SEQ ID NO: 2748 - DNA, 145 bp, Homo sapiens
  misc_feature (1)...(145): n = g, a, c or t
cagtatgagggggagaagggtgggttctcatggatcgaagtgaccttcaagaaccccctggtatgggttcacgcatcccctgaacacntggtggtgactcggaaccnaagaagctctgcgtacaanttggaaggagaccctattc

SEQ ID NO: 2749 - DNA, 274 bp, Homo sapiens
ccagtgacacttttgcctgaatttttgtcatacatgtggaaagaatgaaatatgcagccatgtggaggataaacaagacaaagtctaatttcattaaacattagagcatctcagaggagacccccagtgagtacctcctctctgtaggcaagtagactggttgagtgttcagctctaagcagagagggtagctcctccctacagccggtcgtcctgtggtcttcccatttctcaggagagagggtagcttctccctgcagctagtcgtcctgtc

SEQ ID NO: 2750 - DNA, 405 bp, Homo sapiens
  misc_feature (1)...(405): n = g, a, c or t
taatattaagtatgtccatgattgaaagaatcattccagaaatggcagcaaagaggctcaatgaattcattatcatttttcctttgaccaaacacttcctggagtttttctccgttgctgccaggagtgatccggaaataatatacataatgcctccccagagagggtaccacacagtcacacagatgggtgcatagatccctgctgggatcatcagaagaccccccagggcaatgtggaagagcccattcataatctggacagcccccaaagtcttagattccctcatgaagaagctttgcgtggggcccaccagtgaagacatcctcctgaagagtggcnttggaccacattgcattncaanagggcctntcattggctctgccgggaaagtcccattttact

SEQ ID NO: 2751 - DNA, 448 bp, Homo sapiens
ttttgtgtaccttgatgggcatgtttctagagtcagaactatatcacactgtgtcagggggagaattgcaaaaaaagaaaaaaaaccctacacaatattcacacaggggcagcttctttgacacttgagtgtctccctgagctaaaggaagcctcacttcaaaaacacctgagtcctgtcacaaaatcagctatacccagggaacacccagcactttcacggttttgtctgattctttatttacatatgcataattctatagtgttaatctgcatgatcacagtaagcacactgaaaacagcacctcagagtgagggctagatttggggtcgggtgtccagcctgtaccctcctgtcaccttctgtggtgcccccgtgccctgctcctcagcttgtcactagggagtcagcctgcggctccgctcctgacccatggagcgtcaatcag

SEQ ID NO: 2752 - DNA, 331 bp, Homo sapiens
  misc_feature (1)...(351): n = g, a, c or t
ccagtgatcattgnaaatgttagccatacagacttttaatgcaagtagtgctagtctcaacagacttgagagcttcccactccaactgccccgttgggatgccaattgtagactctttctgtaacacatctctgcagctctcatcattccttgggattgatacacatgtgccagccactgccaagctggaacagaggttgagttggacatgactgttttttgtagttcttcaagtacagcgtctgggagtggcttttgtgactccaggagtggtttacactgaacttgtctcaaaagtaagataacggctggctgatcagggttacttttt

SEQ ID NO: 2753 - DNA, 233 bp, Homo sapiens
  misc_feature (1)...(233): n = g, a, c or t
ngagctctaggagggaccacattggaaattccatccacccactcatccacccatctgatcattcaatcatctgtttatccaatcattcatccattcatccatccacccacccattttctgggctccaattttctgctaggccctggaaacaaaacacacaaaacccccaaacaaacaaaaaaacaaaagagtaaaagcctcatagaaaaaaagctgtttagtgaccagcctgg

SEQ ID NO: 2754 - DNA, 434 bp, Homo sapiens
  misc_feature (1)...(434): n = g, a, c or t
ctgcccctcctgggccgcttggtgagaggtttggtttgatacctctgcctccctcctgccagcatggattctgggtggacacagcctcgtggaaggtccagtaccaccaagagctgctcatccactcccaccccacactgtatcaaatgtatcacattttctcatgttgaacactttagccttaattgaaaatgagcaacaaagctggacaattgctagttgtatataaaatttaatctcaccgaatgtacagttttcaaatttcacgtgtatattaaggaactgatgcatctgagcattctgaaagaaagaaaaagaagctactttagctgccaccccattctagaaaagtctcttattttcaagctgttctaaatagcttcgtctcagtttccccaaaaggggtacccangcccctcctctgtgtgccccag

SEQ ID NO: 2755 - DNA, 293 bp, Homo sapiens
  misc_feature (1)...(293): n = g, a, c or t
actccctcagtgactccaaatcccgctttcccttgnactgatccacctggccgagacacgggcacgcggctgagtgagtccactgaggtgttctgaatcacttaagccttcctgcaacccctgcttgcccgggtcagagctcccagatgtcttagcggtggtgcaaagtctgcatgttcatatttagacgggaatgtagagaggataactgaatgcctcggctttggtgagagaactgtacaggcccctcttccctccacggggttacacatcacagaagtctggggnagagg

SEQ ID NO: 2756 - DNA, 344 bp, Homo sapiens
gggaagtcagttcgttctctcctctcctctcttcttgtttgaacatggtgcggactaaagcagacagtgttccaggcacttacagaaaagtggtggctgctcgagcccccagaaaggtgcttggttcttccacctctgccactaattcgacatcagtttcatcgaggaaagagcatgtcctttgcaacctgatcacacaaatgatgaaaaagaatagaactttctcattcatctttgaataacgtctccttgtttaccctggtattctagaatgtaaatttacataaatgtgtttgttccaattagctttgttgaacaggcatttaattaaaaaatttaggttt

SEQ ID NO: 2757 - DNA, 105 bp, Homo sapiens
  misc_feature (1)...(105): n = g, a, c or t
ctggaactgcacntagtcccagctctcctcggccgcggtctcctcggggntggtgccgtacttttggatggttttctctacnacntcccgcaagcttccntccag

SEQ ID NO: 2758 - DNA, 492 bp, Homo sapiens
  misc_feature (1)...(492): n = g, a, c or t
cctagcattttgttagggaccatgggagatgtgaaggaagttatctcacacatgatatgtcttcaaggagctaaaaatgccagtggataaaagcaaaacacatggaaaaacaaagtacaaataataatccgtgtatattgtcaaaaggaacattttatcaaaaggtaggattgtagctaaggttggcttgccttcttccctcttttattcaacaaacatttaatgaaggcccactatgtgccaagcacttggtacatgatggtgaataaaacaaacaaggtttctgccctcatttacagcctggtaggggagacagaaatgaacaagtaaaagtagcatatatataaactgcaataaatgcaatgaggggaaaagacaagatgtggtgacagacacagaagtagactgctcanggactgaagggcccgggaattgtcaagacttgaggaagaaggacaccacctgagtcaagagtggtgggggtggagagct

SEQ ID NO: 2759 - DNA, 209 bp, Homo sapiens
  misc_feature (1)...(209): n = g, a, c or t
natcggtggttggcctggcatcaacagaaaccaggcaaagcccctaatgtcctaatttatgcgacttccagtttagaagaaggggtctcattaagatttactggcagtggatctgggacacaattcaatttaaccatcaccagtctgcagcctgacgattcagcaacttattattgtcaacattattctgcatctcttcgcagttttgg

SEQ ID NO: 2760 - DNA, 231 bp, Homo sapiens
  misc_feature (1)...(231): n = g, a, c or t
cattatcatttttcctttgaccaaacacttcctggagtntttctccgttgctgccannagngatccggaaataatatacatactgcctccccaganagggtaccacacatgcacacagatgggtgcatagatccctgctgggatcatcaagaagaccccccagggcaatgtggaagagcccattcntantctggacagcccccaaagccttanattccctcatgaagaagc

SEQ ID NO: 2761 - DNA, 408 bp, Homo sapiens
  misc_feature (1)...(408): n = g, a, c or t
ctgtctcatatntccagcaccgggcaacgttacgaatggtgtaaccaccgcctcccagcatcagcataggcaggttaaagctcttgacaaattccacacacttggcgtgtcctttgatagttagattgaagcaacctaaccgatccccagatagggagtctgagccacactgtaagaccaccgcactaggctggaacatctccattactttggacatgacctaaaatgatacatcctggtcaccaccaacctcaagaaagcaatacgaggtttggagtggaaaggctgggtgcaacactttcccacccactcctacctttccactctccctcatgctatgtgggagagaaaagggagtgctaggctggagcccttgcttgcccacttgggatttcaattttccaattt

SEQ ID NO: 2762 - DNA, 277 bp, Homo sapiens
  misc_feature (1)...(277): n = g, a, c or t
ggtgcctcagccatggcctggaccgttctcctcctcggcctcctctctcactgcacagactctgtgacctcctatgtgttgactcagacaccctcagtgtcagtggccccaggaaagacggccaagattacctgtgggggaaacaatattgggagtaacaatgtacactggtattaccagaagccaggccaggcccctgtcctaatcatctcttttgataacgaccggccctcagggatatctgaacnattctctggcttcaattctggggacatgg

SEQ ID NO: 2763 - DNA, 370 bp, Homo sapiens
  misc_feature (1)...(370): n = g, a, c or t
caagtcacagtttccagcgtgctgctcagccctccgagtgtgtgtgctcatccttttcatagaagtcccatcggccatggagagggttgggctgcagagctgtgattgccagaggcccttccttgagaactgtggggaaggaggccctgggggtttcttctgtaggcagagctcaggccccagtcacctctgccaccctcagcctggcactgttgtgccagagcctctgctgcctctctcttcctacccatctgcagaccagcagaatattctccccctctcatcaccaaccaggagtttggtgtggtttctggacaccggccagagcantcactgcggggctggntttgctgggcttccctgtcaaagc

SEQ ID NO: 2764 - DNA, 198 bp, Homo sapiens
  misc_feature (1)...(198): n = g, a, c or t
gatgaagccttcctggcccgtggncagggactgngccttccaccactcgccgctctgctccaggatgcggagctgttcccccttctcaaagcccagatctccgncgtgagagggctcatagctgtgcagagcgataaccaggttgncttgcngnggggaanccggcggantggagccttcgaangnaaccnggggggg

SEQ ID NO: 2765 - DNA, 411 bp, Homo sapiens
acattatggagcagcgtccctgaactgcaggaggagaacctgcaggactcctgggtaggattgcacttttgcaataatggaaatgggagcaatgtttcagcctaagtttctatttataatggtgacaaaaaaatactgctggattcccattatgggtctcgatagagtgccaaagagttctcattgtgacagcccaactcactcagaaacaccatgagacacttttgggtgtcccttctgaagacagacactgaaagcattgaagagaaaaacagctctcagtctgaataaaattgtattacgaggttaaaagcatctgaaagagaaattcagactacatataatattagccaagtcgaccagaaaatactcccctgagaaagtttctctctaaatacccaaaatgcacag

SEQ ID NO: 2766 - DNA, 458 bp, Homo sapiens
tatgttgggagccatcaatcaggaaagccgggttagtaaagcagttgaagtgatgattcagcacgtagaaaacttgaagaggatgtatgccaaagagcacgctgaattagaagaactgaaacaggttcttctgcagaatgaaaggtctttcaatcctcttgaagatgatgatgactgccaaattaaaaaacgttcagcttctctaaactccaagccatcttctctacgaagagtgactattgcctctttacccagaaatattggaaatgcaggaatggtggctgggatggaaaataatgatcgattcagtagaaggtcaagcagttggcgtattttggggtcaaagcagagtgaacaccgtccctcattacctcgatttattagcacctattcctgggcagatgctgaagaagaaaaatgtgaactaaaaactaaagatgactcagagccatctggag

SEQ ID NO: 2767 - DNA, 372 bp, Homo sapiens
  misc_feature (1)...(372): n = g, a, c or t
ntcacgtggaccttggtcaatgttggaggtagattcagacatcaaaggctctccagttttagtggatacctgaggatcttgagactgtacattattctgaaatgatgaaggtctaggcaacagcatgtcttcagtaagaccagaataatcctcttcaataaagagtccaggaatagaagggaaaatccagtatcgtctatacatgcggtcgcgacccaagggaaagatattggtacaggctatggcactttggattttttctaagagctctttctcttttcgttggtgttcctgttttaatgcttcttcctcatcagcagtaagaggctctcttgttacacagttgatctgttcttgccttgtaaattcttt

SEQ ID NO: 2768 - DNA, 375 bp, Homo sapiens
  misc_feature (1)...(375): n = g, a, c or t
nactggcagaagaggctgggaagagctgtggagccggctctgtgatgcaggcccccgaggagccgccgccagaccaggtcttccggatgtttccagatatttgtgcctcacaccagagatcatttttcagagaaaaccaacagatcaccgtctaagtgcgtcgcttgggcgccccaccccgtctgcgtcctgcatccatctccctgttacagtggcccgcatcatgattaaagaatgtggatccctctgtctggggtgggatgccttactttgcacttaatttaataagggcattctcggaggagtagacgtttaatacgaagtggcggcatagccctgccnagatgtcggtgatggcctggatgctgtaaccac

SEQ ID NO: 2769 - DNA, 290 bp, Homo sapiens
ccatgtccccttaattgaagccagagaatcgctcagatatccctgagggccggtcgttatcaaaagagatgattaggacaggggcctggcctggcttctggtaataccagtgtacattgttactcccaatattgtttcccccacaggtaatcttggccgtctttcctggggccactgacactgagggtgtctgagtcaacacataggaggtcacagagtctgtgcagtgagagaggaggccgaggaggagaacggtccaggccatggctgaggcaccaccagtgctgctt

SEQ ID NO: 2770 - DNA, 504 bp, Homo sapiens
aaaagcccagattctactcataaaaatatgaatggagaaaagcaagtagtgtctgtgcaacacagtgcagtatattgtacagaatatttttaaggccatggcagtctataaattaaaactgatattcattaaaagaacttactgttgactacactctgagtgctcaacacatttggaaatgcagtctacataagtgctgcttaacaaaagaaacaaaatcacacacagtgtgaggcaacacataagcaggtgtaccatagagttttatctactacagtggtctatatgaataataatttacaaatgaaccagtattaatatgtccctttatgtatacggaagtcgctaaactacaaaacatgtccatttgaagtttttagacatctctgtatcatagaagcaaacaaacagcatcagttcctcagttctctgtgtgactgattattaaacaacctgtagacattgagcatgattacattagataaagcaggcaggtctagagtt

SEQ ID NO: 2771 - DNA, 189 bp, Homo sapiens
ttatcttcatttgagttaacagcacacaggtaagagtcagagacatttctaggtctttgtaggtgtgcacgtgtgacatgtcttatcaatgcagacccaccatgtgtgcaggggtggcctgggccccgctggttgggtgtccagctccttgcttttccctctttctgttttccccctgcgtccttccag

SEQ ID NO: 2772 - DNA, 272 bp, Homo sapiens
  misc_feature (1)...(272): n = g, a, c or t
tgaagccagagaatcgctcagatatccctgagggccggtcgttatcaaaagagatgattaggacaggggcctggcctggcttctggtaataccagtgtacattgtgactcccaatattgtttcccccacaggtaatcttggccgtctttcctggggccactgacactgagggtgtctgagtcaacacataggaggncacagagtctgtgcantgagtgaggaggccgangaggagaacggtccangccatggctgaggcaccaccagtgctg

SEQ ID NO: 2773 - DNA, 299 bp, Homo sapiens
  misc_feature (1)...(299): n = g, a, c or t
nagccctaaattttttccagtattggtcaacactgagggtanaanggttgggtgaacanaatattaacaaggtaaatgatctctaatcangaaggaaatgatcatcccagatgctgaattntccttgctataatactacatcctatcttctccaaaaatcacttttgaaaaangcncaccccctagattagnacttgcatacnanacttgaggacctgcccgggcggccnctctaannggcnaattctgcanatattcatcacactggnngccgctcgagcatgcatctanagggccca

SEQ ID NO: 2774 - DNA, 203 bp, Homo sapiens
  misc_feature (1)...(203): n = g, a, c or t
tcacgctggaccttctgcactaacatgtgatttcttatgattgaaggatcgtgcaagattctcttggtgtaatgcttagtctgagagctgacagatttcacaagcttatcttttttactactaaagtcatacatgctaattgtagaatatttggggtaaaaaaagaaaaaaattacattaataacatggtctttccagncttt

SEQ ID NO: 2775 - DNA, 368 bp, Homo sapiens
atgggtctcagtacagcggctccagggtggagactccggtgtcctacgtcggggaggacgacgaggaggacgatgacttcaacgagaatgacgaggacgactgacgtcctccccacttcagattcggcttcaggaaaacgtttagcgaaaagaaacttttttttaatgtgggttttctgtttccttttggcctactcccaagaagatattggtaagctattgaatttagatatgcacctctgataagcaaggattgtttcccgtaggattaggacgtgctgtggatgtgtgttttgataccagtgtgctgatgcagagcgtttatttacttgttaggattttgtgttttcatttgctatttttcttta

SEQ ID NO: 2776 - DNA, 271 bp, Homo sapiens
  misc_feature (1)...(271): n = g, a, c or t
tcacgtggaccttggtcaatgttggaggtagattcngacatcaaaggctctccagttttagtggatacctgaggatcttgagactgtacattattctgaaatgatgaaggtctaggcaacagcatgtcttcagtaagaccagaataatcctcttcaataaagagtccaggaatagaagggaaaatccagtatcgtctatacatgcggtcgcgacccaagggaaagatattggnacaggctatggcactttggattttttctaagagctctt

SEQ ID NO: 2777 - DNA, 398 bp, Homo sapiens
agctagcaaaccctcccttgccacctatgattctagaagggattcctcggtcacatcaactaaagtagctaagctactgtaatgatttgaaagtttgttatgagagaattatgctttgtcaagccaactataaggcagctttctacaacagttctgcaaaatgtttccaccacattgagcaaagctgacactagacactagctacacgtgggaataggaagatgggccagactcagagccgccgcaaaggatgaagtccactcagatttgaggcaatcctggggcaaagcactgagcaaagcaacttctctggtaatctcctcctcagccattctctacccaggatttcagaacacagaacagaagaaactgcaaaagccctgcaggatatatcacag

SEQ ID NO: 2778 - DNA, 214 bp, Homo sapiens
tttcttagaacatgtggaagaaggaaaaagacaaaaaaggaaatctggattctgaggaccacgtctcacccagggtgacatcaggaatggtgctagcctctgcaacacgacacccagtctgaagagctctatacaggtactaagactagcaggggacaccaagactctgcacaaccagattgcttgtgcagagggccacaataaaatataaaac

SEQ ID NO: 2779 - DNA, 215 bp, Homo sapiens
  misc_feature (1)...(215): n = g, a, c or t
cttcagaatatttgtaaatctacttctagatgtactacacatgatctgcttttaaactggatttgngtctatggaataaacttaagtcccaaagatagatttcagtgattccctcaatttgagcccttaggatttaggtgtttttttgntttgttttgttttgttttgntttttttttttgagcaaatgaacttatgatttggatttctgagcan

SEQ ID NO: 2780 - DNA, 445 bp, Homo sapiens
  misc_feature (1)...(445): n = g, a, c or t
ctgaagaactgagacaggaggtggcactgctctgacaccatcctttgaaggtgacagagcatctcagggcttgggggacgccagccggactttgagaggagacagaagaggtgcttgcagaggtatttcacaaagatcagggtctcggcccaaaagttgacttctgctttttcaaacaggtagtcttcttccacctaaatcagatgaaaaagccgaaagtcagtcttacagggaatggtgacaagccccagtccagaccaagcagtaccctgccagatgcaagaggggtttcccttcccccacctgacagagggtgcactcttgcctgtcaacatccatgtacacacaccacttgcagccttgaaggncaccttctattttcactcactgtatttctccaccagagaggaattttttccccagacttaacatgaccttggataaa

SEQ ID NO: 2781 - DNA, 270 bp, Homo sapiens
  misc_feature (1)...(270): n = g, a, c or t
cccatcctcagcacgtggattcgagtcaccgtgagaattccggtatctcaccctgtcctcaccntcagggctcccagggcccacactgtggggggggacctgctggagcttcactgtgagtccctgaaaggctctcccccgatcctgtnccgattttatcatgaggatgtcaccctggggaacanctnancccccctctggaggaggancctccttcaacctctntntgactgnagaacattctggaaactactcctgtgatgcnnacaa

SEQ ID NO: 2782 - DNA, 310 bp, Homo sapiens
  misc_feature (1)...(310): n = g, a, c or t
tgctcagtctgggcctaaggaagcagcactggtggngcctcagccatggcctggaccgttctcctcctcggcctcctctctcactgcacagactctgtgacctcctatgtgttgactcagacaccctcagtgtcagtggccccaggaaagacggccaagattacctgtgggggaaacaatattgggagtaacaatgtacactggtattaccagaagccaggccaggcccctgtcctaatcatctcttttgataacgaccggccctcagggatatctgagcgattctctggcttcaattctggggacatgg

SEQ ID NO: 2783 - DNA, 478 bp, Homo sapiens
  misc_feature (1)...(478): n = g, a, c or t
ccaaatctttntttttttcttggagctgtaagatcttttcttctactgntccctcacaaacaaatctgtgtatgacaacatctttctgctgccctactcggtaaattcggtcacaagcttgatcttcaagtgatggattccagtgcatgtccaaaagaaagaggtgatttcctccagtcaggtttagaccaacacctccggccaagagagagattagcattacctgagggcctctggagtggttaaatgcctctaccaagtccattctctgcttgggattgacagagccatcgatggtggcataagtcagtccatgcttcttcaggtgcaatgctacaactttcagcatgttggtccactgagagacaatgacactcttttgggatgctgaatttctttgaattgcctccaattctgccaacagagatgaaatcttggtgctctctcgcatgccttcaaaaagctccatcttgaagaa

SEQ ID NO: 2784 - DNA, 337 bp, Homo sapiens
  misc_feature (1)...(337): n = g, a, c or t
cgaggtccaaaccaggtcntcaggcatcccaggatttccaggcatcagatggagggtgagggctgcccagaaaatgtcagtgtgtgtcaacatttactgcaggttcagagctccctccggggtccctgagtacatcatgtgctcctgagagttttaagggaaagccaagtaaagacgtgatgatgttctaaacccaagcaattaataaacgccacggaaatcagtcattcacttaccaagtatttctctgctttctgccatgtcacgggcccatgatcccctggagattgagggaaataagatcacaggagctcccagtctgagtgagaaaaggcag

SEQ ID NO: 2785 - DNA, 295 bp, Homo sapiens
tttgaggaacaagaggtggacatggaagcgttcctcacactgactgacggtgacttgaaggagctgggaattaagacagatgggtccaggcagcagattctggcagcgatttctgaactgaacgcaggcaagggacgcgagagacaaattttacaggaaaccattcacaactttcactcttcctttgagagcagtgccagcaacaccagggcccctggcaacagcccctgtgcgtgatcctccttcccgcagccaccagcgtgagctctctgaatcccgggaccccttcacgtgg

SEQ ID NO: 2786 - DNA, 179 bp, Homo sapiens
gtgttggcaatcgttttcgtaagagtcagaaaaattaggccggtttcacaatatagagtgtcctttctggtcaacagtattgcttcaggacagaagagcatttcacagatctttcctgtaacttctagaaaagtcatccagccagatttaggctcaagcttctttacaaagccattttc

SEQ ID NO: 2787 - DNA, 238 bp, Homo sapiens
  misc_feature (1)...(238): n = g, a, c or t
gcccaagcacagccctgactaggatgacagcagnacaaaagaccacctttctcccctgagaggagcttctgctactctgcatcactgatgacactcagcagggtgatgcacagcagtctgcctcccctatgggactcccttctaccaagcacatganctctctaacagggngggggctacccccagacctgctcctacactgatattgaagaacctggagaggatccttcagttctgg

SEQ ID NO: 2788 - DNA, 333 bp, Homo sapiens
  misc_feature (1)...(333): n = g, a, c or t
caagtatgtccatgattgaaagaatcattccagaaatggcagcaaagaggctcaatgaattcattatcatttttcctttgaccaaacacttcctggagtttttctccgttgctgccaggagtgatccggaaataatatacataatgcctccccagagagggtaccacacagtcacacagatgggtgcatagatccctgctgggatcatcagaagaccccccagggcaatgtggaagaccccattcataatctggacngcccccaaagtcttanattccctcatgaagaagctttgcgnggggcccaccagngaagacatcctcctgaagagng

SEQ ID NO: 2789 - DNA, 449 bp, Homo sapiens
cgaggtctgagctcctctggttcttctctagacctgctccctctctgaaatgcaaggccgtgcctttaatgggcttttggcattctgtctccagacctcccttctcatctgaagggctctcaggagaacagagaaaaaaccagcctgtctccaaactggcccgtctcagggactgggggcctttacccccagtgaaagatgcagactttacagcgctgcagtacagtagagtcaagtgactccttcagatagttggatgggtctctcgatcattcctgataataacattttgcctatgttaagtgctttccacctatcatgttaccttctaactactcccttggttggatacaggtattagccccatttcacaattaagaaattgaggcttaaaaggattaaagagttttttagaggagaaacagctcttccttacagaaggatcccaa

SEQ ID NO: 2790 - DNA, 219 bp, Homo sapiens
  misc_feature (1)...(219): n = g, a, c or t
tacagggtcgaagccggcgatgaggccgactattactgtcaagtgtgggatcgtaataatgaccatgtcgtcttcggcggagggaccaaactggccgtcctaggtcagcccaaggctgccccctcggtcactctgttcccgccctcctctgaggagcttcaagccaacaaggccacactggtgtgtctcataagtgacttctacccgggagccgngaca

SEQ ID NO: 2791 - DNA, 374 bp, Homo sapiens
ccaccctgaccatttacagggtcgaagccggcgatgaggccgactattactgtcaagtgtgggatcgtaataatgaccatgtcgtcttcggcggagggaccaaactggccgtcctaggtcagcccaaggctgccccctcggtcactctgttcccgccctcctctgaggagcttcaagccaacaaggccacactggtgtgtctcataagtgacttctacccgggagccgtgacagtggcctggaaggcagatagcagccccgtcaaggcgggagtggagaccaccacaccctccaaacaaagcaacaacaagtacgcggccagcagctatctgagcctgacgcctgagcaagtggaagtcccacagaagctacag

SEQ ID NO: 2792 - DNA, 316 bp, Homo sapiens
  misc_feature (1)...(316): n = g, a, c or t
aaaaagtgaggtntttcttaaaagtttagtatacaaacaaaatgaaggtaccttcacattttactacagatgtgcagatagttttcttggtgcacagagataaggcagaattaagtcagaataaacgttctaaaactgacctccggaagaactagtcttagtcatttctttgcagagtatgtgaaccaagattcgggtttggtctttggtgttagcactgtgtcaaggatcagatagaaagtacaaatggaggggcccctttctgaggccaggccccactgttggggcatgtggggtgaccaaaggccaataccag

SEQ ID NO: 2793 - DNA, 429 bp, Homo sapiens
aaaaaagttaaatggagatcttctgggaaaccaagccatgaatgcgagtttgtactaacctagccctctggaggccacatctgtagcaatcagaataggagcttttccatgtttgaattcatttagaacccagtcacgctcttgttgactcttgtcaccatggatacccatggcaggccacccatctctcctcatttttctggtaagctcatcacatcttcttttggtttccacaaaaacaatggttttattctccttctcactcatgatctcttccattagacgaataagtttttcatccttttctacgtcatgacacacatccacaatctgaagaatgttgtggtttgcactcagttcaagtgcaccaatgtttatatgaatatagtctttcaggaaatcttcagcaagctgtcttacttcttttgg

SEQ ID NO: 2794 - DNA, 216 bp, Homo sapiens
  misc_feature (1)...(216): n = g, a, c or t
ntcaagaagctaagaagaaagaatctgttagaaatgctgaagcaaagattacaaaacttacagaacagcttcaagcgactgaaaaaattcttaatgttaacagaatgtttttgaagaagcttcaggaacaaattcacagagttcaacagcgtgttacaattaagaaagctttgactctaaaatatggagaagagcttgctcgggcaaaggcagtgg

SEQ ID NO: 2795 - DNA, 44 bp, Homo sapiens
  misc_feature (1)...(44): n = g, a, c or t
tcaagtccagtgtgtctgcctgtgactcctgcctgggggcccan

SEQ ID NO: 2796 - DNA, 347 bp, Homo sapiens
  misc_feature (1)...(347): n = g, a, c or t
ccaccatttcccntgcatcgtctctcctacgtaatcagtccctgatgaactctcttcccataaaaatccctgtgtcctaaagtcatggcgtgctctatttcatggtcatttgtagagcacagcagcactgtgcctgtcaggaaaagtgtgtgctaactgcaataagcatgatgactgccatcacggttttgttattctctgtccacctccatggtctctaaatcagacaatctttaatctgaaaaggcagtgtccttattcctccaggaaactggatagaaacgctcctcatctaatgaagtcagccctgtcatcttactgattctttcccagaccacagtgaaagg

SEQ ID NO: 2797 - DNA, 155 bp, Homo sapiens
  misc_feature (1)...(155): n = g, a, c or t
ccatgaggaccagccgcctgtccagctcatgaatacgctcattcttcatctcnatgacaaagtgtaagctctccagctcctgntcccagaactggctggggctcccataatcntgnatatgnttcttatagnttgggcnnagaatggactcctcc

SEQ ID NO: 2798 - DNA, 294 bp, Homo sapiens
  misc_feature (1)...(294): n = g, a, c or t
aaagctatctgacgctaatgacttgtacaatctggtttgcaaactctgagagacagtatcaaataagcactgtcaaagactactcccagctaatctttactgccatttttctttgaaattgtctttgggactggctatgttctcactgtagcttccgtttatcccacagcacaaaccctaaagtccatgtgcagtctccatgttcaagtataaaagtctgtttcaggacaaccctgggttgctgtagtgtttctctctctgtagtgnctacttggtgtcatgcccttggacagg

SEQ ID NO: 2799 - DNA, 311 bp, Homo sapiens
aaatccaagtctcttgaggaccagagaagcactgctacctttttctttattcaacacagataccacagaatcagcagggtgagaaacaattgcacaaaagactccagctatgtaacctgctacaaatgttacaaccagttagtgatcaggtgagggttctttgaacctggttctatcagtcgaattaatccttcatgatgggccactttgtccttccagctcttggtcttattagttgccatctccagcttctttttaacttcctcgtactgctcaagtgcttgcttccgttctaactcaagctgctccag

SEQ ID NO: 2800 - DNA, 373 bp, Homo sapiens; identical to SEQ ID NO: 142

SEQ ID NO: 2801 - DNA, 287 bp, Homo sapiens
aaaattcccaaaaggattatacaaggcagccaaaaattcacaatctgaaaaatgatcaaacacattattaacccgtccatgtgacttggcagtgaggtggcgctgaatgatttggtgcagcatctctctgcattcatttaacagcctggataacacattccggtcaaaggtataatccacctgatggaaactgaccacggtcatagcaagctgatgaactttcttcttaaatttctccatcaatgctagctcatcttgattaaactgattatccctataaagaatgg

SEQ ID NO: 2802 - DNA, 424 bp, Homo sapiens
gcgttgtgaggggtgtcagctcagtgcatcccaggcagctcttagtgtggagcagtgaactgtgtgtggttccttctacttggggatcatgcagagagcttcgcgtctgaagagagagctgcacatgttagccacagagccacccccaggcatcacatgttggcaagataaagaccaaatggatgacctgcgagctcaaatattaggtggagccaacacaccttatgagaaaggtgtttttaagctagaagttatcattcctgagaggtacccatttgaacctcctcagatccgatttctcactccaatttatcatccaaacattgattctgctggaaggatttgtctggatgttctcaaattgccaccaaaaggtgcttggagaccatccctcaacatcgcaactgtgttgacctctattcag

SEQ ID NO: 2803 - DNA, 493 bp, Homo sapiens
ccagtgtaaaaaactctctccgggtcagggatatactcagtactgagctcatgcttgggcaccagtccctgcacattgttgtagaacttcacaatgcagccatagtccttgaccctgatgatgaagccatgtgtctgcagaccaggcttggcatcggcatagcaggtaatgacaggtagtttggactcaatcagggtttttttcagggtcatcatcagcttcttggcttcagggtcacaaagcaaaacccggcacttgacctcatccccgatgtggtacttcttctctggattcttcatcaggatgtcagccaggtgcatgggaggtaccaggcccctcatctgctcgcccaccttcaccagcatcccatatgactttatggttagcactgtgccctttaccactgccccaggttcgatgtcatgatatctaaggtactgagcttcaataatagacgttcgtagagagagcaaggccagttcatccatttggc

SEQ ID NO: 2804 - DNA, 398 bp, Homo sapiens
ccatgtaagagtagggtggccgctcagacacagagttctgccaggacgctgatggtctcgaaggctcctcaaccttaacctgtcgctgctccaggtgacaattctccttttcctccatctcttgcttgatgctgcgggagcccagtccatcagaactcatctttcgaagccactggatgttggataggctattgttgatagtgcagcctgctgcctcaccatctgcacaggtctcccgtttctgctcgcaaagggctccaggtggtctaggaagattcacatccctagctgcaggttttggtcccaaggtctccagggtcacttctgtccttttggcatcatagctggtttggatttgaggccggagtcctggaggctgagttggggctcccccacag

SEQ ID NO: 2805 - DNA, 250 bp, Homo sapiens
  misc_feature (1)...(250): n = g, a, c or t
ntcgaggtccaccctgaccatcaacagggncgaagccggcgatgaggccgactattactgtcaagtgtgggatcgtaataatgaccatgtcntcttcggcggagggaccaaactggccgtcctaggtcancccaaggctgccccctcggncactctgttcccgccctcctntgaggagcttnaagccaacaaggncacactggtgngnatnataactgacttntacccnggagccgatgacncngncctg

SEQ ID NO: 2806 - DNA, 615 bp, Homo sapiens
  misc_feature (1)...(615): n = g, a, c or t
ccagtacacccatgaatttgatggagatgagcagttctacgtggacctggggaggaaggagactgtctggtgtttgcctgttctcagacaatttagatttgacccgcaatttgcactgacaaacatcgctgtcctaaaacataacttgaacagtctgattaaacgctccaactctaccgctgctaccaatgtgctgtttcctcaccacagaggttcctgaggtcacagtgttttccaagtctcccgtgacactgggtcagcccaacatcctcatctgtcttgtggacaacatctttcctcctgtggtcaacatcacatggctgagcaatgggccctcagtcacagaaggtgtttctgagaccagcttcctctccaagagtgatcattccttcttcaagatcagttacctcaccctcctcccttctgctgaggagagttatgactgcaaggtggagcactggggactggacaagcctcttctgaaacactgggagcctgagattccagcccctatgtcagagctcacagagactgtggtctgcgccctggggttgtctgtggggccctcgtggggcattgtgggtggggcactgtcttcatcatccgaggacctcn

SEQ ID NO: 2807 - DNA, 456 bp, Homo sapiens
ccatcttgaacttggaagggactatgtccagaataagtgggctcatggaactaactggttctaaagcctcaagatagggggcaatcagatttgaggctgagagaggtaaaccaagattttctttgaaggtacgggctttaagaaagcaaaagtggctgagcgtgttggctcacacctgtaatgccaaggcaggaggatcacttgagcctaggatttcgagggcagcctgggcaaccgcgagacctcgtctctgcaaaaaattaaatattagttgggcacggtggcatgtgcctgtagtcccagctacttgggaagctggggttgggaggatggctcgaacctgggaggtcaaggctgcagtgagctgtcatccttgccactgcactgtagcttgggcaacagagcaagagtctgtcttggaaagagcaaaagtaagttgctgtttgtatttccagg

SEQ ID NO: 2808 - DNA, 308 bp, Homo sapiens
aaatcacaacattctggtcgatataacagatagaaattcctgatctagacagcagaattctgttgtgttaagagagaatacacaattatagctaaactctaattctcactttatataaatttatttacactcacctaactacattattctaacaaaacactgggacaacttgtaaaagtacttatgcatatgtgcaggacaggaagagaaaataaagaatcagatttattggggtggttaagtgagatcatggatgaactgtttacttctattcagcagtagcctttgtggtcccaggcttccggtgg

SEQ ID NO: 2809 - DNA, 101 bp, Homo sapiens
ccaagggaataagcaagaggagacatttcctccctgccccagcactctgtcccaatccgagaagttccgaggctttcccggggcagtctgtgtcacgctgg

SEQ ID NO: 2810 - DNA, 436 bp, Homo sapiens
aaaaggcttccttttctgttaagttctgagacttaataaatgagataaaaacagtttcttacacctaagaaactgggttatgaaagctgtgcctaggatgttggggagagcacactgggagaaggcattcttgctggtaccttgagttcaggaatctacgttgaggcttcctcatccaccatgatcacagccccaggggatgctgggcttgttagcattcaagctctgggacctgattggcctctctgtctcctctaagtaaggacaactgatggggacagtctcccactctctgaggcttcgatgttccacgcatggctttcctcttccagaaactcccctccctggctctcccatgcagccctagtcagcagcagctcacaggtccgtggacagcgagtctgggatctgtttgccttcttcagccgatttgctg

SEQ ID NO: 2811 - DNA, 472 bp, Homo sapiens
ccactcccctttcttcttaggcagattctgccccatgtaagcaaaatgcctcagatcctggcaaagcagcgttgggggtacctcttcttcccaaagtcctggtcagttccccagaaaggaccagtcatggctgtgccagggtgactgccctcccccaggtcagccctgtcgacaaaggcaggggcttggttgtcatttccaccaagtgggaagacagtattaatagatggagaaccctctgcagtgggaagatttcagcaatgggcaagctggatagagccgtggttaggatggagttgtttgcttgttgcacttggagctctttatgaagcaagggctctgcctcccagcctgagacccagaccctggtttggacccagtagaactcttgtgggccctgggttggtgtctctgagcaaatccccaaagcaggagagtccctagcaccgtgagctctgtcagaacctcccag

SEQ ID NO: 2812 - DNA, 347 bp, Homo sapiens
ctgaatctgtctttcattcgaccccctgaaaaccctgctttgctgttaatcaccatcactgccaccaacttctcagagggtgatgtcacccatttcatctgccaggctgctgtgcccaaggtttgtaaagatcagagttcagaggtggcctggggactccaggagaaaaggccactaagtggaggaggtgggtgggagacagtgtgagatgggattgagtcatctggagatcagcacttggggagttacaggaaaagggtgtggagccactgagtatagaggggctgcctgagccctacctactgccatactgtgctctgttaaactcctgtgttcagagtctccag

SEQ ID NO: 2813 - DNA, 264 bp, Homo sapiens
  misc_feature (1)...(264): n = g, a, c or t
ncgaggtccaccctgaccatcaacagggtcgaagccggcgatgaggccgactattactgtcaagtgtgggatcgtaataatgaccatgtcgtcttcngcggagggaccaaactggccgtcctaggtcagcccaaggctgccccctcggtcactctgttcccgccctcctctgangagcttcaagccaacaaggccacactggtgtgtctcataagtgacttctacccgggagccgngacagcggcctgnaaggnagatagcant

SEQ ID NO: 2814 - DNA, 218 bp, Homo sapiens
  misc_feature (1)...(218): n = g, a, c or t
ctgctccangcnctgcancatcntcanacncagggcttgnaacttnntggncantgngattatttctctttcttnctcntntnnnantnnttcaacaaanctgtncnncnccggnattnnaaacttaangtactgancnacttcatgggggactnccacncccnagtcannttccatcacgaanatcctggngancgactnacanggaccatgcagga

SEQ ID NO: 2815 - DNA, 385 bp, Homo sapiens
  misc_feature (1)...(385): n = g, a, c or t
caagcctcatcaataactgtatccaaaaggagacgctgcttggggtgtacccagagaaaacaccaagctttcctggcttcccggtcctccctctccccattagtctttggggtgcatacataagtgttgtgtgaagtctcttggggtttagaagatcttgcactcattgatggagaagagcctccttctgtttcgtctcctggcctggttgacggcagttcggacggcgcactcaaacacctgctgtactccccgattgctaagggctgagcactccaggtagcccttggctctgacatcctgggccagtttcttcccttccatggcattgacncangaggccctgaggggccccatctccccctggtcangtctgggtggaccc

SEQ ID NO: 2816 - DNA, 367 bp, Homo sapiens
ccaaaactgcgaagagatgcagaataatgttgacaataataagttgctgaatcgtcaggctgcagactggtgatggttaaattgaattgtgtcccagatccactgccagtaaatcttaatgagaccccttcttctaaactggaagtcgcataaattaggacattaggggctttgcctggtttctgttgatgccaggccaaccaccgatctatattctgagaggcccgacaacttattgtaactgtatctccgacagatgcagacagggtggaaggagattgggtcatctggatgtcacatttggcacctgggagccagagcagcaggagccccaggagctgagcggggaccctcatgtccatgctgt

SEQ ID NO: 2817 - DNA, 373 bp, Homo sapiens
  misc_feature (1)...(373): n = g, a, c or t
tcgaggtctggacttctttaagcgactcnttcaactgtgtcacgtgtcctttcagtagtatctgctnccgtatggactgctctaactgccgcttgagaagtgctttactgcggctcgagaacccatccggcttcttcttctgtgtggcggcgacagcacagagagaccactctaactctcctatacgctgcgatgaacgttgcaggcggccggccagatccttggactcttcttcaaagtatctgagagaatgtttcatgtgatacaggtccgtatttagtttctttttctctatgntcaatctctgganttgaccctctagctccctttcagctttctgnttctcattgtctgctttctttncttcttncag

SEQ ID NO: 2818 - DNA, 226 bp, Homo sapiens
  misc_feature (1)...(226): n = g, a, c or t
cctgtcctcttaggactcaaannnagaccctggactgattttccagtccccaccgtcctgcgggacagccagcgtatgctaatgttgcaaacccatgataatgtatgtggaatatcctgccattggggttttacattaaaaccccanaatggctgcagaggggngaacaggccccaatatttggggngctgtgatacccctcttctacccacaaggagccctctcg

SEQ ID NO: 2819 - DNA, 436 bp, Homo sapiens
  misc_feature (1)...(436): n = g, a, c or t
cctaaaaaagcggnctcggngggaatgcatttctcttgctccacgtctattttagttgcatatctgtagtgatgacaaatgcctccagccttgtcctctgcaaggctgcactgggctgcatacaggctcctgtctcaggtgtctggtttcctccttgaaaggttggggcagcagagtcagccctgtctatctgggcaaggccctgacacttggaagcatgaaaagccatggttcaggtggagtgagcttccaatgcccttggaaggattttatttcanggccgtggggcttaaaagtcatcactgtacaatccactgggagcaaagatcaagataacatgtgatggatatcataaaagcggaacagaacatcccattgctcagagatggganaacaactctgaatggagagggctcaggttatatacattcaccct

SEQ ID NO: 2820 - DNA, 294 bp, Homo sapiens
ctgaatctgtcgtgactttcctgagatctacccggggcttggctgtctgttctgggcactggctccgagttcccctcctgggatttgcaggagggcagtactgaacctgcattcttctccttgtaaatgtaggccgggtgcccctgttctccgggtttggaacaatacgaggttggtgctgatgggatttacttgcgtacgtgctcttcacaaaaacaccgtggatgctgaagttagagcacgtcgccacagagcttgacatcaatgttagagtgtctcttactccccgcccag

SEQ ID NO: 2821 - DNA, 277 bp, Homo sapiens
ctggtggtatctgagttgacttgacagaacactgtcttgaagacaatggcttactccaggagacccacaggtatgaccttctaggaagctccagttcgatgggcccaattcttacaaacatgtggttaatgccatggacagaagaaggcagcaggtggcagaatggggtgcatgaaggtttctgaaaattaacactgcttgtgtttttaactcaatattttccatgaaaatgcaacaacatgtataatatttttaattaaataaaaatctgtggtgg

SEQ ID NO: 2822 - DNA, 246 bp, Homo sapiens
  misc_feature (1)...(246): n = g, a, c or t
aaaacgaccaccacagatttttatttaattaaaaatattatacatgttgntgcattttcatggaaaaaatttgagttaaaaacacaagcagtgttaatttcaaaaacccttctgccccccattctgcccctgntggctttttttggccnatgggcatttaccacctggtttggaaagaaattgggcccatcgaactgggaactttcnaaaaaggcattacttnngggcttcctggaagtaaggccn

SEQ ID NO: 2823 - DNA, 341 bp, Homo sapiens
  misc_feature (1)...(341): n = g, a, c or t
ttttttgantcaatttcctttaatgantacttgttacagnaaaanaggnataaagtcctgttcccaagtccaaaccactttttaacttaaatcttgagtttttctgaattactcaatttgaagtaattctntttatatctgaaaaatggttttattgaaacntttgaaantaaaaaatatgcattgcaanaagcatatgacaaacattntganagtacaaaattagttgtaaaaaataacataatttaccagtaaacccactcatataaaaatgtgcaaagccttttgatataaaaagttttgtcaccaagcacctatttttataacttaacttcccatgg

SEQ ID NO: 2824 - DNA, 521 bp, Homo sapiens
cttacaccctttttcatcttgacattaaaagttctggctaactttggaatccattagagaaaaatccttgtcaccagattcattacaattcaaatcgaagagttgtgaactgttatcccattgaaaagaccgagccttgtatgtatgttatggatacataaaatgcacgcaagccattatctctccatgggaagctaagttataaaaataggtgcttggtgtacaaaactttttatatcaaaaggctttgcacatttctatatgagtgggtttactggtaaattatgttattttttacaactaattttgtactctcagaatgtttgtcatatgcttcttgcaatgcatattttttaatctcaaacgtttcaataaaaccatttttcagatataaagagaattacttcaaattgagtaattcagaaaaactcagaattaagttaaaaagtgggttggacttgggaacaggactttatcctcttttactggaacaagactcattaaaggaaatggataaaaaa

SEQ ID NO: 2825 - DNA, 152 bp, Homo sapiens
  misc_feature (1)...(152): n = g, a, c or t
tcacatattanacacnataatttttattatggaaattaatctttacatacaaaatcagctacgtaattttacttacaaaacaataaaaactggtctttactgnggcaacaaaagaagcattttgacaaatgaaaaaaattaatgcaaacaaa

SEQ ID NO: 2826 - DNA, 285 bp, Homo sapiens
  misc_feature (1)...(285): n = g, a, c or t
ctgtctcatcagccctcccctccatttattcctatttttctgtagttaagaatactgtaaaaatgtgactattccttaatatcagaaaagaatgcacaggctgagtcttccggtcaaaagttaaatactgatggaatcaagtattttgtatgaagttctcatttgttatctctaacgctattttgtgttttgcatatagtattatagtatgtgtatatcactttttgtatagagtaagcaattgaataatttgttaataaaaataataccacattgactgatnaa

SEQ ID NO: 2827 - DNA, 456 bp, Homo sapiens
  misc_feature (1)...(456): n = g, a, c or t
tttttccagttttatgatttatttaacttgnggaacaaaaataaaccanattaaccacaaccatgccttactttatcaaatgtataanaagtaaatatgaatcttatatgacaaaatgtttcattcattataacaaatttccaataatcctgtcaattatatttctaaattttcccccaaattctaagcanantatgtaaattggaagttaacttatgcncccttaactatcttaacaagctttgagngcaanaaantgaaaanttcaaatctgaccaaaaagttgatgntggaaaaaaaaattcttcaatcncttgcctntaaacanangatgtaaaatggaagttaacttatgcncccttaactatcttaacaagcttttagtgccaaaaaatgaanagtcaatctgaccaaaagntgatgttggataaaaaaatctctgcttcccactntaan

SEQ ID NO: 2828 - DNA, 317 bp, Homo sapiens
  misc_feature (1)...(317): n = g, a, c or t
gaacaagaggcttaaaaccgggctttcacccaacctgctccctctgatcctccatcagggccagatcttccacgtctccatctcagtacacaatcatttaatatttccctgtcttacccctattcaagcaactagaggccagaaaatgggcaaattatcactaacaggtctttgactcaggttccagtagttcattctaatgcctagattcttttgtggttgttgctggcccaatgagtccctagtcacattccctgccagagggagttcttcttttgtgagagacactgtaaaccgacacaagagaacaagaatna

SEQ ID NO: 2829 - DNA, 120 bp, Homo sapiens
  misc_feature (1)...(120): n = g, a, c or t
caggcataacacagaggcaatcagattccaanaataggggttgcactccagggagacaccatctggctggaccangaaagggccatgctctgtgangagcccatctaaagagctgcagcc

SEQ ID NO: 2830 - DNA, 260 bp, Homo sapiens
  misc_feature (1)...(260): n = g, a, c or t
ttttttttttttttttttttttttttactttaaanatttttatttctccaaatttgttatttatcaggagngactgaaataaaaaatacaattgagtcccatcatcatcatcatggaaatggctttaaaaaaaaactggncanatgaatattattgcttcccattttcaaccagtaaatagttgccactganaaactgacagccaggagtctgtcaaaaaatgctcaanatatgttatataatacaacatgcctgttcac

SEQ ID NO: 2831 - DNA, 368 bp, Homo sapiens
  misc_feature (1)...(368): n = g, a, c or t
ctttatctgtggaaacttcagactctcccctattactttaatttcagtgagacattattaaatataagtgggcttacacatttgttttgctttactgacaaataatacacaacttggaggctttttttcctttctattcttcctctaaatgttcaacacttttctgattttgtgatttgaggntgtttaatagcttcctgaggctccattgagaccgtatatacgtgacacttaacagtctagccttcctcggtacatatagatatatgatggnggctttgcctgtagtaaattcatgccaaaacataggctttcagtgcctattacatatggctttcagctctctctactgagggatgtangagttt

SEQ ID NO: 2832 - DNA, 111 bp, Homo sapiens
  misc_feature (1)...(111): n = g, a, c or t
cctagacactctcatgctttcaatgtggaatacgtagcctaatatgcatagaagcatgaatggcaaacttgaagancnatatnataactatttttctanntattngaagca

SEQ ID NO: 2833 - DNA, 347 bp, Homo sapiens
aaatcctcatagtcaaaaaattctccagatggacttttaatttgtaagatttgaactgtgacttgtatacatctgtttagaatcaattatatttgaaaagctgcctgtgttttaacagtcaagtgtgctaaagtttgtcaatttaagctgcttttgatttcagctaccaagatcacaggtgcactctacacataacactgacagacccataacattacatacatcttagtgaattctatcacatggtaaaatgaacagctttctttgtaactcataaaattctcttaggacatttttataaagtcacctgtttatagttctatcttttcagattccatttcttttta

SEQ ID NO: 2834 - DNA, 278 bp, Homo sapiens
  misc_feature (1)...(278): n = g, a, c or t
cctactatgtgccaaggaggggtaaggcagctagctctcacagacacaccccacagtgaaaatcacacacacacacacacaccccggcatctgtgctcactcacaggcagactgctcactttcttgcacctttcttgccatcacctcggcacacccacattcctccaataggcttgggaaccagcatggaangggcaagtgtcataaaaaaaaccccctacctaccctactnccanacttcatgccaaaaggttaactccacttcccttctggttgcc

SEQ ID NO: 2835 - DNA, 143 bp, Homo sapiens
  misc_feature (1)...(143): n = g, a, c or t
atgccttctggtgaatttgcacgtatatgccgagatctcagccatattggagatgctgntgtaatttcctgtgcaaaagacggagtgaaattttctgcnagtggagaacttggaaatggaaacattaaatngtcacagacaag

SEQ ID NO: 2836 - DNA, 226 bp, Homo sapiens
ccatttttttagttttattgttaaatggtatttttctatgtttaattataatagatctggctttttctggatagcataaagatcactgaactatatatatataagaaacaagagttctattttagcacaaaggcattttatattatttattgaatccataagtttgttttcgtcaaaaacattccatattatttctgctcctttttatttgtatagtttgttattt

SEQ ID NO: 2837 - DNA, 379 bp, Homo sapiens
ttttaactatatatcatattcatttattatcaatccacaggaaaatctgattgctacatgagctcataaaagcttttttcacctttacaaaattaaaaaaaaaaatgtgccacaaggatgtaataacaactgctgataaacaagaaaaggaatcttaaaattataaatttgctgtagaaaagataaaaaacaattatattttatttagaattttaccttgaataaaatattcccctgtataaaaaataaaaaagcttgctctggttagaattagagtatttttgtcttcaaatctgggaatttgcataatatttccatgatactttttcctttgtaccgcgtggcattcaagcatagcagattagaagggatttttttt

SEQ ID NO: 2838 - DNA, 506 bp, Homo sapiens
  misc_feature (1)...(506): n = g, a, c or t
aaaaaaaaaagttacagaaatactataacatatgtacataaattgcataaagcataagtatacagttcaataaacttaactttaactgaacaatggccctgtagccagcacctgtaagaaacagagcagtaccagcgctctaaaagcacctccttgtcactttattactcccagaacaacaactatcctgacttctaatatcattcactagctttgcctggttttgtcttttatgtagatagaatcaatcagtatgtattcttttgtgcctggcttctttctctcagccttacatttgtgagattcctctgtattgngctgattgtggatcttttcattctcattgcagaataatgttctattgtgggacttattacaatttgtccatcctattgttgatgggcacttgagaactttccattttggcgctattacaaatagtgcaactatgaatgtactgcatgttaccatcttacttgagcctttaatggacttatctcttcaaa

SEQ ID NO: 2839 - DNA, 469 bp, Homo sapiens
aaaaaaaaaagttacagaaatactataacatatgtacataaattgcataaagcataagtatacagttcaataaacttaactttaactgaacaatggccctgtagccagcacctgtaagaaacagagcagtaccagcgcgctaaaagcacctccttgtcactttattactcccagaacaacaactatcctgacttctaatatcattcactagctttgcctggttttgtcttttatgcagatagaatcaatcagtatgtattcttttgtgcctggcttctttctctcagccttacatttgtgagattcctctgtattgtgctgattgtggatcttttcattctcattgcagaataatgttctattgtgggacttattacaatttgttcatcctattgttgatgggcacttgagaactttccattttggcgctattacaaatagtgcaactatgaatgtactgcatgttacc

SEQ ID NO: 2840 - DNA, 483 bp, Homo sapiens
aaatgtaagtattttaatgagtaaatagaattaaccttttttacaaatgaaatgataggcatctatgtaaagtgggaaaaatatgtttcgtaaatatttgcatctttaatattgttagtaagtagtaaacaggtgttttgctgattgaaaggaagttatcttggtaaattgagactcaaagtgaaatacaaaaatgaaaatatttataataggactcgacttggagaaattgctattcttcctgttgtccaaaccataaatctgaggataacctgggcttttctctttcctcttctcctaaccagtttttcaccaagtcctgtgccatttcacctcctaacgtctgtcagctatccttttgcctttacctcaccactattaccctagagaagactttcattatttctcatctggattaccagctcgatctctaatctgcttcagttcatccttcttgctacttctaggctaaacatcaaaaac

SEQ ID NO: 2841 - DNA, 395 bp, Homo sapiens
  misc_feature (1)...(395): n = g, a, c or t
aaagattctgaaaaacacaatttttaacgcttatgtagtccgccatcaaaacatcaatgtactgaagattttaagcagcatgaggcaccatcacgtttttgtttcttccccctcatttccccgcccctaccagatctgtttttgatgtttagcctanaagtagcaagaaggatgaactgaagcagattagagatcgagctggtaatccagatgagaaataatgaaagtcttctctagggtaatagtggtgaggtaaaggcaaaaggatagctgacagacgttaggaggtgaaatggcacaggacttggtgaaaaactggttaggagaagangaaagagaaaagcccangttatcctcagatttatggtttggacaacaggaagaatagcaatttc

SEQ ID NO: 2842 - DNA, 428 bp, Homo sapiens
  misc_feature (1)...(428): n = g, a, c or t
aaacattaaacaacaagtatataatcaaaataatcctgtattacttataactgaataactattttcaaagaaactttcctccctgatgaataagaatgcaaactccaagtgtatatagggtgctgtgagtgaagaagcttgagtttgccccatcagcttctgcaaggttatttttacatagnctcatgcttatttgtatggggaagttctttttcctggaaaagatttaactaagcacaaaactaaaatccagagcagggataagggaagaatgcaggtgttcttagtggaaatatcagcatcagggaatctttctcttaaacactggaactggtagagttgaagaacttctttttctcaatacttccatcattntttgtatccattcagcttgagggtccacacacacaattgacttgttcttnttc

SEQ ID NO: 2843 - DNA, 212 bp, Homo sapiens
aaacattaaacaacaagtatataatcaaaataatcctgtattacttataactgaataactattttcaaagaaactttcctccctgatgaataagaatgcaaactccaagtgtatatagggtgctgtgagtgaagaagcttgagtttgccccatcagcttctgcaaggttatttttacatagtctcatgcttatttgtatggggaagttcttt

SEQ ID NO: 2844 - DNA, 366 bp, Homo sapiens
  misc_feature (1)...(366): n = g, a, c or t
tttttttttgttgtcccagatttattgaaaataatacagcactacagaaaaaattcaaacaggtccccgaggcgttttgaaattcatcccaactgtaggctgagtgacctgaaggttggacagactgccgaagtccaaaagcttcagcatttccttagtgncaggatctacttcaataatctcctgatccaaggctgagacctcaggaacataattgtctctcctttctctctcctcctcctgcagcttgatgganatacctcttactgggcctctctgaattcgcttcatcagatgcggtgacataacctgctatcttgttgcggagctttttgctggggataatggcgatctcctcgcacacgc

SEQ ID NO: 2845 - DNA, 337 bp, Homo sapiens
  misc_feature (1)...(337): n = g, a, c or t
ttttttttttgttgtcccagatttattgaaaataatacagcactacagaaaaaattcaaacaggtccccgaggcgttttgaaattcatcccaactgtaggctgagtgacctgaaggntggacagactgccgaagtccaaaaagcttcagcatttccttagtgtcanggatctacttcaataatctnctgatccaaggctgaaaacctcgggaaccataaatgggcttctcctttcttttttcctcctcctgcagctttgatgggagaataccctctttactggggcctcttcttgaaattcgctttcatcagaatgcggtgacataaccctgctatc

SEQ ID NO: 2846 - DNA, 263 bp, Homo sapiens
atttgaactcttcaatctcttgcactcaaagcttgttaagatagttaagcgtgcataagttaacttccaatttacatactctgcttagaatttgggggaaaatttagaaatataattgacaggattattggaaatttgttataatgaatgaaacattttgtcatataagattcatatttacttcttatacatttgataaagtaaggcatggttgtggttaatctggtttatttttgttccacaaggttaaataaatcataaaa

SEQ ID NO: 2847 - DNA, 163 bp, Homo sapiens
ccttcagcaatctatattaccagcgctggatcctttgacagagagtggtccctaaacttaaatttcaagacggtataggcttgatctgtcttgcttattgttgccccctgcgcctagcacaattctgacacacaattggaacttactaaaaatttttttttac

SEQ ID NO: 2848 - DNA, 139 bp, Homo sapiens
  misc_feature (1)...(139): n = g, a, c or t
ctgtttgcccttaggccagnacacagaattaaagtgggggagatggcagacgctttctgggacctgcccaagatatgtattctctgacactcttatttggtcataaaacaataaatggtgtcaatttcaaaaaaaaaaa

SEQ ID NO: 2849 - DNA, 106 bp, Homo sapiens
aaaactcttctaactgccatagcaccagcctccacaaaatacttcagacacatatcatcaattccaccagtggttagaataacattggcaccagcttttttttttt

SEQ ID NO: 2850 - DNA, 271 bp, Homo sapiens
  misc_feature (1)...(271): n = g, a, c or t
tttattgatataccacattacatacanaaacattcatgtaaagctttttggattataacanataatttacataactgaggaataaaaccagctttactcctacccanaaaataaatttctncctncctccctggccaaaggnaaacaanatcctgagctaacnttgtaaacnaatattgtgcatttatacaaangnttttaaagacataaaaataaaatntatagacctgcccccagcttcaactactaatcatggaccacttccgcttca

SEQ ID NO: 2851 - DNA, 226 bp, Homo sapiens
  misc_feature (1)...(226): n = g, a, c or t
ttttttttttttttttttttcgtttttcttcatgttatttattttccaatnanaaatgacanattcattatcaaanacatcatttaccattttctcctttgtacttcttattngcatacttcttatctcgcccattanagnaaaagcatcttaagtataccttaaangncanatttatcttggtatgccccacagcaacttactnatagtanatacttnaatattn

SEQ ID NO: 2852 - DNA, 153 bp, Homo sapiens
cctagaagtatcacacatgacttgaagttgggcaacttcagtgttttaattaaattcagacagaaagcaatccccaagatatcctgtaaaatccaagcccacctgtcttcatttcgaaacacagcccaaacaacagctactgctatgcacagt

SEQ ID NO: 2853 - DNA, 401 bp, Homo sapiens
  misc_feature (1)...(401): n = g, a, c or t
nccaatgggtttaagtctcatctcattcgtctgattggaaatctgtgttacaagaataaagataaccaagacaaggtaaatgagctggatggtatcccgttgatcctggacaactgcaacatcagtgacagtaacccctttctgacccagtgggtgatatatgccatccgaaaccttaccgaagacaacagccaaaaccaagatttgattgcaaagatggaggaacaggggctggcggatgcatccctacttaaaaaagtgggttttgaagttgaaaagaaaggcgaaaagctgatcctgaaatctactagagacacccctaagccatgaatgaactacatccaaatacctgaatttttggaatctgtttcatggatttttcatcttctaccgtatgtgaa

SEQ ID NO: 2854 - DNA, 154 bp, Homo sapiens
ctgttatggatacagtctatacaaaatgagatcctttcataagcttgaagattggggtttcacgctcatgtgtgagatgtccctctctcaaaccttactatgaagtcagcaccactgggcacattacttgtctgacatgaaggggaaaaaagaa

SEQ ID NO: 2855 - DNA, 164 bp, Homo sapiens
  misc_feature (1)...(164): n = g, a, c or t
aaagaattgggtgaccacgtgaccaacttgcgcaagatgggagcgcccgaatctggcttggcggaatatctctttgacaagcacaccctgggagacagtgataatgaaagctaagcctcgggctaatttccccatagccgtggggtgacttccctggcaccaan

SEQ ID NO: 2856 - DNA, 339 bp, Homo sapiens
ctggtatttgggtgaatgttgttgctctgtgcctgttgaatgtccatgctacaagaagttatgagccttgttctaagtacagatgaaccttgtatttgtgtaatctcccaagggagagctatggtttacattcaattttttggtctttctgctatgaaacgtgtttattttgcctctgtcaatgtgtttgcaaccttaagtaaggaaagggaaaaaaaaaatagccctctgaactctgatcttttgccgcttctgtagattttgattgtgaagttgggagtgaggacattcaaaagcccatggtgaatgcatatgcctttagaatattgtgcctgtttt

SEQ ID NO: 2857 - DNA, 174 bp, Homo sapiens
ctggcctccagatccacatcaccactcttccactcgattgttcccagatcctccctgcctggcctgctcagaggttccctgttggtaacctggctttatcaaattctcatccctttcccacacccacttctctcctatcaccttcccccaagattacctgaacagggtccatgg

SEQ ID NO: 2858 - DNA, 359 bp, Homo sapiens
  misc_feature (1)...(359): n = g, a, c or t
ctgtggaacacaaggggagtctcagcatctggtccttgatttggttttttcattgtttccttggcccctgtatccagatattggacttactgctatacttgtgatactgggtagcccagactttgaaggtgctttgtgaggtttggactcatgctgagaaacccacaggaaagcactgtccaggtaggattagaggcttcccacttaaaactatttctgagaaatcttaggttttatcactgctatggtttcccatatttacttgggactgttctgactttctttttccagcccttagcttgngttagaaaagtggacatgtaagtgaacaatgcattacttctaccttaggtttanga

SEQ ID NO: 2859 - DNA, 374 bp, Homo sapiens
  misc_feature (1)...(374): n = g, a, c or t
aaattttaatattctacatgaaaacttacattgggaaatatgcagacaagtgattatattccaaattttacccttattttaatatctaaaatattgggtatgatgcaaattatactatagaatatttatctgaaatatgacttactggggtattctgttaatactatatataaatattcagaatttttttcaaaagtagaaaaattcccctctaaaagtacagccagatagattttcatccatattgaggaacttagctttttcaacaagcttcagaatctgaagtctgtagaatctaaaatacagaaatatccagaaatcagacaataaattgaaagtttagacatcatgagtattaaatagctttacctcnc

SEQ ID NO: 2860 - DNA, 308 bp, Homo sapiens
aaaaatcctattatgtaaaccttaacataagagggtagttaagataatactacaagtttcagggcgtttccacagacttctagaccttatgtacacacagactatcagactctagatatgcggcctgcttacccttaagggggtgcactgggagcccgatcatgggcgccccctagtggggttaccatcgctcctccattcaaaaagactcgcttctctaagaagtcggtgtcaggtgagtaagcgttctacctgacggctaagccagggatgaagagaggccaacattcttcttaggatgagtcctg

SEQ ID NO: 2861 - DNA, 454 bp, Homo sapiens
  misc_feature (1)...(454): n = g, a, c or t
gtgcccagcaagcccattgaccacagcaccatcacttcctgggtatcacctgattttgatacagcagcaggaagcttgttcccagcctaccagaaacaccaaaactgggcgagacactcaagtcgaaaacctaccacctccaagtttccacatctaacttttgagagtccgcaatcttccagttcagagacattggggatccccttaatccgagagtgccccagtgaatcagaaaaggatgtttccagaagacccttagttccagtgctcagtccccaaagctgtgggaacatgtcagtgcaggcacttcagagcttaccttatgtgttcattccacctgatatccagaccccagagtcatcgtctgtgaaggaagaactcattccccaagatcagaaggaaaacagccttctaagctgcactcttcacactggcactcctaataacccaganc

SEQ ID NO: 2862 - DNA, 194 bp, Homo sapiens
aaaagtttttatttacctaaaaacataaatttatcaaacatatcaatttgctttacagagcaatttacataaaaattcatgatgtataccaacgacagcatagcattatctacctcagtttgtgaagcatcctttcctacagatctcagcaaaacgcagagccagtaggggaaattcaagctttcatttggggg

SEQ ID NO: 2863 - DNA, 233 bp, Homo sapiens
  misc_feature (1)...(233): n = g, a, c or t
ttgaggaacgggaacaaagattatgatagctttccgaccaccaccaacttcaatttccttagctgccgtaatattcagctccctgagctgagccttgaggtccgagttcatctccagctccagaagagcctgggagatgccggactcgaactcgtccngcttctcgccattgggcttcacgatcttggcgctcgaactgaacatggctttctcctgggagaacttgccgagcg

SEQ ID NO: 2864 - DNA, 243 bp, Homo sapiens
  misc_feature (1)...(243): n = g, a, c or t
ctggtgtgggaagtttcttgctcgcctccaaatccccagtgcctgtcacataggggctgacttgaaccaggtgctaattatagacccccgttgggtgaatgagccctggtcagaaaacactgccttcctccatgcanatgggccctggaggctgcatccctggggtacctgactttgaggtgccaccgggcagancccatcactggtgcangagcanagggaggggatccagggtacctgnga

SEQ ID NO: 2865 - DNA, 403 bp, Homo sapiens
aaaaaatataaattatatgaaaatacaagttggaaaatagtcaaacacaatataacatctttttcatccctatacttctcagcttaaaaaaaaagtattcttaaaaaaaaaagttcaataactgaggcagtattcctgataattttattttaatatatatattttatatatgtatatgtatacatatatttatggttccttgaaacttctttggaatgtaggtaagagttcaacaaatttatatagaccccaacagagtaagcggcatgcacagcatgactagaagagagatggtgtatttctcaccatgaaggttaggcaggttaatgctgtaaaacccagagtgttcatctccaaagtgaggaaaagcacatctgatctttgaatgctacctccaatcccc

SEQ ID NO: 2866 - DNA, 236 bp, Homo sapiens
  misc_feature (1)...(236): n = g, a, c or t
aaactttttatttgcatattaaaaaaattgtgcattccaataattaaaatcatttgaacaaaaaaaaaaaaatggcactctgattaaactgcattacagcctgcaggacaccttgggccagcttgattttactctagatttcactgtncgtcccaccccacttcttccaccccacttcttncttcaccaacatgcaagntctttccttccctgccagccagatagatagacagatg

SEQ ID NO: 2867 - DNA, 328 bp, Homo sapiens
aaattacaaagtaataaaaagctttgctctttaattaaaaaaaaaaaggaaaaaggggaaacagaggtaaataaattaggaaaacacacacacggagaaaacaaacaaaaataaaataaaataaaaacaaaaaggtgttaactaggaaggatgggttaatccaaaacccagccctgactccaggctcctcctcagaaaggtggaaccagggagaggggggaccccaggtgactgtcaggaccagggaagtaatttataactcagagccagatgccttctggaagcagtctccatggattctgccctaaaaccaggaatggaagatgga

SEQ ID NO: 2868 - DNA, 430 bp, Homo sapiens
  misc_feature (1)...(430): n = g, a, c or t
aaaaattatacatattgtacattttcaaaacctgcacatgagtaaaaccatggcaatattgtcctaaagctacctaactgtgactatggaaattgctactttgcattcagtgttgtgggatttgcacgggcagtactcattttccctcatacttcggattgaccacagttgttacggcactcttataaataggattttcacccgtgtcccatttggcattcattttctccttttcaaatttagcaaactcccttctgtcatgaattatcattaaaagcttccatatcagcagtaatgcaaggccaataagaacaattccagcaaccacaccagctacaattggaatgatgtctggaccagtgggacactctggattctccacaacatgaaccatgacctcgttgntcccattcctgaatacngtaaaata

SEQ ID NO: 2869 - DNA, 405 bp, Homo sapiens
ccatcttatctctgtcttcaagcattcctcagctttctctttccagaacaggattatgaaccgacaccatacagaggtatttgtaagaaagaaggtggatgccggaatcctttcttcaaacagaagcttaccagtaagtgcagactaatacaacaggcggtaaagagaagaacagagaaagcatcctgccccagccctgccccagagctaaacgtcattctagagaatgaaaaattccatctccacccagtgggttctcagaattccagagagattggaactacagcaaaggtatgaacaggtgtcacggggacacagaagaaagagcagttactcttccggaaggttggagaagattttgtgaaggtggggatgtttgatttgaaccttgaagaacaagcagag

SEQ ID NO: 2870 - DNA, 403 bp, Homo sapiens
cctggagcctgcctcccgggctgagggctcagctctggcctccggctggatgccgtctagagtcctatgtgctcataggtctttttctttcagtaaacagtataaaacattactattttcctttgattgtaaacttcaacagaaaataacatacttaaagaattttgctacaaagagtactatgatttttattgcctcaccacctttagaacatttccacttcacaagtttctgatttgcttcactttcttacttggcgatggcgccctggcagcatcatccacacataccagtgcgtatggagaaatgggctgtaggcccttcctgcgtggtccatggctctgccttcatggaacaggctgagtcatgtctctgctcaagctcaaaccatctactctcaagt

SEQ ID NO: 2871 - DNA, 451 bp, Homo sapiens
aaataactttcttaaccctgcccattaagatcacagtaaacatacaataatttttattatggaaattaatctttacatacaaaatcagctacgtaattttacttacaaaacaataaaaactgttctttactgtggcaacaaaagaagcattttgacaaatgaaaaaaattaatgcaaacaaattaaaacaatgcttttctttttacttgcttcactgtctcttctatttattttctatgatcatttgacacaaacatggattactttgatatctactgaaacataaatgataaggttcttaaaggttgaattaaaagtctgggtgttcaatattttagaagctgaataaacaaaacgaaattggggtttgtgattacagaggatttatcattttttccctttgcccatatgaaaatatataatagaaaattacccacgggaaaacattttt

SEQ ID NO: 2872 - DNA, 265 bp, Homo sapiens
  misc_feature (1)...(265): n = g, a, c or t
aaacttgatccaacctctttgcatcttacaaagttaaacagctaaaagaagtaaaataagaaggcaatgcttgtggaatgtacagtgcatattggcggcgcacgcctcattacgattcgcctgcttgcttctcctgttcaatcgtttctttggaaggcaggtggatttttctcttgcgtntctgtcttcttcagtttcgacttatcgaatttctcgatctcagccatatctgggtttgtcaagacatggttgcggangaaaagcg

SEQ ID NO: 2873 - DNA, 436 bp, Homo sapiens
cctcagaggaattcgggaatgacacgtcttctgatcccatgagacagaacaaagaacaggaagcttggttcctgttgttcctggcaacagaatttgaatatctaggataggatgatcacctccagtccttcggacttaaacctgcctacctgagtcaaacacctaaggataacatcatttccagcatgtggttcaaataatattttccaatccacttcaggccaaaacatgctaaagataacacaccagcacattgactctctctttgataactaagcaaatggaattatggttgacagagagtttatgatccggaagacaaccacttctctccttttagaaagcagcaggattgacttattgagaaataatgcagtgtgttggttacatgtgtaagtctctggagttggatgggcccatcctgatacaagtttga

SEQ ID NO: 2874 - DNA, 328 bp, Homo sapiens
aaattatttgctgtttctggctcagatttcaaccttttttccccctttttaagacaaaaataagtgtgactttctggtcagggtgattgtagaggaagggtcatgatactgaaataggacttggttaaaataaagagttgagagtaagagactaaagacatatgccaaatgtttgtaataaaattaaagagaaaatataaatatatacaaaatccaaaatgtcaggataatgaaatcaaagcatttttagtattatcactttgggtactttagtagaattgcactcgtttatgattttgaagtttgttttacaaataacatccaattt

SEQ ID NO: 2875 - DNA, 294 bp, Homo sapiens
  misc_feature (1)...(294): n = g, a, c or t
cctctccaacttccgaagcttcaccttcttgagcttcttgcctggtcggccttcctcacccctcattaactccctgtgattccaatagctctgcttgaacaggtcgtaatcctggatctccacatcctcactctcccaagaagcctgatcgtaaggtaagtcccgccacttgatcaagtagtggacgtggnccttcttgtccacactgtggntgaggattcggtggatcatcatccactcgggttttatcccatagcgatagaagcgttcctccatctntgcaaatttagggnc

SEQ ID NO: 2876 - DNA, 334 bp, Homo sapiens
aaaaagcaacccccatgtatgcctatatgtgtattgtatactttttttacataattggagtcatactgtaaacagttttataagtagatctttttcattgcaaaattgccacattttcttatggcattaaaaattttacaaaaacataattttaatggctatattatattccatttaatggatgcaactcagtttatttaaccattcccatgttgttaactatttaggttgtttctaattttcattattataaagttgcagaaatttggtgtacataaaactgtctccatataattgattattaggatatattcccatgaaggattcttttttt

SEQ ID NO: 2877 - DNA, 408 bp, Homo sapiens
aaaagccctttccaaaggtttcaactgtaaaatacttctttttacaatgtatcaacatatttttatttaaggggaattaacaattgccagggaaaccagccaacccaagtttattatatcattaaccttatcataaattcaaacctaagttgctggaccctggtgtgaggacataaatcttccaaagttttgcctatcctaagagctgcatttttctactgctctttaccttgcattttagctaatttaggagttttgagaatgtattggatacgctccagtacataaggagttgccgcatattatatcagactgctttgagaaatctcatccctagtctattgcagttgtttctattagcttactgattaactcagtcctgacacaccttttgggaaatgctgattt

SEQ ID NO: 2878 - DNA, 426 bp, Homo sapiens
  misc_feature (1)...(426): n = g, a, c or t
ctgggataattctgcctttgctttccatatggatgctccaattcatcagtatggggacactcatgaatcacagagctatgttcctgataattctgggtctgcaagaggatctgggagtaaataacaatcaattttcttaaagatatgctanaaagtagttagtacttccaatttctcatccaaatcccaaaaagggccagccctgagaagcttacctgaaatatttctttccttctctcatggaagtccataaaagccacccctcctccttatcctttcaactgggcaactatagagtgagggagattctaattgtattagncactttccctcactagntagatgntgacttttcctctaaaactccattttcagattccccctcacagccagcagaaagatgactaccttgcttgactatggtng

SEQ ID NO: 2879 - DNA, 443 bp, Homo sapiens
  misc_feature (1)...(443): n = g, a, c or t
tttttttttttttttttttttgncaagttaaccaattttaatggaaccaagtaattacacaataaaattttatattcatccacaaaaaaacatnttgcaacctttggaaattgtagaaanaaaaccgtggggagcatatccttgnggagcatctctggttgtaactagngattagcattttggtcttttgacttcaaccccatcagcttccatcttcttcctcttctcaatgattgcactaatcttcttccactggcgancaagctctgctttgtcattggtttccttgaagcgcctggttttccgcccttcanacattttgataccatactggaatgcagccttgggcaaagcttctttgntgntcatatactcgctgnattcttcctgggtatcaaagtcccaacggcctaaaggccccttcttgntaccctgggccattt

SEQ ID NO: 2880 - DNA, 383 bp, Homo sapiens
cacagtgcttgatatttcagagtcagtcattggttatacatgtgtagttccaaagcacataagctagaagaagaaatatttctaggagcactaccatctgttttcaacatgaaatgccacacacatagaactccaacatcaatttcattgcacagactgactgtagttaattttgtcacagaatctatggactgaatctaatgcttccaaaaatgttgtttgtttgcaaatatcaaacattgttatgcaagaaattattaattacaaaatgaagatttataccattgtggtttaagctgtactgaactaaatctgtggaatgcattgtgaactgtaaaagcaaagtatcaataaagcttatagacgcaaaaaaaaaaaaaaaa

SEQ ID NO: 2881 - DNA, 326 bp, Homo sapiens
  misc_feature (1)...(326): n = g, a, c or t
ctggactgctgtacatcaaggacagattaactggaaaacatatgttccttatgtgtgattgagagccattcacaaaagacttcctttgngtncagcctatacttttccatatggtataccttgaaaaaaattagcncaccatgnttattcttntacctttnataaaanacanagcctgtttactcatttagaagatacaganaatnggtctaaaattgaacatcctagattcacactcccaactcacttaaggagattcgatggtgaggaaaatgatntgacaaagnccaacaatgatctncggaatcacattttccaacanacca

SEQ ID NO: 2882 - DNA, 460 bp, Homo sapiens
aaacctggtacaagttaaacaacatctttctcatacccacatgattaagtatgtattctgacaggatataaagaagatgaaacacaagctggtgggtctcagaattagaaactctaatgcaggaccagatcccaaaagctatgttttctatcacttttgtgacatttaggaaacatttaccttgcataaaatataaaagcttttccttttaattatactgtttgtacaaaaaatcactattgagggaaaggtccaccatggctgtatttatctataattcactgtagtatatataaagttcacttggaagttggaaatgtggaaactataatgaataaacaagctgagctgtaattgtgaattttttactgctaatttagaatgtccaactcactcctacagatattacaacttacaatacatgacacacacaaaaaacatgtcaaactttgctgtagag

SEQ ID NO: 2883 - DNA, 502 bp, Homo sapiens
aaaaataaagaaaaaaataccacgactctttgctaatggcttttaagatttgcagacacagctaaatactcatctaacaaagtatccaggctatccaactatattgccatgaattcataagacagtaacacacatttataatataaaagtagtcaaaaaaataaaaagaaacagccacaggtaatttagggctaaaatgagtcctaataagggttacatgagaaataacatataagaccccaaataaattttagatacaaaattaaatgatgtggctttgttcaaacatacctaaaattcaaaatcaagttaaatacctaggctggcttttttatatcaccagctttcattagggctttaatcgctcttgccctcatctcaagttctagcagctccagttgctgtgcagaaggttgaacatcttctggtggaggaacagccagggtggctgctttgggttcgtttgggctagactctgccagtcctagaatctcattccact

SEQ ID NO: 2884 - DNA, 302 bp, Homo sapiens
ccattagctcctgtagctagttcctgtcttttccaaaacctgttttttttttggctttttggtagatgctgtggctctcttatggcctccaataaacataagtgaggcagagttggtttctattgtttgcaaccaacgaacttaatggattctgtattagaaagaactggtatatttctttaagcaaagactaggactctatggggctcaacaaactctgtaatcgcctttccactcccctggacaaaataaatatattgtctactgctgaaacgcaaattatccccaaaccaagtagcttt

SEQ ID NO: 2885 - DNA, 271 bp, Homo sapiens
  misc_feature (1)...(271): n = g, a, c or t
ccatcatgtttaagttgaggaaaactcagttcttaaattatctgggaagggtctggattctctatttttgagattgactttatcacaatatgattcttacatctttataccatttacaattgtgttttagatctacagagttagaaattcgaaaactattccangactaatncttaatcgggcattatttatacaagaggtcaaggaacatttactaaccncaatactgcncttgtnaatgaattataaacgctccttctggaatatattt

SEQ ID NO: 2886 - DNA, 308 bp, Homo sapiens
  misc_feature (1)...(308): n = g, a, c or t
aaagatcagatttatttggagaaaacaaaaaacccacaacccaaaggatgggattttacatcaagacatctcccangtaataagtctacagattacaaatcattttcatagaagatatttttgtacaaattttacatgtattcaggagcgggacattaatcaatccctgtttctattttaataggggggacaaggtaggggagagggaaaaacagttttggatataactatttggaaggagagtagacatgaagagggcaaaccctagcttttcattatctacaatcaatagtttgtttttctttttt

SEQ ID NO: 2887 - DNA, 148 bp, Homo sapiens
  misc_feature (1)...(148): n = g, a, c or t
aaaatgttagtaacaccaggttcaaatccttttccaatgaaaactcctggtgtcaggtgataaagaatgatgttttgaanagcatttttgtcccgtatcagaatttctttttnttcactagncattcccttaaaagcatcattggttg

SEQ ID NO: 2888 - DNA, 196 bp, Homo sapiens
  misc_feature (1)...(196): n = g, a, c or t
ccatggatgtgccccaatacagnncacattnnttgganaaatgtgtttncagatcatttaatgnaatctttgaagtatctttgactctaactttgacttggtggtggaccttccttggtttttatancacctnncanatatcctttagaattacatgtattttagcataaggaaatcgaaaaagtanaacatactg

SEQ ID NO: 2889 - DNA, 303 bp, Homo sapiens
  misc_feature (1)...(303): n = g, a, c or t
cgagccttgtatgtatgttatggatacataaaatgcacgcaagccattatctctccatgggaagctaagttataaaaataggtgcttggtgtacaaaactttttatatcaaaaggctttgcacatttctatatgagtgggtttactggtaaattatgntattttttacaactaattttgtactctcagaatgtttgtcatatgcttcttgcaatgcatattttttaatctcaaacgtttcaataaaaccatttttcagatataaagagaattacttcaaattgagtaattcagaaaaactcaa

SEQ ID NO: 2890 - DNA, 317 bp, Homo sapiens
  misc_feature (1)...(317): n = g, a, c or t
agtccaccttggcacaaaagccttgtggtatagaaaaacaaatttgtttttatgtcctcttctccctttccatctttcagcatagacttaactcccttaagcccagacatctgttgagacctgacccctagtcattggttaccagtgtgtcaggcaatctggactttccagtgatgccactgagatggcacctgtcaaaagagcagtggttccatttctagattgtggatcttcagataaattctgccattttcatttcacttcctgaaagtcagggtcggcttgtgaaaagttgttaaacaacatgctaaatgnga

SEQ ID NO: 2891 - DNA, 364 bp, Homo sapiens
  misc_feature (1)...(364): n = g, a, c or t
nggcnggtaaatatagcaaagcagtgtcttcttgcacagcaaagtgaagaaagtttctacagagaaatagaagttttacatttgtaaaatctttttcacattctaatcatctagcttaagatccaatgccaggagttttcagcttccttatttactatgtatttcttgtgcgcatgatggttaatacagaaattatgttgatgcattactagttatccttctagttaaaggaaagggtaaaacatgtattgttcttgtagaacaaacccctgatttagtctataacaaaatggacataattgggctcaaaagatggagttttgattgggaccacctgtgtacacacaacagtgacttccactcg

SEQ ID NO: 2892 - DNA, 359 bp, Homo sapiens
cctgttctctctttacatcttcagacttaaattctgtagaaggtaacagctttgtattaagacagaagcttagtggtcacaaacaaaaaataacactgaaatacaattcggaaattaatgatactgtgtgtctcaaagaatacctgaactatacattcactaataatttggcaatgagattccatgctgttcaacttttgtcttttatacccacacgtagaaaaaaaattcatgatttaccccaaggttattattaaatatcattttgtgatatgaactttagtaatagaaattaataacatttcccataccaacagaaagtaagttgctagaataaaggaatcatttttcccatcagg

SEQ ID NO: 2893 - DNA, 362 bp, Homo sapiens
  misc_feature (1)...(362): n = g, a, c or t
ctgaggcaacagaataaatgcagaggcattacaatgaatcccacttaatataaagaactatacagaccaacacttctctacaaaatttttttttcctcattgccagttaaatacagagttttactttcatagcttaacaatgaagggtcatacactgaagccaatacatatacctagcatttcagtctaagcttgtgcacgtacatagctgaagtcaattacaaggtttggcctagaaatgctaggggaacttctttgtagtttttacaggtattaaacttcatcttgcacactgaagtcatcatacatacagggcanaatcagagcttttatatttgcgtttattcttcatttaacttttt

SEQ ID NO: 2894 - DNA, 385 bp, Homo sapiens
  misc_feature (1)...(385): n = g, a, c or t
aaagaatttattaagcctgttataccacacagtatgttttatacactgacatacaactccctaataagataaagcaaagacaaaaaagtttatcttattagaaacaagatacaccaccacttattgtcttcaaacattattgcactttaactttcttaatttgacaaagcattcaagaaacatctgcggactagttttaacagacaaataacacctgtaagcagacatgactgtcctaaattgtttattaagtatgaattttacaaactttacttatattagcggtaacggtggagctggagagtattgcgccttctccaagctgcccggcgagagccaccaatagtgtggtggaacttgtggccctttccaaggccaccggntc

SEQ ID NO: 2895 - DNA, 338 bp, Homo sapiens
  misc_feature (1)...(338): n = g, a, c or t
ctgtcangtggcccaataacgnaatnggactccgnccccttgncagtgccactggctgttcctggctctagttcccaggggagcctcaaactggggcctagcccagaaagccaccggctagcatcacatagcttctccagctcaaatagcccaaggngtggcatgnctgcccgacctccanagaataaccggcantcaccgtgcccagncaacacatgctcgtgctatggggagaagcctctgctgggtgacccaccanccaaccctgggcgcaattttaattttagataaaatgcntcaangntcaaacngccacaggnaaacccctgatgtaacac

SEQ ID NO: 2896 - DNA, 241 bp, Homo sapiens
agagcccagaggtaacagaacagcttcaggttatcgaaataacaatgttaaggaaactcttatctcagtcatgcataaatatgcagtgatatggcagaagacaccagagcagatgcagagagccattttgtgaatggattggattatttaataacattaccttactgtggaggaaggattgtaaaaaaaaatgcctttgagacagtttcttagctttttaattgttgtttctttctagtgg

SEQ ID NO: 2897 - DNA, 156 bp, Homo sapiens
  misc_feature (1)...(156): n = g, a, c or t
aaancattcctttctttaattttgtaannctttactgtggaatanctcaaaatgtcagttctgttttaagtaacagaattgataactgagcaaggaaacgtaatttggattataaaattcttgctttaataaaaattccttaaacagtgaaaaaaa

SEQ ID NO: 2898 - DNA, 50 bp, Homo sapiens
ataaagtaaggcatggttgtggttaatctggtttatttttgttccacaag

SEQ ID NO: 2899 - DNA, 267 bp, Homo sapiens
aaactctagatcagaattgttgacttgcattcagaacataaatgcacaaaatctgtacatgtctcccatcagaaagattcattggcatgccacaggggattctcctccttcatcctgtaaaggtcaacaataaaaaccaaattatggggctgcttttgtcacactagcatagagaatgtgttgaaatttaactttgtaagcttgtatgtggttgttgatctttttttttccttacagacacccataataaaatatcatattaaaatt

SEQ ID NO: 2900 - DNA, 262 bp, Homo sapiens
cctttttcttgggatgattttctagtcttaaggtttggggacattataaacttgagtacatttgttgtacacagttgatattccaaattgtatggatgggagggagaggtgtcttaagctgtaggcttttctttgtactgcatttatagagatttagctttaatattttttagagatgtaaaacattctgctttcttagtcttacctagtctgaaacatttttattcaataaagattttaattaaaatttgaacttttcaaa

SEQ ID NO: 2901 - DNA, 427 bp, Homo sapiens
ctgtagctttttcattcagaaactggagaccatcttttcactgagttgttattccttcctcttcccttagcttagggatatgttgaaaaaggcttttcaacaagtattttattttttacaagttgctatgaaattaaaatttatatatatatcttaagtgtttataaagcactcaaaattgtagcttacatgtatatgacttctgaaaataaaaatcacacttctaacataatctttctgctctgcaaaaatattctacatacatgcatatgatcaaaacaatcttttcatgtttggggtatttcttacacatagtaaaagaaaagtcaacaattgtatcagtacttcccctgttaagataactgagtgccacctagtgttcaatttctgcaactactaagcttacaaattcaatactgctattaaa

SEQ ID NO: 2902 - DNA, 432 bp, Homo sapiens
aaaaatacttacacagcttaaaaaaacaaaaacattaaagtcgtagagaccaattattaagcgtataggaacatgatattcatgtatcattaaaacgtagagaccaattattaagcgtataggaacatgatattcatgtatcattaaaataaggattctttcaagatctgtttcctatctcagtctaaatcaggggtctggagttgtggccttaaaaaactagcctcaaacggctccatgcatgcataatagctttatatgtgttccctttgttggtccagttacctgatttataattcttccttacctgaatgactttagaaaacacattaatattgccttaggaattaaatcaattaaacactgatgatcagctacatttatcgtgtaatttaatctgcttttttgtatattagcttttacatatagaag

SEQ ID NO: 2903 - DNA, 243 bp, Homo sapiens
ctggtgaagaggatacagcagaaaaagatgagttgtagacactgatctgctagtgctgtaatattgtaaatactggactcaggaacttttgttaggaaaaaattgaaagaacttaagtctcgaatgtaattggaatcttcacctcagagtggagttgaaactgctatagcctaagcggctgtttactgcttttcattagcagctgctcacatgtctttgggtgggggggagaagaagaattgg

SEQ ID NO: 2904 - DNA, 415 bp, Homo sapiens
  misc_feature (1)...(415): n = g, a, c or t
cggggactaactgcaacggagagactcaagatgattccctttttacccatgttttctctactattgctgcttattgttaaccctataaacgccaacaatcattatgacaagatcttggctcatagtcgtatcaggggtcgggaccaaggcccaaatgtctgtgcccttcaacagattttgggcaccaaaaagaaatacttcagcacttgtaagaactggtataaaaagtccatctgtggacagaaaacgactgtgttatatgaatgttgccctggttatatgagaatggaaggaatgaaaggctgcccagcagttttgcccattgaccatgtttatggcactctgggcatcgtgggagccaccacaacgcagcgctattctgacgcctcaaaactgagggaggagatcganggaa

SEQ ID NO: 2905 - DNA, 199 bp, Homo sapiens
ccatggagaagggcaggcatatggagtatgaatgcccctacttggtatatgtgcccgtggtcgccttccgcttggagcccaaggatgggaaaggtgtgtttgcagtggatggggaattgatggttagcgaggccgtgcagggccaggtgcacccaaactacttctggatggtcagtggttgcgtggagcccccgcccag

SEQ ID NO: 2906 - DNA, 327 bp, Homo sapiens
ctttttggttgttatttggctatacagttttatgctttaaaacaaatgataaagttaatttccaattcaatagtgaaatattaacaatctaactatagccagatcaaagacacctgaacacagaaaacctttatttgctggtgctgccattgcacaggctgtacaatgaaatagatttgaaaagctgattgattttcccgcacataaattctggatgtcaatttccaaccaaactccaatccagctatgtggcatgaagagttacaggagggagggaggaaaatagccctatgttagtcatgtttgcatacagaggatcaaagtagg

SEQ ID NO: 2907 - DNA, 414 bp, Homo sapiens
cctggatatggtgaacagagaaactgcacatgaaagggaaatgcaaacggcaatgcagataagccaatcatgggatgagagcttgagcctgagtgacagtgattttgacaagccggagaaattatattctcctaagagaattgacttcactccagtttctccagcaccttcacccaccaggggattcggaaagatgttcgtgagcagcagtggattgccaccaagtccagttcccagtccaagacgattttcaaggagaagtcagagtccagtcaagtgcattagacccagtgttcttggtcctcttaaaagaaaaggtgaaatggagacagaaagtcagcccaagagactcttccaaggcactaccaatatgttatctccagatgccgcgcaactgtctgatctcagttcatg

SEQ ID NO: 2908 - DNA, 422 bp, Homo sapiens
ccatggatgtgccccaatacagtacacattttttggttaaatttgttttcagatcatttcatggaatctttgaagtatctttgactctaactttgacttggtggtggaccttccttggtttttataacacctaagagatatcctttagaattacatgtattttagcataaggaaattgaaaaagtaaaacatactggtttttttcaacaagaccatatgtaaattaaatagtgaaatgtgtatgagtttcagtagaactgtaccatcaacaatgtttccataaatatgcagagttctttcttttgtattgttatttacaatattgttaaattgaatgcatttgcaatttctaggattctaaagaattgagtacagaaagtagcaattttattatttgatgataatatgagaattactgtgcc

SEQ ID NO: 2909 - DNA, 352 bp, Homo sapiens
tcaagacccacggactcctggtctgagcccaataaagactgttaattcctcatgcgttgcctgcccttcctccattgttgccctggaatgtacgggacccaggggcagcagcagtccaggtgccacaggcagccctgggacataggaagctgggagcaaggaaagggtcttagtcactgcctcccgaagttgcttgaaagcactcggagaattgtgcaggtgtcatttatctatgaccaataggaagagcaaccagttactatgagtgaaagggagccagaagactgattggagggccctatcttgtgagtggggcatctgttggactttccacctggtcatatactctgca

SEQ ID NO: 2910 - DNA, 151 bp, Homo sapiens
ccatgtatgtgcatgcatatacactctacagtgctgttagaccttttggctgcagtttcatgttagggtcttacagtgtgaatgacggtgcgcaactctacatgattgacccatcaggtgtttcatacggttattggggctgtgccatcgg

SEQ ID NO: 2911 - DNA, 373 bp, Homo sapiens
  misc_feature (1)...(373): n = g, a, c or t
aaaagatcattctgttctttcaaggagaaataagcctaaaagaagaaaaacaaaaaaaattctgtataaaactgtaatcctttgtattcatgtttacagtgctattactataattcaaaattatgtatgtgacttagagttatataatcataatttatgtttatttcaaatatctaagtttattgcttggatttctagtgagagctgttgaatttggtgatgtcaaatgtttctagggtttttttagtttgtttttattgaaaaatttaattatttatgctataggtgatattctctttgaataaacctataatagaaaatagcagacaacataaacntctttgtaaatatcaaacctaatacatttcttgtc

SEQ ID NO: 2912 - DNA, 187 bp, Homo sapiens
aaaaaagtcataggtactgtgagttctgtataaactggtggacagtaagttagttcctttgttttaacttataagcctcaacttcaccgcagaataaagaatgtaggccaaagaaagcataatcggtcactcgtatagaacagtattgtttctataatttgaagctttctgaatggacgggttcagg

SEQ ID NO: 2913 - DNA, 309 bp, Homo sapiens
  misc_feature (1)...(309): n = g, a, c or t
ataaaaataggtgcttggtgtacaaaactttttatatcaaaaggctttgcacatttctatatgagtgggtttactggtaaattatgttattttttacaactaattttgtactctcagaatgtttgtcatatgcttcttgcaatgcatattttttaatctcaaacgtttcaataaaaccatttttcagatataaagagaattacttcaaattgagtaattcagaaaaactcaagatttaagtnaaaaagtggtttggacttgggaacaggactntatacctcttttactgtaacaantactcattaaagg

SEQ ID NO: 2914 - DNA, 270 bp, Homo sapiens
ccagagggaaggcccaagagacgtctctgaagccaccgttcctgattattcagaggcagggtccacagtgagtgactcggtggggctggaggaacccagggtgacccagagggggctctggagcgggtccctaacatctgaaaaagtcctcccagggaactcggagctggaacttccaggcagcttcgggggtgacatttgtatccggccagccgagcggggaaaggagaccttgtgtcctggcaacagggagagccgggactgggatgg

SEQ ID NO: 2915 - DNA, 288 bp, Homo sapiens
ccaattatttccaatttttattttattcttaaaacttaagcatggtaaaatgttaagctgttttcatccactgatattattctactataaaaagcccttcttgagcagatttgatgataaaaaggagaacatttctaaggtataattagagaagctgttgcatgagaaatcatgtctccatctccattttgctatgcgttatctgaggattgtttctgaaagagatctatttaggcagtgtatgtatgtgtcagcatgtaaaaagtaaagaactgaaaatagacaaac

SEQ ID NO: 2916 - DNA, 419 bp, Homo sapiens
aaattaaattaatagttacaaggtaggttggctcttaggtgaatttagccatgtcaactaatagcttttatatggtatgtaacaaatctgaattatgttatgctgtgaattattcagtgcattataagaaatcttagttaatcatgcttttgggcttcattagtcaatgtgattggccttttattttctttccataacttatctgctattattagtttcttattccttattattaatctgttagctcattatcattagcttactaacttgaaagttagattaatatcaaaataagaatagcagcactatgaagagttaataaaatgcaatttcatgttagagctagaataaaagtaattgagcagtcatttgcaaatgcttcattataacatttatgtgcttaagatttctaaggtttt

SEQ ID NO: 2917 - DNA, 269 bp, Homo sapiens
ctgcctcctgagggtgtggggttattagggtctcaatactttctcaaggggctacactccccattaggcagcatcccaccagcctgcaccacaggctcccctgggaggacgagggaaacgctgatgagacgctgggcatctctcctctgtggctctaggacatctgtccaggaggctgggcggaggtgggcaggatgtgagaggtggggagtactggctgtgcgtggcaggacagaagcactgtaaagggctctccagccgcagctcag

SEQ ID NO: 2918 - DNA, 302 bp, Homo sapiens
aaacaagtgggattaagttcttgaagcatttctttgaaaaactgtaacaggagatgtaacatgccttcaccagtgtgatcctgaatactaagtgcaatccaagcaatcgttaccgagaggtggcagtggtccagtcaaagcaaaagtggattggtcaagagcaaacgtcattgcaacagatttttgagatgctcaaggcatattccttggtaactttatggaaggacaatgaataattacatattttgttatgaaagtgttttgagaaatttgccaaagacttagaaaaacaccaaggaagg

SEQ ID NO: 2919 - DNA, 331 bp, Homo sapiens
ggaaaaacagatgttgttgacagatagagtgataggcaaattctgtgtggactttagtcccaaaaggaaactttagttcacttgcagtatgcttatccttgactgcacatgagaatgccttgtgcagagttatttggagattatgtctttttcttaaacaccatggctgtcacacttcagttcaattaaatcagaatgtctgaggagtgagacacaggcatcaacactctcaaatgattcacatgttcagccaaagttgagaaccatcgagcctgtggaagttctttctcgtggctcagaatcttaggtaggtgcttaactcttgtggtgg

SEQ ID NO: 2920 - DNA, 207 bp, Homo sapiens
cggatacaaatgtcacccccgaagctgcctggaagttccagctccgagttccctgggaggactttttcagatgttagggacccgctccagagccccctctgggtcaccctgggttcctccagccccaccgagtcactcactgtggaccctgcctctgaataatcaggaacggtggcttcagagacgtctcttgggccttccctctgg

SEQ ID NO: 2921 - DNA, 212 bp, Homo sapiens
ctgtccagtgttggtgattccagtggactgtatctctgtgaaaaacacaattttgcctttttgtaattctatttgagcaagttggaagtttaattagctttccaaccaaccaaatttctgcattcgagtcttaaccatatttaagtgttactgtggcttcaaagaagctattgattctgaagtagtgggttttgattgagttgactgttttt

SEQ ID NO: 2922 - DNA, 247 bp, Homo sapiens
ccttcccagtccccacaggtccccgtcctgataggtccctggagctccactggccctcaggtaaactccaagcgccacactactgtctacaaacgctggtgatctggacctgcagcccttctcgccttggtggaggcccctccccacgctctggaaagtgcctcaggccctctcagctctggtctctgcaccttccattcccctcacctagatcactcctctaccaaactcctgcacaccttccagg

SEQ ID NO: 2923 - DNA, 316 bp, Homo sapiens
ccaccacaccacacccctttacaacctccagccctatagtctaaggatatggggccctgggagacaccgagggaccaaggaaagaggccccctgtagaaagcaagcagaaattccttgtagacccactgaccagagttgctcgctgtccttgaccccaccgagaggggtgcaaccctgactcagcatcacctcctatctgtcatagcggggagagctttccccaaaggccagcaggggaaaacccaaccttacttggaggagccagggaagtatctcgcagatcccgcaaaaaggcacccacgtctacagctcggc

SEQ ID NO: 2924 - DNA, 316 bp, Homo sapiens; identical to SEQ ID NO: 2923

SEQ ID NO: 2925 - DNA, 269 bp, Homo sapiens
  misc_feature (1)...(269): n = g, a, c or t
ctgcctcctgagggtgtggggttattagggtctcaatactttctcaaggggctacactccccatcaggcagcatcccaccagcctgcaccacaggctcccctgggaggacgagggaaacgctgatgagacgctgggcatctctcctctgtggctctaggacatctgtccaggaggctgggcggaggtgggcangatgtgagaggtggggagtactggctgtgcgtggcaggacagaagcactgtaaagggctctccagccgcagctcag

SEQ ID NO: 2926 - DNA, 207 bp, Homo sapiens
ctgggaggctattcccaatgccaggatcgagctgcaggagtgggagcatgtgacctgcatgaagacagtgtctctgcgcagtgaggagaccgtgtcgggcctcaaaggctacgtggtcgccgggacctgcctcatgcagggggaggaggtcacgtgccgagggcggatcttgatcatggatgtgattgaggtggtgcccgagcctgg

SEQ ID NO: 2927 - DNA, 346 bp, Homo sapiens
  misc_feature (1)...(346): n = g, a, c or t
ccacgagaccaccccgagcgccaagcctgtatctgcagatccctctctgctcaggaaccaccacgtcctgtgttctcgccaatggagaccaagacctggggttggttctgggctcctgacagttctcttgatgttaagagtgcagctctgtcaacactcagcataccaaaagctctggagcagcttatggcacacctttccctggtgccatctcttcagacacgatgtgagctcattacaaccncatnagtaaatggagctaccatgtatattttantgaaaatacatangcacccgtgtccccatggggtctnacanggctaggctggggacactgctngggggg

SEQ ID NO: 2928 - DNA, 314 bp, Homo sapiens
ttgtcctttggacaaatctataactttcttttcctagccaattatactcaaagaactaggggattatagagaggttaggcatattttgttgggtgtcaggagatgctgaacagagggcttgtatatctgtacattgctctttctccactgtgaggtccatcctgccttaatttgggttcctgcagcctcagggcattctagggctctcttagatcctgctggactgagtcccctctagaaaagaagcaggaacaggctaaccaacagcagactgttagaagttggtggagggcactgacaggagtaccagccag

SEQ ID NO: 2929 - DNA, 269 bp, Homo sapiens
  misc_feature (1)...(269): n = g, a, c or t
aaaagatactttggattcaattaagaagagtttttaagaaaaaagaggaaggttctggcatggggagctctgcaacccactgctgggtgccacaagcgatgcttaanaacggaagatgaanatggcaccatgtgtctntaaaccacaaatggaaccactgatttctatgtgtatttgcatttgctgtaatgtgtgggaaatctgaaggttacacagcacaactgtncacancagatggcccttnaaggggatgaggtttanagccatnc

SEQ ID NO: 2930 - DNA, 175 bp, Homo sapiens
ccctcccctgctcagaatctgataccaaagagacagggcccgggcccaggcagagagcgaccagcaggctcctcagccctctcttgccaaaaagcacaagatgttgaggtgagcagggcaggcccccggggaggggccagagttttctatgaatctatttttcttcagactgagg

SEQ ID NO: 2931 - DNA, 216 bp, Homo sapiens
  misc_feature (1)...(216): n = g, a, c or t
ccagcccacngggtactggaagacantggttntgatgggttcagccctgctacttggggctganctcagacgcttggntctcttctccanccagncctccagatggccctcngggagctcangagcatntagtaaccactccctggctcgnctctcctcctccacctggatgctcagntcctgcaggtctcgctctgacatgtgggaaaatctgca

SEQ ID NO: 2932 - DNA, 186 bp, Homo sapiens
  misc_feature (1)...(186): n = g, a, c or t
tccganctnngtaccaanctnggagnaatcatggncatagctgnttnctgtnaatgccccacggagacttagcaggttccaggagtgagcgagggcagcggaaaggagttcttccgggggacacgaattgcctggctgantatcaagaaagacacactcttaaatttcttggttcagagcaggaaa

SEQ ID NO: 2933 - DNA, 444 bp, Homo sapiens
ccacctgagtgcaggtgacaaggacctgacagagcccatgcagggctttagatttggacacacaagagttgataacttcctcatgaactccttgcctgatctaaactcatattatgggttctgactgtttgagtaatcatcttcaaggttaaacctcttggcagttacccttttcacaaagtgcacagtgggaatcgggaatcgatagggttaattttggagcagtggcttataccattcacctctgtttttttgtgattatttcacagataatgagaccttaataacaaataggcgtaaaaaaattttcacatcgaaatgatagaaacatttgatgtaataaaacttggttggcttgatattttaaggaattgaaacctagcaatcttattggagagacaaaaattggtctccaggggctggaggtctgcgggccaagccagg

SEQ ID NO: 2934 - DNA, 236 bp, Homo sapiens
aaaactattattctagaagaaatgggcagttttgtaatttggtggtggctgagaccccatagaagttttactatgtaaataatttggagagtgaataaggagattgtgctatgaaatcctgacagcgctctttaggaggcagacttgacagtcctaggaaggttgacataaaaataccaaccttcagtaaagctctagtacaaaaaagggtaaatgtcatcattcttatttttagg

SEQ ID NO: 2935 - DNA, 347 bp, Homo sapiens
ctgaacaactgtggagacccatcctgcctcctgactctaagctgcttttaagctaattttctggctctttgcctactgtgtatgtgtgataggactgttttccttggtatgttcccagatattctctgggatatttgggttctcagggatacctgcttcttggctgggcaccatgcccttggcttaccccccagccttcagggttcaagcagtggacatacacccttacataacctggtgaaggacctgtcacactacagcagctttataaaaagatataaaaagataaagtattataccctaacaatatttgacattttacctttagcttcagttattattctttt

SEQ ID NO: 2936 - DNA, 234 bp, Homo sapiens
ctggaccagaaatgtgaacagcaggggacccaggaagttgaccagggcgatgacccaagggggcaggtactggagcagcagaaacagggactcctccttgttgtcctgtgagtacttggtagcccagaagatggcgctgatggccccaaccaccaggagcccgttgagtacgttgacccgcaggtaggagagcaggcggcaggccgtctgggcccgggtctgctgctgcatcag

SEQ ID NO: 2937 - DNA, 401 bp, Homo sapiens
  misc_feature (1)...(401): n = g, a, c or t
gatgatggacagngaaactggtcgatccaagggatatggatttattacattttctgactcagaatgtgccaaaaaggctttggaacaacttaatggatttgaactagcaggaagaccaatgaaagttggtcatgttactgaacgtactgatgcttcgagtgctagttcatttttggacagtgatgaactggaaaggactggaattgatttgggaacaactggtcgtcttcagttaatggcaagacttgcagagggtacaggtttgcagattccgccagcagcacagcaagctctacagatgagtggctctttggcatttggtgctgtggcagaattctcttttgttatagatttgcaaacaagactttcccagcagactgaagcttcagctttagctgcag

SEQ ID NO: 2938 - DNA, 250 bp, Homo sapiens
ctgcatcagtgacatgaaaacagaaaccagggaggtcctgaccccaacgagcacttctgacaatgagaccagagactcctcaattattgatccaggaactgagcaagatcttccttcccctgaaaatagttctgttaaagaataccgaatggaagttccatcttcgttttcagaagacatgtcaaatatcaggtcacagcatgcagaagaacagtccaacaatggtagatatgacgattgtaaagaattt

SEQ ID NO: 2939 - DNA, 338 bp, Homo sapiens
ccagcatagcagggtggagtccatgtccctggctgacagagggaaccctggaaatattacttcgcgcttgatggagaaggagaaggccagagattgcctgattcctatggggatagcctctgagaatgtggctgagcggtttggcatttcacgggagaagcaggatacctttgccctggcttcccagcagaaggcagcaagagcccagagcaagggctgtttccaagctgagattgtgcctgtgaccaccacggcccaggatgacaagggcaccaagaggagcatcactgtgacccaggatgagggtatccgccccagcaccaccatggagggcctgg

SEQ ID NO: 2940 - DNA, 352 bp, Homo sapiens
ctggcttgcctgctggcctgcttcctggagataggatgctcagacccaccgctgctcttcaggggtcgtggaaggaattaatgcacttccttctgtcccccaatctctgtccctttacgtgtctctggagctgagcaggtattctttttctttcttcatctcagtagagccataaaacagggacctctgacgcttcacattatcaggtaagaaatgtttcttgcccagcagcccccagaggatgaacagctccctccaccttttacttttatccagcatttcttagctcggttggcaaactggatatttatgcacctgcatttcacaatccatctccaccgattattcctgg

SEQ ID NO: 2941 - DNA, 196 bp, Homo sapiens
ttgagtattctatagtgtcacctaaatagcttggcgtaatcatggtcatagctgtttcctgtgtgaaattgttatccgctcacaattccacacaacatacgagccggaagcataaagtgtaaagcctggggtgcctaatgagtgagctaactcacattaattgcgttgcgctcactgcccgctttccagtcgggaa

SEQ ID NO: 2942 - DNA, 307 bp, Homo sapiens
  misc_feature (1)...(307): n = g, a, c or t
nggcggncgaggtccaggcaagtggcaganccagacctgggtcttcacacacttccctcttcttgactgtactggcgcaggtgcttaagatttgggggaaggtgggtgggtatctggcctcttctttgggactcaaattgngatatntntctgagaacccacaggctccctctttanggctgaggtgagaagttctgaaagtcaancagacacatccaggcatttgggcaagaaacttcttccttccaaatcaaaggtgaaatgaaaacgattatgagnccaccgggggatgaacanaggtgaatgg

SEQ ID NO: 2943 - DNA, 357 bp, Homo sapiens
ctgacagttctccatggcaactcagtcctccagcagacccctgcatacataaaggtgcaaaccaacaagatggtgatgctgtcctgcggggctaaaatctccctcagtaacatgcgcatctactggctgagacagcgccaggcaccgagcagtgacagtcaccacgagttcctggccctctgggattccgcaaaagggactatccacggtgaagaggtggaacaggagaagatagctgtgtttcgggatgcaagccggttcattctcaatctcacaagcgtgaagccggaagacagtggcatctacttctgcatgatcgtcgggagccccgagctgaccttcgggaagggaactcag

SEQ ID NO: 2944 - DNA, 205 bp, Homo sapiens
  misc_feature (1)...(205): n = g, a, c or t
ctggcctgggtcacagtgacctgacctcaaaccagcttaaggctttaagtcctctctcagaacttggcatttccaacttcttcctttccgggtgagagaagaancggagaagggttcagtgtagccactctgggctcatagggacacttggtcactccanagtttttaatagctcccaggaggtgatattattttcantgctcag

SEQ ID NO: 2945 - DNA, 138 bp, Homo sapiens
gtgaatgctggtgtcactcagaccccaaaattccgggtcctgaagacaagggcgaattccagcacactggcggccgttactagtggatccgagctcggtaccaagcttggcgtaatcatggtcatagcttgttcctgt

SEQ ID NO: 2946 - DNA, 250 bp, Homo sapiens
  misc_feature (1)...(250): n = g, a, c or t
ctgctatactaatgggattctggggcaggtctcagtaattatgaaacatctactgataaaataggtattcaccaaccctaagagtagactgcgattcactagatgtgagcattctaagtaganccaacccagggaaaactatgcaaggggcccctgacagggaaagggctgcaaagcaccaggcaaggtgactctcatgcgctttccagctctgcttttgtttctctatgatcctagaacttaattatta

SEQ ID NO: 2947 - DNA, 214 bp, Homo sapiens
  misc_feature (1)...(214): n = g, a, c or t
ctgcacgtaggcgaccttgtagtccggcttcttgatcctcacgtttctgtgatctcttctcttgttagagccatgctgcacccgtgtccgcacagcagccacgggcacgttatagatgccctcganggaaattcctgaggtccacccttgtcatttccatggggatccggaactgcacggtgtcctcgggctgggccacaccgggccgcaccag

SEQ ID NO: 2948 - DNA, 134 bp, Homo sapiens
  misc_feature (1)...(134): n = g, a, c or t
cctcatcatccatgaaggctcctctgtctaccgcatcttcaagcgctggcaggcagtgaaccagcagtggaaggtcctaaattatgacaagaccaaggacataggaggagatgcaaggggagggacggnaggga

SEQ ID NO: 2949 - DNA, 233 bp, Homo sapiens
aaagggtgtaatgtgttggtcacatcacaaccagtaagaaacgcttggtaggttatccacatcttttgctgactgtttccatatacaattctggtcaccatattttccaaagctaaaatctgaggcgtgggcttgatggtttttgaaatcaggattaccccaggaagaaccaggtcctattactaattttcctgattctgaggctctgaaggcttgtctgagacacattccgg

SEQ ID NO: 2950 - DNA, 169 bp, Homo sapiens
ccatagggcgctacgacgggactcacccgtgcctggcggccgccacccaaacgggcaaggtttttattcataatcctcatacacggaaccagcatgtcagtgcatccagggtcttccagaaccccctggaatctgatgtttctcttctcaacattaaccaggcagtcag

SEQ ID NO: 2951 - DNA, 360 bp, Homo sapiens
ccatgttcccccgtttgccttcacaaaaaccttgtgaataatacaagccatatggactctgatttacagtttagaagatgagcagaggtgggtgtgagttgcccagtcatgttgctagttgttgaagaaactaggattgttctcaggtcttgggctcctggcccatagaccagtggctctgtgttctgatggggtattggggaggatttttacaaatgcagattcctgagattgttcctggaacatctccgagtgggtgtgggttgtggccctgcgtgtgtgattttgcctatcccagctccggggtaccaccaaccactttttgtctctgtgggtttacctactctggatattttgttt

SEQ ID NO: 2952 - DNA, 238 bp, Homo sapiens
ctggagacactttagaactctttccccatcctccaccatagtgcaaacttcacgcttctctgagcacctccaaggtatgcccttgaagtaaaacagaaaagggaagaaagggggctttttcttttccatttctgaccaaacagaggtctgaaatagcagtgtattatgaaattctcattccctgcaacagtcagccaccacttggaaaatggctatttttgccataaactagattttt

SEQ ID NO: 2953 - DNA, 349 bp, Homo sapiens
ccaacattggagaccacttctgtcaaatggtgatttctgaaaaggaagctatgtcaactattgagccacacagacaggttgcttggaagcgagctgtcaaaggtgttcgagaaatgtgtgatgtgtgcgacaccaccatcttcaacctgcactgggtgtgtcctcggtgtgggtttggagtatgtgtggactgctaccggatgaagagaaagaattgccaacagggtgctgcttacaagactttctcttggctaaaatgtgtgaagggcgaattccagcacactggcggccgttactagtggatccgagctcggtaccaagcttggcgtaatcatggtcatagctgttt

SEQ ID NO: 2954 - DNA, 286 bp, Homo sapiens
  misc_feature (1)...(286): n = g, a, c or t
nctgtgtcctgccctcccttntggaggctggangggagaggccaagcccttggaaaatgtagcaaatgtctggatgtcgcataagtgcgtgtatgtgcgggacaggccccgagaagctagtgacttcttgcacacccccattgcacaaatgaaatcacagcccaggagggagggtagcttggcactggctgagaaatagagctctctccccgcccctccccctaaccacaagggattgtcctgacaacttgtggggatagaagggctcacagggcaggggtctcag

SEQ ID NO: 2955 - DNA, 286 bp, Homo sapiens
  misc_feature (1)...(286): n = g, a, c or t
ccagagaacaagatgctcccttgctgagctcctgggagcgtggaaggagatgctaggccctggcacagtgttatgtggactgggccacgatagggtggagtgagctagtgaagaaggcaganggagactttgcttctggtctcagctatgcctgttttgtgaccttgattgagttgcttgggctttacttctgcctacaaatcaggggtaaaaatacctgttgggaggagaaatgagaacatagaggaaagcctcttggaggaaaggtgcttggaccaagtctcag

SEQ ID NO: 2956 - DNA, 125 bp, Homo sapiens
taaaagatactttggattcaattaagaagagtttttaagaaaaaagaggaaggttctggcatggggagctctgcaacccactgctgggtgccagaagcgagctgtggagcggaagattaagatgg

SEQ ID NO: 2957 - DNA, 309 bp, Homo sapiens
  misc_feature (1)...(309): n = g, a, c or t
ccagtaggtgtgggtgcttttgatgtttgcttctggtggttgaaagaagcgcagggaagagactgggtgtagagtgatgtaccccaaggctgcagctaagatcaaattcttctggagagctgtgtganctggatgctgatgcanaggagggtgggggagctggtgagaccaaggctgggctctgtgcccatcccactgggtgtgaaggaaggaaatgaccacagacagccatgttctgggtcggccgtctgcaagccaggctgactcctcctctcccccagagttcaggatggtcaacggcagcagcag

SEQ ID NO: 2958 - DNA, 290 bp, Homo sapiens
  misc_feature (1)...(290): n = g, a, c or t
cctgtgaccaagtttacagtcatctagtttctctcacaatttcaaaatgtcagatcagaagaatctttggcgattaatccactctccattttatgcgtgagaaaaccaaggccctgatggtgtccctggtcccaagtccagtngcccttcacaatgaggcttttggctcttaccctctgaagtggggcagtggctcactgtgaggggagagggtcagatcttgttagtttgatcttaaggcactcacaaaatgccctgatttttcttgtctttgtgagaagacaaaaaac

SEQ ID NO: 2959 - DNA, 122 bp, Homo sapiens
aaacagctctaagtgtcagtactcatagtggcatattacaaagtaataaacagtgcacacttgagggcaaaccgcatattgagctatggaagagctcactgtgattaagatgacatcaaacc

SEQ ID NO: 2960 - DNA, 377 bp, Homo sapiens
  misc_feature (1)...(377): n = g, a, c or t
ctgagattgtgtgtgtgtgtgtgtgtgtgtgtgtgtaggggaggactggctangaaagcaagcagagtgcctctgcttnttctgccaactctatctcagcactgatccagaccccaccagccaagcattttntgggacccgcacactttgctctggagctttctaatancctgnattaatccacccctgtgcttcatgcctttgccaccaggagaaccagtgcaactgaagtttccactgcctgctgctctcctgnggcatccacatcctgaataggcaggagggtgcancccacctggtgcacagggaggaggaggaacgtcccctctgatataccacatgnnagnanaccacctcttcccagaccanatctcggt

SEQ ID NO: 2961 - DNA, 401 bp, Homo sapiens
cctgaaagctgagggcataactgaccattttttggaaaccctctcctccctcctccacaccttgagtgatgaccacaccaatcactgtattttatagctttttttttcatgtaggtttttagttaaaacatctcctgcctaaaatgcattgaatattttaagataacagatatactggctggaggtttgtttaacactatctatatttaagcttatacaaaatgggcaaaatatagaatatttgtgattggaagcagtcacctggggtttctgggggtggacagttcctcgccacccagcagcaccctgggactgcggcctttcccagctttatggaagcagaatggtggaacttgtgccggaggtacactgctgaaggtgcgtggcggtggaccagccag

SEQ ID NO: 2962 - DNA, 207 bp, Homo sapiens
ccttgtcctacggccagaagccctacaagaagatgaaagggccggaggtcatggccttcatcgagcagggcaagcggatggagtgcccaccagagtgtccacccgaactgtgcgcactcatgagtgactgctggatctacaagtgggaggatcgccccgacttcctgaccgtggagcagcgcatgcgagcctgttactacagcctgg

SEQ ID NO: 2963 - DNA, 375 bp, Homo sapiens
  misc_feature (1)...(375): n = g, a, c or t
ctgagagactctaaatccagtgacaagtctgtctgcctattcaccgactttgattctcaaacaaatgtgtcacaaagtaaggattctgatgtgtatatcacagacaaaactgtgctagacatgagggtctatggacttcaagagcaacagtgctgtggcctggancaacaaatctgactttgcatgtgcaaacgccttcaacaacagcattattccagaagacaccttcttccccagcccanaaagttcctgtgatgtcaagctggtcgagaaaagctttgaaacanatacgaacctaaactttcaaaacctgtcagtgattgggttccgaatcctcctcctgaaagtggccgggtttaatctgctcatgacgct

SEQ ID NO: 2964 - DNA, 424 bp, Homo sapiens
  misc_feature (1)...(424): n = g, a, c or t
aaatcaatagcaaaacaggattaagataaatgtgggcataattaggtgtattgacatgcctttgatgtatcaaactgagggggaacccactaaatccagtcaagcagtttcataagatcttcacaaaatgcctctacttacggaatcatgttgattttagtcctgctgatgtgtgtaccgttagcactttggtttatcaatatttgactggctcaaatgatggatagaagggtggcctggttataggcagtaggcanaaggaggcagagggttacagtaatgtaagatcaagaccggaaaatgatagctatagaattacaagcccggtaccaccaggtaccacatcacataagaaaaaaggttctaatgttttcttaacttaacagcaaaccagtccagctacgggggcccagccagccagcag

SEQ ID NO: 2965 - DNA, 318 bp, Homo sapiens
  misc_feature (1)...(318): n = g, a, c or t
ctcattantcctgatggttctcgtaaaaaccccgctagaaactgcagagacctgaaattctgccatcctgaactcaagagtggagaatactgggttgaccctaaccaaggatgcaaattggatgctatcaaggtattctgtaatatggaaactggggaaacatgcataagtgccaatcctttgaatgttccacggaaacactggtggacagattctagtgctgagaagaaacacgtttggtttggagagtccatggatggtggttttcagtttagctacggcaatcctgaacttcctgaagatgtccttgatgtgcag

SEQ ID NO: 2966 - DNA, 459 bp, Homo sapiens
ctgtttcccaagcgcacagggaagccattgaaaagcatgcccgcttccggcagatgtgcaacagtttcttcgtagacctggtgtccaccatttgcttcaaggacaacgctccgcctgagaaggaagtgattgagagcctgctctctctcctcttcgtccaaaaggggcgcttaagagatgctgcccagagacactgtgaacacacaaaatctctctctccattcaatgatgttgtggataagactcctgtcatccgctcagtgatactgaaactgcttttgaagtacagctttcatgatgtaaaagattatattcaggaatatttgaccctgttaaaaaagaaagcattcataactgaagataaaactgaactgtacatgctcttcatcaactgcctggaggtaagtgaactctctcttccctgaatttcttttggaaactatctgaaccacatggttt

SEQ ID NO: 2967 - DNA, 286 bp, Homo sapiens
gtgtacatggacatcaagattgggaacaagccggctggccgcatccagatgctcctgcgttctgatgtcgtgcccatgacagcagagaatttccgctgcctgtgcactcatgaaaagggctttggctttaagggaagcagcttccaccgcatcatcccccagttcatgtgccagggcggtgatttcacaaaccacaatggcactgggggcaagtccatctatgggaagaagttcgatgatgaaaactttatcctcaagcatacgggaccaggtctactatccatgg

SEQ ID NO: 2968 - DNA, 237 bp, Homo sapiens
aaatacagaaagcacaagaataaaccaatggtaacatgtagaatctagatcgtcggggcaatttagaaggtagactttcaaaaagtctgaggcacaattacaagtgagtaaaagttcttgtgcaacctacataaacgcagcaaagaaacttaagacataaaaacatgggaaagctcactgtaaaaatattatcaaaatatttctacataagatattttgctttcatttttagatcag

SEQ ID NO: 2969 - DNA, 135 bp, Homo sapiens
  misc_feature (1)...(135): n = g, a, c or t
ggtccaagncgtagtggggtctgatatcaccagcataaccgagcggtataggatatattctgttaaagatggaaaaaatggaaaatctctgccatttatgttgtgtgacactatggggctatatggggcagaagg

SEQ ID NO: 2970 - DNA, 371 bp, Homo sapiens
ctgcattgtgaggggcttgctcctgcccttaggtataagcaggttcatcactccaatttgtgagtttggctactacccattcatgctcaagtgcagtagtagatgattttacaaaatatgctgtgatgcactggaaaccaaagaccaattcaggtctcaaatcgtattatctagcaacaaaacatttacagttgtgcaagaacaaggattccattttcataaccaaataacaaaataaaacattttatgtgtaagataacttacatctttggactgctggaaaatactttttaattatgaacatgttaaaaataaaaaacagcagaagccctgatattacctctttttcctcatttcttatactacctttt

SEQ ID NO: 2971 - DNA, 210 bp, Homo sapiens
ctgcctgactatggggctaaaggggtaagacccagacagacaaaaacttgctctctgccaacccgtcacccaccgctgcccagggcagcctggctgcttaggctcaaattccagctccacctgggtgggtgactttaaggggagttgcttagtgattctgcctctgtgagcctccatttcctcatgtgtaaaagctggtcacgcatgttc

SEQ ID NO: 2972 - DNA, 359 bp, Homo sapiens
aaaagcagagagcatgtgtaggttccctgtggtgggaggaaataaggtgccatcaaggaactaaagggcctggagtgtaggggaggataagatgaacagaagccagattgtgcagtatcttacaagctgtgtttaagtctttggactttggttcttagagtaatggaaaactcattggagggttttaagcaagagggtttgtgattaaatttgtgttttgaaaagatatttctagctatattgtaaacatgttcacagcagggggtaggatggaagcggggaatcagtgggaacagttaggatgcttttgcatttgtccagttgagagatgatagtggcttggcctaggatgatggtgg

SEQ ID NO: 2973 - DNA, 322 bp, Homo sapiens
aaaaagaaaaatgcaaatatagagcaaatccctaaacttgaaccatttcctagtgccttgctagacaaacataaaggggcagggttgtggggaggggaacgtttttggtggtgtgtgcagttcctactggatgagtgtgtgtttcttaatgtctcatttcaagcaggagatgttgggtctggagcaagatctgagactgagatgtcccccaagggtgacaggtcagatttatttcagtcagtgcaagtcacactccaaactaaaggctgggcagtgcgtttagtctgtggcctagaagacctcatcagcccccgagaggagg

SEQ ID NO: 2974 - DNA, 259 bp, Homo sapiens
ctgtacaaacagcgagcttcctgccttgtccaaagacgacaagatgatattaaagatgaatcttcggagttttcaagccattcaagtcagtccatcttgaagacaaagctctgatggcaccaaatcttgactcctttggacgcgatcgggcactgtatcaggagcatgcaaaacgtcgcattgcagagcgggaggccaggaggactcgtcgtagacaagccagagaacaaaccggtaagatgacagatcaccttgaagg

SEQ ID NO: 2975 - DNA, 344 bp, Homo sapiens
aaagacccaagcagtcattttgagttatatctataaaaattataaaaggatttttgaaagtataaacaaattgtcagtgaaataaatgagattttggaataaagtgagaataggagaagggatatgttgtgagcatataccttcacagttcttaatacctgttttgtaatcatgatattcagtcaaggcattatggtttttaatcttgaaacttagagaaccctttgaatatttgcttttactggtgtacagtatgagtggaatataaactgtacacataattatcatgttgatataaatcataatttcaactagatcaagacatgttaaccttttataaattt

SEQ ID NO: 2976 - DNA, 353 bp, Homo sapiens
  misc_feature (1)...(353): n = g, a, c or t
tctgaattttccctgaggagagtcagttcaaccttattacagcagcttttacaaatctatctctaaagtctccctgccgactcaagtttccactgacttgtccccctgcatgcgatgccatgaccttcacaccaacatccaaccacatgtctctcctttggaatctgtgtgccccaccaccangaacctgttaggcaaaggtggcaccatctccctctgtaaggctgcagcgggtgtctgtcancatctgacaggggccctttgcgtgctgtgtgttgaatgttgcacttgctgaatgcatgcagttcccgtgagcctgtggntgagctgaaactgacagcgctctgcaggcc

SEQ ID NO: 2977 - DNA, 157 bp, Homo sapiens
tggctgagggactcggaggtccacagcagcttagacctggagtcatctgttttggtcttagttctgacactttaatgggcttgggaccctggagcaaaagttctcctctgtgaggcaaggatttcaggagcgaggatttcaggactgaggcagcctg

SEQ ID NO: 2978 - DNA, 176 bp, Homo sapiens
cccctttctcaggcttactgtcaccagtctgtctgtgttaggggaggggggagtccgctctgtcctgaaggcccagagatggaaggacaagtggtaggccgggtgttcaggctcttccaacgccgactgcttcaactccgagcaggaccaccccaggacaattcaggggaagcttt

SEQ ID NO: 2979 - DNA, 433 bp, Homo sapiens
ccatctctctcaaagcaatgaagaaggaggtgaagattggggcctattacacaagataaacagtgtcagcatgctttaccagagagaacattttcatcaccccactactgaaagccatgtataatccgccaccacctgttttttgggggacctgggacacatgaaacacagagaggaaatttcatgggtactggatgaaataaggaaggaaatgtttttgctcacctgagtcacagggagaatgagaggtttatagagtttaataccatgttttttctggtaaagtgccatctccgaggaagccttgtaatactcaatatggtctcctgctaacttggcctctctgattcgactggaaaacttctggatctctggcaagtgattgtggatcctggctgcctctcgctggcccgtcacgatgagaggaaaaatc

SEQ ID NO: 2980 - DNA, 405 bp, Homo sapiens
gccaggcaccgcaagaccggccagaaggtggctctgaagaaggtgctgatggaaaacgagaaggaggggttccccattacagccttgcgggagatcaagatccttcagcttctaaaacacgagaatgtggtcaacttgattgagatttgtcgaaccaaagcttccccctataaccgctgcaagggtagtatatacctggtgttcgacttctgcgagcatgaccttgctgggctgctgagcaatgttttggtcaagttcacgctgtctgagatcaagagggtgatgcagatgctgcttaacggcctctactacatccacagaaacaagatcctgcatagggacatgaaggctgctaatgtgcttatcactcgtgatggggtcctgaagctggcagactttgggctg

SEQ ID NO: 2981 - DNA, 345 bp, Homo sapiens
  misc_feature (1)...(345): n = g, a, c or t
taacaggtcacncagtgggaagcgcatatgctcctactgcaataacattctgggcaaaggagccgccatgatcatcgagtccctgggtctttgttatcatttgcattgttttaagtgtgttgcctgtgagtgtgacctcggaggctcttcctcaggagctgaagtcaggatcagaaaccaccaactgtactgcaacgactgctatctcagattcaaatctggacggccaaccgccatgtgatgtaagcctccatacgaaagcactgttgcagatagaagaagaggnggttgctgctcatgtagatctataaatatgtgttgtatgtcttttttgctttttttttt

SEQ ID NO: 2982 - DNA, 102 bp, Homo sapiens
  misc_feature (1)...(102): n = g, a, c or t
tcctccagcanacccctgcatacataaaggtgcaaaccaacaagatggtgatgctgtcctgcgaggctaaaatctccctcagtaacatgcgcatctactggc

SEQ ID NO: 2983 - DNA, 269 bp, Homo sapiens; identical to SEQ ID NO: 2613

SEQ ID NO: 2984 - DNA, 111 bp, Homo sapiens
  misc_feature (1)...(111): n = g, a, c or t
gtctgncaggtgtaatttttcaagtgtcaaagatcccaagtgatccctgacacccaccccttcctactcttacattcatgcgtctgtaagatagctgcctacaacaggtca

SEQ ID NO: 2985 - DNA, 286 bp, Homo sapiens
ccacgtcgatctgcttcttgcgcatgcggtacacgccctggcgcactgagccaaagttgccgcagccaagttcaatgtcagctatgaggaggttatcgcgcttcaggaagagcttcttgtccttgagctcctctgggtcgctgtaggggctctcatacacgctcgtgtccatgggcatcggccgcggtttgtctggggacgttatgcgtgctggctcaggggtgtatccatctgagttgagggtgtcgattcgtctctgaggctaaaggccacagggtcagcaagg

SEQ ID NO: 2986 - DNA, 269 bp, Homo sapiens
ctccctccttgaaggctaccccttgggaaggctggtgccccatgccccattacaggctcacacccagtctgatcaggctgagttttgtatgtatctatctgttaatgcttgttacttttaactaatcagatctttttacagtatccatttattatgtaatgcttcttagaaaagaatcttatagtacatgttaatatatgcaaccaattaaaatgtataaattagtgtaagaaattcttggattatgtgtttaagtcctgtaatgcagg

SEQ ID NO: 2987 - DNA, 240 bp, Homo sapiens
ctgcaggaacatctaaaatgaaagcaaaacgcactgaagtgagctgaagtgcatatgtcctgcttgaaatgttcacattgtggcatctgaacaggtttcactgtttgtctaacatgtttgtgggaggcatatttgttacaccattcttttccatactgtaactctggattctttccattaaaggttcgggatgagtatcggcaggactacgatgctgggagaggaggctatggaaaactg

SEQ ID NO: 2988 - DNA, 244 bp, Homo sapiens
aaaaaaagaaaagaagaaaacagaagaaaaaataaactgaaatagggctgccaattgctaccaacagagtgggtttggctattacatttatttagctctactgaacaccttacaagggcggagaagccactatgtgttacaggcaattcacagagaagccacttaccagacaagctgtctcagaaaaagaaggcttctttttatgtcattatttcaaacttttccagaactttcaattttattt

SEQ ID NO: 2989 - DNA, 331 bp, Homo sapiens
ccagaatgtatcatttcttgatctgagtctggttacagagatgtattcactttgccaatatcaatgatgttacatactcatgatttgtgtacttttctttatgtatgtgtgagcaaagagttaatagcaggtctgtaccatttttctcccagaactatgcctgcttgggaaattttaggtttgtcttatcccagcacgagtttcttgtaaatgacccaaattaagataaatttggaatattgggtaccagggacagacatccattttgtgcactgtgaaacctacaatctatgggacagtacatggggctgggagacctgggaaccgtagg

SEQ ID NO: 2990 - DNA, 163 bp, Homo sapiens
ctgactgctaagacttcctcatctctgtccacctgcactgctctgctctcaccacctgttcagctctgcaaggccagtttcaatgcctcctgctctgtgataagggtggtttcccttcaatttgtggtggcgatggagacattcttgacacaggttctagagg

SEQ ID NO: 2991 - DNA, 323 bp, Homo sapiens
cctgagctacacacagatgccagggacatgacttctctgagccctggaggacagccccaccttctgccaccagggaattgcgagtgctggacctcctcggctacccaggactggtcctcagtgtccctcacgttcacatgcagaactttctggactccatggggtgaagagcagagtggagaggagggttttagccgagagctctagctggcaggaagcacatctggcggccctgttaaaactggaactctcagcagaaaagttttggtctgtggtcagcctgtgaggcacacacgtgcgtacacatacacacacacatacag

SEQ ID NO: 2992 - DNA, 358 bp, Homo sapiens
ccaagcatcagaactacatggcctaaccaaacaggatggaaatgtgagagggtccctcccttgtggaaggggtggatgatgctttctgcccaccctatttaattaagatggaaaagggggctatagatactggctggcatctgttaattcattcagcattcaaggtaataataaaacctcataaacacaagagctttaatctcaaggcagctctaagaggcagtcagggtacatggagcataagggaagttagtcatctgtagttacataaccaggaggtaccagagtcaggacaaaagcccagatgttcttaaaaacagggctctgtgctcagatgtcttctgcactgtgtaagcag

SEQ ID NO: 2993 - DNA, 126 bp, Homo sapiens
aaaaggaaatacaaagtataggcaaaacctacaagcattttgccttcagaagaaaatgtaatgttctcctgcactagtgatcccacccacgaacacaaatgtggctccatctcccatgaaagcatc

SEQ ID NO: 2994 - DNA, 273 bp, Homo sapiens
aaataacatcacctttccatgtatagtaaactgttcatatttctacaggtactaagagtacactggaattacgtgttacatataaatggagaggtggagggaagggggaaaacttgcactaagtcgcctaagagataaactgataatgttagtaagacagctttgtattaaaaactttttatactacaagttactgcagaatcatctactgtaagttttatctccccaccagaaaactgaaatgttgatttacaatattaatgtaaaatattt

SEQ ID NO: 2995 - DNA, 218 bp, Homo sapiens
aaacacccagtactgaaacaatatccaaagacagtattgcaatgaactccttttgctgtatcatgtgcaaatgctacttagatgaggttccctctctttagctaaaaatcacaaaacattaaacaatggaaaaagccctcccctcagttcttgctaattgaggtgtccgtgatttacaaaaaaagagttccttaaacactgcaggattcttatttttt

SEQ ID NO: 2996 - DNA, 339 bp, Homo sapiens
ccaatgtgcatttttgcacatgctggaaccttccatgggggtctggactattggctggagccaggacatgagtcaggggcaccatggacctcacgtgccagggagacttgaatgtggctgtcactcttccggacgccaagggctgcaggaggctgcttttggcactacccaccccgtgtgacagaataggagccagcgactcaggactgctcacgggtcaggagggcaacgcctgaagtcagacctccctataggtcaacagggacaacctggggatctctggagcagggccctcctctctcaggcttggcccactcccccagacacctggacacgtgg

SEQ ID NO: 2997 - DNA, 110 bp, Homo sapiens
  misc_feature (1)...(110): n = g, a, c or t
ccctcaccaacccagagaacctgntttactttgcccagggacttcctccccatgtgaacatggggaacttcgggccctgcctggagtccttgaccgctctctgtgggccc

SEQ ID NO: 2998 - DNA, 167 bp, Homo sapiens
ctgattgactgtgcccagtacttcctggacaagatcgacgtgatcaagcaggctgactatgtgccgagcgatcaggacctgcttcgctgccgtgtcctgacttctggaatctttgagaccaagttccaggtggacaaagtcaacttccacatgtttgacgtgggtgg

SEQ ID NO: 2999 - DNA, 174 bp, Homo sapiens
  misc_feature (1)...(174): n = g, a, c or t
cctttncttgagctgcacgtgaacctgtgtgggcaggcagcgtttgcaggcgtgtttacgggcaggcagcgtttgcaggcgtgtttaccggcaggcagcgtttgcaggcgtgtttacatgcaggcgtagcaccatgtgagaccactggtccagggtttcagaggtcctgctcag

SEQ ID NO: 3000 - DNA, 395 bp, Homo sapiens
cctgctaaacagaagggtaaatgttttgcccttctggctttaagcagtcataggaatgtgacagacattcctcttagggagcgcctcctcctagggtttcctcatctgtctcacactgagtggatgtaatgctattttaatcctgctgtggcccccaatactagtacttgtccataccttcttgcatttttagcgtctgctctgtggggttgttaggccctggcactcccaggaactagtgctaaagctgcatctctctctcccctctagggatcgataaagtttcactgcagaaagtctccactgcggtatgctgacatctgccctgaaccttcaccctacagcattacaggctttaatcagattctgctggaaagacacaggctgatccacgt

SEQ ID NO: 3001 - DNA, 356 bp, Homo sapiens
aaacaagccatctcacaatggaagcctgtgtgtcttgaaattgctgtggttattattcactctgccctttgaagaactgcagaaattcatagggcaatgttaagtgtttgtgtctccaaaaaagatgttggagtcgttaccctcagaacctcaggtaatcatgttagttaatccattaggttagttcctaattgactatgactgtgtccttagaaaaatgggaaatttggtcacagaggcagatgtacagagggaagacgatgtgaagacacaggaagaacatcttcaagccaaggaacacacggggctaccagaagccgagatagaagcatggaacatatgttctagtaagaagt

SEQ ID NO: 3002 - DNA, 135 bp, Homo sapiens
ctggggagggcggcggacctagtgaagtcacagagagagagacaccagtagagtggactggggccacgggacatttatttgtagccatcaagtgcctgcccacctgggggagggttgagactggcccgcaggtgg

SEQ ID NO: 3003 - DNA, 264 bp, Homo sapiens
  misc_feature (1)...(264): n = g, a, c or t
ctgagttcccttcccgaaggtcagctcggggctcccgacgatcatgcagaagtagatgccactgtcttccggcttcacgcttgtgagattgagaatgaactggcttgcatcccgaaacacagctatcttctcctgttccacctcttcaccgnggataggtcccttttgcggaatcccananggccaggaactcgtggtgactgtcactgctcggtgcctggcgctgtctcagccanntagatgctcatgttactganggagatt

SEQ ID NO: 3004 - DNA, 170 bp, Homo sapiens
aaaacctgttgactaaacagtaattaatttatatttgtgaaaaatgtcactgtcctagtgatttctgatgtaaataatgttgtttatatagtatgtattaaattttcctacattgtaaaactgctgtacttttgattcttgtatattaaaaagtgttactgagcattttt

SEQ ID NO: 3005 - DNA, 411 bp, Homo sapiens
  misc_feature (1)...(411): n = g, a, c or t
ccaattatttccaatcttnattnnatncttaaaanntaaccntggtaaagtgttaagctgnaatcatccnctgnnannattctnctatnanaagcccttcttgancngatatgangagaaanaggataacatanataaggtatanttagagaagctgntgcntgagaaatcatgtctccatctccattttgctctgcgctanctgangatcgtttctnacaganatgtatttaggcagtgtgtgtancgcagtgctntgccaaaagtactancgtgaaggtagacaaaccttgtaaatgcacttccanccaattgtggctcaagngtangtggtgaccccaaggctggtgccaatgagactggggtttgggaataagttggtgcatcatcccncctgctgcccctacnngg

SEQ ID NO: 3006 - DNA, 138 bp, Homo sapiens; identical to SEQ ID NO: 2945

SEQ ID NO: 3007 - DNA, 130 bp, Homo sapiens
  misc_feature (1)...(130): n = g, a, c or t
ccanctcactagatgaggaaagaggaaggcattttctgcattcttgcctagttttccttataagcaccactaanttaatagctctgtctttttgntcgtttgcactatgtaatgctattaatanttttta

SEQ ID NO: 3008 - DNA, 243 bp, Homo sapiens
ctgccgcgcatgcctaaggagtatatcgcccgcctcgtctttgacccgaagcacaagactctggccttgatcaaggatgggcgggtcatcggtggcatctgcttccgcatgtttcccacccagggcttcacggagattgtcttctgtgctgtcacctcgaatgagcaggtcaagggttatgggacccacctgatgaaccacctgaaggagtatcacatcaagcacaacattctctacttcctc

SEQ ID NO: 3009 - DNA, 150 bp, Homo sapiens
  misc_feature (1)...(150): n = g, a, c or t
ctgaccagaagtngnttgttatatggatgggaaccctaacttagggcttgggcaggggaaaganaaagaagatgagagattatacttcatgagtnttagcnatatgggagcaggntttcanttgaattctnangggngnctctgnntgtc

SEQ ID NO: 3010 - DNA, 136 bp, Homo sapiens
  misc_feature (1)...(136): n = g, a, c or t
ccacctgcgggccagtctcaaccctcccccaggtgggcaggcacttgatggctacaaataaatgtcccgtggccccagtccactctactggtgtctctctctctgtgacttcactaggtncgccggcctccccaga

SEQ ID NO: 3011 - DNA, 130 bp, Homo sapiens
  misc_feature (1)...(130): n = g, a, c or t
gtgtggacagtggnggccgcgctgtgcctgctcgtgttgcctacatgtccctggctgttgaggcgctgcttcagcctgcacccctcccttgtctcatagatgctccttttgaccttttcaaataaaatat

SEQ ID NO: 3012 - DNA, 109 bp, Homo sapiens
  misc_feature (1)...(109): n = g, a, c or t
tatctgtaaaatagccaggaatttcctgtttgtgatctattatgcctttttacaaaaaaaaatggctgcanattatccnntaatattaaaggaactttnctttcttgaa

SEQ ID NO: 3013 - DNA, 196 bp, Homo sapiens
  misc_feature (1)...(196): n = g, a, c or t
actcctggcctcaagtgatctgcctgcctcagcctctcaaagtgttgagattacaggcgtgagccaccgctccctgcccaacacatataccatctgaaaatgttagaattctgagttgngattttattgacttgtngcttgctttttcttaggctttgtnacttgnaatatgntaaactgtactatcctaataaac

SEQ ID NO: 3014 - DNA, 127 bp, Homo sapiens
taaatatatttctctcagcttcttcccttatattttttattttttcatcatattttaattttagtaatttaatttctttctccttttcttcctctgatttatgcttatcctcttctactagggttaa

SEQ ID NO: 3015 - DNA, 88 bp, Homo sapiens
  misc_feature (1)...(88): n = g, a, c or t
aaattgtaatcagagtcaaatacagtattgaatggaatgtactgccttctcctcctaaatcaataaacatctttcntggaaaaanaaa

SEQ ID NO: 3016 - DNA, 442 bp, Homo sapiens
ccatgtagcaggtggtcagtatgcgtccacagaggtctcggggatcctggggggtgtagctgatctggttcacgatggtgcggacatcagccagcacttcctcatttccactcctcacggcctcgcagacctggcagcacatggagtagatgaggcaggcggtggctgcgctgtccaccccgccactcaagggcagcaaaaaccctgcctgttgacttcgtcttaaaaaatcccagagccagcaggcaggtccaaggcttatctcctcctcagggctgtggtatttccactcgatgggctcagagatgggtgccagcaagtcctcgtggcacgagagggcaaagtccaccttcactctggggtaggggctcgccctgctggcttgaatctacgaggcagaggttgtgctgagctgggattgcgccattgtactccagcctat

SEQ ID NO: 3017 - DNA, 442 bp, Homo sapiens
  misc_feature (1)...(442): n = g, a, c or t
ncgaggtctgcatacaaaaggaaatggcaacaattgaactggtagcccaggacaaccatgagcgggccaggcgcctgatgaaggagctcaaccagatgcagtatgagtacacggagctcaagaaacagatggcaaaccaaaaagatttggagagaagacaaatggaaatcagtgatgcaatgaggacacttaaatctgaggtgaaggatgaaatcagaaccagcttgaagaatcttaatcagtttcttccagaactaccagcagatctagaagctattttggaaagaaacgaaaacctagaaggagaattggaaagcttgaaagagaaccttccatttaccatgaatgagggaccttttgaagaaaaactgaacttttcccaagttcacataatggatgaacactggcgtggagaagcactccgggagaaactgcgtcaccc

SEQ ID NO: 3018 - DNA, 337 bp, Homo sapiens
ctggctgatgtctgcttggacactccactctgtaatgggcacaccacagggatggatgtcctctgggcagggacccccatggtgactatgccaggagagactcttgcttctcgagttgcagcatcccagctcacttgcttaggttgtcttgagcttattgctaaaaacagacaagaatatgaagacatagctgtgaagctgggaactgatctagaatacctgaagaaagttcgtggcaaagtctggaagcaaagaatatctagccctctgttcaacaccaaacaatacacaatggaactagggcggctctatctacagatgtgggagcattatgcag

SEQ ID NO: 3019 - DNA, 216 bp, Homo sapiens
ccaggctcaggccctggggtgaaaggagacaggtgctgccaagaccatacatcagtcatctggcagcagctcgagaagcatgtcctccacgccgtcaatcttgatgtggtgcactaagcgccagaaactggagtctgaggatcggtatcgtccatcagggtagagctgccacatgataggcagcaggcttgggcctatctgggtgggggtcatagg

SEQ ID NO: 3020 - DNA, 294 bp, Homo sapiens
caagcagaccagcaattgcgtcctggagatctgtgctgagcagcgaaacctgagcgagcaggtagactcagccctctctgtttcactctcccctctgccagcgctcagtgccttcccctctatctaactttgtttccctctcagatgccaagctcagtaactctttctctgaagtagggctagggcctttctgtacttgagtttatggcagaattcttttcttagtgtagtcccttcagtctttcctcccttaggactggatagaagtgtctaaaaatactcttatttgaacag

SEQ ID NO: 3021 - DNA, 431 bp, Homo sapiens
ccttttgttttctaagcttactatcttgtgtttgtttatttgcttttaatgaagtattttgtgtagaaggttaaattaggatgcaaaacagatctgccattcctttttcccttatatcttccttttggtcttcatggacgagatgaatgaggattctgctgccctgagggagttcattggaaacctgcgttctcctacctctcccaaccctccattagctcaattttgagataatggaaaattgactggaaattcaaaactcaaactactatctttagatataaacactagtaattaaaatgtgccttttgaagatgttttctaagagaaaggaaatacgttgcagtgatgtgggtactgctttcataaaacagttttttcagtattttgagaattgccatattaatttttataatggaaaacttaataaa

SEQ ID NO: 3022 - DNA, 410 bp, Homo sapiens
ctggggcttccattcacgactttctggtccctggcaggacagagcgggatgccaccagcttgtccaaagggaagttccaggagctcctggtgggcatcgttgtggagaatgacgctggccgcggcgagatcaacgagttgaagcaggtggaaggggaggcttcgtgcagcagccgcaaaggaaagctgattttcttctatgagtggaacatcaaactgggctggaaaggcatcgttaaagaatctggagtgaagcacaagggattgattgaaatacccaatctttctgaggaaaatgaagtagatgacactgagaatttacaacgggaatgattttaccaacgaaagctatggcaacccaggaattgactgccaaaagaaaactgagtgggaataccctgcaggttcagg

SEQ ID NO: 3023 - DNA, 313 bp, Homo sapiens
ccttgcctgtgaagctcattgggatgaattgcactctaatgaagcaatacattgagtttgtggcagacagacttatgctggaactgggttttagcaaggttttcagagtagagaacccatttgactttatggagaatatttcactggaaggaaagactaacttctttgagaagagagtaggcgagtatcagaggatgggagtgatgtcaagtccaacagagaattcttttaccttggatgctgacttctaaatgaactgaagatgtgcccttacttggctgattttttttttccatctcataagaaaaatcag

SEQ ID NO: 3024 - DNA, 355 bp, Homo sapiens
cctctttcttctgtttgtaaaggttttctaaggcagggcttttcagactttattcagtcaacattaagctcctacactgcctcaaagcagagcgacgatggaaccctttatttcaatggaattgtgcacgtaggccagtgtattgaagaaaaactaagtctggtttatggagagttggcatggggcttagaggttgccgacctggacatccccacttagctggctctaaggcaccctcagaaaaccactgctctaacctgagaatgccatctagtttacaaactcttagaaaactgtgtttaatactcatatcactggcttctagatgtgaagcaaatgctctacaatggttttt

SEQ ID NO: 3025 - DNA, 340 bp, Homo sapiens
  misc_feature (1)...(340): n = g, a, c or t
ctgattgggggggcccaggagctacatgcctactctgtgcgccgcctctacaatgccctggcagaagacatttcccancaaccactggtgcaggtggcagcctggtgcattggggagtatggggacctcctgctggcagggaactgcgaggagattgagccccttcaggtggacgaanaggaagngctggcattgctggaaaaggtgctgcattcccacatgtccctgccagccactcgaggatatgccctcacagccctcatgaagctcagcactcgcctctgtggggacaacaaccgcatccgncangtggtgtccatctacgggagctgcttggacn

SEQ ID NO: 3026 - DNA, 411 bp, Homo sapiens
  misc_feature (1)...(411): n = g, a, c or t
ncgaggtaaatttgtcttgtgagattttactatatctcagacagcataaatgctgttttagcactggattctttcactgagcacaaagagttgttggggctttagcatctgactgattttgttacggggttgattctgaccataggaagtatgcaatgtgaatcactatttacagagaaacctacaacagatgcttgatgttgtagaaactgggacatatagataccaagcaaaattataagaaacctataaggtgttcaatacgcttgtgtttccaaaattcactgtacatgatcagtttggtgttcttgtaccacagtttttaactgaaggaaccagttgtaacagtctcaattttaactaaaacttgaagaactaaaacaacaatgcaaacctttcagcattgtttgg

SEQ ID NO: 3027 - DNA, 464 bp, Homo sapiens
  misc_feature (1)...(464): n = g, a, c or t
ctgccaccaactcaggactcaggggctcaattctcttctttggagcatattctgtagctcttcgaagcctgccaagtgtagcttccaaacttttaagtggtcttcttttggggggctttgttgttcgtacatttactgtgcttaattcaactttcatgcccttaataatgcctaacaagtctttttcgtattttccttttcactgtcttggctctctgaagtctccttggaagtctcctcagttcgaacagactgcttatctttcttgctacagatcacactgttagtgccaaaatatctttggatgttattttttgtccgggccaacagcgctgaactgcggtacctgactgttccgtgccgaacagtgagtagcataatcgcagccgctgatgtctccgggcttccagaggacaaagggtggcgggaaagggggcgaagaggtangaacgtcgagactctan

SEQ ID NO: 3028 - DNA, 143 bp, Homo sapiens
  misc_feature (1)...(143): n = g, a, c or t
aggtccaccctgaccatcaacaggggngaagncggcnatgaggccgactattactgtcaagtgtgggatcgnaataatgaccatgtcgtcttcggcggagggaccaaactggccgtcctangtcagcccaaggctgccccctc

SEQ ID NO: 3029 - DNA, 357 bp, Homo sapiens
  misc_feature (1)...(357): n = g, a, c or t
tggaacccangacccatccaacttggctgcttcacattttcatcccctcctgcatcattgctttcattttcatagccacagtgatagccctaagaaaacaactctgtcaaaagctgtattcttcaaaagacacaacaaaaagacctgtcaccacaacaaagagggaagtgaacagtgctgtgaatctgaacctgtggtcttgggagccagggtgacctgatatgacatctaaagaagcttctggactctgaacaagaattcggtggcctgcagagcttgccatttgcacttttcaaatgcctttggatgacccagcactttaatctgaaacctgcaacaagactagccaacacctgg

SEQ ID NO: 3030 - DNA, 402 bp, Homo sapiens
gaagctttctcaggggagtattttctggtcgacttggctaatattatatgtagtctgaatttctctttcagatgcttttaacctcgtaatacaattttattcagactgagagctgtttttctcttcaatgctttcagtgtctgtcttcagaagggacacccaaaagtgtctcatggtgtttctgagtgagttgggctgtcacaatgagaactctttggcactctatcgagacccataatgggaatccagcagtatttttttgtcaccattataaatagaaacttaggctgaaacattgctcccatttccattattgcaaaagtgcaatcctacccaggagtcctgcaggttctcctcctgcagttcagggacgctgctccataatgtgacactggagtgcag

SEQ ID NO: 3031 - DNA, 163 bp, Homo sapiens
  misc_feature (1)...(163): n = g, a, c or t
gcaggtctgacctacctgccaacctctcctctgctggcagattgtatcatccccattactgatatcagggctttcacaacaacactcaaccttctcccctaccataaaatagtcaaataaataaactgcagtcacgttggccggaaaaaaaaaaaaaaaaaan

SEQ ID NO: 3032 - DNA, 285 bp, Homo sapiens
ctggatgatggtcttcagcctctttctgtcccttctgtccctcacagcactagtatttcatgttgcacacccactcagctccgtgaacttgtgagaacacagccgattcacctgagcaggacctctgaaaccctggaccagtggtctcacatggtgctacgcctgcatgtaaacacgcctgcaaacgctgcctgccggtaaacacgcctgcaaacgctgcctgcccgtaaacacgcctgcaaacgctgcctgcccacacaggttcacgtgcagctcaaggaaagg

SEQ ID NO: 3033 - DNA, 160 bp, Homo sapiens
  misc_feature (1)...(160): n = g, a, c or t
gtagcaccatgngagaccactggaccatggtttcagaggncctgctcaggtgaatcggatgtgttntcacaanttcactgagctgagngggtgtgcaacatgaaatactantgctgtgagggacagaagggacagaaagaggctgaagaccatcatccag

SEQ ID NO: 3034 - DNA, 278 bp, Homo sapiens
caccaccacgtcgatgcggtccactgagaaggggttgaactgcttgtccggccggcgcatgaactcatgcttgaggaggtagccgctctgcccgttgaactcaaatactgccatgttctgctgcatgggcaagtccatcgtctggaagttgagggcaaccatctggcatccagcattccagaacatctggggcatgtagttggaggagtccatgcgggttcccttggggtaaatgcggctcatctggcgcttgttgtagtccacaaactgcaccgagg

SEQ ID NO: 3035 - DNA, 120 bp, Homo sapiens
  misc_feature (1)...(120): n = g, a, c or t
gataatgtaaatacttcttaaatgtctgnaactcttcaaaagtgatgcttcangataaatgagctgctaagcattttaagaatttaccgtaactctaatatctgganggaaggggatgga

SEQ ID NO: 3036 - DNA, 397 bp, Homo sapiens
  misc_feature (1)...(397): n = g, a, c or t
gaggtaaatgcgcatgtaatttatttatgataatgtaaatacttcttaaatgtctgtaactcttcaaaagtgatgcttcaggataaatgagctgctaagcattttaagaatttacgtaactctaatatactggagggaagggatggatctgaaaggctaccatcagtaagaggaataaaacttgctctgtgtcctccagaagtctggacagtgatcagcaggtaatagacacagaggaactgatttcaacttttgaaaaagagttttccactaattaacactgtcccacggcggaataggttccctgaagatgttgagtgctgaaagtgatcaagcaggaggctagagggcttcttgcctgggagcaggggagggttgggggagaaggacaanagga

SEQ ID NO: 3037 - DNA, 263 bp, Homo sapiens
  misc_feature (1)...(263): n = g, a, c or t
aagtgctcggtttacaggtgtgagccactgtgcccggccattatgtgttttaagaaagggttgtgatctgttacaggctggtgggcttaaactggatggccggcagctcaaggttgacttggcggtgacccgtgatgaggctgcaaagcttcagacgacgaaggtgaagaagccgactggcacccggaatctctatctggcccgagaaggcttgattcgtgctgggacgaangctgcagagggtgtgagtgctgctgatatgg

SEQ ID NO: 3038 - DNA, 394 bp, Homo sapiens
  misc_feature (1)...(394): n = g, a, c or t
gatagggactttgccaagtccaattatcttctaggattgaaaggtgcattttccccataaaaaaggcgaggaaaacccatggctgctttgtgtcacctcagtgacttacagtcccccttggcatttagttggtactagagccagtcatccttaacaaatcttttcacattttatttctttcacatgtagtcatcttcaaaaaggaaagatttggaattttagaaaaggggcaactcttctttttagcattctcatcagaaagtcacaaaaatcgatggaatcatttccactgggaagattgaccttttgtatttatttgtggggnaaattaataagcattccagatgcttgcagcttcctgcatccaggagatgctgtgttccccgtgatgcag

SEQ ID NO: 3039 - DNA, 240 bp, Homo sapiens; identical to SEQ ID NO: 326

SEQ ID NO: 3040 - DNA, 213 bp, Homo sapiens
  misc_feature (1)...(213): n = g, a, c or t
cactctgttnccgccctcctctgaggagcttcaanccaacaaggccacactggtgtgtctcataagngacttctacccgggagccgngacantggcctggaangcagatagcacccccgtcaaggcgggagtggagaccaccacaccctccaaacaaancaacaacaagtacgcggccagcggctatctgagcctgacgcctgagcagnggaa

SEQ ID NO: 3041 - DNA, 343 bp, Homo sapiens
cctcaggttaggaaggaggggcacaggttcttgttggcatgagtgtcaactcagtgcaaaggactgtcctaatctggaaacctgaaagctgtcatctcacagatgtagggaagagaacttctacatgactctgactccagtgtccaccatgaccaagttttatgtaccttgttacattttgagctttgagcataagtcctagtgcgttgtgtatcatcagtcaacttccaatccttgttagagctgaggccagtccaatatgaattccctgaaccaccatttggcaacagtgaatttaagaagtagtaagagtgtgattgtggataaatttcactgaatgtgg

SEQ ID NO: 3042 - DNA, 275 bp, Homo sapiens
cctgatgcccgaatttcagtttggcacttacagcgaatctgagaggaaaaccgaggagtacgatactcaggccatgaagtacttgtcatacctgctgtaccctctctgtgtcgggggtgctgtctattcactcctgaatatcaaatataagagctggtactcctggttaatcaacagcttcgtcaacggggtctatgcctttggtttcctcttcatgctgccccagctctttgtgaactacaagttgaagtcagtggcacatctgccctggaagg

SEQ ID NO: 3043 - DNA, 223 bp, Homo sapiens
ctgctgccacagccagtattgccggggctccaacccagtacccacctggccgtgggggtcctcccccacctatgggccgaggagcaccccctccaggcatgatgggcccacctcccggtatgagacctcctatgggtcccccaatggggatcccccctggaagagggactccaatgggcatgccccctccgggaatgcggcctcctccccctgggatgcgagg

SEQ ID NO: 3044 - DNA, 359 bp, Homo sapiens
ctgcgagtgggtgagttctgtcacaaccgtggcatcaagctggtggtggcagacacgcggggcctgtttgggcagctcttctgtgactttggagaggaaatgatcctcacagattccaatggggagcagccactcagtgctatggtttctatggttaccaaggacaaccccggtgtggttacctgcctggatgaggcccgacacgggtttgagagcggggactttgtctccttttcagaagtacagggcatggttgaactcaacggaaatcagcccatggagatcaaagtcctgggtccttatacctttagcatctgtgacacctccaacttctccgactacatccgtggaggcatcgt

SEQ ID NO: 3045 - DNA, 400 bp, Homo sapiens
aaatatgctgcatagactactggaccatattttgtagccattaaattttcaaaagactgggcccactgtaatacttcctccaaagtaaggtttgaagggggcctcttagattcatctctgcacatcttacaaatccaacaattccgcctgctcatttttctctaaaatgagaagagaaaaggcagcgttagaatatcatcaagcttcaaataaacaatgatcatttttttctcatgttggtggtataatatgtggaaacattccattgacaaatatatcctgtcgagcagtccaccatgctaaatttgatctcctctttgttatgatccgtttgaaatcaggttctgaaattttgtgagacacccagcattttatttttcccagagtaaaagaattttac

SEQ ID NO: 3046 - DNA, 299 bp, Homo sapiens
ccactcggatcagctcctcgctcacctgaagccaagagaagaaggagagaagcaccaagaatcagctaacctcagaaaggtctgttttggagacacaggaggtactatttccagcagtcagaggaagtgcacagcaccaatgcgaggaagaaaaacaatcccacttgcgcccaccagctaagggaccagggtctatgaagccccacagtggctccgacccaccatcatggcctgctggaccagggtgttgctgtgctcacacatgttcttcagaatcttgttggctgcattgtgccggg

SEQ ID NO: 3047 - DNA, 129 bp, Homo sapiens
  misc_feature (1)...(129): n = g, a, c or t
atctctggaagcttancaatcttattgcacactgttcgctggaagctttttgaagagcacattntcctcagngagctcatgagggttncatttttattcttccttccaacgtggtgctatctctgaaac

SEQ ID NO: 3048 - DNA, 410 bp, Homo sapiens
ccataggaaaaggatacagagtagagtttcatgaacctgaaacttggtggaaatttgatcctgaagaattagaaaagaggaataaacatggtgtgtctcgaaagaagattgctcagatgttggatcgttatgaatatcaaatgtccatttctattgtaatgaattcagtggaaccatcacacaaaagcacacaaagacctcctcctccacaggggagacagaggtggggaggctctcttggctcacataatcgtgtctgtgtcacaaataatcattaaattagctattttcagctaacacatttgttgttgcacttgaaaaagagttagtgagcctgtcttggagtttaagtagtttcaaataaaaaaaggctacagtgcctcacaaaggatgttcccagcaagttgttt

SEQ ID NO: 3049 - DNA, 464 bp, Homo sapiens
ccttgtggcccgatcacctcccaacaccttcacattggcaacacctggactagggtcttagtagtcccacccctggggtcgtcaaagaacagatcagaaattcctggggtgtaggggcaggatccttacatcccctgtactgtaacatatgcatgcaccccccagtcgcatccaagtcccacagatacaagggcttgctgaggtccgagggtctggatggtgagtccagggagcatgagaaattcatccaggccacacaggctcaggcacctatactcctgcccaccccctgcaggatggatattaccatttgaaatactttggcgcttgcagtgagatcttgcttaaaagaagaaacccaccaaattctagaatcgcagaggtgggggcacctatgtgacaaatgagggaacagaggcacagagattggcagggacatgctcaaagacatggagagcctgggc

SEQ ID NO: 3050 - DNA, 264 bp, Homo sapiens
  misc_feature (1)...(264): n = g, a, c or t
ccaccctaagcccgncagtggagctccttttccagattcagagctggtatcggagcggggagacctgggatagcaagttcagcaccatcgcctccagctacgaagagtgccgggctgagagcgtgggtctctacctctgtctccacccgcaagtgctggagatctttggctttgagggggctgatgcggaggacgtgatctacgtgaactggctcaacatggttcgggccgggctgctcgctctggagttctacacacctgagg

SEQ ID NO: 3051 - DNA, 128 bp, Homo sapiens
  misc_feature (1)...(128): n = g, a, c or t
cttccactgntcaggcgtcaggctcagatagctgctggccgcgtacttgtngntgctttgcttggagggtgtggnggtcnccactcccgccttgacggggctgctatctgccttccaggccactgnca

SEQ ID NO: 3052 - DNA, 329 bp, Homo sapiens
cctgaggctggctcatcggaggcgtgagtgttcggccctgccatgcctcacatccccaggatgccgcggtgggaactgggctgtggctttcctgccctggcactgcttgtttgctgggatttcaggaggaaaacccccaagctccgaaagaaaggtatttcttttttattttgtggttcacttcttccactagaagactcgtttcccagagcctctaccctctcctgtcaggggtggggagcgcttctggaactgataccctgggaaggaggtatcagtgctgagcgggcaggcacagtgtgtatgggggtggggagctctccctgagg

SEQ ID NO: 3053 - DNA, 373 bp, Homo sapiens; identical to SEQ ID NO: 6

SEQ ID NO: 3054 - DNA, 466 bp, Homo sapiens
  misc_feature (1)...(466): n = g, a, c or t
ccatgagtgacaggtggcctcttggtgggagaggtggggcagggggaaggcagctcccactagaccagggcagtatttaggggaaggaggcagattggagcagttggctgccaacacctggcctcactcagggagaggggccttgggcctggaagatatctgggtgaggtacccacaccatctgctgcaacctctgtgtatccattatgggctcacgccattcacaggcatgaattgagcacctagtatgtgggaaaacaggggaaacagagatggcacagacatggtctccatccttcgggggctccagtctagttgggggagatcagagaagttccatttgccactctaggccangctaggtaagcggcagagccatgaagcattgtgggagcttggaggagggagtgagcccttgcagtcanggagaaggagtcatcctggggagacttccagaaagtagccc

SEQ ID NO: 3055 - DNA, 114 bp, Homo sapiens
aaattcctgtaataaaagggaaattgagggcagagcaatcaggctggagttgcaaggacccaggggatcacctaatgccagaagccagccatccaaaactctgtttgtcaaagg

SEQ ID NO: 3056 - DNA, 373 bp, Homo sapiens; identical to SEQ ID NO: 6

SEQ ID NO: 3057 - DNA, 359 bp, Homo sapiens
aaacctaaattttttaattaaatgcctgttcaacaaagctaattggaacaaacacatttatgtaaatttacattctagaataccagggtaaacaaggagacgttattcaaagatgaatgagaaagttctattctttttcatcatttgtgtgatcaggttgcaaaggacatgctctttcctcgatgaaactgatgtcgaattagtggcagaggtggaagaaccaagcacctttctgggggctcgagcagccaccacttttctgtaagtgcctggaacactgtctgctttagtccgcaccatgttcaaacaagaagagaggagaggagagaacgaactgacttcccagccgagggtgtttc

SEQ ID NO: 3058 - DNA, 345 bp, Homo sapiens
aaaccctgcgtggcaatccctgacgcaccgccgtgatgcccagggaagacagggcgacctggaagtccaactacttccttaagatcatccaactattggatgattatccgaaatgtttcattgtgggagcagacaatgtgggctccaagcagatgcagcagatccgcatgtcccttcgcgggaaggctgtggtgctgatgggcaagaacaccatgatgcgcaaggccatccgagggcacctggaaaacaacccagctctggagaaactgctgcctcatatccgggggaatgtgggctttgtgttcaccaaggaggacctcactgagatcagggacatgttgctgg

SEQ ID NO: 3059 - DNA, 340 bp, Homo sapiens
  misc_feature (1)...(340): n = g, a, c or t
ctgtgagactagggctgtgctttgcaacccccatagcacccggcatatattgctctgcattcagtgtatatttgagagctctgttcttttggaaacactaacccatgtattttgaattttataccatttgtagatgtactagcagcaatatgtcctgtcttatggattacaaccatgcctagaagttaaaaaaaaaaatcactgtaggngtataaagtttacctcaaatataaccaaataattgagcaactggtaataactgctgtgctctgaatgtttgtgttcccccaaattcatgtcaacatcctattccacaaggngatggtatcaanaggtgagg

SEQ ID NO: 3060 - DNA, 325 bp, Homo sapiens
ctgagagtagacacttgtggtatgtggagtacagataagccaggggcaggccacggcacgctccatgaaagctaggagggagtgaaatatcagtgatcatcgcaaggaaggaggcagacaagagtaaggcacacctgactcttaggactagcagtcagaaccaggaggaaaggttttattgctatgcgggtaggtaagaacagattttacttacatccatatagttacttaaagtccagttttctgttaaacatttttcttaatatattgagccaaaactagtccagttaagctgaacttggtttttctggagatgaattgtttt

SEQ ID NO: 3061 - DNA, 419 bp, Homo sapiens
ccaggccgcaccccttgctgtctcagcagatgggatataggaagctcctgggcttagctgtgggaagccaagtaccctcaccggcatgggacatgaggggcagctagacttcacccccttcccgcagacctgcctccagagcaaggagaattctgccttaatctgttgggctccagtctccgggttgaattccagtgtatcccactgggagtgaatggatcatgaggtgggatggccccatctggatgttctgcagatccccacatgggaggagattcccaagtagaggcagccagaattctgactccctggcagcagcagggctttcaggcaccagtgtctgtgttgttagaactcagaggaagaggcaggggcagcagccgacagggggcagcatgacccaagcaaggggcctgagg

SEQ ID NO: 3062 - DNA, 246 bp, Homo sapiens
ccactgcaacagtgagtcaaactctcctcgcatgaccacaaagtatagggacaggtgtgaccccctccctgacccatccccattcaggtatgctctagcacagagccggtagccacagcggctggtgtagaaggactggctgaagatggacactgtgtgcccatccaccgcctctctcttcttcatcttgtaatctgtcaccttccaaatgagccttccattatagcaagtaccctccagcagttt

SEQ ID NO: 3063 - DNA, 220 bp, Homo sapiens
  misc_feature (1)...(220): n = g, a, c or t
aaagaccaatttgttctacctagcattttaactagtttttctgccggctatgttgaatgcacaaattctgtcacgcatgttcattcattgctacataatttggttcttctggaatatttttatgtagctcttggagtacagctatgaaaattaacaactgttaaaggaaataccttttttttttgtaattttttccttgaanaaccaaagtattttttca

SEQ ID NO: 3064 - DNA, 467 bp, Homo sapiens
  misc_feature (1)...(467): n = g, a, c or t
ctgtagcttctgtgggacttccactgctcgggcgtcaggctcaggtagctgctggccgcgtacttgttgttgctctgtttggagggtttggtggtctccactcccgccttgacggggctgccatctgccttccaggccactgtcacagctcccgggtagaagtcactgatcagacacactagtgtggccttgttggcttggagctcctcagaggagggcgggaacagagtgacagtggggttggccttgggctgacctaggacggtgaccttggtcccagttccgaagacataattgttgctgcctgcatatgagctgcagtaataatcagcctcatcctcagcctggagcccagagacggtcanggaggcccgtgttgccagacttggagccagagaancgatcagggacccctgagggccgcttactgacctcataaatcatgagtttgggggctttgcctgggt

SEQ ID NO: 3065 - DNA, 441 bp, Homo sapiens
cctcagcatcgcctggacctgttcttgcttggggcatcccgtcggtcaccaaccatgacagcgaggcgggcctggcctgtgctccaccggagggggcttcttgcacagatgacctgctcatttcagcccctccagaatcttctggcaggcgcagagcaacaggacgtccattttacagacgaggaaaccgagacacagggaaggttgccatctgcaacccagcccggtttttatcttgtttttctgtgttttaactttttatttagacttacagtttgaaacagtgctagaatcggaagcatgtaaagaaacctgtggaccttttatgcagatacacttaagtttttaacccatgtgccttatcactggggacctcttgcactctctctcatgatttttttcccgaactagatgaggatattgacaaagattcttgcttgg

SEQ ID NO: 3066 - DNA, 349 bp, Homo sapiens
aaagaactaatttgtaaattatgacacaaaattttattaacaaggaaatatccattaattgactactacagtaaaaactttataatgcttgtatcatgaagaaagaccttccttttccttatatattaattgaactacataggcttgctgtacattttgttattcatgttataagaattctagattccattgcttttgaaatatgtttctttttaggaactaaaagtcaacttatagtttgatttctgttttatttgtactgtgtttctgattttgtgggtttctaaataaaaagatcaaacccaccactttcaatatactgttttctatttaaacttttgagttgtag

SEQ ID NO: 3067 - DNA, 119 bp, Homo sapiens
  misc_feature (1)...(119): n = g, a, c or t
cttccactgctcaggcgtcaggctcagatagctgctggccgcgtacttgntgnngctttgnttggagggtgtggtggtctccactcccgncntgacggggctgctatctgccttccatg

SEQ ID NO: 3068 - DNA, 413 bp, Homo sapiens
aaaatgaatttgaaattcagtatctattcaccatgacctaagagtatacagaggaaacagttagaaatggccagttgagggtagggtgtttaattgagaagtcagcacacactggcagctcttaaaccaaatattggctcgtttaacttgaaactgtaagtattttgaaattctttgtaacatataatatgctgtaatttcaacccttatttcccctgttgttagacatagggactttagactaaacatactttttgccttcatcacagttccaagttcttcgatttgatttgtctaatggaacaaattgatgttaccttgaagtggtatgaggacctgataccttcagcctactttccccactcccaaacaatgatacatcttctccaagcattggatgtggacctgcccgg

SEQ ID NO: 3069 - DNA, 151 bp, Homo sapiens
  misc_feature (1)...(151): n = g, a, c or t
cgaggtccaccctgaccatcagggngggnngaagccggcgatgaggccgactattactgtcaagtgtgggatcgnaataatgaccatgtcgtcttcggcggagggaccaaactggccgncctaggtcagcccaaggctgccccctcgggca

SEQ ID NO: 3070 - DNA, 320 bp, Homo sapiens
aaaatgacatctaacataaccagcaaataccagtaatggtggtgatatatacattatcctttatgttgtaaataaattgtattcaaattaaatgcaattttctcatgatcaaaacattctgctttcgatcatgttttgccagaggaaaaggtgagcgcgcttagtgtattgccaggtacttagaaagtgctcaagatctctggcgtcctcaacagtcttggtaaccatcttggattatctttattaatggttttacaactcccctgactgacaaaccttcacttctttctttcttttcttttctctttcttttttttttt

SEQ ID NO: 3071 - DNA, 181 bp, Homo sapiens
aaacatttgtcttattttatacctgtactttgagtaaggttttaagttgaaatgtcattatttccttatctgaaggattaaaggaaacagggacccagtggcttggtggtttgggaagaacacttggtgatggcggctcactaaatttggcaccagcatagttctgattagcttgagattt

SEQ ID NO: 3072 - DNA, 454 bp, Homo sapiens
aaaaggcccacttgccgtaacctcttttggtctattttgcttcccattcagcccaaagtttatatgataaaggtgtttacttttacttcccagtctccaagtgctaacacataaacacatacatgtctgactgttgcagaactgttcgagctcctaattcagtgttaccttgttttagtcgcagcaaccctctcccctaccccttgcccgcccacgtttttctcactcttccgggttgtgcaataactctcccagccagtggtcctttccacagcctttctgtcccttaaaacacctgcaactgggggagaaatgggacccatgggagggggagtcgtcatcccttacacaagaaatagccactttccttttgttgtcattcttgtgatcctgggtgggtttctgtggcactcttttagaacatgtagcatcatcttagaggtctatttttact

SEQ ID NO: 3073 - DNA, 321 bp, Homo sapiens
aaaggaggttatgggctgagagtagattgctgaaagtcatgatttaggaagtgtaaggttactggtaatgacacaccgcaagtgcagctaagggagttgacagttgggatgagtgaaagaaaagattattagtatgaggatttcaaggaatcgagaaagtagggctttggatgagttgtttttgtagaagtcaccaatgatgacaatggatgctgatagagaaaaagatggtgaacccgggaggcggaggttgcaatgagctgagatcgtgccactgcactccaacctgggcgacagagtgagactcagtctcaaaaaaaa

SEQ ID NO: 3074 - DNA, 310 bp, Homo sapiens
aaaaggaagagaaaagcaatcatcactattttggttttgttttgttttaggagtaactgactactgaacagtactgcatgtttctgaggttcctctgttattcctgtagttcactacctctgcatcctccccaggacaagaaattcattttccttattgtactgtgttatgccaagaatattactattgtttggtgaatataaaataatcattatagcaacaatttttttggcgtcctaaataaggctgatccatggcaacggtactatgcaaagaaaagaataaagtcaaaacacttgtaaaacctttt

SEQ ID NO: 3075 - DNA, 451 bp, Homo sapiens
ctgcaacagcagagcaaggccagcaagatcctcattgtagactgggacgtgcaccatggcaacggcacccagcaaaccttctaccaagaccccagtgtgctctacatctccctgcatcgccatgacgacggcaacttcttcccggggagtggggctgtggatgaggtaggggctggcagcggtgagggcttcaatgtcaatgtggcctgggctggaggtctggacccccccatgggggatcctgagtacctggctgctttcaggatagtcgtgatgcccatcgcccgagagttctctccagacctagtcctggtgtctgctggatttgatgctgctgagggtcacccggccccactgggtggctaccatgtttctgccaaatgttttggatacatgacgcacaactgatgaacctggcaggaggcgcagtggtgctggccttggagggtgg

SEQ ID NO: 3076 - DNA, 270 bp, Homo sapiens
ccttcagaagttaaacgtgatcacttgtgctgggacagccaatagaggagtctgagatgatcatttccaaggagttcttcacagaggaggtagctttggagctgggctttgaggttgggcagtatttgaaacagtagagacggagcaaagaacccctcctggtggggtcagtcattcgctttcttttcctcctcaggaccagggctctttgaagatgaagaatgcccacaagggaacacaggcagaagatcagataagccaaagtcacag

SEQ ID NO: 3077 - DNA, 472 bp, Homo sapiens
aaaaaaggtgacttggattaaagtatgcaaactcaaggagtagtacgagcccacttgagtcaagttagcttagttgctaaagagcttgataccaaaattacttttgtttacttgatgaatgggatagttgttgcacagggccactgatctagattactgtcttatttgtcaagtacttatagttgtagaagtagcagtgtgaaaattatcggaatggagaaggggcaatgataaaacaatttattttcaggtaccagcaacttcaaggtttctgccagcccactgttgtatacacttattgagaaaacaatgcaaaatgtgaagcatccggttactggacaatttctatatcaggacagcaactgggccagcaaagttgagaaactcactttagacaatgctgctttccctttccttgcatattctggaatcccagcagtttctttctgtttttgcgaggtaagtctgttca

SEQ ID NO: 3078 - DNA, 269 bp, Homo sapiens
ccttgcctcagatccaaggtcactcggaagaggccatgtctaccctcaatgacactcatggaggaaatgctgagagaagcattcagatgcatgacacaaggtaagactgccaaaaatcttgttcttgctctcctcattttgttatttgttttatttttaggagttttgagagcaaaatgacaacacccagaaattcagtaaatgggactttcccggcagagccaatgaaaggccctattgctatgcaatctggtccaaaaccactcttc

SEQ ID NO: 3079 - DNA, 142 bp, Homo sapiens
  misc_feature (1)...(142): n = g, a, c or t
agcagcgctggtggtgcctcagccatggcctggaccgttctcctcctcggcctcctctctcactgcacagactctgtgacctcctatgtgttgactcagacaccctcagtgtcantggccccaggaaagacggnnaagatta

SEQ ID NO: 3080 - DNA, 341 bp, Homo sapiens
aaaacagatttcatctagagcttcatttccctgttgagctttcttaaagagttctcttaggactgactgtcggaactggacaggtaaactcaaggttaagttgtcttcaatgaaaatctgtattacctcctgatagttgccagatctcaaacaaatatggacttgactatatggagtcaactgttgagatgtactatcagaagaaggtacaagaacatcacatgcttgacaatagccagctaaccgcttctcatctatggtacaatgaagagataatgaacctatctctgcaattagttctttggttctaaaaaatttttccctggcattttcatagacag

SEQ ID NO: 3081 - DNA, 468 bp, Homo sapiens
ctgcactgggagagctgagagcctccatgacagaccccagccagcgtgatgttatatcggcacaggtggcagtgatttctgaaagactgagggctgtcctgggccacaatgaggatgacagcagcgttgagatatcaaagattcagctcagcatcaacacgccgagactggagccacgggaacacatggctgtggacctcctgctgacgtctttctgtcagaacctgatggctgcctccagtgtcgctcccccggagaggagcatgcggcgatgctgagtttcatcaaataggacgcagcagaagttgggaagcactgcagaagatgggttgtcttccagaaagaccactgttttggggaacagcttggctctttcttcggccgctggtggttggattagctgttggagggatgtgcaggactgaatggctagtactgatggtttcacggctgtctctgcaggcaggg

SEQ ID NO: 3082 - DNA, 173 bp, Homo sapiens
aaaaaaataaaaacaacagagtgggcttctttcctgccgttgcttttgccatttgtagcattacaggtaatcagtcagaattcagatcacttaactacataggtgagagtgagagtgggttaagttatgagtcctctgtttttgctattctctctggcctgtggttctgctgg

SEQ ID NO: 3083 - DNA, 373 bp, Homo sapiens; identical to SEQ ID NO: 142

SEQ ID NO: 3084 - DNA, 424 bp, Homo sapiens
cctcctccctcacacacacgtcgccctgtcagaaggccaggcacactactgcagccaggatgctgggatagcaaggggataggtgctccaaccttcaccttccagaaaggcagggtgatctgaagtgacgtgtagctgagagctggatggggagaatttcactttcccagttgatccagaaaggaaagaaaccccagagcatcctctcggaagaacttaaactggctttgggctccagtgcgagcgagtgacttgtggaaaggggcaccatgatgagaggccggggccggtgggtgttgctgtcctgggtgaacatctcgtcatctgtctgttctttctccccggcatcatatcccttatagtctgtgctccaggtaaacagtgtctctgccagccacagcttggcaagcccggctatgtctgg

SEQ ID NO: 3085 - DNA, 308 bp, Homo sapiens
ccaccggaagcctgggaccacaaaggctactgctgaatagaagtaaacagttcatccatgatctcacttaaccaccccaataaatctgattctttattttctcttcctgtcctgcacatatgcataagtacttttacaagttgtcccagtgttttgttagaataatgtagttaggtgagtgtaaataaatttatataaagtgagaattagagtttagctataattgtgtattctctcttaacacaacagaattctgctgtctagatcaggaatttctatctgttatatcgaccagaatgttgtgattt

SEQ ID NO: 3086 - DNA, 470 bp, Homo sapiens
aaaacagcaaatagcagatttacgggaagatttgaaaagaaaggaaaccaaatggtcaagtacacacagccgtctcagaagccagatacaaatgttagtcagagagaacacagacctccgggaagaaataaaagtgatggaaagattccgactggatgcctggaagagagcagaagccatagagagcagcctcgaggtggagaagaaggacaagcttgcgaacacatctgttcgatttcaaaacagtcagatttcttcaggaacccaggtagaaaaatacaagaaaaattatcttccaatgcaaggcaatccacctcgaagatccaagtctgcacctcctcgtgatttaggcaatttggataagggacaagctgcctctcccagggagccacttgaaccactgaacttcccagatcctgaatataaagaggaggaggaagaccaagtacatacaggggagaaatcagtct

SEQ ID NO: 3087 - DNA, 465 bp, Homo sapiens
ccttgcctcagatccaaggtcactcggaagaggccatgcctaccctcaatgacactcatggaggaaatgctgagagaagcattcagatgcatgacacaaggtaagactgccaaaaatcttgttcttgctctcctcattttgttatttgttttatttttaggagttttgagagcaaaatgacaacacccagaaattcagtaaatgggactttcccggcagagccaatgaaaggccctattgctatgcaatctggtccaaaaccactcttcaggaggatgtcttcactggtgggccccacgcaaagcttcttcatgagggaatctaagactttgggggctgtccagattatgaatgggctcttccacattgccctggggggtcttctgatgatcccagcagggatctatgcacccatctgtgtgactgtgtggtaccctctctggggaggcattatgtatattattt

SEQ ID NO: 3088 - DNA, 190 bp, Homo sapiens
aagatgtcgaagcgaggacgtggtgggtcctctggtgcgaaattccggatttccttgggtcttccggtaggagctgtaatcaattgtgctgacaacacaggagccaaaaacctgtatatcatctccgtgaaggggatcaagggacggctgaacagacttcccgctgctggtgtgggtgacatggtgatgg

SEQ ID NO: 3089 - DNA, 166 bp, Homo sapiens
gaggtaaaaacaaaaatatttatttggaaaatattagtagcatgataactcaacctcaccagatattaacagttcatcaggtcaggcaatagaacaagtccacatgagcttcttaaaaagaaatggatgactacttcaatagctgactccatcttccattttatta

SEQ ID NO: 3090 - DNA, 193 bp, Homo sapiens
  misc_feature (1)...(193): n = g, a, c or t
ncgaggtctgattgaaggagaaaatatggtccttatttgctcagtagcccagggttcagggactgtcacattctcctggcacaaagaaggaagagtaagaagcctgggtagaaagacccagcgttccctgttggcagagctgcatgttctcaccgtgaagganaagtgatgcaggggagatactactgtgcag

SEQ ID NO: 3091 - DNA, 145 bp, Homo sapiens
  misc_feature (1)...(145): n = g, a, c or t
tcgaggtcctcaggcacttggcctttgntttcacaccaacttgatgggttctactataagatgctaaaaaggtgggttgtgtgtggttcagattggttgatttgtaaccctagttgtgcataagaattgcccagatatttttttt

SEQ ID NO: 3092 - DNA, 89 bp, Homo sapiens
tcgaggtaaagaaaacaaaattggagttgaagaataagtaggtttccaattggctattgccgttttctttgaaaaaataaacatttttt

SEQ ID NO: 3093 - DNA, 164 bp, Homo sapiens
  misc_feature (1)...(164): n = g, a, c or t
tcgaggtaaaaatactgaatattatagnttacctcttctcttcttttaagagcctacgcaacttttctgcacttgtttctattttctttgttttctgcttttcttccttttcagcttgtttttctcttaattccaaagatttcttttagaacccagatatcgaa

SEQ ID NO: 3094 - DNA, 283 bp, Homo sapiens
  misc_feature (1)...(283): n = g, a, c or t
aaaagaggacactgaattagagtgactgttgggccagggtgggaggatgggtggtcaggtaagacagactctagggagaggaaatcctgtgggcctttctgtcccacccctgtcagcactgtgctactgatgatacatcaccctggggaattcaaccctgcagatgtcaactgaaggccacaaaaatgagctccatctacaagtgattacctagttgtgagctgttggcatgtggttagaagccatcagaggtgcaagggcttanaaaagaccctggacctcn

SEQ ID NO: 3095 - DNA, 304 bp, Homo sapiens
  misc_feature (1)...(304): n = g, a, c or t
cactaaacctcaagaagtcagataggtattatcatggnccaactccaatccagtcactacagtatgcaacaagtcaggacattattaattcttttcaaagtattagacaagaaatggaagcttatacacccaagntaactcaggttctctcaagtagngctgccagtagtaccatnacagcactgtcacctggaggggcacttatgcagggaggaacacagcaagccataanccagatggtgccaaatgatattcaatctgaattgaaacacttatatgtagctgttggagaacttctaccaca

SEQ ID NO: 3096 - DNA, 137 bp, Homo sapiens
  misc_feature (1)...(137): n = g, a, c or t
ncgaggtaaaagtcgacctgttttgcagaaagtctgctgtttttgtactaaaggctttggaatttggcatttagctaggaatgcacattctttcacctcattcatactttaagaaccacagaagtgactctgcttgg

SEQ ID NO: 3097 - DNA, 182 bp, Homo sapiens
ttggctcgcttaaatgggacccttcgggaagacgataacaggatcttaagaccctggcagagctcagagacccgcagcattaccaacaccacagtgtgtaccaagtgtggaggggctggaaaacaccaagtcatacattttacattgtagaagcagtagcagcagtactatactcagtattt

SEQ ID NO: 3098 - DNA, 125 bp, Homo sapiens
  misc_feature (1)...(125): n = g, a, c or t
gnaaaccagtagcccctctggaccccccagtgaatgctgagatggagctgacagcaccgtccctcatccagcccctgggaatggttcccctgatccccagccccttgtcatcagcagngcccctg

SEQ ID NO: 3099 - DNA, 215 bp, Homo sapiens
  misc_feature (1)...(215): n = g, a, c or t
nngcaggtccttgcgggaagacctcatgggacgcaaggactccctgggcagagggtgggcccctggtcctggaggcacagaatcctcgacccacacgactatgtgacctctttataactggggaagacttcgatgatgatgtgtgatctgggactggcagggtattaatcgagatacacttgttaggagggacagggttcccctaaggcactttt

SEQ ID NO: 3100 - DNA, 380 bp, Homo sapiens
  misc_feature (1)...(380): n = g, a, c or t
ncgaggtccaccctgaccatcaacagggtcgaagccggcgatgaggccgactattactgtcaagtgtgggatcgtaataatgaccatgtcgtcttcggcggagggaccaaactggccgtcctaggtcagcccaaggctgccccctcggtcactctgttcccgccctcctctgaggagcttcaagccaacaaggccacactggtgtgtctcataagtgacttctacccgggagccgtgacagtggcctggaaggcagatagcagccccgtcaaggcgggagtggagaccaccacaccctccaaacaaagcaacaacaagtacgcggccagcagctatctgagcctgacgcctgagcagtggaagtcccacagaagctacag

SEQ ID NO: 3101 - DNA, 146 bp, Homo sapiens
  misc_feature (1)...(146): n = g, a, c or t
ccatgggaagcccgagaatnggttcctatagacccggttcctgatgaattcccaggccaaaagaaccaccctgacaaattttgggttctgaaagtcttattattggacagtattgcatagctagagaaggaaaaggatttactcat

SEQ ID NO: 3102 - DNA, 268 bp, Homo sapiens
  misc_feature (1)...(268): n = g, a, c or t
cattttccccttggtcacacatctgtaacaaagccctaaagtcaaaaccagtgacccgagacccacgtgcccaagactcccggggtctgaacctaaactttgtacacgttactaacataccagttcgcttacctaaaagggctaggtcatatcttaccacgtanacaaacatttcctctagaaaaaaggacagcagggatcctcttggcttccttcagccagtggctttangacatgcaagtccctgtagtaagggaagtctatgacc

SEQ ID NO: 3103 - DNA, 10 bp, Homo sapiens
tcaaaaataa

SEQ ID NO: 3104 - DNA, 159 bp, Homo sapiens
gaggtaaagctcaaacttacagagtctgttgtaaggttaatacatagaatgctagctttttagtcacctgagaatcaggaaattcacatgaacataattccctatactgacaaagaactatagctacctatgggcttgtcaagttcctacgcttcattc

SEQ ID NO: 3105 - DNA, 156 bp, Homo sapiens
  misc_feature (1)...(156): n = g, a, c or t
nttcgaggtccaccctgaccatcaacagggncgaagccggcgatgaggccgactattactgtcaagtgtgggatcgtaataatgaccatgtcgtcttcggcggagggaccaaattggccgtcctaggtcagcccaaggctgccccctcggtcactc

SEQ ID NO: 3106 - DNA, 238 bp, Homo sapiens
tactctcagcatgagaaatacaagtattatgagaaagagggcttattctgagcagaatttccatctctgctgctctcccatctgccggccgttggattgggaatctatactggaacacacctgacaacctccaccagcactttttgatgaagaattggaattcactctattcacatagtagaattatatcagagattgcaagatagctaactgaagagctactatgattcttgggtgg

SEQ ID NO: 3107 - DNA, 168 bp, Homo sapiens
catgttataagaattctagattccattgcttttgaaatatgtttctttttaggaactaaaagtcaacttatagtttgatttctgttttatttgtactgtgtttctgattttgtgggtttctaaataaaaagatcaaacccaccactttcaatatactgttttctattt

SEQ ID NO: 3108 - DNA, 122 bp, Homo sapiens
gtatcacatgagctgctgagctgaaatcacagtggtttatttggtgtcttgcaggacccagcctttatatgttaatgtttttccctcattggtatgggatacctacaggatgaagtgcagac

SEQ ID NO: 3109 - DNA, 196 bp, Homo sapiens
  misc_feature (1)...(196): n = g, a, c or t
agatggtcctcctctgtgcccatgacccctcagcagccaaggctggccctgccagataaatgtgtgtgcccatgatcacacccangggcacaggccacatacgtttccctgaaaccttgggctccagcctccatcccgtccatgtgggagggaacttgggtcccagcagtgtgtctttcagcaccaantcatgttt

SEQ ID NO: 3110 - DNA, 380 bp, Homo sapiens
acctaaatagcttggcgtaatcatggtcatagctgtttcctgtgtgaaattgttatccgctcacaattccacacaacatacgagccggaagcataaagtgtaaagcctggggtgcctaatgagtgagctaactcacattaattgcgttgcgctcactgcccgctttccagtcgggaaacctgtcgtgccagctgcattaatgaatcggccaacgcgcggggagaggcggtttgcgtattgggcgctcttccgcttcctcgctcactgactcgctgcgctcggtcgttcggctgcggcgagcggtatcagctcactcaaaggcgggaatacggttatccacagaatcaggggataacgcaggaaagaacatgtgagcaaaa

SEQ ID NO: 3111 - DNA, 295 bp, Homo sapiens
tcctccatcctgtggaacgtgggaaaactatcttgagtgttggcgtgttctaagtatgacataatagtttaatgtatgataaatcatgggtgtttagacgaaagatttacacatataaattggaggctttagcggtcttagtgtaactaacttttcggtccccttaacccttgatgcctgttctatgggtctctagagcggaaggagcattatactccggaaacatttgctggaaggggttatgagaaattcctctctgtatgctaactccgtaatacaagcgtttgtgtatttt

SEQ ID NO: 3112 - DNA, 287 bp, Homo sapiens
  misc_feature (1)...(287): n = g, a, c or t
naggtgatttgcccgccttggcctcccaaagtgctgggattacaggcgtgagccaccgtgcccagcctaacagttgctttcttttcagatccggagacatacccttcagccttgctgccatgtgaaatttgttgtctaccagaccccagagctcccagttcttggtgtgcagcaagggcagaagtgggtgactcaccttctggcacaaacatgttggcgatcaccatgagcccggccaggatgaggaaggaggccaccgtggcacggcggcccacgtaaatcatggt

SEQ ID NO: 3113 - DNA, 508 bp, Homo sapiens
  misc_feature (1)...(508): n = g, a, c or t
ncgaggtgttgttgcctgggctggacgtggttttgtctgctgcgcccgctcttcgcgctctcgtttcattttctgcagcgcgccagcaggatggcccacaagcagatctactactcggacaagtacttcgacgaacactacgagtaccggcatgttatgttacccagagaactttccaaacaagtacctaaaactcatctgatgtctgaagaggagtggaggagacttggtgtccaacagagtctaggctgggttcattacatgattcatgagccagaaccacatattcttctctttagacgacctcttccaaaagatcaacaaaaatgaagtttatctggggatcgtcaaatctttttcaaatttaatgtatatgtgtatataaggtagtattcagtgaatacttgagaaatgtcaaatctttcatccatacctgtgcatgagctgtattcttcacagcaacagagctcagttaaatgcaactgcaagtaggttactgtaagatgtt

SEQ ID NO: 3114 - DNA, 166 bp, Homo sapiens
ttcgaggtccatgggatggctcttctgaccattgggggccaggccaggccaggccaggcttagggcagcaaggaccaggccaaaggggcagggcctcctttggaggggttgaggggtacatcctcggctggtgtttgcatccaggggtccagcaggatctcttcca

SEQ ID NO: 3115 - DNA, 350 bp, Homo sapiens
  misc_feature (1)...(350): n = g, a, c or t
tcnagggggatggaggactagtgatcggctggctgcttccagtcgattagagaggtgaaaaagctgaacgtgtgccagtaatcttcaaaaggcagaacatatcacctctgccccgtaaactgttctctccgaggggaaaaaatggaagttatcctcacagttcactgccgtggtatttcttctgtcccatgctttgcatgactgccatggtacagccttgtttcaaactgttcactgtgatctgtgggtctttgagtttcagtgagtttgctgaaatgtcgaagaagtagttccaaacttcaatgttcaatgaaatttttgttcaagtttgaaatggagagagcagcttt

SEQ ID NO: 3116 - DNA, 344 bp, Homo sapiens
  misc_feature (1)...(344): n = g, a, c or t
ncgaggtctgaacgtctgtgggtgagccggggtcccctgggagggtcttcttgcactctgactgcagtcggtaggcactggacgtcagtaaacgaagggaagtcctcaccatatcagacttgggttttttggggaataatgctgccatttctgtaacagctaccgtgtatcctctctgagcagggaatataactgtcatgtttattttcttgggctgctcttaagagctcctgtatgtttttggtgatctgttcagtcctcctgatgacatcttcggtgctagggagagtggggcttggggccacatggggttctgctgtgtctggtaccaagccatcccctgg

SEQ ID NO: 3117 - DNA, 365 bp, Homo sapiens
  misc_feature (1)...(365): n = g, a, c or t
ntcgaggtcatgagggtccccgctcagctcctggggctcctgctgctctggctcccaggtgccaaatgtgacatccagatgacccaatctccttccaccctgtctgcatctgtcggagatacagttacaataagttgtcgggcctctcagaatatagatcggtggttggcctggcatcaacagaaaccaggcaaagcccctaatgtcctaatttatgcgacttccagtttagaagaaggggtctcattaagatttactggcagtggatctgggacacaattcaatttaaccatcaccagtctgcagcctgacgattcagcaacttattattgtcaacattattctgcatctcttcgcagttttgg

SEQ ID NO: 3118 - DNA, 350 bp, Homo sapiens
  misc_feature (1)...(350): n = g, a, c or t
ngtggaacagacgtcagaaaaacaaaaccttcccaaaatactcctggatttggaagatggaaattgcaaactgcagtgtagcaaaaggaacattcattttaggatctggaaatctgggtgggagtccagactcctctcactagcnggaagactgaaggcaggttaggctaactattctgagaccacaaaatgcaactcagaactggatcgagtgttattacacataggaaaagtgctttataaattgtgaagcagtatatatacaatgttaggaagcagcatcataaagaccttgataaatcaatgagaaaaaaatacaaaaatgcacaaaggatgggaataggtaattc

SEQ ID NO: 3119 - DNA, 3 bp, Homo sapiens
  misc_feature (1)...(3): n = g, a, c or t
ccn

SEQ ID NO: 3120 - DNA, 348 bp, Homo sapiens
  misc_feature (1)...(348): n = g, a, c or t
ctgagacaaaagtaggcccaantccttccacagggacggaatgatgctgccagttcactgtcagcatgggtgggaagagattactgacaaaacagaccaaagtgttgggcttgccaaactccaggggcttcagcgtgaacacttcagcgataggaaaccctctggacaccgggattctcccatcaagttttggccctatttgctggatcatccactcgcagaactctttgtcaaataaaatggcaggagcatctccctgttcctgagcccagtcagcaaattcgggcaggcgaggcacccgagtgttctgggaaaagtcgaagaagaaaagctggtcctcgtcgtagg

SEQ ID NO: 3121 - DNA, 372 bp, Homo sapiens
  misc_feature (1)...(372): n = g, a, c or t
ngcaggtggagggcacagagagggctctgggtctaggctgcagctctgtggcctgtgctgggtcatgaggacatggggacacagagggacgggtgagactgggtgaggtgccagaatccaaccctcccaggacagtcaccagaaaggagacagtctcttagggcagagatgtgtctgtccctggagccccgtcacctctggggcccagtgtctctctgttcacggatcggcctcctgccttcctcaaagggcatgttagactcaggaaatgaccagaggggagtgaatgaggggtgcagagaactccatggctaccaggtgaagtttggggtcatcacaggctgctggggtgggcctgggggctgctgagtc

SEQ ID NO: 3122 - DNA, 115 bp, Homo sapiens
gcatcgacaaaagaaccattgaaaaatttgagaaggaggcctatgacccccacccagataggcccaagcctgctgcctatcatgtggcagctctacccttgatggacgatcccga

SEQ ID NO: 3123 - DNA, 77 bp, Homo sapiens
ccacggcagtgactgctgattgcctaaccccacatgtgttctcccccttccctgataatcaagcccctgattttcag

SEQ ID NO: 3124 - DNA, 315 bp, Homo sapiens
aaaatcagattttctaaactacaattgttttagaacactgtatgaagaacttatctagtcatagttatttgtagtcaggattttaacagcttgcaacaggtaatgttttgaatataaatatctttccaaagtgttactaatggtaaagagataattttctaggcttctattctgctgcttgaagtcagaactgctgatggagacaaaggcacgaaagtgtacgtattccggattagcaacccaggaacccatcacttctgaagactctaaactgtgctgtcattttgtttttatatgcattaaaatatttgtttt

SEQ ID NO: 3125 - DNA, 159 bp, Homo sapiens
  misc_feature (1)...(159): n = g, a, c or t
tcgaggtccatgagtgacaggtggcctcttggtgggagaggtggggcagggggaaggcagctcccactagaccagggcagtatttangggaaggaggcagattggagcanntggctgccaacacctggcctnactcagggagaggggccttgggcctgc

SEQ ID NO: 3126 - DNA, 382 bp, Homo sapiens
ttcgaggtaaaatcttgagggattgatctcgcctcatgacagcaagttcaatgtttttgccacctgactgaaccacttccaggagtgccttgatcaccagcttaatggtcagatcatctgtttcaatggcttcgtcagtataagttcttctccaggaactcacgcactgacttggcaccccggcctatggcattggccttccaggcatggtatgtgcccgaggggtcagtctgatagagcctaggagtgccatcaaagtcgaaacccacgatgagggcagagatgccaagcggcctgcgcccattgctctgcgtataacgctgcttcagactggcgatgtagcgggtgatgtactccacaggtgaccgggtcctccgcagtc

SEQ ID NO: 3127 - DNA, 310 bp, Homo sapiens
  misc_feature (1)...(310): n = g, a, c or t
gntttaatatggatatactgatgaagacttcaaaattcaccaagaatctttgggatctaatttcttcaaccaatttactttagggtcctttttactgtaggtggtggggatctacctggttctcaatttgacaccctctcaacatgaatgaggttcaaatcacattcattcctaagcgatcactcaagaatggtacagatgtgttggagtatgccaatacctaaggtaaaaaagtagattatctttaactccagacccatgttctcaagataaaagcctttgacattcatgatcctgtcacattttcagg

SEQ ID NO: 3128 - DNA, 381 bp, Homo sapiens
  misc_feature (1)...(381): n = g, a, c or t
ctggcactttaagaaaacgataatctcgaaaaccacaaaattgccaaattgttccctaaactcctaagcagataaacatgactaatgaatgagtttgttttgtaaagaaaaatcattcaaataaattgaataattcatactgagatgcaaagtttgtcttctttcttcctatctacttggatttataaaggggnnnaccgtaatataggaaaatataccctattttgaatgtggcatntttgnttgaaaagctggcccaattaattaaaantncttgtantggaaagtntcntcccctgagcagtccatatttnnataaatgggaanangacatctatggcgcagcatnttcatagtctnnactgagactaatgtcnacaa

SEQ ID NO: 3129 - DNA, 359 bp, Homo sapiens
  misc_feature (1)...(359): n = g, a, c or t
cgtgaataccaagacctgctcaatgttaagatggcccttgacattgagattgccacctacaggaagctgctggaaggcgaggagagcaggatttctctgcctcttccaaacttttcctccctgaacctgagggaaactaatctggattcactccctctggttgatacccactcaaaaaggacacttctgattaagacggttgaaactagagatggacaggttatcaacgaaacttctcagcatcacgatgaccttgaataaaaattgcacacactcagtgcagcaatatattaccagcaagaataaaaaaagaaatccatatcttaaagnaaacagcttttcaagtgcctttntgcagt

SEQ ID NO: 3130 - DNA, 238 bp, Homo sapiens
  misc_feature (1)...(238): n = g, a, c or t
ttttgtatgtgngnatgtatgtgtaaatagcaatanaagaaagattnaaaagtttgctaagttttttctttttaagccctttaagtaatgatataactagaaactacgtttcatctcanaggaaaaaccacaggtgatatattctcatgcttcagggtaaaaacctctcttaaaaggctatgtttgngaaagccttcctaaaantatgcttntgttgntactatcaatttgatattca

SEQ ID NO: 3131 - DNA, 374 bp, Homo sapiens
  misc_feature (1)...(374): n = g, a, c or t
ctgtagaaagagcgagagagatggttaaaatgccattaaggaaagctccttgtttagaatctttaagatagagctatatgtaaccatcactattcagccatttttgacctacaaaaatggtcacttcatatggtccaacacatttggtgagaatccttaagaagtggagggcttttcctttgggcaactaatttagaggtgatcccaaacctagaaatntaatnatatatctagattcttctctcacctcttctacttctactctttctactttggaaagattttcaaagcacaacacctgtcacagaacggatgtaagttanttttcatagaaggagnccctctntttcatagaggaattngtgtanntnccc

SEQ ID NO: 3132 - DNA, 335 bp, Homo sapiens
ctgctatctagaagaaaaccaaggtcccttaatatagtctaaatataatgtgtggcttattatagagaaatctttagcaacgtaagtttaaccagtaagtgtcacaactgatcaacagtacttaaaaggaaacaaacaaaaatcacactagccacaaatttccaccatatacacatgaaattaattttaatctgttttgactccttgacactaactgatcattaatgaaatatgatatggaaagatcacagagtagaaaacaagcaaagattagtttatacaacagtgactatatacatcagagggaaaacatgctagctaatgcaacattaagg

SEQ ID NO: 3133 - DNA, 414 bp, Homo sapiens
  misc_feature (1)...(414): n = g, a, c or t
ctttcccagaattagttgtntagggttggcccaagagatgtaagaaaaatctcgcattgctccctaagcaccctgggccttattaaagagcaacttctatttccagtcgggggagtaacactaaagctacaagaaatatgtaataatgataggtaataatgtgntccaaagctttttcaaactagaataaggaggcaaatngaagaatgaganactgatgtccacagttcattggcagaatctaaccccttctgttatcttttntaatactattngnngcttacatagaagtttcacangaagatanaaatgcttgaanagnctgagagtaaaaaagattntgctgcnaaangctntgatataaactgcctcttncannccacagggatacctgnttaaagaantttcttattt

SEQ ID NO: 3134 - DNA, 181 bp, Homo sapiens
ccaatccgttttttaattcttaaattcttgacattacagaactaaactgaaatttattaacattccactcttacacttcttatcgacaaacagaaataaaattcatgagccaaaaaacccaaaacaaaactaaaaacagggaaaagcttataaaactaaatatggatcccagcattaacag

SEQ ID NO: 3135 - DNA, 341 bp, Homo sapiens
  misc_feature (1)...(341): n = g, a, c or t
aaaaatccatgttcaacccaaacccactccccaaccctaactataggagatgaccctttaggaagctgaaaaggtttttataaagtcacaaaatgcatctcaatgcaagtttatataatatcaaaattatctcactgattttaatgtgtaagttatataatttatttcacccaccttgtattattctagaaaataagtcagnttttatatttaacaaatatgtgcaaaaatcataaacatagcttatagaaatatcaacngatatctaattacaaagtttcccgatctacttcgcttaaaaggcccaagtccccttttttctttttatttataacctntat

SEQ ID NO: 3136 - DNA, 284 bp, Homo sapiens
  misc_feature (1)...(284): n = g, a, c or t
aaaccaatccaatatacagacctttgaaagtaaaagatcaactgcacagatattttttaactaaagaatgtgtcagtaaatctatgtaaatatccaaattgacacaaattttctaaagagttaaaattattaaattncaaattattattttatatacttttgatcaaaanataatatttgcttcaccataagtttgaagatattaagaaaacataatctaaggtttattacaaaaaataatggccnctgatagatatacagagaataatntattnttaaatttt

SEQ ID NO: 3137 - DNA, 268 bp, Homo sapiens
aaatatattccagaagagcgtttataattcatttacaagtgcagtattgcgctagtaaatgttacttgacctcttgtataaataatgccgattaagaattagtcctggaatagttttcgaatttctaactctgtagatctaaaacacaattgtaaatggtataaagatgtaagaatcatattgtgataaagccaatctcaaaaatagagaatccagacccttcccagataatttaagaactgagttttcctcaacttaaacatgatgg

SEQ ID NO: 3138 - DNA, 365 bp, Homo sapiens
  misc_feature (1)...(365): n = g, a, c or t
gtcgatttgggaggaaaggtgtggctataaactttgttactgaagaagacaagaggattcttcgtgacattgagactttctacaatactacagtggaggagatgcccatgaatgtggctgaccttatttaattcctgggatgagagttttggatgcagtgctcgctgttgctgaataggcgatcacaacgtgcattgtgcttctttctttgggaatatttgaatcttgtctcaatgctcataacggatcagaaatacagattttgatagcaaagcgacgttagtcgtgagctcttgtgaggaaagtcattggctttatcctctttagagttagactgttggggtgggtntaaaagatgggcgnct

SEQ ID NO: 3139 - DNA, 385 bp, Homo sapiens
aaaacattgttttctaaacactaacaaaaaaaattaagggcaaactgaaaatacaaatgagatttacaggcactgtgtgtagaatgtgtaaaaattcacttagcttttcttttgtttttttggtgttgctttaagaaactttatcaaatatatttcttacaaatataaagctttctctcccaattgaaggcaattaaaaaaattcaaagtttatcaatactcagtacacaggtgaaccagtcaaattcattttctttctggaaaagaataacaaaccaatatttaggatgttcagagactcaacaaaaaccattctagaaatcacccagaacaattgttttctgttgccaaagccttttgttcttcaaaagtcaccatccaccag

SEQ ID NO: 3140 - DNA, 385 bp, Homo sapiens
  misc_feature (1)...(385): n = g, a, c or t
ntntcgaggtaaatggaaagttactattataaggttaatttgcagncctcttctaaatagaaaaccatatccttggctactaacatctggagactgtgagctccttcccattccccttcctggtactgtggagtcagattggcatgaaaccactaacttcattctagaatcattgtagccataagntgcgtgctttttattaatcatgccaaacatantgtaactgggcagagaatggttctaaccaaggtacctatgaaaagcgctagctatcatgtgtagtagatgcatcattnnggctcttcttacatttgtaaaaatgtcanattangccatcnttaantcatattagtgacnccggaacagcacctnccctatntgtatg

SEQ ID NO: 3141 - DNA, 176 bp, Homo sapiens
  misc_feature (1)...(176): n = g, a, c or t
gcctctgtctccgagctcgcctgcatctactcggcccccattctgcacgacgatgaggtgacagtcacggaggataagatcaatgccctcattaaagcagccggtgtaaatgttgagcctttttggcctggcttgtttgcaaaggccctggccaacgtcaacattgggagnntcnt

SEQ ID NO: 3142 - DNA, 242 bp, Homo sapiens
  misc_feature (1)...(242): n = g, a, c or t
cctgccagtctctggacggctacggcgtagggtggcaggcacaatctccgggggcagatgaaggtaatcacggagatactggataccctcattggtaaggtaccagtanaaatgtctccaggcaaactgttccttcacgtagcctcgggacttgagagactgcatggccttcacgacatgaaggttgggcacattcttgtctgccagctccgggtgcttangcatgtggacatccttcttgg

SEQ ID NO: 3143 - DNA, 200 bp, Homo sapiens
  misc_feature (1)...(200): n = g, a, c or t
ctggtgttcagcctctcaacagcaaaccatgagactacataactatcaggttttcacttcactttcttctcttctgtctaaataatcacaatgcctttaggcttataaaaagcatctaatcattacagtgtcttatcctttttaatgntctntccttttataaaactgtggcaaganctgaatgtttaggaaaggtancc

SEQ ID NO: 3144 - DNA, 364 bp, Homo sapiens
  misc_feature (1)...(364): n = g, a, c or t
gatttacatgtgcatatacaatttataaagttaaaaattctctgtacaaaatcttacatgtacagagtntatataagccccattcttatggctgnatcaccacacagatttgcttaaaactataatactacaaacactcgggttcttcatattcaatcttggcacccatatagcaatacactattctgaaatgtaaattacaaaggaaataaaatgtaatcatgcagacattttttaatataagaaaatgcgataaaatatactacaccagatcaacatttatcaattccatagatactgagttttcaacttactgcactgttttcatataagtacatgcaaaactagcagantatggattttt

SEQ ID NO: 3145 - DNA, 374 bp, Homo sapiens
  misc_feature (1)...(374): n = g, a, c or t
aaagtttatttcctttgtggatacaacattatttttacaaaaatgcaaattgggaggaaaaactaaggctagagaatatatcttctacttcttggcaaagcatgtttactattggtcaatgttattatttgactctatattgccaaagggataatcggggagaaggtcataggaattttcatccttctttaatagcagacattaaagatgtctcctattataaggagttatgtgaggtcagctaaaactaattatttgaggtcatacaaatgactcaaaattcttagagaaaccatgggtttggagaggaatcctcatatatatttcannaagaggagaaaaaataagatagaaataagatcttgtattttttt

SEQ ID NO: 3146 - DNA, 414 bp, Homo sapiens
ctgttttattgctaaactatcatgatacaagccgtataaaaatactttacatataggaaaaataaactacattaaactggagattaaaaacatttgcataggaatgtgatgtattcaaacgcctttaacagtcaggattttctaaacctaagcctgccagcaccaccatgttggagagacctgtttgttggagaattggttttctctcctctgagggctgtagaggccagaggggtgagtgaggttctttgacaagatgtccaggatgctaagcttgtcccaacagccatagcctcggtctgctcaggccaatcagaatgctgtgagcacctgctctaatggaaacaacatcatttgcatccattccattcaaagcttgaactcagcagggagtttattctggtcagccaacag

SEQ ID NO: 3147 - DNA, 396 bp, Homo sapiens
  misc_feature (1)...(396): n = g, a, c or t
ctggggagatggtgtttgtatatgaaaatgcaaaagaaggagctcggaatataagaacgtcagaacgagtgacactaatagtggataacactagatttgttgtagacccatccatttttactgcacagccaaatacaatgttgggcaggatgtttggatctggccgagaacataactttacacgacccaatgagaaaggagagtatgaggtggcagagggaattggttccactgtgtttcgagcgattctggattactataaaacaggaataatccgntgtcctgatggcatatctatncctgaactgagagaagcatgtgactatctttgnatctcttttgaatatagcactattaaatgtagagatctcagtgccctaatgcatgagttatcaa

SEQ ID NO: 3148 - DNA, 425 bp, Homo sapiens
  misc_feature (1)...(425): n = g, a, c or t
ctgctgacagttctttggtggaaaagtaagttgcgtacttacccaagctgcccaaatgattatcaagccaagtttgtttttcaaaaataggntttaagatacaccaaagaaactatacaatacaaaaatttaacaatgaagttaaagtatatagncanaagccnaatangacaacacacatgtataatgtagaaaagaatcctttcaggtcctagaaaactaaaatggggagaacttactgaagggtaacatacataaaatgagtactaatagcaaggaataatcctaaacattttcccaataaactgactaancctcaaaaggacagcttaggaaaatgattaacatgcagtttttcttttttcctagccaattcagttctaccntagataaatctgggttgccaagcaatacatntataaatt

SEQ ID NO: 3149 - DNA, 381 bp, Homo sapiens
  misc_feature (1)...(381): n = g, a, c or t
ctggatgatgaagtagcacagactcctatgccatcagaatatcagaacatgactgtggatattctctgcaatgactgtaatggacgatccactgttcagtttcatatattaggcatgaaatgtaagatttgtgaatcctataatactgctcaagctggaggacgtagaatttcactggatcagcaatgacgagcctacacagtactggagaacttggcattttntgatatagaaaaaggctttccttggtatcncgntatcatgtgtcgtcatctatgcattatagtngatgggntttgtactacnngtcaccagcatanaatcatattacaagtncgtaangattcaggggctcttganagactttatcatagcctntnt

SEQ ID NO: 3150 - DNA, 328 bp, Homo sapiens; identical to SEQ ID NO: 2874

SEQ ID NO: 3151 - DNA, 228 bp, Homo sapiens
ctgaaagtaaacagaatggattgccagttacatgtatgcctgcccagttccctttttatttgcagaagctgtgagttttgttcacaattaggttcctaggagcaaaacctcaaggattgatttattgttttcaactccaaggcacactgttaataaacgagcagggtgttttctctcttcctttctaatatatggagtttcgaagaataaaatatgagagcaatattt

SEQ ID NO: 3152 - DNA, 303 bp, Homo sapiens
  misc_feature (1)...(303): n = g, a, c or t
aaaaacaggacttgtcactttatataaaagaatagtatgctctatttcctgaatggatgtggaaatgaaagctagcgcacctgcactttgaattcttgcttcttttttattactgttatgattttgctttttacagatgttggacgattttttcttctgattgttgaattcataatcatggtctcatttcctttgcttctttggaatatttctttcaacacattcctttattttattatacattgtgtcctttttttagctattgctgctgttgntttttattctatttacaggatgattttt

SEQ ID NO: 3153 - DNA, 236 bp, Homo sapiens
aaaaaagatgaaaaagaaaaaaaaactttgtaaaatgcgagaacagaagcaaaagacactacgctctgtcattttatctttcttttgttgaaagactaaaaaaaaactgaaatgctttttagacaatcaaatgttaggtaagtgcaaaaacttgttttttcttactggtgtagaaattaatgcctttttttatttttcagttattttataataacgaaataaaaagaaccccccag

SEQ ID NO: 3154 - DNA, 343 bp, Homo sapiens
  misc_feature (1)...(343): n = g, a, c or t
ccacttgtgtgggtcctcacaagcaaagagagcactaaacttgacattgggagtccaccactccaactttgctttctgaaggttttggtgtacattgagccccanaaggaaaggagagtatctgtgagtgggggcctcccttgaccccagtacgaagtctatgccctgaatccccagagtagcccttcctggtgcccaactggcctggggacaaacagcgtccactacatctaggactgccggctaagtggacacacttcttgacctcctaccaggaactttggtaaaagctagctttggggaaggggttgggtgtaaatatgagagggtggagggagaccag

SEQ ID NO: 3155 - DNA, 355 bp, Homo sapiens
aaaaaaaagttcgagtctgttgcactaggctgtacatgactaaagttgacagatgctatgctagatttataatcactagttctggtacttgtgtctttgtatgatcaaagcatgcaataagcaatacaaaataccaagccttatacttaaaagaagtttaacatattggttaatatactggttaatatactggttaaacatattgaatgtatataagtggcaaaactagatttttaaggaagtgtacattataatattggagctcagtactgcatgaagagacttcattaaaactaagaaaacatttatttggggagaaattttaggcatttaagaacttgtatttttctatttt

SEQ ID NO: 3156 - DNA, 269 bp, Homo sapiens
  misc_feature (1)...(269): n = g, a, c or t
nncgaggnaaaagatcattctgttctttcaaggagaaataagcctaaaagaagaaaaacaaaaaaaattctgtataaaactgtaatcctttgtattcatgtttacagtgctattactataattcaaaattatgtatgtgacttanagttatataatcataatttatgtttatttcaaatatctaagtttattgcttggatttctagtgagagctgttgaatttggtgatgtcaaatgttctagggntttnttagttngtttttattgaa

SEQ ID NO: 3157 - DNA, 430 bp, Homo sapiens
  misc_feature (1)...(430): n = g, a, c or t
ccattacatcctctttttaatttacataatacagatacttgagaaagttgttgtggtgttgtatgccaagaaaattctttttattggtgcctatattgtaacaattatttttaatgcattgtattttgaagtaacggttcagttaaatttttcacctgctgtgtaactgaaacacaattacagtctataatcatctgtagaagtctggagataattttgcaactcatgttatgggttaaatgaatatttttgtaaaagtaaaagcaacaaatttataaattgattatttgaaactttacaacacaattgcatcccaaatacaaattgtattgctnattcattatagctattcgtcctgtaatctgtttctaggtgaaggcatactccagtgttttaggggttttgaaaataaatatttacctcngccgct

SEQ ID NO: 3158 - DNA, 228 bp, Homo sapiens
gttaaaacagaaataaattaaactcttcatcaacaaagacctgtttttgtgactgccttgagttttatcagaattattggcctagtaatccttcagaaacaccgtaattctaaataaacctcttcccatacacctttcccccataagatgtgtcttcaacactataaagcatttgtattgtgatttgattaagtatatatttggttgttcccaatgaagagcaaattt

SEQ ID NO: 3159 - DNA, 515 bp, Homo sapiens
  misc_feature (1)...(515): n = g, a, c or t
aaagatattttcttgaattatttagaacatggtaagcctggtattttttaatcaaacaaaatatttatgaaatgggttttctcttaattctggattcatcatggctttctaataccaattgtaatatttacaatattcaccaaaacttagaattttgcaaatgctggaattctgccagtgtttctttgctaagccttgcatgcaaaatttgaaattttaacattggcacccaaaacctacatggaatgtatgtctggagtatttcaaactttacattgaaacataatttccttggaaaacaaaccataagcctgaggaggtttttatcaactggaatgctttatattagttnngtttttcactgtacattcctcattttacattcatttaacctgccgattatttaatntttttattgtaaagtagnttttagcatttgctcttatttttntactttgatgcctttncaattgncatgtctttacctgccccgggcggcccgctccaaanggccg

SEQ ID NO: 3160 - DNA, 486 bp, Homo sapiens
  misc_feature (1)...(486): n = g, a, c or t
aaagaaggtagataaatttattgccacttgaaaactaaatataactcagatgagtcagacaaaaaaaatcattgacattaaaattattattatttgaccaggtttgtcttttgaagatttctctcacaggcacttctgcaacaaatttgtataatttaatataaatattttgtgattattcttaaaggccaagcaatgggcatttatgatggctaatcataaatacacaataatatatattacatagtatatattaattgacaggttgcattttttctttgagcttatacacttttggaaaaagtctaccttttataaatatcaagntggatattcttgtctgntgcatttgctaaataagagncaatagntaagaatctgtttcttttntatatgtccggattgttccatttggaatacagaatcccctgnataaaactagcatgntttgntgaagnccttgtgaacttgactctaaaatatttt

SEQ ID NO: 3161 - DNA, 413 bp, Homo sapiens
aaaaactatttgtaatgtaattttaatgcattttttacaggcccagtaatggttaaatacgtcagcttactgaataattttaactatttattcttctaaggatacagcttgtctctggattttccagtcttaattttatattttattaatctattttaatgcttgcttttcccatttatagacgttgtagcagtaattgcaagaagttcttgagctgaattcctgttgtgacaacttcctataattacagtagataactttttctttcagtccgtatataacttttctataacttgtgatggacaagagatatgcttatccaataaaataagcttaaatattagatgctcttgggtcaaaatgtcctttaccaaattgacctttttatgagttctttgggtaaatacttttac

SEQ ID NO: 3162 - DNA, 201 bp, Homo sapiens
  misc_feature (1)...(201): n = g, a, c or t
gatggcacaacatacttgaagaccatagaagtttttgatcctgatgccaatacatggaggttatatggngggatgaattaccgtcggctagggggtggcgtaggagttattaaaatgacacattgtgaatcccatatttggngaacacanagaacacaggncttgtatntattcctctgnnttctggggagctttgacctt

SEQ ID NO: 3163 - DNA, 379 bp, Homo sapiens
  misc_feature (1)...(379): n = g, a, c or t
gtgggtgttttctaaatattaataggggggcttgattcaacaaagccacagacttaacgttgaaattttcttcaggaattttctagtaacccaggtctaaagtagctacagaaaggggaatattatgtgtgattatttttcttcttatgctatatccccaagtttttcatactcatttaagtaanangctagagngagtaaggaatagagccaaatgangnaggtgtctgagccatgaagtataaatactganagatgtcacttttattcaggaaatatggggagattcaagtnatatanattcctactcgaaaancttgacacctgactttccangatgcacattttcatacgtagaccagnttcctctttggtttct

SEQ ID NO: 3164 - DNA, 266 bp, Homo sapiens
ctcaaattaccctccaaaagcaagtagccaaagccgttgccaaaccccacccataaatcaatgggccctttatttatgacgactttatttattctaatatgattttatagtatttatatatatctgggtcgtctgcttcccttgtatttttcttcctttttttgtaatattgaaaacgacgatataattattataagtagactataatatatttagtaatatatattattaccttaaaagtctatttttgtgttttgggcattttt

SEQ ID NO: 3165 - DNA, 446 bp, Homo sapiens
  misc_feature (1)...(446): n = g, a, c or t
aaatcagcatttcccaaaaggtgtgtcaggactgagttaatcagtaagctaatagaaacaactgcaatagactagggatgagatttctcaaagcagtctgatataatatgcggcaactccttatgtactggagcgtatccaatacattctcaaaactcctaaattagctaaaatgcaaggtaaagagcagtagaaaaatgcagctcttaggataggcaaaactttggaagatttatgtcctcacaccagggtccagcaacttaggtttgaatttatgatnaggttaatgatataataaacttgggttggctggtttccctggcaattgttaattccccttaaataaaaatatgttgatacattgcaaaagaagtattttacagtttgaaacctttggaaagggcttttacctgcccnnggcngccgtaagggcgaattccanccca

SEQ ID NO: 3166 - DNA, 387 bp, Homo sapiens
  misc_feature (1)...(387): n = g, a, c or t
ctggntctantcaatngngaaccaccaccccccgccccccgcaaaaagtaaaagtcaaaccaaacttcctcaagctgcatgcttttcacaaaatccagaaagcatttaagaattgaactatgggctggaagaagtgaaagggaagcatctaaaaangaaaggtgagtaaccanatagcaaaagaaaagggaaagccatccaaatttgaaagctgntgatagaaattgagatncttgctgtcttttgtgcctctacaagctactactcattccagaattcctgggtcttccaagaggatncttaangtaccagagatttgctatggaaccaaaagcgcttgagaattctgactgaggggcttcgcntagntntcacattacaaaaaan

SEQ ID NO: 3167 - DNA, 478 bp, Homo sapiens
  misc_feature (1)...(478): n = g, a, c or t
ctgagttacaaggactaaaagtgaaaagcattctaaaagtccatgaacactgttgttnananccttcttcagaacacactaaacttgtctgacacatttctcttcatacatagcaagcaacagcacccaataaaagcctgagaagaaatgctgctgtgtaaatactgcaactattcctgaaaaaagaattatgggatatatactccaaagctgcccattcccataatttgtattgcataggtcacataatcacacacatatatatacacatgtgtgtatatatatgcacatgcaagaatatattaagacgacaatgaagtctagtcacagagcaatttacaggctcaatatatttttttanactttggttganagaaaatttaatattttacagtctttcagtaggcattatatacactgcnctttatgaaatctaaaaggtattgaaataaatttttccacattttggtancaaaac

SEQ ID NO: 3168 - DNA, 198 bp, Homo sapiens
  misc_feature (1)...(198): n = g, a, c or t
ttttcatatcaatgaaaaattccataaaaatagctatattaaatttcatatgtaaatatttaacaaatatgtttgtattcttctatttttatacaatgaatattaatacatattgcatttatttattttaatgacatttatttaagttcaattgtacaaaacctaatttgttgncaaaagtatcaagcaataaatttt

SEQ ID NO: 3169 - DNA, 327 bp, Homo sapiens
aaaaatgtttttgaaaattgcaattcctacaaataaatgtcatagtgcaaataaatgtcaggatttagagaaggagcctaaactgaatttgtgttatttcagtaaaagttatggagttatgggtctagacgtgttaataagttagacagaactttggcactttagaacaaatgcatgagtggtatttcagttcctaagttacataaaaagtgtgaaagaacactgtgaggtcccagcaacgccagactatattaaggtaagtagaaagtgtttttatagggcttcaatacccaggtggtgacagagcagaagaaccgggtttttttt

SEQ ID NO: 3170 - DNA, 439 bp, Homo sapiens
  misc_feature (1)...(439): n = g, a, c or t
gttagtattgactttgnttnaaanaggcttgacttcaactgggataaaaatgtcagtgaattttgttaaagtagtaaaaatgcagttgacttagtaggaacataaaattatttcctaataagataatattgcactcctaccaaataaacaggattttagtaatatctgagggattgttgatggtgagttagactgtatttggcatagaatttggaaatgtaacttgaatgtaaatatgctgcaaaatgttgaatgtatacatagaaagactttttctgtcgacgccaaatgcccgttgtaaatgaaccttaaatattacattcctcctttgcacaataatatttctttataacacttatgattttttcccccaggacaacaaactgcccttaagagtcatttccttgttatcacangtgncaatatttttctgtatttt

SEQ ID NO: 3171 - DNA, 279 bp, Homo sapiens
  misc_feature (1)...(279): n = g, a, c or t
agccattacaggtttgaacaaattcaaaattgcctattattaagcctccgcaggagctactgggcataagcaaacctaagattttataacccagcaattatcctatagaaaatagtccagattattatattctgccacacctttattcatacttgactccaaaaagttctcaattattcacagggataatctagaaaataaatattagttttgctttcaaagacattactggaatgagcaggaacctgcatctttgntatattaattaacttattattt

SEQ ID NO: 3172 - DNA, 302 bp, Homo sapiens
  misc_feature (1)...(302): n = g, a, c or t
ctgttgaaatgaagcactttncagtctttgtggcagcagaatatacttgtccatggttcatatcaatgctaaaattccggcagggaaaaaaatgatatgttaagcacccaaatcttcacatggagggggagggggtgggaaaagaaggaaaaaaagggaaaaacaaccaaaataatttaagtaaatgacagattggaaaacagggtttataaaaattattctcttgagtttataaattgttaaactcaatttatagctatgttaaactacgtaagaaccactatactgaaagaccatttaag

SEQ ID NO: 3173 - DNA, 300 bp, Homo sapiens
  misc_feature (1)...(300): n = g, a, c or t
aaataaattacaccttttgaaaatgtttaattgtacagtcaatagcttcaacaaaatattgaagtgtctgtatttagtatctactttatatactttatactttacaaattttacaattatttggcagnaattttctgattatgacatgactgctgtgcgattcagcgatttcccagatgcaggcaatanctggtgtttgtgtnctattctcagagtaactgnctcaatgtaggtgaaaaatatcancnattttagtnaactgtncaaggnccattnacacttnatcaacactatagcata

SEQ ID NO: 3174 - DNA, 519 bp, Homo sapiens
  misc_feature (1)...(519): n = g, a, c or t
ctgagcacgagtatagcagcattaactttaatctcattggctacattaatgaactttcctaatcctctcaatgccatgcagattttgtggatcaatattattatggatggacccccagctcagagccttggagtagaaccagtggataaagatgtcattcgtaaacctcctcgcaactggaaagacagcattttgactaaaaacttgatacttaaaatacttgtttcatcaataatcattgtttgtgggactttgtttgtcttctggcgtgagctacgagacaatgtgattacacctcgagacacaacaatgaccttcacatgctttgtgttttttgacatgttcaatgcactaagttccagatcccagaccaagtctgtgtttgagattggactctgcagtaatagaatgttttgctatgcagttcttggatccatcatgggacaattactagttatttactttcctccgttcagaaggtttttcanactgagagcctaagcatactggatctggntg

SEQ ID NO: 3175 - DNA, 499 bp, Homo sapiens
  misc_feature (1)...(499): n = g, a, c or t
ctggtggcttcctgattnccgcccacagaaggtatgttcacactgagagagctctcccgccaaggggaggaatcacctgctttaatacatgttgttctcttctgtgctagtgtggncatccactctgtataaacttatgtgcaacattaanacaaaaaaagggagttgagttgataanatgacttgggaggctctcatagttgnaataactatggaagacagaagaacatgctatcatctttatttttagcactcatatctggacctattactaaaaaagcttcttcattccttccaaccactagattataatggctaaaaagtcttttccttaaatctgatgggtgtaaaaataaaaagtaacagcatttctctagggctctggtttattttgnnttgntcttccttttatagacacgacaaaaacaaggattaactttccaaatactcatggtgcacaagaaggntatgtatgcncagtatnctaatttattcaaan

SEQ ID NO: 3176 - DNA, 451 bp, Homo sapiens
aaaaatgttttcccgtgggtaattttctattatatattttcatatgggcaaagggaaaaaatgataaatcctctgtaatcacaaaccccaatttcgttttgtttattcagcttctaaaatattgaacacccagacttttaattcaacctttaagaaccttatcatttatgtttcagtagatatcaaagtaatccatgtttgtgtcaaatgatcatagaaaataaatagaagagacagtgaagcaagtaaaaagaaaagcattgttttaatttgtttgcattaatttttttcatttgtcaaaatgcttcttttgttgccacagtaaagaacagtttttattgttttgtaagtaaaattacgtagctgattttgtatgtaaagattaatttccataataaaaattattgtatgtttactgtgatcttaatgggcagggttaagaaagttattt

SEQ ID NO: 3177 - DNA, 303 bp, Homo sapiens
aaaaatacaaattttatgaaaatattaagaatttttaggatgggaattataaaagtcaatgctgaacaaaattctacttttagatagtatgtatcttaaaatattatgaaaaatattctttattctgaaaacaatgtcaggaaagaatacctgagttctctaaaaccactagttctaatttcaaattgctgttttggtaacataaagaaaacacatttacaatttaacactgcagttacctgtcaaataattagaatagaataaatgttgcatatacattaggttgaaaattatatatatttt

SEQ ID NO: 3178 - DNA, 343 bp, Homo sapiens
  misc_feature (1)...(343): n = g, a, c or t
aggnaaaactcattaataagatnccaaattcaagagattatagttacattgtaaaacgtaatcttcttttaataaaagctaataatgactgatgaattacaaatgcacttatttattggngattacaaacaatacttaagaacttangcagcttgagtagtagntnaagctngacagagcanagaaaattcttgtttaatatatatatatttttaattccagtaatattttcttaaattcctgttaaaaatataatcaatattaaagtcagcaaaatgcctttgactgacgcctggattattttaccacttaacctggttacacagtgatttttttttttttn

SEQ ID NO: 3179 - DNA, 417 bp, Homo sapiens
aaatatattgcattttattacgtaacagtaaaattagtaaaataattgatatactttaatttataatttctttctctcagtataatgtagaaaagtattactctgaacacctaccttaaacattacttaatataggttaactacaatgagcctctccacttatatttttgtcatgcatcttacattttaatgtccttactgttttatagaaaaggtcataaagaatgcccaactaataaagagtctctaatatctctgatgcagcaacaattgatcacatactttcacgtgaatataataaagtaacagcataatttgaaagctgtattacatcattattcacttttcaaaaaaattgttttcaaggaaacaaatatactttcaatgtaattacaaagcttcaaaaaatctcctttt

SEQ ID NO: 3180 - DNA, 304 bp, Homo sapiens
  misc_feature (1)...(304): n = g, a, c or t
agatgctcccttgcttttnataattcctaactgtaaaatataattttagtacagaacaaacaaattctccttggttggtcacatcattcattattgaaagggaaacttagtatcaaaagaaacaaaacactgaaataaataactaagtaatttactgaaaggtagttttgttgcattgcacacanctgaccgcagagaattctaaagctgatttttttcttaaaggatgaaaaactcatttgccatttttagnttcttgctaagngatacatgctcctnataaggaaaactactctgtgtatng

SEQ ID NO: 3181 - DNA, 347 bp, Homo sapiens
  misc_feature (1)...(347): n = g, a, c or t
aaaatacataaaattttctaaaacgtaaaatggaaaggtttaatacacaggaaaaacactgcacaccttaactaaacaaactagaaagaaaatatatttatatacagaactaagatgagtccattcattatttttacaaatattcacatagatggtttagagataagtagntaagcgngnctnattaattaatggatgctttctagcctctgtcttcattaattttatttcctattcaacaaaaaataatgctttcaggatatattacatntagagcaatntcatttttatcagtaatnttgcctgaaaaagagaaaaactttnnagcataaccctacnnagcanga

SEQ ID NO: 3182 - DNA, 279 bp, Homo sapiens
  misc_feature (1)...(279): n = g, a, c or t
aaattttagagtcacattttattctgatcagaatttttattgagatgttgagcttttgtttttgaaactagtttgtcataacattgtgcataatcacagtatttattttctaggacaattgngaatgtgtagacttatgtttactgctaagggaacaattatttataaaataatattaaatccagtattaggctgcctatttcagacacttaatacttgcngagatctatgttacatttaccacactgaagttntttttgttgttttttgtttgttttt

SEQ ID NO: 3183 - DNA, 367 bp, Homo sapiens
aaagctatttaatactcatgatgtctaaactttcaatttattgtctgatttctggatatttctgtattttagattctacagacttcagattctgaagcttgttgaaaaagctaagttcctcaatatggatgaaaatctatctggctgtacttttagaggggaatttttctacttttgaaaaaaattctgaatatttatatatagtattaacagaataccccagtaagtcatatttcagataaatattctatagtataatttgcatcatacccaatattttagatattaaaataagggtaaaatttggaatataatcacttgtctgcatatttcccaatgtaagttttcatgtagaatattaaaattt

SEQ ID NO: 3184 - DNA, 149 bp, Homo sapiens
  misc_feature (1)...(149): n = g, a, c or t
aaacttgaactattccttccagaagaatacccaatggcagcccctaaagtacgtttcatgaccaaaatttatcatcctaatgtagacaagttgggaagaatatgtttagatattttgaaagataagtggtccccagcactgtcgatccn

SEQ ID NO: 3185 - DNA, 197 bp, Homo sapiens
  misc_feature (1)...(197): n = g, a, c or t
aaagaaaatccagtagttgttggtgaaaagatccaaaagatttgaactcctgctggaatacaaaattcttgagcatctgcaaactaaaaattgacttgaggtttttttttttcctagtcnttgggaatgtanagcagggtatnttgcntgtcatcggaanaatanatttttgtttnggttttgttttgaaaatgact

SEQ ID NO: 3186 - DNA, 421 bp, Homo sapiens
  misc_feature (1)...(421): n = g, a, c or t
ctggaagagagggctgcccgnaacgactctcaagtttccaagaacttggaaagccaccacggtgaccagatggcgcagaaatcccagtccacgcagatttcacaggaactggaggaacttcgagctgaacagcagagattgaaatctcaggacttggagctgtcctggaacctgaacgggcttnaagcagatctgagcagcttcaagtcccaggaattgaacgagaggaacgaagcttcagatttgctggaaagactccgggaggaggtgacaaagctaaggatggagttgcaggtgtncagctggctttgtgtgcaacacgtgccctgaaaagtggatcaatttccaacggaagtgctactactttggcaggggcaccaagcagtgggtccacgcccggtatacctgtgacgacatggaa

SEQ ID NO: 3187 - DNA, 349 bp, Homo sapiens
  misc_feature (1)...(349): n = g, a, c or t
ccaagttatcatgtccatncgcaccaagctgcagaacaaggagcatgtgattgaggccctgcgcagggccaanttcaagtttcctggccgccagaaggtatgtagtgctgcagcccccttctcccacctttgccccaggctgaataggcacccaaaagtccgtgactaaatttcgtttgtctttttgatagcaaattatgttaagagacagtgatggctagggctcaacaattttgtattcccatgtttgtgtgagacagagtttgttttcccttgaacttggttagaattgtgctactgtgaacgctgatcctgcatatggaagtcccgcttcggtgacatttcctgg

SEQ ID NO: 3188 - DNA, 434 bp, Homo sapiens
  misc_feature (1)...(434): n = g, a, c or t
gaacaaagaatcttaagggtttattaagaactctttattttcttcataccctgttctctgcagtgctttctaacagcttctgggtgcagattttcttcggcatccttttgcactcagcttattacaggtaggtagtgcttaagaaaagtcatggaggactaaagcctaagtccttttcacttttcctccatctgaaggnaggtgagttcatcctcttcatagtaatgctgttttaccaagactttatagcagatggacccagaaagaattttctgctattgtgttcactacaacaggatagggacatcagacagccccagaaaccccttccagatctgatatgggactattaatttttatgctgntaattggtattcattcacaatgcagttgaagggggaangntccactgcattctttggctaaggacctcg

SEQ ID NO: 3189 - DNA, 367 bp, Homo sapiens
  misc_feature (1)...(367): n = g, a, c or t
ctggtggttaacaagtggatcgtcatgttcagtagtttatacattatgtgagaagtaacgttctgattctttttcttacacagaattggcagagggggtcgatttgggaggaaaggtgtggctataaactttgttactgaanaggacaagaggattcttcgtgacattgagactttctacaatactacagtggangagatgcccatgaatgtggctgaccttatttaattcctgggatgagagttttggatgcagtgctcgctgttgctgaatangcgancacaacgtgcattgtgcttctttctttgggaatatttgaatcttgnctcaatgctcataacngatcanaaatacagattttgatagc

SEQ ID NO: 3190 - DNA, 231 bp, Homo sapiens
ccaggcagccctgctcacaggcaaggtgtaggggggtatttcctcgaaagtctcggagctcaggatcacagccagctcccagaagtgcctcagcaatttctggctggttggtgatcacagccaagtggagtggagtctgctgcaggttgttctggaagttgaggaaagccaggtctcccttcacctggcggatcacttccatggtcagtgccttttcttcatggatgatgg

SEQ ID NO: 3191 - DNA, 409 bp, Homo sapiens
  misc_feature (1)...(409): n = g, a, c or t
aaaacaaatttctaggacttacgctctttgggcctgatttgttaatgcttatgaggtaatgatattatgtttgagaagctctacttctagtatacctcaatgctcagagagaaagccaacaatacaatcaggaaaccacaatattgacaaaacttagtactaccaccaagattgntcctcttgccttggcactactaaaaaactttacctttgttactaaagtcatggtgaatacagattttgcatttctcatgtaagcagctatataagctagggttctacaagccttagatgaaaggaaaaactttgctggaagccctgtaaaaatcactttattcacaatctgaagaatgaaagacaaatttggctgtcaatacaaaaactgtagtacaaggaagttcaactgttt

SEQ ID NO: 3192 - DNA, 374 bp, Homo sapiens
ctgaagcggcggccagagaagagtcaagggcacgagcatcggccatgcctttcttggacatccagaaaaggttcggccttaacatagatcgatggttgacaatccagagtggtgaacagccctacaagatggctggtcgatgccatgcttttgaaaaagaatggatagaatgtgcacatggaatcggttatactcgggcagagaaagagtgcaagatagaatatgatgatttcgtagagtgtttgcttcggcagaaaacgatgagacgtgcaggtaccatcaggaagcagcgggataagctgataaaggaaggaaagtacacccctccacctcaccacattgacaagggggagcctcggccctgaacagagcag

SEQ ID NO: 3193 - DNA, 208 bp, Homo sapiens
  misc_feature (1)...(208): n = g, a, c or t
atatataatagctgtaactgtttcactgctatgctgttttgtgttgttatagttgtaacatatttctcaattttcctgtttttcttttagtttattgacaagactacctggtcggcctaaattcacattttcattcagtttttgggcatttgagatcaaanagtaagtatggnttctacagttacttcatttttctacttatcttttt

SEQ ID NO: 3194 - DNA, 290 bp, Homo sapiens
  misc_feature (1)...(290): n = g, a, c or t
ncgaggtaaaccaatccaatatacagnnntttgaaagtaaaagatcaactgcacagatattttttaactaaagaatgtgtcagtaaatctatgtaaatatccaaattgacacaaattttctaaagagttaaaattattaaatttcaaattattattntatatacttttgatcaaaatataatatttgcttcaccataagttgaagatattaagaaaacataatctaaggtttattacaaaaaataatggcctctgatagatatacagagaataatatattcttaaatttt

SEQ ID NO: 3195 - DNA, 253 bp, Homo sapiens
  misc_feature (1)...(253): n = g, a, c or t
ccactcagcacatttcatggangtcatgtcttttcactgatacttttttgatagtttttatataacaaaatccttattctatttataacttaagatgataaggcactataaattaatgacctaaaataatntatttgnctgntatctttgtgctatttctacttcactttaatttttaggctgtaaaattggtaaatggattcttacaactatctctttccatttcttactatttggttttcaaatttcattt

SEQ ID NO: 3196 - DNA, 371 bp, Homo sapiens
  misc_feature (1)...(371): n = g, a, c or t
ctggtggttaacaagtggatcgtcatgttcagtagtttatacattatgtgagaagtaacgttctgattctttttcttacacagaattggcagagggggtcgattngggaggaaaggtgtggctataaactttgttactgaagaagacaagaggattcttcgtgacattgagactttctacaatactacagtggaggagatgcccatgaatgtggctgaccttatttaattcctgggatgagagttttggatgcagtgctcgctgttgctgaataggcgatcacaacgtgcattgtgcttctttctttgggaatatntgaatcttgtntcaatgctcataacggatcaganatacanattttgatagcanag

SEQ ID NO: 3197 - DNA, 326 bp, Homo sapiens
  misc_feature (1)...(326): n = g, a, c or t
ctgaactcttccttgacactgtttcaacatttacatcctatgaactcatggattataaaacatttgtgacttatactgtctatgtcagtatgattgccttagaaagaccagatctcagggaaaaggtcattaaaggagcagagattcttgaagtgttgcacagtcttccagcagttcggcagtatctgttttcactctatgaatgccgtnactctgttttcttccaatcattagcggntgtggaacaggaaatgaaaaaggactggctttttgcccctcattatcgatactatgtaagagaaatgagaattcatgcatacagtcag

SEQ ID NO: 3198 - DNA, 516 bp, Homo sapiens
  misc_feature (1)...(516): n = g, a, c or t
cctttcagtggggcttggacaaaaagggccccaaagaccaattttgctcattaacctcacactggggatcagattgacaacttaaggatttttagggagcatatgtgagatcaaagggaagaagaaaatggtgcccctttcagatggtgcttcaggtgctaaaaaatatcccaacacaaacaagcaggtggctagctgacaggtgggggaagagatgcaagtcagatagcaaaggatctgcacagtgcaaaatcttcttggctttttatttaacttagcagtgaatgcagcaggattggcttaaagtataggtacaccccatggaaacatgcaataagatcacatcgatccagaggctggctcaagtttgactgaggggaaacggagggaaggctgttcctatcacacaatctcagcagaggttgaggtggtggggatttctttcttctnatatgacgctaccatcggtgacttcttactnggagaccactgancactgaatcaangtttctaata

SEQ ID NO: 3199 - DNA, 186 bp, Homo sapiens
  misc_feature (1)...(186): n = g, a, c or t
aaatcacatgtttacacaaacacttggacaaaaatggttttagcagctttatttgtaataaccccaaactggtaaaaaactaaatgtccatcagcagaggtatggattagaaaattgtgatgtattcatataatggaatattattcaacaataaaaaataacacatctgatnaaaaaaaaaanaaa

SEQ ID NO: 3200 - DNA, 275 bp, Homo sapiens
aaattaaaaaggtaaagaagaaaaagaaaaagaaacacaaggagaatgaaaaacggaagcgtccgaaaatgtatagcaaatctattcagaccatctgctcaggattgctaactgatgttgaagatcaagcagccaaaggcatcctaaatgataacataaaagattacgttgggaagaatttggataccaagaactatgattccaaaattccagagaacagtgagtttccatttgtctcattaaaggagccacgagttcagaataacctcaaaagg

SEQ ID NO: 3201 - DNA, 385 bp, Homo sapiens
  misc_feature (1)...(385): n = g, a, c or t
aaactttaggttttatttacaaatatttatcttatcttcctctcctatttgacgttttagctcaagaagagttaaaatggaatgcatctgtagatatatagttgggaatgcgtgttcagtcacttggctctgtgataataatcttatgtaccatgtcagacangattttcagactccagatcctctttgccattatctgaatttcctgatgagatatagcaaccagagtcccttgggcagtcatctaactgtgacttatttaaggagatgtctgagctcaaggataggggctcaggttcattttcttgctcttgaataatttcttcttcaaggaagttttcagcagacctgcccgggcggacggtggaagggggaattncaacac

SEQ ID NO: 3202 - DNA, 302 bp, Homo sapiens
  misc_feature (1)...(302): n = g, a, c or t
aaaaatatatatttcagattttcagtgctaacagattgcatatatacagttcatttacttttattaaattggcaatcgatattttattgaatggggaattaagaatataaactgtaaattttgtcttaaatttattntttttcttggcctttatttttattacttaaggnatgagnnatattttaggagatactttctagacagttngaagnttgggtgctatatgaagaaaaacattnaatgatatactcanatataaacaccttgttttcttgaatgnaatttatttattagctaanaaa

SEQ ID NO: 3203 - DNA, 510 bp, Homo sapiens
ccagagagccagtaaattaggacagtgtttcaacaagcctaggctatctcgtaagttgaaaaatatcccactatagttgcttcatgagtatgaagtaagatggcctctgatttacactggttcaatttacaaattttcaactttatgataggtttatcagggtactaaatgcatttcaacttgatagtttcaacttatgataggtttaccaggatgtagtcccactgttgaggagcatctatttaggggttaattactttagtaataagtggaaagtaagataccttgagtaatgtttgcctataaaattgtcagcgtatttttacactattggctcaagaatgttataatgctaagggacataagttggcaaccacttggtttttggaaggactttcggtattgtattagaagtctgccctagctgttaaatttctgggtatttatcctaaggaattaattaaagagttaattgttcctttcttcagtgggccattgttttagatattt

SEQ ID NO: 3204 - DNA, 449 bp, Homo sapiens
  misc_feature (1)...(449): n = g, a, c or t
ggnaaatcttaagatttgnagaatgtttctaggataggatattaaaaatgattgaaacccatgcatggtgttagacaatttttctaattattccattgagtcagttttttgtgattagtgattatcagagcaaacatcatgtagatagcacaagtatttggagaaacgttgtttgttttgttaccaaaatgttggaaaaatttatttcaataccttttagatttcataaagtgcagtgtatataatgcctactgaaagactgtaaaatattgaaattttctttcaagcaaagtgtaaaaaaatatattgagcctgtaaattgctctgtgactagacttcattgtcgtcttaatatattcttgcatgtgcatatatatacacacatgtgtatatatatgtgtgtgattatgtgacctatgcaatacaccattatgggaatgggcagcctt

SEQ ID NO: 3205 - DNA, 382 bp, Homo sapiens
  misc_feature (1)...(382): n = g, a, c or t
gccatctttcatgcctttgtcaatatgaacttctaaaattttcttctctcgaactatcttccttccgttgcagcttttacatctatctttaggactgatccgctccccatggccctggcactccatgcacacagactgaatttgctgaaccattccaggtcctatctgatgaattcttatttgcattccagtacctcggcaattgggacagcactctactgctcctttcttacctcctctaccttcacatttgtcacaaatcacattcttttgcagagccagttntcttgttgcaccattatataagtcttctagggttactgagagctgatgtacaacattttnacctntcctttctctctgcatccttcctcctcctgca

SEQ ID NO: 3206 - DNA, 316 bp, Homo sapiens
aaaatatatagaggaatcctcttgattgctcagcatgatgttagataaatgagtttgtcagaaaatatcagtatacgctgtttaccaatgttatttatttacattcttctaaagccattatggatattgtattatgagagctaaacctaaataaggttatcctgttccctaggaccttctctgtaaatagtgatttttagacgagtagtctgtcctaaatcttaaatagaaaaaaaactaaagcgatttgcttaagccattgtacattataaagagctgttttgttttgctttgctttgctttgttttgttttttt

SEQ ID NO: 3207 - DNA, 287 bp, Homo sapiens
ccattctttataggaataatcagtttaatcaagatgagctagcattgatggagaaatttaagaagaaagttcatcagcttgctatgaccgtggtcagtttccatcaggtggattatacctttgaccggaatgtgttatccaggctgttaaatgaatgcagagagatgctgcaccaaatcattcagcgccacctcactgccaagtcacatggacgggttaataatgtgtttgatcatttttcagattgtgaatttttggctgccttgtataatccttttgggaatttt

SEQ ID NO: 3208 - DNA, 345 bp, Homo sapiens
  misc_feature (1)...(345): n = g, a, c or t
aaaaatggagcacagtgacgagaatattcaattctggatggcatgtgaaacctataagaaaattgcctcacggtggagcagaatttctagggcaaagaagctttataagatttacatccagccacagtcccctagagagattaacattgacagttcgacaagagagactatcatcaggaacattcaggaacccactgaaacatgttttgaagaagcttcanaaaatagtctatatgcatatggaaagggattcctaccccagatttctaaagtcagaaatgtaccaaaaacttttgaaaactatgcaggtccaacaacaggtttctgactacaactcaaaagttt

SEQ ID NO: 3209 - DNA, 427 bp, Homo sapiens
  misc_feature (1)...(427): n = g, a, c or t
ctgaagatagagaaatgaggaaaaagaaggaagaatatttaacttttagtcctcttacagttgtaatatttgtggtcatctgctgtgttatgatggtcttactttatttcttctacaaatggttggtttatgttatgatagcaatttctgcatagcatcagcaatgangtctgtacaactgtcttactgcctaattcataagataccatatggacaatgcacgattgcatgtcgtggcaaaaacatggaagtgagacttatttttctctctggactgtgcatagcagtagctgttgtttgggctgtgtttcgaaatgaagacaggtggggcttggattttacaggatatcttggggattgctttctgtctgantttaattaaaacactgaagttgcccaacttcaagtcatgtgtgatacttctang

SEQ ID NO: 3210 - DNA, 491 bp, Homo sapiens
  misc_feature (1)...(491): n = g, a, c or t
aaatggtattacgtataaattaatataaaatgatcacctctggtgttgacaggtttgaacttgcacttcttaaggaacagccataatcctctgaatgatgcattaattactgactgtcctagtacattggaagcttttgtttataggaacttgtagggctcattttggtttcattgaaacagtatctaattataaattagctgtagatatcaggtgcttctgatgaagtgaaaatgtatatctgactagtgggaaacttcatgggtttcctcatctgtcatgtcgatgattatatatggatacatttacaaaaataaaaagcgggaattttcccttcgcttgaatattatccctgtatattgcatgaatgagagatttcccatatttccatcagagtaataaatatacttgctttaattcttaagcataagtaaacatgatataaaaatatatgctgaattacttgtgaagaatgcattnaaagctatttt

SEQ ID NO: 3211 - DNA, 409 bp, Homo sapiens
  misc_feature (1)...(409): n = g, a, c or t
naaatcagcatttcccaaaaggtgtgtcaggactgagttaatcagtaagctaatagaaacaactgcaatagactagggatgagatttctcaaagcagtctgatataatatgcggcaactccttatgtactggagcgtatccaatacattctcaaaactcctaaattagctaaaatgcaaggtaaagagcagtagaaaaatgcagctcttaggataggcaaaactttggaagatttatgtcctcacaccagggtccagcaacttaggtttgaatttatgataaggttaatgatataataaacttgggttggctggtttccctggcaattgttaattccccttaaataaaaatatgttgatacattgtaaaaagaagtattttacagttgaaacctttggaaagggctttt

SEQ ID NO: 3212 - DNA, 314 bp, Homo sapiens
aaacatgtactggcacaatttgtgatgaaaatattagcacatttgcaataatgtttctccataacagagaatgttaatggataccagaattttatttttgtatttatgttcatagtacttttcctcttgtctactccagacagttattccataaagcatttgtataattaaaaggaaaacagaaaaaggaaaagtaggcaaatgtgaaaatagtttcaatatatcttatgatttcttaatgtaaaatgttttgttgaagtatatggctatcatgactaagtgctagaatttatagttacaggcggtgtcctttt

SEQ ID NO: 3213 - DNA, 285 bp, Homo sapiens
ctgggatgattactgattcctccattcctttggggtaactctgccaacaggggacaggttccattctattccgacttgtgttgctacatatgtccatgtaacaatacagaaagtggctccactggctaatacagcattaccgtatttgtcatgaaaatcgggtgtacgtttctggtggctctgccttgccattgtttgctgaatgcttcgaacttggagacgatttagtgcgcttttgaccaagggaaacatcgtgaaggtgaagctagaactgcggcaatacag

SEQ ID NO: 3214 - DNA, 420 bp, Homo sapiens
  misc_feature (1)...(420): n = g, a, c or t
taccanntcngtaccaagcttgggataanaatggacntagntgatnactgtgacttctgtttgatgaagagtatcacttcattccatttttgtgtttttgttgcatctccaagtcagaatacaaaaaaaatcatgacgaaaagacacttgcttattaattggcttggaaagtagaatatangagaaacgttactgtttattttttttcatgtattcattcattctacaaatatattcgggtgccagtaggtacttggtataaggtttttggccccagagacatgggaaaaaaatgcatgccttcccagagaatgcctaatactttccttttggcttgttttcttgttaggggcatggcttantccctaaataacattgtgtgggtttaattcctactccgtatctcttctactactctgg

SEQ ID NO: 3215 - DNA, 441 bp, Homo sapiens
  misc_feature (1)...(441): n = g, a, c or t
aaagagatttcagcaggctggttttaacctacgcaaagttaacaaacacataaagtttccggaaatcttagatttggctcctttttgcacccttaaatgtaagaatgttgcagaagaaaatacaagggtactctattccttatatggagttgttgaacacagtggtactatgaggncggggcattacactgcctatgccaaggcaagaaccgcaaatagtcatctctctaatcttgttcttcacggtgatattccacanggattttgaaatggaatcaaaagggcagtggtttcacatcagcgacacacatgtgcaagctgggcctacaactaaagtactnanctcacaagcgtacctcctattttatgagagaatctgtaataatatcnaaagcacttttntctggaaacanatttatggcttttataanggntgaanta

SEQ ID NO: 3216 - DNA, 242 bp, Homo sapiens
  misc_feature (1)...(242): n = g, a, c or t
ccaaggctgtttgcatcccngggatccccgtctgctgaccagctaaacaccaatttcttcctgcttttctccacttggtttggaaaatcacacagttttcaggctccatctgtttggagaaaatacattctgaagcntccccaatttcaccttgtaaaaactcatgtgcagggnttggatataacaccacaacanaanacacttgatgctgtattatnttacatttattncatangatttgg

SEQ ID NO: 3217 - DNA, 501 bp, Homo sapiens
  misc_feature (1)...(501): n = g, a, c or t
ctggaactcaactaatcctaaacgaaaactcaagaacagcacaccagatgccacctgttgtttgtcagggtctcaaactccagaggaaatgcatttgcctgtcatggttttcctctctaagggcacctgtctgaacttggagctgtgtttccactggtgcctcatggggcctgggcctactctccacctgaattcacacttttctctataaggtatcaggtggggaataagtccaagaaggtgacaagaggctcccgagcaacagagcttgctcattcctggcaggcatctcccacaatgccccagagggctggcgaggccgggacagcataaggacaganaaagggcngaggggtgcttggaagtgctcatcactcangggagctggcaggcccgggatgacaggcagcctgaacagtgcttgnaacaaagacagccaccctgcggccccttgtcggagcanacctcngccgtnaccactgctaagggcgaatttcagca

SEQ ID NO: 3218 - DNA, 456 bp, Homo sapiens
  misc_feature (1)...(456): n = g, a, c or t
aaaaatctaaagaattcaaaaataaggcattcaatatttgaaaaaagtacagatttacaaaatgtgtatattctgtcatgaaaactccacaccaacattatacacttggaaaaaaatacaaacaggatatattacaaatttatgcagcagntaacttagttcacaccatgcaataaaaagtacattaatcaagatacacaagcttttgtaggttctaaactgaaggacttttttnttttttttctgcagaatccttaaaacctgtggcacttaaaatttgttagcctttctaatgagaggtaaattatacacaacantgatgaaaaagattaacagaccagttgtctattatgaatcattccagctttgtgcaacaatggccgaaactcttttctcatattctcgtcttgntttcctnataaaactgtgctgcctggctattnggcttggctgtta

SEQ ID NO: 3219 - DNA, 272 bp, Homo sapiens
  misc_feature (1)...(272): n = g, a, c or t
caattgcatacccatattttaagggacaggtgaatttactactttctaaagtttattgatacttcccttttatgtaaaatgtagtagtgatacctatatttccacattgngcattgtgacacacttgtctagggatgcctggaagtgtataaaattggactgcatttcttagagngnttntactatagatcagtgtcatgggccatctcttcctcagatgtaaatgatatctggntaagtgttatatggaataaagtggacattttacctcn

SEQ ID NO: 3220 - DNA, 354 bp, Homo sapiens
  misc_feature (1)...(354): n = g, a, c or t
aaaacaaaaatgaacatttcttttacttaaattcttgtacttctaaggtacaaatgatgaccaataattttatctttcttcctttgaatatactgtaaattctatgaaaaattcatttataaaaacaaagcaaagaatagcataaattttattttctttccaatgttatatttgtaatagaagaaaaaaactccttctgataactgtaacctaaggnaacaaatattttacatataatttngaggcaaanctaatgagnttcttgantcagctggagaaattagncncattacctatgtcatgcataaatgatggtaagaagaananaggcatctgatcatgtatgacaacngc

SEQ ID NO: 3221 - DNA, 419 bp, Homo sapiens
  misc_feature (1)...(419): n = g, a, c or t
aaaatagctttaaatgcattcttcacaagtaattcagcatatatttttatatcatgtttacttatgcttaagaattaaagcaagtatatttattactctgatggaaatatgggaaatctctcattcatgcaatatacagggataatattcaagcgaagggaaaattccngctttttatnttntgtaaatgtatccatatataatcatcgacatgacagatgaggaaacccatgaagttcccctagtcagatntacattntcacttcatcagaagcacctgatatctacagctaatttataattagatactgtttcaatgaaacccaaaatgagccctacaagntcctataaacaaaagctttcnatgtctangacantcaccaattaatgcatcattcannaggattatggcttgttcc

SEQ ID NO: 3222 - DNA, 502 bp, Homo sapiens
  misc_feature (1)...(502): n = g, a, c or t
ctgacaggttacacaatatatatcaaacaatgtgacacaaaacatagctctcctctttcgtctcacagaggaactaaagttccaaaatatatacaaaaccatcttccatctccaactgtcttctctttcttcccagttttatgcaaagcaggctcattaatacattcttcaccaggctcaaccaagtagcgnagtgtcttccattgcacctctaaagttggaagattctgatcccacgtcttgacgtgttncaaaaaacaatcaggtcacaaaggtaacagcaaaatacgaggccatgcccaacatttnaaaaacacagcgaagtaacaagaataaacgtgaccacaaaaacaacttaattaagccccatttctnttctgagagtatttctttgacaaaagggtatattttccaaaaccaaacacatttgataatctaaatccatatcgaggtcatcaatcactgaccataagggagactgttcattgggggggaaaaaaca

SEQ ID NO: 3223 - DNA, 318 bp, Homo sapiens
  misc_feature (1)...(318): n = g, a, c or t
aaaataaaaaagaaattaaaggtcatatactgtactactttcacaaagatcacacagttttgcaaaagacttgtcatatgtacaatgctatatatcaaatgagaaaagctgtaagcaattatatacgcaaaagaaatgcagtatttacagtttgtcaggagacattagaaatcatctatacattaaattacattttgcttgcaaataactggtaaaacaaaatgagccatgtccacaccaaaatataaaaatctgtattgcatttttatacctaagatgcattcacagaactgctgctgacaggaaagaaaaaaanaa

SEQ ID NO: 3224 - DNA, 221 bp, Homo sapiens
aaaaattacatgataaatgtaaatcataaaattgaatgtacttataaaggtacacctattttgtgctacataaaaaaactgtagactgcaaactgtgcatgcttaccataacattttacccggggtcgatgagtgggatttcttgcaaatatttactgctatgatataaaacaattatgtgcaaactgcaaggtccctaaaatagcagttaaagagtttat

SEQ ID NO: 3225 - DNA, 427 bp, Homo sapiens
  misc_feature (1)...(427): n = g, a, c or t
aaaggnatttgctcattggtctggcttanagacaggaagacatatgagcaataaaaaaaagattcttttgcatttaccaatttagtaaaaatttattaaaactgaataaagtgctgttcttaagtgcttgaaagacgtaaaccaaagtgcactttatctcatttatcttatggtggaaacacaggaacaaattctctaagagactgtgtttctttagttgagnaagaaacttcattgagtagcttgtgatatgttcgatactaanggaaaaactaaacagatcacctttgacatgcgttgtagnagtcgggaataangagaggggcttttttattttttcgttcatacgaatattggntgaagatgatactaantgctaaatgaaatatatctgctccaaaaggcattnatcctgacttgggagatg

SEQ ID NO: 3226 - DNA, 275 bp, Homo sapiens
  misc_feature (1)...(275): n = g, a, c or t
aaactgggctctgtgattccagagtttanaatgtagaaatgaaatgcttagctttaccttttcttggggggtgtggaccctgccagaaatgtaattacgtatgctcaagtgcattaattgaaggcactgtgcacaccattggactgctgaccacagttaaacatttccagtaaaatttcgtaactggtcacagctcattcataatcactgtattttttgaccctgataaagacaattattttgatggtgttctggtactgtaattggtatccttt

SEQ ID NO: 3227 - DNA, 295 bp, Homo sapiens
ccaaaaaaatcaagatttaatttttttatttgtactgaaaaactaatcataactgttaattctcagccatctttgaagcttgaaagaagagtctttggtattttgtaaacgttagcagactttcctgccagtgtcagaaaatcctatttatgaatcctgtcggtattccttggtatctgaaaaaaataccaaatagtaccatacatgagttatttctaagtttgaaaaataaaaagaaattgcatcacactaattacaaaatacaagttctggaaaaaatatttttcttcatttt

SEQ ID NO: 3228 - DNA, 147 bp, Homo sapiens
  misc_feature (1)...(147): n = g, a, c or t
atagcatggcatctgtgaaatatggctgnttgttacatacagtgattctgcagacatgttgacatgacagtgaaatacataaatatgtaatgagaaaaggctnaactgtggataaaacaaagtcattacaattaaagactcnangtt

SEQ ID NO: 3229 - DNA, 434 bp, Homo sapiens
  misc_feature (1)...(434): n = g, a, c or t
tcagtttgttaatataacacctctagtagaaagcaagcaatagttaaggtggcaggaaggcaatctactttcaaggcttttattaaagtttagaaatgatcagtggtcttcagaagattataaatttcagtctaaactgaaatgcgtttttaattttctgaataagtaacttccagtttacgatgaaaataagtgatcagtttctctgaccaaagaaagaggccattgcatgtgattggactgacctcttcctgtggtgactagaaagtgctaaaagaatattctttagtattttctctcatactanggggttaatatggannntgtttgaaattgcaaatngaataattgtccangttttttttataccttgctaaantaanntcctcttttaatctantgatagatacagtgatcgccagtgatgacanctn

SEQ ID NO: 3230 - DNA, 259 bp, Homo sapiens
  misc_feature (1)...(259): n = g, a, c or t
gtcacattcagcattatccaggcatcaggcaacatctgtctagtgttgtcttcatcaagaacagactatatactaattcccactanaagctgtccatgccatacagaagatntattaaaaatgttttaaatggaaaatgtnctctagaccacaggactaatgtaaattaatatacacgtcnttcattattngtngaagctgatagaatncttgangtgnaaacttgcgnctgaatgttntatttgttctttanctgaag

SEQ ID NO: 3231 - DNA, 506 bp, Homo sapiens
  misc_feature (1)...(506): n = g, a, c or t
ctgcctatattcaatgccagtttgaagatctgaacagaagaaaagataccaaggagatctatactcacttcacctgtgccacagacacgaagaatgtgcagtttgtttttgatgctgttacagatgtcatcattaaaaacaacttaaaggaatgtggactttattgagaagcatggatgttagtgaaagttactacagtgtggagtgttgagaccagacaccttttgctgtctcatggggcagctacaagcatgaacgggaccagggaatggcagcagcatgcagaatcttagcactctttagcacaatattttgtattagggaacttttaattgacatgagatgctaaagtcagacattggaattggaagaactataaagtgtgattcnatcgtcaagacatcacttggatttcttaatcttaaatgcttatggaagatgtgaagttgaggtgctgcattctagaacttcaatntgtagcttactctttttttcccccctttctt

SEQ ID NO: 3232 - DNA, 332 bp, Homo sapiens
  misc_feature (1)...(332): n = g, a, c or t
aaatagaaaacagtatattgaaagtggtgggtttgatctttttatttagaaacccacaaaatcagaaacacagtacaaataaaacagaaatcaaactataagttgacttttagttcctaaaaagaaacatatttcaaaagcaatggaatctagaattcttataacatgaataacaaaatgtacagcaagcctatgtagttcaattaatatataaggaaaaggaaggtctttcttcatgatacaagcattataaagtttttactgtagtagtcaattaatggatatttccttgttaataaaattttgtgtcataattnacaaattagttcttt

SEQ ID NO: 3233 - DNA, 508 bp, Homo sapiens
  misc_feature (1)...(508): n = g, a, c or t
aaatagtttcaggaataaaaagtacaaaagaagactggttaaaatttgttgctacaaagaaaaggacacagaaagacggccaagagagagataatgttaattcaagactctcgaagagaagcttcagtgcagatggatttgagatgctacaaaacccagtaaaagattcaaaagaaatgtttcaaacctacaaacagatgtacctggagaagagaagcagaagccttggtagcagtcctgtaaaataattacaagatgtggttttgtaattgccactgggaaatttctttccttttctgttcaaaatatttcgctgaaactaatgagaaatgccatgataaagatttctcagagtttggttcccactttcattgtatttcattgaaagggcttaattaaagatggcttgagaactttnggtagccatgtgtnagaaatggatggtattcnccgggggaaacaangtntttgaatttctacnttattgaaccagattcccattgtttta

SEQ ID NO: 3234 - DNA, 147 bp, Homo sapiens
  misc_feature (1)...(147): n = g, a, c or t
tcagtatatgatactctgtaacatttctatttatatcggcataaatttcattttttttcttcatatgcaatgtggntatataaagcttaatgcagctcatttgctaccattcggatacttagacactntgagcaagattgtggcnnt

SEQ ID NO: 3235 - DNA, 340 bp, Homo sapiens
  misc_feature (1)...(340): n = g, a, c or t
aaaatattttttattgaaatattaatgtttattacatgcaaataactattttgtatctacagtcggataatggattttttattttgtatatttattctattttgtatattgttaagtgcaataaagtttttgccttgctttattttttaatacataaaacttacattctcataacgcgattgataacttaggaagttcacaatgtattttctacttntgcaattaaatattctttagtgcttgtttattattactaaatactaattaagtactaacaagnacttaaatactaatgtattaagtatttaagnctttctaatngnntctttaacaaaaaaaa

SEQ ID NO: 3236 - DNA, 275 bp, Homo sapiens
  misc_feature (1)...(275): n = g, a, c or t
aaaaatgcccaaaacacaaaaatagacttttaaggtaataatatatattactaaatatattatagtctacttataataattatatcgtcgttttcaatattacaaaaaaaggaagaaaaatacaagggaagcagacgacccaatatatataaatactataaaatcatattagaacaaataaagtcgtcataaataaagggcccattgatttatgggtggggtttggcaacggctttggctacttgcttttggagggtaatttgacnancaggatt

SEQ ID NO: 3237 - DNA, 501 bp, Homo sapiens
  misc_feature (1)...(501): n = g, a, c or t
ggattacttgagccccagaggttgaggttgcagtgaaccatgatcacaccactgcattctagcctgggtgacagagtgagaccctctccctcctaaaaaaatccttaagaaatatattgatgcttggttcctttggtcagaattttgatttaaggtgttgggagtgtagcacagatgttggaataaacctctcaaactgattttaatatacaaacaaggncgagaaccaccaaggaagagtttttatgcataaagattcctgtactctaccctagaactaatacatctgaatctctgggaatggagtataacaatcagatttgaaaaggtttctttagtaattttaaggactgaccattttanacactgctttgttanagcaaaatgattaggtacctagtatcaacctagccatccaaccttatattaataactagggaaaataaaggggttggagcctctgtgtttctttgttgnaaaatctgctactattattaagat

SEQ ID NO: 3238 - DNA, 218 bp, Homo sapiens
  misc_feature (1)...(218): n = g, a, c or t
ggtgggggaaganatgcaagtcatatnncaaaggatctgcacagcgcaaaatcttcttggntttttatttaacttancngtgaatgcaccntgattggnttaaagtataggttcactcccatggaaacatgcaataagatcacatngatccagaggctggntcaagtttgactgacgggaaacgggagggaaggctgntcctatcacncaatctcagc

SEQ ID NO: 3239 - DNA, 374 bp, Homo sapiens
  misc_feature (1)...(374): n = g, a, c or t
aaaaaaatacaagatcttatttctatcttattttttctcctcttctgaaatatatatgaggattcctctccaaacccatggtttctctaagaattttgagtcatttgtatgacctcaaataattagttttagctgacctcacataactccttataataggagacatctttaatgtctgctattaaagaaggatgaaaattcctatgaccttctccccgattatccctttggcaatatagagtcaaataataacattgaccaataggtaaacatgctttgccaagaagtagaagatatattccctagccttagtttttcctcccaatttgcatttttgtaaaaataatgntgtatccacaaaggaaataaacttt

SEQ ID NO: 3240 - DNA, 429 bp, Homo sapiens
  misc_feature (1)...(429): n = g, a, c or t
ggacgacacacagtatggatcacatattgtttgacattaagcttttgccagaaaatgttgcatgtgttttacctcgacttgctaaaatcgattagcagaaaggcatggctaataatgttggtggtgaaaataaataaataagtaaacaaaatgaagattgcctgctctctctgtgcctagcctcaaagcgtncatcatacatcatacctttaagattgctatattntgggttattttcttgacaggagaaaaagatctaaagatgttttattttcatcttttttggttntcttggcatgactaanaancttaaatgttgataaaatntgactagttttgaatttacaccaagaacttctcnataaaagagntnatgaatgctccacantttcnacatnccacangagaagtcaattntcttaacattgg

SEQ ID NO: 3241 - DNA, 397 bp, Homo sapiens
  misc_feature (1)...(397): n = g, a, c or t
ctgaaccctcgtgaagccattcatacaggtccctaattaaggaacaagngattatgctacctttgcacggntagggtaccgcggccgttaaacatgtgtcactgggcaggcggtgcctctaatactggtgatgctacaggtgatgtttttggtaaacaggcggggtnagattttgcncgagntccttttactttntttaacctntccttatgagcatgcctgtgttgggtngacagtgaaggtaataatgacttgttggttgattgcagatattgggctgttaattgtcagttcagtgtttgaatctgacgcaggcttatgcggaggagaatgtttncatgttacttatactagacattagnttcttntatagggtgatacgattgtgnccnatngg

SEQ ID NO: 3242 - DNA, 298 bp, Homo sapiens
  misc_feature (1)...(298): n = g, a, c or t
tnncgaggtccacttgtgtgggccctcantttcaaananagcnctaaacttgacattgggggcccaccactccaactttgctttctgaaggttttggtgtacattgagccccagaaggaaaggagagcatttgtnaggtgggggcctcccttgaccccantacgaantctatgccctgaatccccagagtnncccttgctggggcccaactggcctggggacaaacagtgtccactacntntaggactgctcggntaagtggacacacttnttgaccncntaccaggaactttngtan

SEQ ID NO: 3243 - DNA, 293 bp, Homo sapiens
  misc_feature (1)...(293): n = g, a, c or t
aaaaggatatttaagtgagcattttctagttcatatgaaaataaccatagtacaggatgatttctgtccacacaaaggttaaattagattgcacagttaattttcacttatatttatggtactattatgtgggtgatgcctttttcttttaagcccagtacatatattatgcctgcctaagntctgaactggggctgtatttcagtagttgtagaattattgatatttagttttgatagctaatgtttaattgtttggatctgcacagtttggtttttgcacaaaagtcattt

SEQ ID NO: 3244 - DNA, 231 bp, Homo sapiens
  misc_feature (1)...(231): n = g, a, c or t
taaataaacaacattttcagtatgaactatggtaagatttcatcattctataaggcatattatttaggaggtattccttcctatgcatttcctattttacagtaaactcagtatcaggtaaaaattaactgctaatgttcctatcaacaattcatccattcctttttatgacacttttatcttgtatacaaaaaaatacacaattttnccaaaccttgagganccccccnt

SEQ ID NO: 3245 - DNA, 209 bp, Homo sapiens
  misc_feature (1)...(209): n = g, a, c or t
ctgccctacttttcaattcagatatactagtaccttacctagaaataatgttaacctagggtgaagtcactataatctgnagcctattatttgggcatttgctacatgatgagngctgccagattgtggcaggtaaagagacaatgtaatttgcactccctatgatattngtacatttttancgaccactanttgganganattcccca

SEQ ID NO: 3246 - DNA, 241 bp, Homo sapiens
aaatgatctttacagatccctgaagttgctgtcctgtcactgtatttaagtgatggatattcaattgaattattctgcataaataattctgttcaacccagaagtatagtagtatgatgggtcagatacagtcaactgttcaataaaaatgcagatgtctgaaattattaaaatgtacttaaaagtaacaaactgtatcacacacttaggcttagaagtgttctttcaagttttttctttt

SEQ ID NO: 3247 - DNA, 268 bp, Homo sapiens
  misc_feature (1)...(268): n = g, a, c or t
ccatggattaatttttcctgttctggaactttatctatatgtactctaccatattcaaatcctttagcacagcacaatgtctgtaagatttattcatgttttattataatagttctgttttgttgctgaatagtattccatttgtgaatatattataatttatttgttttcctgttaatggacatttgagtttttttcatttggaggctataatgaaggaaactttgtaaatatttgtgtaccagtctttgtgtgaacagatgtttnt

SEQ ID NO: 3248 - DNA, 286 bp, Homo sapiens
  misc_feature (1)...(286): n = g, a, c or t
cacagtaattgaaataatttcaaataactgtaaaggaactgaaaatcttcacagagatgaagtggggtttccattaggtgctttgaaatttgataacaaatcatcaacttccactggtcaatatatagattttgggtgtctgaggccccaagattagatgccactaatctccaaagattccctccaattatgaaatattttaatgtctacttttanagagcactanccagtatatgaccatgtgattaatttcttttccactagataaaattacctggttcaaaag

SEQ ID NO: 3249 - DNA, 101 bp, Homo sapiens
ctgagggatcatgctgatcttcaggagtttgctgcttgcatacttattcttgatggcgatgaatttagttaagttttcatttactttcaccacattcttgg

SEQ ID NO: 3250 - DNA, 330 bp, Homo sapiens; identical to SEQ ID NO: 2

SEQ ID NO: 3251 - DNA, 493 bp, Homo sapiens
ctgcgtgacgtcatgttctacctggagacacagcagaagatcaaccatctgcctgccgagacccggcaggaaatccaggagggacagatcaacatcgccatggcctcggcctcgagccctgcctcttcggggggcagtgggaagttgccctccaggaagggccgcagcaagaggggcaagtgaccttcagagcaacagacatccctgagactgttctccctgacactgtgagagtgtgctgggaccttcagctaaatgtgagggtgggccctaataagtacaagtgaggatcaagccacagttgtttggctctttcatttgctagtgtgtgatgtagtgaatgtaaagggtgctgactggagagctgatagaaaggcgctgcgttcgaaaaggtcttaagagttcactaacctcacattctaatgaccattttgccttcctgcttggtagaagccccaactctgctgtgcatttttccattgtatttatggag

SEQ ID NO: 3252 - DNA, 142 bp, Homo sapiens
ccagattacccaggaccgactccttctctcggctgaattgctcaaaggactcctctcctgccaccggggggttcacgacaatgtccatggcggcctgcccagacactggggggcacaggcgcaccgacagcagcttcaccag

SEQ ID NO: 3253 - DNA, 530 bp, Homo sapiens
  misc_feature (1)...(530): n = g, a, c or t
ctgggctctgcacctagggagacggcactgtgttgggggaagcgcgtgggaagccagagtcagccttatcaaccacaacccaggatgttccttcggcacaggcatctcctgagggccccgccacaagccacccctctgcccctggcctcacattccttggaagcacaaatgagtaagatgggaagggggcccagtggacatgtacctttccagaaccttcctaggcacccctcgacctgcagggtaagggccctattcctcaacctggcactcgaggcccctcgggtctgtccttcgcccctgcctatcttacctccaacctttcttcactcaaaatcccacacttgagctacaatgaaaggccagcggctccctaaacacacggggaccgcctgcctctggcttgcacgggcttgctctcttctgccagaagagaaaactcccaagantccctcagtgccaagctccaagcatcacctttttccttggaaaggaaatcttccantttccccaaaaagggggtcaccgtg

SEQ ID NO: 3254 - DNA, 533 bp, Homo sapiens
  misc_feature (1)...(533): n = g, a, c or t
ctgcagagtatatgaccaggtggaaagtccaacagatgccccactcacaagatagggccctccaatcagtcttctggctccctttcactcatagtaactggttgctcttcctattggtcatagataaatgacacctgcacaattctccgagtgctttcaagcaacttcgggaggcagtgactaagaccctttccttgctcccagcttcctatgtcccagggctgcctgtggcacctggactgctgctgcccctgggtcccgtacattccagggcaacaatggaggaagggcaggcaacgcatgangaattaacagtctttattgggctcagaccaggagtccgtgggtcttgaggacctctgtgtatttgtcaattttcttctccacgttcttctcggcctgtttcccgtagcctcatgagctgtttcttctttccggtagtnggatcttgggctttctctttcctcttctccttccanggtggctgacactggctnggacttcccagccaaccctcgtgaagccaggccccc

SEQ ID NO: 3255 - DNA, 187 bp, Homo sapiens
  misc_feature (1)...(187): n = g, a, c or t
ccatggctgatattttgactacaacctcatgagagactgagccacaacaacctaactaagaaactnctgaattccctaccaacanaaacttntgagataatgttctgttgttntaactaanttttcaagccggcaatttgttatacanaatatgtnactaataaagcatggctcctttaggtcttct

SEQ ID NO: 3256 - DNA, 314 bp, Homo sapiens
ccactcctccatttagtcgtcaggagaaattctatgctacattagttaggtacgttggggatcgcaaaaacccagtctgtcgagaaatgtccatggcgcttttatcgaaccttgcccaaggggacgcactagcagcagggccatagctgtgcagaaaggaagcattggaaacttgataagcttcctagaggatggggtcacgatggcccagtaccagcagagccagcacaacctcatgcacatgcagcccccgcccctggaaccacctagcgtagacatgatgtgcagggcggccaaggctttgctagccatgg

SEQ ID NO: 3257 - DNA, 235 bp, Homo sapiens
ctgaccatgactgaagttccagctttactttttataaacttgaatgataaagaatagaccatgggctactactgggcattagtgcaatataacagcgataataaaattctctattagtctgttaatttatgacatgatctcggaatggaaaaagatcatttcagagtgtgcgaaataatagtctttaaccatgtaattaaatatgtgtgtttattgtcaaataaggatttgtttt

SEQ ID NO: 3258 - DNA, 194 bp, Homo sapiens
ctgagaaggctgcaagtgacgagaaagattctgtttcaaatatagccacagaaataaaggatggacaacaatctgggagacataattttgcaaagcagatttaatgtcatgttcagccaagatagacaagaacttctcttccccgaataaatcagcgggggactctttgaagctgcacattctgattcagcagg

SEQ ID NO: 3259 - DNA, 230 bp, Homo sapiens
ctgaggtctgccagatcatcgatgaaatcaaacaactgactgatgtcatatgtgatagagggactgttgggattcattcttttcagatgttcttcatacattttacaaacaccttccatgcattcattcacagattcgtagtcagcataagttctgcctcctggcctcttggtaggctgtaccagcaaaatggtgtgagacatcgcgccaaactctcttcgctacagcag

SEQ ID NO: 3260 - DNA, 406 bp, Homo sapiens; identical to SEQ ID NO: 1

SEQ ID NO: 3261 - DNA, 486 bp, Homo sapiens
  misc_feature (1)...(486): n = g, a, c or t
cctgaaagaagggtactagtccagaggtggctagatgggattgggtctctaagggagaactcctgctctcaggcccaaccctccacctcccccccgaaaacccttaccagagcctggggaccaggtttgtgttgtccacatattctccccacatacaagcctctccaccaatcaccagagccttctgctcaggggtaccttcaaatgccaggggttccactacgtagaaatccttccagtcagggccataggatatacggttcaggtaccagggggcagagagaagggcccggaagccggccttggtgaccagttccagctccttcatatagttcactggaatatcctctcgccacacctgtatgattgtgtctggctgaatctttactttattatcaaacacctcctgccacaccacatagcccttgccataagaaagagacgaatgtccagcagcgtctggatgtagaaggactccagacctcn

SEQ ID NO: 3262 - DNA, 227 bp, Homo sapiens
cctggcattcaaggctctctgagatctgggctacccacccatgtcctccagccgtctgtcgcacctcctactgcccactcactgttcctggcatgagatgtgatctccagcccccatgcctttgctgtgcagggtgttccagagtgaattgtccctcctgtctgtctctctgccctcttcctcgtctttccatcttcctgccccacatcactgcctcctacccaagg

SEQ ID NO: 3263 - DNA, 182 bp, Homo sapiens
aaagctttttaccacaatggagttgatgcgttggtccacacttgttgaggactatggaatggaattaagaaaaggttcccttgagagtcctgcaacggatgtttttggttctacagaggaaggtgaaaaaaggtggaaagacttgaagaacagagttgttgaacataatattagaataatgg

SEQ ID NO: 3264 - DNA, 269 bp, Homo sapiens; identical to SEQ ID NO: 4

SEQ ID NO: 3265 - DNA, 197 bp, Homo sapiens; identical to SEQ ID NO: 532

SEQ ID NO: 3266 - DNA, 279 bp, Homo sapiens
ctgcctctcatgtacttgtctgttgggggcttgtgttgatcaggagtgaattcacagtctaccatgaattggaaggttcttgagcacgtgcccctgctgctgtatatcttggcagcaaaaacattaattctctgcctgacatttgctggggtgaaaatgtatcaaagaaaaaggttggaggcaaaacaacaaaaactggaggctgaaaggaagaagcaatcagagaaaaaagataactgaagattctgccatgtaaatgtcagcttgagtggactccag

SEQ ID NO: 3267 - DNA, 389 bp, Homo sapiens
ctgtcaggggcggcgtgcctggtgatgcggcatcttaccttcatccccatctcagaatgggcagccagtctcagattcaaggaggaggaatcctgaggtgtggcgttcagtcctgaggtagatctgaggtcccctggaaattgtgttgatgctgagatggatgaggggtgctcattctctcaggtagacagtgaggagtcctggttcagccgagcctccatgtctgcatggatggttatgaccctgattgtttttggaaacagccaagctctctaggtgtactcagcaaatgcaaggtatagtgggtcctgcatacccagggtattatttgagccatggaagcaaaacagagactgcttagcctccctaagagtagttggtgggagtgg

SEQ ID NO: 3268 - DNA, 113 bp, Homo sapiens; identical to SEQ ID NO: 3
  misc_feature (1)...(113): n = g, a, c or t

SEQ ID NO: 3269 - DNA, 492 bp, Homo sapiens
aaaagtcctaagagaaatatgtgacaggtagttactgtcagtagggatattttctacctttttttccctattgttgaagtgtcggccacaacagcttctgggcatgttacagcctcaaaatcaccacctaccaaaaagggcaaaactaaaaatccctataaaataaaaaagaaagttccacccaaatgtttagtgcatttgacaaaatattatgggtatttagcaaatgaataagaaaataaagaaaacagtgcaggaagaactatataatgttttaagatttttatattacagacctgcatctctgtacatttttcacaggatgattaccagtatctcagatagcctgagtgtgcaaaaatcttcagaataagaataccatagttgctaaatatcttttaccatgaacaataatttcttcttctctccccactccccaattataaacattttatccttcaaaatacagctctcctgagttgtacttcttgt

SEQ ID NO: 3270 - DNA, 294 bp, Homo sapiens; identical to SEQ ID NO: 280

SEQ ID NO: 3271 - DNA, 587 bp, Homo sapiens
  misc_feature (1)...(587): n = g, a, c or t
ctgctgacagttctttggtggaaaagtaagttgcgtacttacccaagctgcccaaatgattatcaagccaagtttgtttttcaaaaataggttttaagatacaccaaagaaactatacaatacaaaaatttaacaatgaagttaaagtatatagcaaaagccaaatatgacaacacacatgtataatgtagaaaagaatcctttcagtcctagaaaactaaaatggggagaacttactgaagggtaacatacataaaatgagtactaatagcaaggaataatcctaaacattttcccaataaactgactaagcctcaaaaggacagcttaggaaaatgattaacatgcagtttttctttttccctagccaattcaggttctacttagataaatctggttgccaatcaatacatatataaattaatttttttctgctcaattactaccattttttctttttcccttttccctaattttctctagcaacacttttcctttggtttgatcangttgaactcaaaaggtttggtacctaaaatgaantatcaactgttatttgcaatagcaccttgggaaatgcaatccta

SEQ ID NO: 3272 - DNA, 233 bp, Homo sapiens; identical to SEQ ID NO: 620

SEQ ID NO: 3273 - DNA, 466 bp, Homo sapiens
ctggtatccttccttagtggcaaagatgaaactgagctagctgaactagacagagctctgggaattgacaaacttgttcaggggggtggattagatgtattatcagagagatttccaccacaacaagcaacgccacctttgatcatggaagaaagacccaacctttattcccagccttactcttctccttctcctactgccaatctccctagccctttccaaggcatggtcaggcaaaaaccttcactggggacgatgcctgttcaagtaacacctccccgaggtgctttttcacctggcatgggcatgcagcccaggcaaactctaaacagacctccggctgcacctaaccagcttcgacttcaactacagcagcgattacagggacaacagcagttgatacaccaaaatcggcaagctatcttaagccagtttgcagcaattgctcctgttggcatcaatatga

SEQ ID NO: 3274 - DNA, 326 bp, Homo sapiens
  misc_feature (1)...(326): n = g, a, c or t
caaagctagaaccctgggaacaggctatgtgttgagggagggagaggaagaaaccaaggaccccctggtcctggcctgagcgccgctgtggatggcgcagcccttcgccagaacagggtgcaacgagcatggggagaggagagcaagtgcctcctcccccacaaccagatgcccaaggccacgtgagacacccagcggggagcccacaccccagggccccttctctggacaagtcactcccccacccacctttcaactcangcaagacagtactcacctccgctcgccanggggtggcttcttggggcttgcaggtttgggcaagg

SEQ ID NO: 3275 - DNA, 181 bp, Homo sapiens
ccttcttgaatctctagtcgtcgtcaggcttaggtcacactacccatgcactgatcagccctgccacgtgggggaggttccaaaaaatgaagcggttccaggggtgccaaggttcagagcagagtcttgagagcctgaggggcaggaggaggcaaaggtctctgaggacgaaggggtttgg

SEQ ID NO: 3276 - DNA, 546 bp, Homo sapiens
  misc_feature (1)...(546): n = g, a, c or t
ctgatcacttatttcatcattttgcatgttttattcactggggagggctgtgttacctgtatcagatgactgattctaaatagccttgttactgtgaaaacgaagttctatttatgattaccacatggtgtttgtttttttcttttttttccaccaaatggagcatcacagtcaatatgcttttaacagtgggagcagagaaggtagtgcttactctagtacaccaacctgatgggtcattagtttcaactggcttcagaagagtgattcttcctctaattagattttattgttgaagttccttcatatggaagatattttccatagtatttggataagctggactgtgttttaagaactcatatggatgttgaaggttgttttcagtttatctttccagggaacttctgttcagctctgatgggtctggtccttttcatgcctgagggagcagatgtgattgcctgtgattgaagccagtggagagttataaactatttttgttctaacatggatgatgcctaaactcttccctcttccacanaa

SEQ ID NO: 3277 - DNA, 461 bp, Homo sapiens
aaatattgttaaagaattctcaaaggagtaaggttaatgagcaagattaaaatggcagcagcagatccaattgcgttttctttttcataagcctaaaagcatcgcggtgtgtttcagagctgcttcctctacaaattctgcatccacattgtcatgtccttcaaaaggatacagggcttgattggaggactctatatctgtcagaatttcaatgaagtagttcagaggcagaaattctacactgaacgatgacttgttaatcatagaattccgaggctgtttcttatagttctgaagcagtcgcgtcacgtggttccgcgaaatgatgttagaactcataggatgatcccaaagtctacaaatcttctgcccaataagcggaggaagccgcacaatgatactgaatttcagtttttcatttttctctgtattatccagatctttcatgagccttatgacag

SEQ ID NO: 3278 - DNA, 569 bp, Homo sapiens
  misc_feature (1)...(569): n = g, a, c or t
ccaggatggcctccatctcttgacctcgtgatccacccaccttccctcccaaagtactggaattacaggcattagccactgtgcccagccgaggctgtcatttttaaccggctctggatgactctgatgcagccatcctggaccttggctgtggtctggtaactggaacccagtgacgtaatcaggtgccattgggggtcatgggaaagggggatccccaaggtctgaggtggactaggaaggctttctgaagaacctgggtctgttagggcatcagccaatcaaggtacaagtaaatagaggcaaaatgagggtttgaactgtgagcagttggtcctggaaaagaaagaaaccaagagattatggggactcaatgggcttcttaagagagaataagttgaaatcaatggccagaaaccctgatggaagtggaggagaatcatctcangcaaactttttgtgtgccagtaacagaaaccctctttgtgtgatcacatgcaaagtataggatatttgcaatatanccatgggggaggantgcagggcccaagggtagattttanccagga

SEQ ID NO: 3279 - DNA, 478 bp, Homo sapiens
  misc_feature (1)...(478): n = g, a, c or t
ctgctgaacaatgacatcgttttctccaggggttgaaatccatgtccatggctgacaacccaacaaggctgggacccaaattcgtacagagatgaggcagagtggagagaaacaactctggctgagccagagtctccagccactacttcttattcctgggctttagctcttcggctgcattacgcaggaaaatgtaattttttttctggggattataaaattcatgtccctttgaccagtcgtagctggaagcgtatgcaaatatgtttccattgtgattgaaacagcaagctgagatgggctgatctaactgttccgaagtttttagttttgttctggcatctttgtcccagaagctgaatctaccatcagatcccacagttgcaagggtgccatgaacaggatggaacgcgattccatttaccgcataaatgtcctgaggagctgaagngttggttccattanatcgatgacattt

SEQ ID NO: 3280 - DNA, 184 bp, Homo sapiens
ctgcacagtagtatctccctgcatcactctccttcacggtgagaacatgcagctctgccaacagggaacgctgggtctttctacccaggcttcttactcttccttctttgtgccaggagaatgtgacagtccctgaaccctgggctactgagcaaataaggaccatattttctccttcaatcag

SEQ ID NO: 3281 - DNA, 364 bp, Homo sapiens
tgaaattagtacagacttacttttttattttaaaatttttgctataacatttctgagccaaaggcagagggtatccattaacttcattgttgccttaattgaggggtgggtggcaatgccaagggtgggaacacaaggaagaaagaaatattaacgtcagctaagaaatcaacatgttatcaggctatactgtagttggttgcttctgtgttactggacatgacaaatgatctggtaaatgatgttaaattggcttgaaacaagagagtctcccaattcttagccacggtttcagtcagcccttccattccaggatgggattcacaagggcccttggtgtctggaagcaccaactgaacgcagg

SEQ ID NO: 3282 - DNA, 372 bp, Homo sapiens; identical to SEQ ID NO: 5
  misc_feature (1)...(372): n = g, a, c or t

SEQ ID NO: 3283 - DNA, 245 bp, Homo sapiens
ccaggccgaagctcactgtcccccacccattggaggttcctccctgatctgtctgcacatgggaaggagcagagcgcgcagggagaccgggctgtacaacaggaacatgctggctggacagtctcttgctggagggaatcagtagcactcacgtgaaccacctgcgctgcctccacgagttcgtcaagtctcagacaacctactacgcacagtgctaccgccacatgctggacttgcagaagcag

SEQ ID NO: 3284 - DNA, 251 bp, Homo sapiens
ccactcagcacatttcatggaggtcatgtcttttcactgatacttttttgatagtttttatataacaaaatccttattctatttataacttaagatgataaggcactataaattaatgacctaaaataatatatttgtctgttatcttttgctatttctacttcactttaatttttagctgtaaaattggtaaatggattcttacaactatctctttccatttcttactatttagttttcaaatttcattt

SEQ ID NO: 3285 - DNA, 224 bp, Homo sapiens
aaatgagcaataactcagatatattagagagaaatcaccgcttgccttacaaataccaaataaattccctagactcccctcccctgtagagaccatcagctcactgtgaaggcttgagcctcagtaggtaaaatttgaggaaaaaaatgagaaatggctaaaagaggcatctgctgcaggaaccttctgtgactgtcaaacattccctcttcaagctccctttt

SEQ ID NO: 3286 - DNA, 481 bp, Homo sapiens
aaatcacagcttttacctatttgttaggctatagtgttttgtaaacttctgtttctattcacatcttctccacttgagagagacaccaaaatccagtcagtatctaatctggcttttgttaacttccctcaggagcagacattcatataggtgatactgtatttcagtcctttcttttgaccccagaagccctagactgagaagataaaatggtcaggttgttggggaaaaaaaagtgccaggctctctagagaaaaatgtgaagagatgctccaggccaatgagaagaattagacaagaaatacacagatgtgccagacttctgagaagcacctgccagcaacagcttccttctttgagcttaggtgagcaggattctggggtttgggatttctagtgatggttatggaaagggtgactgtgcctgggacaaagcgaggtcccaaggggacagcctgaactccctgctcatagtaagtgg

SEQ ID NO: 3287 - DNA, 469 bp, Homo sapiens
ctgtgttgctcaagttgagctttgaagcaccgatccccaaagaaaatccagttccccccgaagcaagagtcgctgttccaaaagtgaagcctgtcgtctgtgtggccggagtctgggtggcaagtgagaacaggccggtggaaggggtacttgtggctggttggaagggagccccaaaattaaaccctccagtgccagaggtggagaaagaaaaccctgtagcaggtgtggttgttgccgtctttgcagtgccaaacgtgaacccgcctgtaggggccccagtgcctccaaaattaaacccgctcatggctccggactctggtggcggcagctactctggctcccaaagcaaatccgtcggtgtctgcagccttgggaagatttcgctcagtatcaggattcctccaccttctctggaccttgattcagtctcctaactgccacagaagggatgaaggttgaactccag

SEQ ID NO: 3288 - DNA, 502 bp, Homo sapiens
ctgaaaagctagattaaaaaaaaatcaatcaagtttcccaaagtataatgtttggaccttcaaaatatttagttctagggaaagatacaagtcagaagcacacacagtgacaagatatgccttgaaaacatgtctactgtgtagtatgataatcgatacaccaagtgcttacgttctgtttagacttcaaagtctgatcaaccatgaagtcaaaggtgtattacagaaacgagatgtaaaaatgaacaaatcccttctgccctttttccttttgggaaaactgacctcataggctcgttcctcaacaaacactgacatgaagacttacctgttggcctctcaattacatctgatgtcccaaacccactgagagtaaaacttggaactgttttcattaaaaaattcactttacagtagatctcaagatggacaaagataaataaggaaagaaacaagaaaaatgtaaagagggaaacaggcagatatttcagccaattagttt

SEQ ID NO: 3289 - DNA, 305 bp, Homo sapiens
aaagatttttctctaataaaagtacagaggaaattgaaagcaggatcagatagatgaatcaaggcttcttcagattcagtggtttacaaatatacctcaaaattcataaacaaaaataatacgtaaaagagaacagaaggtaacgcaataaaggtaacagagatagtgtcttcagtatataaagagatctgaaaaatttaagaaaacactagcaatgcaaagaaaaaacagacaaaagatttggaattcacgggaaaaaaagaaatggtcagtaaaaatgcaaaactgtttaagcattatatttt

SEQ ID NO: 3290 - DNA, 348 bp, Homo sapiens
ccacggagtgatgagttgtgtgcttgtccctggcagtggcaggctgtgtcctatggacatcttggcaggacatggaatttggcctcatgacaggcccaactagggataggaaggaaaatgaagagagccagtatttccccttctccagaagcaggtactcagctttctgggaaaagcgtgcctccagccgtggggacaggccatcctactgactacctcttgcttggcatgaaataaactgctatcctccccttggaatctaccgccactctacatcctactgctttggcctccctctcctctcaccagatggcatgtggtgtggcacctgtggctggacacaggagg

SEQ ID NO: 3291 - DNA, 373 bp, Homo sapiens; identical to SEQ ID NO: 6

SEQ ID NO: 3292 - DNA, 117 bp, Homo sapiens
ctgggctgctcccgccccagcccggcccagggtgaaggaagaggcacgtgctcctcagagcagccggagggaggggggaggtcggaggtcgtggaggtggtttgtgtatcttactgg

SEQ ID NO: 3293 - DNA, 464 bp, Homo sapiens
ctgcaggtctgacaggttctgctccagggccatgggcccagactccaggccacagcccagccgggccttccactgtttcatgaaccccaacagcaggtttaggtgggaggtctgggaggtgacctcatgctcttgcacagactgtgggcttcccttgaaggagcagccgacacctgcaaaggggcacccaattccagcctcagccacctcggggtgagccttctcctgagttcgaagacggcttcctgggcttatagactggaggtcttcccctctgcatttggggcagatctgatcctcgccattcctcgggttctcagagagacagcctgcacagcagagagccctgggctcctttgggtcctggcagacggtgggagggcacccaaagggaaactcattctcatcaggggccgggcgaggactgctgcctgagctggagccatctcagggttccaggctgg

SEQ ID NO: 3294 - DNA, 299 bp, Homo sapiens
ctgagggatttccacatttcgaggcagggagcagacaaaggccataagcagtgcaatcagccgcctctgccctgaggagccatcctggaatggctggaatctgctcgggaagctgttttcaggcagaaaggacacgttgccatccaagaagaggggcacaatgtgtgtcacactctgggcagctaactcagggctcaggggggttgtagcagtgccaatgacagacaccatggcagccaacacctcatcctccaatagtacttttctcagaactgagggctccttctctggcatagagg

SEQ ID NO: 3295 - DNA, 169 bp, Homo sapiens
ccagcgcctggcgtcttgtagtgatgaccgtactgtgcgtatctggcgtcagtatctaccaggcaatgaacaaggggtggcatgcagcggctctgaccccagttggaaatgtatctgtactttgtccggcttccactcaaggaccatttatgacattgcttggtgtcag

SEQ ID NO: 3296 - DNA, 147 bp, Homo sapiens
aaagtcaaaccactaggaaaatatatcacagcctggaaacagcaaacggacaggctatattataatttcaagtaataagttggtgaaaattcaacgaagttgctatcgaaacaataaggtgccatgctggggcaggaacactgccag

SEQ ID NO: 3297 - DNA, 253 bp, Homo sapiens
ccttgtccaggaatacaggtaaagggttctgcgtacagaaaatgggtcccgctacattttaattttcaacagtcacacaatttttgcatcaaaatgacataaaagaatactagcacaaaaaccctaaaatgggcacctcagactgcagtccaatttacagatctctggcttacgttatcctaaggtgttaccacaaatataaccaaaatgtgagatataagcataattctttcaacagctttcggtgcctttt

SEQ ID NO: 3298 - DNA, 441 bp, Homo sapiens
aaacatcctgatgaatggagagcatatccatttcactgggcttggcttcctcaagcaaaagttcccttttctgaagaaataagaaatttgattctaccatatatttctgacatgaactttgtgcaagatttatgtgaagatctctatgaactttttaagactgacaaaggatttgacaaagccacttttgaaagtcagatgtctgtgatgaggggtcagatcttaaaccttactcaggcattgagagacgggaagagtcctttccagctagtacagataccttgtgtgattgtggaacgcagtcaaggtggaagtcagggtcggattgtccacctgagcaattcctttacccagactgtcaattgcaggaagccatttttttcctcctggtagtaaatgtcagagtaagagaaacaaactgtttagaattatcatgttttt

SEQ ID NO: 3299 - DNA, 491 bp, Homo sapiens; identical to SEQ ID NO: 282

SEQ ID NO: 3300 - DNA, 209 bp, Homo sapiens
ctggcagggagaacagcgacaaacacctagccgagagtatgtcgacttagaaagagaagcaggcaaggtatatttgaaggctcccatgattctgaatggagtctgtgttatctggaaaggctggattgatctccaaagactggatggtatgggctgtctggagtttgatgaggagcgagcccagcaggaggatgcattagcacaacagg

SEQ ID NO: 3301 - DNA, 262 bp, Homo sapiens
aaaggtaccattctggcctgagatcttctgtaaatctattcctagtctttccattaccataaatctgtaactgtaagaaaaaagcatcaaaaagagatcatcctgagaaagtaatgcttgaaactgtctatttaatttgaaacaagaaaaattacgctcaacctaacaactaagtataatgcaatctaaaccattagagaatgaatgcacgttcataattctgctattcttttgcagaaactgctcaatatttactttgcag

SEQ ID NO: 3302 - DNA, 477 bp, Homo sapiens
aaatactctcaacgttttaccaagtgattttacctccacctttactaaagtctttacctaaaacatggcagtcgctggacacaggaaagcccaccttttgtttggccttttcgaaaggtgacccatattgcacagcagaacatcacagctgtggtcccagatgagacactgacatgcgagtgaaggcctctcctcctgggccccgggctgcgcaggctcctcactctgggcggtgtttcctgtctcagaattgacacggtgaatgcttagtgtctggattttcttgtgccagtgtttacatatctgacatcgagctcctctaagaggccacgttcaagcttgtgtgtccctgacccaagatagccagtgctgctcccaggtggtacttctggtaccgtgttgagacacttgggattctcagactgtggacaggagtgtttgtcatttttcatactgttttcttaataagcgctcaag

SEQ ID NO: 3303 - DNA, 555 bp, Homo sapiens
  misc_feature (1)...(555): n = g, a, c or t
cctagtgggagaagattcagcaggatgtcatgacattttgagaaaaactaaatcatgctcctgaaccttctgaacgcatttgttattgaaggaaagacaccacccccaaatcctgccatcttattggggctacttttgtcagtgtctgtacccttggcatcggcatctgtgactctttatccatgacctcagtgtttcttaaccaaagttgtactcagcatttcttaaccaaagttgaattttgaaaagagtcagtccttgtttgctggaattagaatgttaatgtcctagtattattccgaactacagtattaactgcttgttgctagtggattagacagattcttttcttactgtggcttccatgttgggagcagaagcttttcatcctggtcacatgaagacagatggtattattgactggagttgaattatttttatatcttgtctggcacaatatggaaattactgaaataagacggtgtataatggaattaacacccaaaataagtagaacactggaagaatttgaatttgatatttaagtnaaaatgg

SEQ ID NO: 3304 - DNA, 158 bp, Homo sapiens
ctgccgcaccacctgcaccagcttctccagctcgtctgggcagatgtcagggcagtgagtgaagccaaagtacatcagcacccactggccccggaagtcagccttgcagcgagcccggcctctgtgatccagcaggtggaagtcgccctggcccacag

SEQ ID NO: 3305 - DNA, 457 bp, Homo sapiens; identical to SEQ ID NO: 8
  misc_feature (1)...(457): n = g, a, c or t

SEQ ID NO: 3306 - DNA, 345 bp, Homo sapiens
ccttcaaggaagggaggggtctcagaaccactaaggggccttcctcactcccacttactcaggggcagaagactcagttgaagacctccaaatccagagacttggtaattaagtcaaagcctggctatgctgggagaatggcctccagaccctggcagaaaatggggtaagggctggtgaggctccccaccttccttcctctacaatctgctagaacccaaaacgagaaatgaggctttgggaaagggagcacaggaagagaaatcacacagcttccctcctcctcccacttgctctattgggctcctgcatctgttgctgggctgctagcagagaggctggcag

SEQ ID NO: 3307 - DNA, 216 bp, Homo sapiens
agcaggccctctttccatcccgtgtcggatgagctggtcaactatgtcaacaaacggaataccacgtggcaggccgggcacaacttctacaacgtggacatgggctacttgaagaggctatgtggtaccttcctgggtgggcccaagccaccccagagagttatgtttaccgaggacctgaagctgcctgcaagcttcgatgcacgggaacaatgg

SEQ ID NO: 3308 - DNA, 385 bp, Homo sapiens
ggactagagggtcctgattttgtgtctgtgcctcttcatctctctggactctgatctccttctcccttcccatctccaggccttctgtctgtcccagataaaggcgctgttctcccatcctccctaccccatcctctccaccaaatcgctcccaattttgagagccaaaggctggcgcttctgacttcaggagcgaaaggaggaggcctagtttgggccgatgtattttaaagcagagtggacagcagagagtcaatttccctttcgttgggagtgggcagtggggtggctaattgtcttcggccaaccaggggcctgttgcccaggcaactcaccagctccgcctccgctgattggctgccacggtgggagtcagccaagattt

SEQ ID NO: 3309 - DNA, 322 bp, Homo sapiens
ctgatcaagactggagacaaagtgggagccagcgaagccacgctgctgaacatgctcaacatctcccccttctcctttgggctggtcatccagcaggtgttcgacaatggcagcatctacaaccctgaagtgcttgatatcacagaggaaactctgcattctcgcttcctggagggtgtccgcaatgttgccagtgtctgtctgcagattggctacccaactgttgcatcagtaccccattctatcatcaacgggtacaaacgagtcctggccttgtctgtggagacggattacgccttcccacttgctgaaaaggtcaagg

SEQ ID NO: 3310 - DNA, 305 bp, Homo sapiens
ctgaggtgttttagtgtcagaagagggctggctgacccccctagctcaatttggtctcacaggtgagaaggtacctggctataaatatgaatactgattgaggcaggcttgatctgggactttcagggcaggcagaatgactatggcccaggtcccacaggatgtggagtttccgggctcagcatcatggtatctggggcccatgtccaagtggagtgaattctagctgggaaggtccgctcaggcacacgggaaccccggtctgcttttccacccccaccccatggagtatccaaggctggtac

SEQ ID NO: 3311 - DNA, 484 bp, Homo sapiens; identical to SEQ ID NO: 7
  misc_feature (1)...(484): n = g, a, c or t

SEQ ID NO: 3312 - DNA, 364 bp, Homo sapiens; identical to SEQ ID NO: 9
  misc_feature (1)...(364): n = g, a, c or t

SEQ ID NO: 3313 - DNA, 311 bp, Homo sapiens; identical to SEQ ID NO: 621
  misc_feature (1)...(311): n = g, a, c or t

SEQ ID NO: 3314 - DNA, 187 bp, Homo sapiens
ccttccccgtcacagaaatcgactgtgcacaggacagcaagcagaacaacttactcacagtgcagctcaagcagccaagagtggcctgtgatgtggaggtagatggagtccgagagagactgtcagagcaacagtacaacagactggtggactacatcacaaagacatcttgtcacctggcccccag

SEQ ID NO: 3315 - DNA, 443 bp, Homo sapiens
ccagggtgattgaaaactcagcctcaaaacaaaaaattcactagttatgattcaacgcgttcaacagaagccatccccagcccagcttaaattataaagatagacaataactctgttccaatctgcatggtgcttctttagtaaatactgtacagattttaccatggagaactttttttttagtttttaccttttcttaattacccttattccgaatggacgaacactttctaccactgctgaccattgtaaaataccgtgtatataaatcccattgaaataatgccctggaatagaacatctcaaatgctgcttaattacagactcaggtcgattacttgtatttcatgtaatgttcctccaagttagacatctggtgcaagaccaaccgggagaccatggaattgtcaaaagtacaaactgacagtgtgtatatttaattt

SEQ ID NO: 3316 - DNA, 303 bp, Homo sapiens
  misc_feature (1)...(303): n = g, a, c or t
aaatnntttatgcctcatcctctgagtgctgaaggcttgctgtaggctgtatgctgttaatgctaatcgtgataggggtttttgcctccaactgactcctacatattagcattaacagtgtatgatgcctgttactagcattcacatggaacaaattgctgccgtgggaggatgacaaagaagcatgagtcaccctgctggataaacttagacttcaggctttatcatttttcaatctgttaatcataatctggtcactgggatgttcaacccttaaactaagttttgaaagtaaggttattt

SEQ ID NO: 3317 - DNA, 148 bp, Homo sapiens
ccatcacttaggttattccaccacttgttaatctcctttctgaagtctccttctttttgtggtcttatgctatccaaccaatcagcttttataccatcaaaataactctggaccctggatttcagtgattcatattgccaaatagcag

SEQ ID NO: 3318 - DNA, 270 bp, Homo sapiens
ctgccaaaaaaaaggctaccatgcaaggtgacagagagcagttgaaatggaagaatagttcctatggaaaagttgaagggttttggtctaaggaccagtcacagtggaagaatgcatctgagaatgatgagcgcttatctaacccccagattgagtggcagaatagcacaattgacagtgaggatggggaacagtttgacaacatgactgatggagtagctgagcccatgcatggcagcttagccggagttaaactgagcagccaacagg

SEQ ID NO: 3319 - DNA, 382 bp, Homo sapiens; identical to SEQ ID NO: 10
  misc_feature (1)...(382): n = g, a, c or t

SEQ ID NO: 3320 - DNA, 271 bp, Homo sapiens
agaggagctcggcctgcgctgcgccacgatgtccggggagtcagccaggagcttggggaagggaagcgcgcccccggggccggtcccggagggctcgatccgcatctacagcatgaggttctgcccgtttgctgagaggacgcgtctagtcctgaaggccaagggaatcagacatgaagtcatcaatatcaacctgaaaaataagcctgagtggttctttaagaaaaatccctttggtctggtgccagttctggaaaacagtcagggtcag

SEQ ID NO: 3321 - DNA, 126 bp, Homo sapiens
aaacactttcaaatatggagattaatcaccaacttcttattttttgggccagttggattcaattttttatttaacatgatttttctctttttggtctgtttgtgagcttagttttcttgggccagg

SEQ ID NO: 3322 - DNA, 277 bp, Homo sapiens; identical to SEQ ID NO: 619
  misc_feature (1)...(277): n = g, a, c or t

SEQ ID NO: 3323 - DNA, 406 bp, Homo sapiens; identical to SEQ ID NO: 615
  misc_feature (1)...(406): n = g, a, c or t

SEQ ID NO: 3324 - DNA, 274 bp, Homo sapiens
aaaaatcgaataatcctattcaagtcaaccagtgttaaccccggtgtgcttcctgccagtctgttcctccccatgggagtcacacaaaatgaaaatctcctagaaagagaaattcctctgtcctctgacttcttcacttagtacgctgcgaccttcccatgttgttcaacatcctcaactcggagcgtcactggctggaggtggtctataaatggaattggcttaactatcccttcactgaaaggtggacatttagggagtgtccagttttcag

SEQ ID NO: 3325 - DNA, 198 bp, Homo sapiens
ctgggattatgaaggggtggcctgcccctccacatctgtgggatatctcatcagcctcgatgacttacgagccctcaaggggaagcattttctcctggaccccttgatgccggagctgctggtgtttcccgcccagacagatctgcatgaacacccactgtaccgggccggacacctcattctgcaggacagggccag

SEQ ID NO: 3326 - DNA, 413 bp, Homo sapiens
ccagaggagctgtgtgtgtggaaactcgcaggccacacgggaaattagcgactgcgtggtgctgatgcagaaagaaaaatggccgagacgcgcggagagcgggacccgcaggcgcggcggcccagggacggggacgcggccggtgagaggacgcagaatgagatcagattgacttctcagttgctgactctcaactgcttagaaaggggcagaaacgataaaaacagacacccctgtaccccacactaaagagctgtgttaatattgacggtatttgcagtgtcccttgcccacggccccatccgccacccgtgactggggcacttccctcctgccctctggccgtcagcctcttgcagcaagcatttccatgaacaccaagtcggagattcgtccacgctggtgcctgcagg

SEQ ID NO: 3327 - DNA, 438 bp, Homo sapiens
  misc_feature (1)...(438): n = g, a, c or t
ctgcccagcgaggtcctggtgctgggggctgccaccagggcacagggcctgtgagaggtcaggctcagcccctgctccccacctcttccccctgccccatctcaggaccagcaagcctatacctgctggccttgagggtctgatgtggcacagtgtaagagagttagtgatcctgagtctggtgtcctttccctgacagacaaccagaggtccagcttcaaaggagatacacagggggcaggggtggagtagggcatcttcttcctgtgcccaatctttcctcccgtgttttctagtttctcacaggactggggcaggggtcagtggggaggcaggtggactgccctgagcaaacttccagagaaataccaggccaattttccctttaagggatggggaaaccaaagctgggaggattgggganggtggagagctgca

SEQ ID NO: 3328 - DNA, 472 bp, Homo sapiens
  misc_feature (1)...(472): n = g, a, c or t
ccactccatcctggggacctttcttcagcacccgtattccttgtaagtctagacgccgccctttcatctctagtgcacccccaaagccttccaaaggccatgcctgttgaaattcatccaccaaagccagtatttcttctgacattttggtttcatctgaattctccatctcatcagaaccattgctctcctcaaccaccgtactttcaagtctaagggcatctgagtccctccctgaattctcaacagagaatacagggtcctcctctgttcctctctcagagggctcttcttcagcagcatccagtgactgtgagttgtcaaaatatttctgtttgtcatggctgttgtccagggttttctcatgacaattaccactgcaaacagaanaagtgatgttgtacagaaaaaggataaaaacttgcatacagcgggatcaacttcaggctgtttncacactctgggacattng

SEQ ID NO: 3329 - DNA, 465 bp, Homo sapiens; identical to SEQ ID NO: 12
  misc_feature (1)...(465): n = g, a, c or t

SEQ ID NO: 3330 - DNA, 292 bp, Homo sapiens; identical to SEQ ID NO: 11
  misc_feature (1)...(292): n = g, a, c or t

SEQ ID NO: 3331 - DNA, 472 bp, Homo sapiens; identical to SEQ ID NO: 283
  misc_feature (1)...(472): n = g, a, c or t

SEQ ID NO: 3332 - DNA, 235 bp, Homo sapiens
  misc_feature (1)...(235): n = g, a, c or t
cctatgacccccacccagataggcccaagcctgctgcctatcatgtggcagctctaccctgatggacgataccgatcctcaactccagtttctggcgcttagtgtaccacatcaagaatgacggcgtggaggacatgctttcagctgtgcagatactgatgatggcttgnagactgctctttacccaggctagctgactcggcggacacctaggcaatcacacatgcgcgtctat

SEQ ID NO: 3333 - DNA, 470 bp, Homo sapiens
gggatgtaccagatgcttatgaaactatcagatctcgtgagaactcactatcacaagaacagcatgaggagaacccatccccataatccaatcatctcccctcaggtttctcccttaacacctaggggttatagtacacagagaagtttgggtggaacacacagctaaactatatgaatgccagaggacagtatctatatttaatttcaacttcatactggagcagaatgaaaatgaagcccagtggagaagtgacattcccaagatcaccctgccagacccaggactgtttgagttgtggcccatgctacctcccacctattctcctaatgcttccatctctaagtgtatgcattatctacaggtgacactacatcattatttttatgtcttatcttatatacacctaatacattccctaggaagtagatgttagcatcatcaccagtgtgcatgttaggaggctgggg

SEQ ID NO: 3334 - DNA, 206 bp, Homo sapiens; identical to SEQ ID NO: 13

SEQ ID NO: 3335 - DNA, 394 bp, Homo sapiens
cctctgagggcacagtggtaaatgatggagggggtggactcctcacttccagacagcatcaccccacacatctgtattattgatgctgaaaattccggccctacgtccagaggatagttctcaatgaggtaaaacgcagtggcacacatgaccagtacgtgctgctggctgtgaatgttcacgcagtgggcgatccctttcaggttggagaggagatagtcgctgatgaccgggatgagctgcttggcagtgtcgtccagcaggtcgcactccagcacatagaggatgccgtgcagggctccaaccctgctgggcaggtggctgctcctgagcgtgctctccagcaggcggctgacaggctccgccacggccttgtccatcccaaggacggcag

SEQ ID NO: 3336 - DNA, 199 bp, Homo sapiens
  misc_feature (1)...(199): n = g, a, c or t
ctgaggcctcactactagatgcagtgctgggaccttcctcttttggagctgtcccatgtacagtggacccaagctcaggaccttcgtggagctgcttctccaacctgagaaactcaagacccatcctcccgctgtcactttggacaatggaaatctacattttcttttccctttttttttttttttnaaaaaaaaattt

SEQ ID NO: 3337 - DNA, 179 bp, Homo sapiens; identical to SEQ ID NO: 285
  misc_feature (1)...(179): n = g, a, c or t

SEQ ID NO: 3338 - DNA, 239 bp, Homo sapiens
ccaactcgcatattgttagtgcaggaggggatgggaagattggcattcataagattcacagcaccttcactgtcaagtactcggctcatgaacaggaggtgaactgtgtggattgcaaagggggcatcattgtgagtggctccagggacaggacggccaaggtgtggcctttggcctcaggccggctggggcagtgcttacacaccatccagactgaagaccgagtttggtccattgtt

SEQ ID NO: 3339 - DNA, 365 bp, Homo sapiens
  misc_feature (1)...(365): n = g, a, c or t
ctgctggatgtcctggaccgcgggctcatcctccagctacagggccaggacctttatgccatccgcctgtgtcagtgcaaggtgttctggagcgggccttgtgcctcagcccatgactcatgccccaaccccatccagcgggaggtcaagaccaagcttttcagcctggagcattttctcaatgagctcatcctgttccaaaagggccagaccaacaccccaccacccttcgagatcttcttctgctttggggaagaatggcctgaccgcaaaccccgagagaagaagctcattactgtacaggtggtgcctgtagcagctcgacttgctgctggagatgttctcaggggagctatnttggtcan

SEQ ID NO: 3340 - DNA, 482 bp, Homo sapiens
  misc_feature (1)...(482): n = g, a, c or t
cctcctgaaactacagaaagggcaaaaattgttatccgggagctattgcctaatgggttgagagaatcgataagcaaagtgcgctccagtgtggcctatgcagtgtcagccattgcccactgggactggcctgaagcttggccccaactcttcaacctgctcatggagatgttggtgagcggagacttaaatgccgtccatggagccatgcgtgtgctgacagaattcactcgtgaagtaacagacacacagatgccacttgttgctcctgtcattctcccagagatgtataagatcttcaccatggctgaggtggtatggtattcgaacccgttcccgaccgtggagatttttacccttgtgtccatatgatcttgtaacatgggaggagctgggaaaagggtgcaggccaaagtccttgatcntttccccgtgggtncagcanttttcacaaaaggacctcnggccgcgnaccacccttt

SEQ ID NO: 3341 - DNA, 349 bp, Homo sapiens; identical to SEQ ID NO: 284
  misc_feature (1)...(349): n = g, a, c or t

SEQ ID NO: 3342 - DNA, 378 bp, Homo sapiens; identical to SEQ ID NO: 14
  misc_feature (1)...(378): n = g, a, c or t

SEQ ID NO: 3343 - DNA, 303 bp, Homo sapiens
  misc_feature (1)...(303): n = g, a, c or t
ccttcctaaaaaatagtggtgagctggaggctacttccgccttcttagcgtctggtcagagagctgatggatatcccatttggtcccgacaagatgacatagatttgcaaaaagatgatgaggataccagagaggcattggtcaaaaaatttggtgctcagaatgtagctcggaggattgaatttcgaaagaaataattggcaagataatgagaaaagaaaaaagcatggtaggtgaggtggttaaaaaaaattgtgaccaatgaactttagagangtctgccttggactggcncttatttct

SEQ ID NO: 3344 - DNA, 352 bp, Homo sapiens
  misc_feature (1)...(352): n = g, a, c or t
ccagcccagagcacaagaaagcaaccaacaaattctggtgggagaacaaagctgaggtccagatgaaagagaagtttctggtcactccccangattatgcgcgattcaagaaatccatggtgaaaggtttggattcctatgaagaaaaggaggataaagtgatcaaggagatggcagctcacatccngtgaggtggagcagagcccgacaggaggtggttcggtctgtcttagangcctcangcagtgccagacccagaagagggctcttcagcacctagaagcttggaaagggatgaacagcccaagtagcttccanctttacagcancccctcaaaatttggaccctgcc

SEQ ID NO: 3345 - DNA, 170 bp, Homo sapiens; identical to SEQ ID NO: 15

SEQ ID NO: 3346 - DNA, 358 bp, Homo sapiens
  misc_feature (1)...(358): n = g, a, c or t
cgaggtctgatggcgtcatccggctgtttgacatgcagcagcatgagtgcgcgatgagctggagggcccactacggggagggtctactctgtggagttcagctatgatgagaacaccgtgtncagcatccggcgaggacgggaagttcatccagtggaacatccaccaagagtggcctcaaggtattccgagtacagcctcccctcagatgccanngggcccctttgtgctgtctggatacaagcggctacaaccaggttcaagtccccaggggcccgactcttcgctttttgacttnggaggggaaattacattgctngacatgttctttgccaccaggcgggngttaatcttacaa

SEQ ID NO: 3347 - DNA, 473 bp, Homo sapiens
  misc_feature (1)...(473): n = g, a, c or t
ctccacatgaattgagtgttcatttacctcagtattaccgtgttcatttttgtcctcgtgctacagttagctccctgccgcctcttgcaggtcttacttcagctcttgcctgtgacccacacagcttctgggctctgcctctgctctaagaagtgctgtgggggtagagaaccaggaaggacatgctgttgggaatgtacacctgggcagaggtggccctgttaagatgtgactgtagccacagccagggatgggatccctgggtctctggaatctgaaacctcaacaaataccagtcttgacccctagcagcagagataagaataaaggggttggtttgctattaagtcagatgggggctctctccttgtnatgctgtccctgtgggtaacagacagggaattgaccatcttactgttgtaccaggtagctggggggggttggataatcccattgaagctgggacagncctt

SEQ ID NO: 3348 - DNA, 179 bp, Homo sapiens
ctgtcccagatcggctgcctgccagggaaagggagatggatgtcatcaggaatttcttgagggaacacatctgtgggaaaaaagctggaagcctttacctttctggtgctcctggaactggaaaaactgcctgcttaagccggattctgcaagacctcaagaaggaactgaaaggcttt

SEQ ID NO: 3349 - DNA, 299 bp, Homo sapiens
  misc_feature (1)...(299): n = g, a, c or t
gttggatttgcaaacctccccaatcaagttcaccgaaaatcagtgaaaaaaggttttgagttcacactgatggtggtcggtgaatcanggtctaggaaaatcgactctcataaacagcctattcctacctgatctgtncccagaaagangtcatacctgggacancaggtaaaaacattcttatgttactgnaagtgtaattctacatgaaagatgcttgaagactgcctaattaatattttatgtctnagctggtgtgttttgtttgttcttgttcanctttgancncaaggaaaaac

SEQ ID NO: 3350 - DNA, 308 bp, Homo sapiens
aaatgattctttatttcaataaactttaacaaacaatatataatatttcttccttaaaaagctcattcaaagatcataggcagacttcttccccattgtattttagttggggagataaaggcaaaaagaggaaatgtaagctatcttacagtcattctgagaacctctggtttcatgctatactttcccagctaaaagttactaatttacgaagttcagatactgaaacttaaaaatcaagatccatatattaggatgtcctgctgtcacactggtggtggcccattgtgtcggagtctggtaaatgg

SEQ ID NO: 3351 - DNA, 466 bp, Homo sapiens
  misc_feature (1)...(466): n = g, a, c or t
ctgcagccccttgaacaggtgaaagctggaatagaagctcattcggaagccaaaaccagtggactcctgtgggctggattggcactgctgtccattcagggtggggcactggcctggctcacgtggtgggtgtactcctgggatatcatggagccagttacatacttcatcacatttgcaaattctatggtcttttttgcatactttatagtcactcgacaggtgagtagtttgttaggaaaatggtaagttagaacatctttgcaaagaatgtcttatctaagcaatgagcaaaaaacctttttatttactgaatnctgccatctggtttttatgagctggtaaattttttattggttttccaagactgaatgaagactcncacacagagaaattatntataaccttctttggaaaagtaattagtgtaacacacaanttcctccattgggaataaatatgnggt

SEQ ID NO: 3352 - DNA, 243 bp, Homo sapiens; identical to SEQ ID NO: 622

SEQ ID NO: 3353 - DNA, 337 bp, Homo sapiens
  misc_feature (1)...(337): n = g, a, c or t
cctcttccctgatggccgcgtcttcatggaagtaggagagaagactgtaaaaagcgaaaggcagcagcctggtgtgctgatccggggccacacgggaggaggagccgccccagcctgaggtcactctctgtcaactgaaagagtgccagccaggatatcttcctcttctctaaacactcgaggattgcttgcacaaacgtggaaaagcctttggcaggtctgtggtgctatttgaggtcagatgtgacgacagcanggcccatcaaggagaagaagaaaaggaaaaccaatagctcctctctctcgcagtccagctttctttacttgcttcctgatg

SEQ ID NO: 3354 - DNA, 337 bp, Homo sapiens
  misc_feature (1)...(337): n = g, a, c or t
ctgcataatgctcccacatctgtagatagagccgctctagttccattgtgtattgtttggtgttgaacagagggctagatattctttgcttccagactttgccacgaactttcttcaggtattctagatcagttcccaccttcacagctatgtcttcatattcttgtctgtttttagcaataagctcaagacaacctaagcaagtgagctgggatgctgcaactcgagaagcaanagtctctcctggcatagcaccatgggggtccctgcccaaaggacntccatccctgtggtgtgcccattacagagtgggagtgtccaagcagacatcagccan

SEQ ID NO: 3355 - DNA, 198 bp, Homo sapiens
ccagaagaaggggtaatttatatataattcaaactatatacagcataaatggaatgcagcccatcccaaactggctctgtgaaacaattggacctttatagttaaaattataacaagtgtaataatacaatagatttacatgggaagcaaaatccaagggacattttatattaagtatttactgtgctgtttcaattt

SEQ ID NO: 3356 - DNA, 201 bp, Homo sapiens
  misc_feature (1)...(201): n = g, a, c or t
ctgcaagaagaatggaatgaacataatgccaaaataattaaatatataagaactaagacaaagccccatttgttttatattcctggaagaatgtgtccagctacccaaaaactaatagaagagtcacanagaaaaatgaacgctttatttgaaggnagacgcatcgaatttgcagaacaaataaataaaatggaggctagg

SEQ ID NO: 3357 - DNA, 281 bp, Homo sapiens
  misc_feature (1)...(281): n = g, a, c or t
aaaatattttaatcaggcagagttttatggatagagaatagaagagaaaggtagtaaatattgaacatattccaatataggaacctatctctgtttttagtacaaaatatttctgacatctgaactagaggtcaagagaataaattcatttgtatacatctgagcaacctgtctttcagatgataaagtatctagccttttctgacaccataatagttcattttgtagggaataagccattaggngtatataattgctttctagaaatggacctaatgtcc

SEQ ID NO: 3358 - DNA, 292 bp, Homo sapiens
  misc_feature (1)...(292): n = g, a, c or t
ctggtggtgcctcagccatggcctggaccgttctcctcctcggcctcctctctcactgcacagactctgtgacctcctatgtgttgactcanacaccctcagtgtcagtggccccaggaaaagacggccaagattacctgtgggggaaacaatattgggagtaacaatgtacactggtattaccagaagccaggccangcccctgtcctaatcatctcttttgataacgaccggccctcagggatatctgancgattctctggcttnaattctggggacatggacctcngcn

SEQ ID NO: 3359 - DNA, 267 bp, Homo sapiens
  misc_feature (1)...(267): n = g, a, c or t
ngnaaaatagactcaggatttatttattttctttttagctttatagcaattaattggctattgattggttggaatgttcaactctccatttcctcaaatacaataaaatagtttcattaaaatgtattcatgcttgaaaagaagggcgccattaaatggtttcctttctgttccactccaagggaaatgcgccgtttgtaaatcaaaaatccatcatccaaaatcacttgttcttaatgatgcttttggagaagatgagggacgtgg

SEQ ID NO: 3360 - DNA, 462 bp, Homo sapiens; identical to SEQ ID NO: 16
  misc_feature (1)...(462): n = g, a, c or t

SEQ ID NO: 3361 - DNA, 235 bp, Homo sapiens
  misc_feature (1)...(235): n = g, a, c or t
gtctgcatggggggccacggatcagatacttagtcctattgcttatcctcaccaaagggtgtgccacccagggccacagtcatggaagaagaccatcccggtcctcacccataggcgccaagccctgttcatgatgggatcacagggcananatcaattcattttactccanaaactaaggccccacggggtgangctcttttgggnttctaagggaaatggacctctgncccca

SEQ ID NO: 3362 - DNA, 471 bp, Homo sapiens
  misc_feature (1)...(471): n = g, a, c or t
nccagcaggctgcggaggtaacgctcccgaagggcggctcgtgcccgctgctcctgggattccagggattcttgagctatgggacactcctggatttcaggaacctctggcctcaagggggctctgcgtccatcaggggcaaagccacggctgaagccatcagggccccggggcagccggagcacaggcacgggaatgttcactggagtttgcattgtcttggctcctccactgccagcatcctgctgcagccacagacacttcctgcctggagtactgtagtcaactcctcactgggtccctggcttccaccttcaccccccgccgtctgcaccccaacaccctgttaatgcctgagtcagatcatatccctcttctgctcggagccctcttgtggcttctgtcttactctggatcctgccggcaccctctggtgtaccacgcttgctcttcccaccccagccacacagg

SEQ ID NO: 3363 - DNA, 179 bp, Homo sapiens
  misc_feature (1)...(179): n = g, a, c or t
ccatcgtgtttgatggtaaggtttctcacaaagccgaaaatgtagctgaagatcaaaaaaatctcacaagaaggggagggagaagagattcgattctgagtctcctactcccgggttctgcgtagagaanccgactgctgctggaggtcggcaacncggccacaaccgctcagtcttcg

SEQ ID NO: 3364 - DNA, 246 bp, Homo sapiens
  misc_feature (1)...(246): n = g, a, c or t
ngtaaatatagtcattgatatactacaaattgtatttctctctctatgtttgcctataaaatttatttacttaatcaaaatggttgcctgatataatttcccctgcaaaagttgtcaaaagaataatgttattgccttaggcaggaactcaagcacaaagataaaaagctgtatctgagtatttgctgtattttatttgttcacatttagcctatttgaggttaacactacttcatttgacagttt

SEQ ID NO: 3365 - DNA, 383 bp, Homo sapiens
ctgagcacactgccacccagattaaaatctgggttatgtgaccaaggaaaaagaggagactggatattggataggcaactaacagtctctgccgcaccctacttaacaaactggcccagcttctgtgttcagatctgatgcttggtgcccgcagctccaaggagaccccatggttcaagctgcaattacttgctccacaggcccttaccaaggaaagtcaggttttttccctcctgaggatcctctgaccagcatcttcagattttttttcagttagaagtattcattgggcacctgttttttgtttgtttgtttgtttgtttatgaccacatcagtctttcattagaatctttgctttatctcattgcatagttgaatttct

SEQ ID NO: 3366 - DNA, 251 bp, Homo sapiens
  misc_feature (1)...(251): n = g, a, c or t
gggagatgccggcaccccccaaccctggggctgttccctggctcangatggtgtctcngggctaggattatggtcaggagtccatcggggcctcaagcacctcctgggaggaatcacccaccttgcccagatccctcaccccctcccagtgccaccctacggctgagtttccactctgcaaaccctaaggcagagacataagcccacagggttggttttcacgaatgtcacaagcccatgtgtctgggcag

SEQ ID NO: 3367 - DNA, 192 bp, Homo sapiens
ccacacctgctgctgccagggcagtggagtagggcgtgccaggatgagatggggcttgggccccttttaaggccaggggaaccctcccaggccccactatgggaagccagagggaacagtgaaggagcagagagggcgcccccaaaccaaaagcccagagagcaatgtccccaccaccaagggagtggggac

SEQ ID NO: 3368 - DNA, 303 bp, Homo sapiens
  misc_feature (1)...(303): n = g, a, c or t
nncaatggtgtgatgaattccttgcaggatcgctacggttcctactgatccgagctctgtgactcaggcttacgatggtgacggcaacaagaactccacagttcccaggctggggatgctttgccttgtggaagctggggaggatttgttacttcctatgtgtggtgtgtgtgtggggtggcctttgaggcgctcactcctgtgaggggaatggtcagtaccancccttgtcctctgcctgtggactganccctttattncctctcacacnaccctccgtgtgttagactcttgtccttctgt

SEQ ID NO: 3369 - DNA, 222 bp, Homo sapiens
  misc_feature (1)...(222): n = g, a, c or t
gaatcctttggtccacttctgctgactcaacccctgcccatgccaacaaaggagtactaagaaaggcaggttagcctgaatgtctaaattcaatttgttcaactttataaaagcaagcaaagctactgggggttgccccctcccaccatcattctggnccaccatttgggccacangcttagggaaatgaaggaaagtcgttttctttgaangaaatcctgg

SEQ ID NO: 3370 - DNA, 297 bp, Homo sapiens
  misc_feature (1)...(297): n = g, a, c or t
caaacttgatttgagagcaagtgcaagggagagaaaagaaaaatgttaagtgtaaatgtttttattttcctaaggaagaacacttgtaactgatggttacatacttgaggctaacatggaaacatatcatgtagctaaatcccatccagttttcctaaacttgancctggagcctgctgnggagtagaaacagtcccaccaganggtatagcaactcttctggcagtgcccaganaggcagaactgaatggagttcctgggggctgcatngccaactttggacctgcccnggcgggc

SEQ ID NO: 3371 - DNA, 236 bp, Homo sapiens
  misc_feature (1)...(236): n = g, a, c or t
caagtcctggcctgcagccactctggtggacttggctttgggtctggggtcttagtgtcttaggcttgagggagaggggcagtgaagaggtgccctcagcctccccattaccccgcctctcctccacagaacccacatcctaggctggcctaccacaagcaagggggctcaggaggggcccacgcggatgtgagggttcatgagtgggtccaggttgggatcgctgtcagacctcn

SEQ ID NO: 3372 - DNA, 292 bp, Homo sapiens
caagtaaacacttacagtgcacacatactacacacggtgcaggagtcttgtttcctcccatgaattcttgatatgtacttaccagtaggacagcttgaatttttactaatctgggcattgtgcatactttttgggtaatatataatttcagaaataaaggtgttacatttttcaggctagaacttggtaaatatgaaaccaccaaggtggtgaattactgtatgtaatctttttcctccaaaaaataagataactggtcttacacttaggttagcattatgattctaatttt

SEQ ID NO: 3373 - DNA, 246 bp, Homo sapiens
aaaccaaagatcatgtttagaacaatgaaaaattatttgttgtatctaatacacgcctgtattgtgaaaagcttcatttagcaatgatgtaataatttttaacttctaggaaataatctgtgaatggaaagattttttaagattttgagatagtgtttagtctcatgttgggaacacatgaatgtgatgaacatagtgaatactaaagaaaacgcttcagactttcagaatgatggttcagaattt

SEQ ID NO: 3374 - DNA, 338 bp, Homo sapiens
  misc_feature (1)...(338): n = g, a, c or t
ccatcctggctcctgtctcgtctggccttttgtttcctcatccctgcagtggggaccatgttccagtggggactgagggaggtggtgtgtacagtgttgtgtgcagagcctggcatggcagcgaccttcancanatggangtgctgtttggcatcacccgtttgcgtgcaagtgaccggcaggcttctgtcttctctgtaaatgaaggaggctgcaagggaagcaagggtccaggcttctgccttggacgcacaagccttggtccgcccttccttnttgaacttccccaagggctttggnaaggggtgcctgaaggggtaacnaggaatggggggcaa

SEQ ID NO: 3375 - DNA, 165 bp, Homo sapiens
  misc_feature (1)...(165): n = g, a, c or t
ctgcaggtcccaggagggcctgaggtcaaagctgtggaaggccctcttggtatcagggctctctccccatggcctcttccccacctctgattgctggttgtggccccataactcatcaccccttgtctccttgcttaaatgtgcanggcttaatgtggcacttga

SEQ ID NO: 3376 - DNA, 455 bp, Homo sapiens
  misc_feature (1)...(455): n = g, a, c or t
caagtcctcccaaagacancaatgggagaagtgaccccataactgcataaaataatccctcttctttgaagctcttggcaggaatcgctcagccagcaggaaacctttaacccaatacccagaaagacagacatttggaggaagagggatcttccagattattcttccattctgccccatcctctacagagaaggaaactaagacacttttcaagaatcacaanataagttaatgatanaaagcanagtanaatcttgagtggaggagtgaaaataacattcactttgttcaaatcccanctctaccactttccaatggtgtgaacttgcacaaataactctgagtctcattttcttcatttgnaaaatggagagaacaatctccgcttcaanagattgtcttaaatggaacatgcaaagcatcctgatatcgtttacccaaccacacatagcag

SEQ ID NO: 3377 - DNA, 207 bp, Homo sapiens; identical to SEQ ID NO: 17
  misc_feature (1)...(207): n = g, a, c or t

SEQ ID NO: 3378 - DNA, 237 bp, Homo sapiens
  misc_feature (1)...(237): n = g, a, c or t
caagtctgtgcgggtctggatagaggagaggtcaagggcttggactggggaccctgagctgccaaggtgtggggactccttgcagtcctggtgcagcaatggcaggaaggccagcaggggccctagttgagcaggttgccctgctcctgggcctgggtcangctgtccttgcggtgcaggtggtgaacccccatcctcttggggctgcnctgggggccgactgganctggggagtgg

SEQ ID NO: 3379 - DNA, 435 bp, Homo sapiens
  misc_feature (1)...(435): n = g, a, c or t
gcccnggcaagtaaagctcttaagttcagggtagcggtctcaaactgccaaacactaggatgaggatgtgactctgcatgtgttttggatgagaggaagcatcgtcccagtcacttttctcctcctgtgctgtcctttcaaaaacaggtctggatttcacgccctaccccaagaaaaagaactggttcagaaaacacttccccaagtttctccaacagaacactgtggctgcagggcctggtagtgtgaagggcagcaactgacatataaaaatgtacttaaaatcanagtcaaaaaatggntttaagttttaatactcttaattagctccctgctttatactgtaactccacagaagacatagggccacctaggattcacaggaaggagcagctctgattcttacatggctggctccgatgcccccacagcagg

SEQ ID NO: 3380 - DNA, 231 bp, Homo sapiens
aaaactaacttcactgttaaccaagcagttcaacatgaaagactgaatctcttatgtttaatattttcttctcttttaatcttcataactaatttttttcagataattgtataaaataaccatggtagcaaaataatgtgatcactggaaaataagcagggaaaaacatgctatgaagatactcctatctgggtgaattcttgatagctttacatttttcatctggcattt

SEQ ID NO: 3381 - DNA, 186 bp, Homo sapiens
  misc_feature (1)...(186): n = g, a, c or t
tccatcaccatgtcacccacaccagcagcgggaagtctgttcagccgtcccttgatccccttcacggagatgatatacaggtttttggctcctgtgttgtcagcacaattgattacagctcctaccggaagacccaaggaaatccggaatttcgcaccanaggacccaccacgtcctcgcttcgac

SEQ ID NO: 3382 - DNA, 216 bp, Homo sapiens
aaaatggtttcacctgttaaagggccaacagaactcttggttttacttttgtaattactgtacagaaaatttcaagagtgtttgagtgcttgtcatcaggtgttttccttaataagtagggatatgatcatttacaggaattatatatgaaaaaagtttttgaaatgtatttttgtgatgtgctatgttgaggggaaaccaaatatttatgatttt

SEQ ID NO: 3383 - DNA, 443 bp, Homo sapiens
  misc_feature (1)...(443): n = g, a, c or t
ngtctgcattgaggtgaccccaggggacaggagttggcaccaaatggtagtgagagccctatcctcccaggagtccaagccagagcaccagggcttggcagagcctgagaacgaccagctcccggaggagtaccaacaaccgccaccctttgcccctgggtactgctagagaacaggtccaccctggctctgggactcgctgccaggggctgccacactcctgaatgccttaacatttcttccatggccccacaccatggcatccgggggtcttcgggaacccgggaaatggaataaagatgtttttggggtctgttcctgcactcacccatggggtgagctggttattttagcaacaatcaccanagtgacgctgatggtttggggcaccagctatacatcagccccagtgccagaccttctattcattattttacgcctca

SEQ ID NO: 3384 - DNA, 388 bp, Homo sapiens; identical to SEQ ID NO: 287

SEQ ID NO: 3385 - DNA, 247 bp, Homo sapiens
  misc_feature (1)...(247): n = g, a, c or t
gaaaggattatgggaaagatggaagctgacccatacctatccaagntcctctaccancttcatgaaaccgagaaggangatctgatcccataggaaaggtccctgagagagcgagtgcntcagtntcgaatggacacanatctggaaaccatggatctcgaccanggtgganaggcactggctccacngcaggttctggacttggaggacctggtttttacccaagggagccactttatggacctcn

SEQ ID NO: 3386 - DNA, 146 bp, Homo sapiens
aagtccttactacgtgtcccacttcctccccgccctgctcacacctcgagtgctccccaaagtccctgactcccgtgtggcgtttatagagtctctgaagagagcagataaaatccccccatctctgtactccacctactgccagg

SEQ ID NO: 3387 - DNA, 415 bp, Homo sapiens
  misc_feature (1)...(415): n = g, a, c or t
ngtaaatatgatcttgggagatgtggaagaaactgtgactactatagaaattgatgaagaaacatatgaagagatatataaatcaacgaaacggaatattccaatgctctttgtccggggagatggcgttgtcctggttgcccctccactgagagttggctgaaacaaagaatttgtcctgtatggaaaacgggagactttgtacagtggcctctctaaaagtacaaaacattcataagagaaacctgcatacattttgatattaagaaataattccggggattcttccactcctgaaatgagttgatttgcagataactcacaacttcttaagctaaatggtattttcatttttctcaagctctccaataaatatgaccaccaagatccaaaaaaaaaaaaaaaaaaaaaaaaa

SEQ ID NO: 3388 - DNA, 294 bp, Homo sapiens; identical to SEQ ID NO: 18

SEQ ID NO: 3389 - DNA, 555 bp, Homo sapiens
  misc_feature (1)...(555): n = g, a, c or t
ctgctcgacagcatatggcaccagcccattttcaatttgctgagcatcggccaaagcctgtatgcgaaagccaaggagctggacagagtgaaggaaattcaggagcagctcttccatatcaagaagctgttgaagacctgtaggtttgctaacagtgcattaaaggagttcgagcaggtgccgggacacttgactgatgagctccacctgttctcccttgaggacctggtcaggatcaagaaagggctgctggcacccttactcaaggacattctgaaagcttcccttgcacatgtggctggctgtgagctgtgtcaaggaaagggctttatttgtgaattttgccagaatacnactgtcatcttcccatttcagacagcaacatgtagaagatgttcagcgtgcaggggcttgctttcacaaacagtgcttccagtccttcgagtgcccccngtgtgcgaggatcacacgaggagaaaacttctggaaagtgtggcctctgcaannacatgatgcccctgagtactgtgaaaaaantgttcacatgccttatga

SEQ ID NO: 3390 - DNA, 255 bp, Homo sapiens
caaagtgattccccggaatcgtgtgctgggctggtcccccttgtcagactcagtcacatgcccactcgaagtcgcactgctatggaaagtgggtgcaggtggtgggcaccctggcgtgatccgcctgcttgactggtttgagacacaggagggcttcatgctggtcctcgagcggcctttgcccgcccaggatctctttgactatatcacagagaagggcccactgggtgaaggcccaagccgctgcttctttgg

SEQ ID NO: 3391 - DNA, 396 bp, Homo sapiens
  misc_feature (1)...(396): n = g, a, c or t
ngtaaatgtttctgccttgtttgtatctctcttgaaagactgtatataagtacaggcacagcatatatttgagagaacatctcacaaatttcatttactataggtttctcaataatctttacatttaatcaatgagaaaagtgattcagtctcttgaattttaagttaaaaaaattaaaaagtatttccagggactcttaaagctctctcccaaagtataaaatattatgtactttcaaaatcttaagcattcacgttctttctgagaccaacgcaggatacaaacttactctcaacatagatgcttatgtgcttttgggcacacatagtcttagaacagtggtcaaacagctcacaggaccctgtactcctcttcatcctggactgtgacggtgg

SEQ ID NO: 3392 - DNA, 188 bp, Homo sapiens
  misc_feature (1)...(188): n = g, a, c or t
agtctggcttttcanancagtgccagtgagaggcaccagtgtaacttgaagcangaatagtgatggctcaggtccccacangtagctcctccatacctgtgggactcaaaggctaanggcactaacttcatagggctcaaaggctggatgaanagaacaatcaatgtgttaaatgtcctttcgaccta

SEQ ID NO: 3393 - DNA, 307 bp, Homo sapiens
  misc_feature (1)...(307): n = g, a, c or t
ngtccattttttgtagaactgctcagtcatctgggggcttccaccccatgggcccacaattgcccaatcagtgggtggcagacatgggtgatgacacggaatgggtgaggcatctggggtacactgagtttcccgagtccctctttgccccccganccctggcaggcccctaagggcttgccccgcatcctccagtttgcagacaaggctgtacagatgcaactgagacacanatggggatccacatgggggggtcatggggtctttctgtctctcctcttccaacctgggggcaagtacaggcacg

SEQ ID NO: 3394 - DNA, 367 bp, Homo sapiens
ctgaaccgaaactagctacctgacgatatgaggcaaaagacaaggaagcaggactgtgagcgcgggcagtcggggtaagataggaaccaacggccggagccaaaataggaaaaaagctagaagtagatgtttcccatggactgactttcttaaatagtggttcagttgctgttggtttacatgactctgtccaacttaaatccaatagcttttccacacgtccacgttccaaatttgatgtgaaagctggtagtacacctaaggcatcctcttcaaaatcttcagaaacttctggctgagataattccatttttcttttggaaaatggaattttcctatgttttcgtttggataaacgtaattctgg

SEQ ID NO: 3395 - DNA, 467 bp, Homo sapiens
  misc_feature (1)...(467): n = g, a, c or t
ccaaattcagtcccgatttgtggggtgtgtctgtttgtacagtagatggacagaggcattctactggagataccaaagttcccttctgtcttcagtcctgtgtaaaacctttgaaatatgccattgctgttaatgatcttggaactgaatatgtgcatcgatatgttggaaaagagccgagtggactaagattcaacaaactatttttgaatgaagatgataaaccacataatcctatggtaaatgctggagcaattgttgtgacttcactaataaagcaaggagtaaataatgctgaaaaatttgactatgtcatgcagtttttgaataagatggctggtaatgaatatgttggattcagtaatgcaacgtttcantctgaaagagaaagtggagatccaaattttgcaatangatattacttaaaagaaaaagaantgttttccanaaggccagacatggttggt

SEQ ID NO: 3396 - DNA, 342 bp, Homo sapiens; identical to SEQ ID NO: 444
  misc_feature (1)...(342): n = g, a, c or t

SEQ ID NO: 3397 - DNA, 396 bp, Homo sapiens
  misc_feature (1)...(396): n = g, a, c or t
ngtaaaaaaaaacctaaatgatcaacagatgttgctttctatatttttcctttgttctgtttgaactgggctaagtaagcacagttagaccctgctgttcacttgaccacgtcctaaacccgggacaagtgagcactcattcatgcacagcagacccggaggcatgggctggggcagcacaactgggttcccgcagcgccctgcctgcaggctcatgctggaggccacggaaccaggcggcacagggcagattctgtttgtcaagcgccccacaagccttgcccagattgtcaagctcagcancgagaatggttttgacgaggaggatggaaacagcatctgctctggaagccgctctggcgtggggagagtggggagagggtgcccttgctgcan

SEQ ID NO: 3398 - DNA, 205 bp, Homo sapiens
  misc_feature (1)...(205): n = g, a, c or t
ngnaaaagatgctgcttccctgttttcttccaggaacacagagaccaacacggtttcaaacacagggcgagcttctcactatttcctgggaatgttacttctcagcccaacacttctcttcccaagaagttcaanttttgagactgtttttctccccggaacagtacttaaaaaaaaaaaaatcattgatnttcaaaaatgggtt

SEQ ID NO: 3399 - DNA, 376 bp, Homo sapiens
  misc_feature (1)...(376): n = g, a, c or t
gtccaccacatcaccccagagaaatttctggaatctgattgagtctccactccacgagcactcagggttccccagcagctcctgtgtgttgtgtgcaggatctgtttgcccactcggcccaggaggtcagcaagtctgttcttggctgggtcaactctgcttttcccgcaacctggggttgtcgggggagcgctggcccgacgcagtggcactgctgtggctttcagggctggagctggctttgctcagaagcctcctgtctccagctctctccaggacaggcccagtcctctgaggcacggcggctctgttcaagcactttatgcggcaggggaggccgcctggctgcagtcactanacttgtagcaggacctgc

SEQ ID NO: 3400 - DNA, 339 bp, Homo sapiens
  misc_feature (1)...(339): n = g, a, c or t
ctgcgtctgtctgaatggtgcgtgaaggctctcagaccttacacaccattttgtaagttatgttttacatgccccgtttttgagactgatctcgatgcaggtggatctccttgagatcctgatagcctgttacaggaatgaagtaaaggtcagttttttttgtattgattttcacagctttgaggaacatgcataanaaatgtagctgaagtagagggggcgtgagagaagggccangccggcaggccaaccctcctccaatggaaattcccgtgttgcttcaaactgagacagatgggacttaacaggcaatggggnncacttccccctcttcagcat

SEQ ID NO: 3401 - DNA, 385 bp, Homo sapiens
  misc_feature (1)...(385): n = g, a, c or t
aacttgtctttagccttggtgctttgatccttctatattttgaccccacaggtgtggtccggtttacttaatcaggacatgggcctaagaacaaaccttttcccttcatgataacatccatagacaacttattagaagggactagagtttttgcaaatttccctgctggatggggcctatagctatacttagtatatgcctaaacatggtaattggatagtaaatggttttctanttccattgctgtatatttgcctaaatggacttgtgttcaaattatttcttcaattgtcatagataatcctgtaccaaatggggaagaattaggaaanaatcatgntggctaaagggactctngattnaggggacgaactgncatttacct

SEQ ID NO: 3402 - DNA, 272 bp, Homo sapiens
  misc_feature (1)...(272): n = g, a, c or t
gtcctccttcctccactctctcaacccctctgttgggtaacatgaaaagactgtattcctctaagatgttgggattgatatacgtgatttaatctgcaataggtggaataaccaggggaactggttatgaatatgtgaatgcaccagcaaatttatccttgaaggngtgatggtagaaataggaaaacaacaaaagaaaaacaataacanaaaaanaaagtgtgatggctgggtgcaacggctcacacctgtcatcccagcactttgggagg

SEQ ID NO: 3403 - DNA, 459 bp, Homo sapiens
  misc_feature (1)...(459): n = g, a, c or t
aagtccatcgggagaagccggtccctgagacatgtggcgcttggaaggaacttcaacgtccggtgcaaggagaccctggacgacgtcctgcaccggattgtccagctcatgcaggacgacgattgtcctcttcagtctctgtcggtggctgagtctcggctgaagctgggtgccagcgtcctactccgggccctagccaccaatcctaacctgaccgcgctggatatcagcggcaacgccatgggggacgcgggcgccaagttgctggaaaacagtaacaaaaaacaccaccacacatggaaaaatccttgcaactaaacacagtggaccaacagagacaactctcacagtgtcttaaggtctgggaatctgggcatgctgcccacagcttgangagacatcttcaggtttaaggcaaagggaacagcctacaaaaagcacaaccaccanctaccccta

SEQ ID NO: 3404 - DNA, 153 bp, Homo sapiens
ccagcatcccatctgcaccgttggtcaggtcactggcagagaaccttgtgccgttagacgtggaacctgccgtcgtgatgaacacgcctccaacagttccctgagccatttctgtcacgtatggctccagagccttggggaccagacttctgg

SEQ ID NO: 3405 - DNA, 297 bp, Homo sapiens
  misc_feature (1)...(297): n = g, a, c or t
ngtctggcctgcagggaagggccagacggcacctctcagtggagactgaatcttccttccttcaggaggctgcctccagggaagacctggggtccttcctgcgctcagcgctggctggctgtcctgttcatgcagtggaagacattacagaagaattcatacgagaagaacatgaagcctgtggagagggcagccttcagcaagctgggggacaggcccttgaagaagcccagggcgccttccttttgcagcacctgcttggcacagtccatgaggcccttgtatctccgtacctgg

SEQ ID NO: 3406 - DNA, 477 bp, Homo sapiens
aaatcacttagtgcattaacaatgttacaaattccaataatgtcagacatatggatgatattcaaaataaagtacaaaaatacatttcaaaatcaaatataaatgactttatggttatctgccatgctcccctttaatttggcctgatagtctacatttgactgtaattataataacatctgtaatttcaagtacaatagtacaatcataataattttgaagaacgtatgacctaggaccccaaaatgcaatccaatatacaatttggagtatggtttactttttagtgaagtttaatactaattgaagtactaaattgaacaaggccagtactctgaagtactaatctcaagtatttgatcccatgtaagaaacagaagggaatttttaaggcaattttggtattccaaaatattggggatctaccttaattttctattattcccctcaagtctcaattgaatatttccatttttt

SEQ ID NO: 3407 - DNA, 197 bp, Homo sapiens; identical to SEQ ID NO: 19
  misc_feature (1)...(197): n = g, a, c or t

SEQ ID NO: 3408 - DNA, 252 bp, Homo sapiens
  misc_feature (1)...(252): n = g, a, c or t
ctgccacagactccaaaggnacacaagtttgtgccaacacacggagtcattctggctctctgctgaggcccctgttttctggcaggtgccctccttggaaactggttttggctctgatcagcggttctttttgcagcaaagcctgcatctgtgttgacttgcaagattttgcgtttattcaggcaaaaactggtcaaaatggttactacatgatttgttcccagaggtttgaaacattcagtgaaacttttt

SEQ ID NO: 3409 - DNA, 356 bp, Homo sapiens
  misc_feature (1)...(356): n = g, a, c or t
aggtaaaagcacagagttctataataataggaaaatagagggaatgattgctcaacttttcttgaaaaagagtcaggaaaatattgaccgagaaggcagtcattgacctgagtcttaaagaatgaataaggtttttacagatggagtagggtagggataactttccaggtataaggaagattttgtattccanggacctttgaatattttagaatggctagaaaacttggtattatgtagcacagaaaaagtggtatgactgaagagatagagaacttaccacaaagggtcttgaatgccatgatacatagtttggattttcttctgtagggagcaaggagttagtgaaggatttt

SEQ ID NO: 3410 - DNA, 387 bp, Homo sapiens; identical to SEQ ID NO: 20

SEQ ID NO: 3411 - DNA, 235 bp, Homo sapiens
  misc_feature (1)...(235): n = g, a, c or t
ccagagttcaggaacgccgggcacagaccaaagaccgcggtccagccccgcccaggcgggcatctcatggcagtgcggacccgtggctggcagcccgggcagtcctttgcaaaggcaccccttgtcttaaaatcacttcctntgtgggaaagggggagaaacttttatatatttgtatgggactctnaggaggngcaacctgtatatatattgcttcntgcttgcttttttatcc

SEQ ID NO: 3412 - DNA, 444 bp, Homo sapiens
ctgtgtggtgcttctgtggtgaaggagctttcatcattcacccttggcacagtaagtattgggtgccctgtcagagagggaggacacaatattctctcctgtgagcaagactggcacctgtcagtccctatggatgcccctactgtagcctcagaagtcttctctgcccacatacctgtgccaaaagactccatctgtaagggatgggtaaggatttgagaactgcacatattaaatatactgagggaagactttttccctctaactctttttcccatatgtccctccccctcctctctgtgactgccccagcatactgtgtttcaacaaatcatcaagaaatgatgggctggaggctgggcatggtggctcatgtctgtaatcccagcactttgggaggccgaggcaggtggatcacttgtcaggagtttgagaccagcctgg

SEQ ID NO: 3413 - DNA, 369 bp, Homo sapiens
aaatcctcaagtgttacaacagttagatagtaaacgacagcaggtccaaatgacagttacagagaccaaccaggagtggcaggtgttgcagttgagagtgcatacttttgctgcctgtgcagttgtgagcttgcagcagcttccggagaaattaaatcctatcataaaaccattaatggagacaattaaaaaagaagagaatacactagtgcaaaactatgcagctcagtgcatagctaaactccttcagcagtgcacaacaaggacgccctgtcccaattcaaaaattattaaaaacctctgtagctcactttgtgtggacccatatctaactccttgtgtcacatgtccagtaccaacacaaagtgg

SEQ ID NO: 3414 - DNA, 290 bp, Homo sapiens; identical to SEQ ID NO: 21
  misc_feature (1)...(290): n = g, a, c or t

SEQ ID NO: 3415 - DNA, 186 bp, Homo sapiens
ctgaatgaagaaaacctctctaccaaaacagaagcagtataggaccgacaagtgtacctctgcacccaatgctggaatcaaatccaaagcttttaattctctcaacaagatgtaaacaggaaagaaatctagttgagcatgaagataggatctaacagcttttccagttgttagatgactttgtgg

SEQ ID NO: 3416 - DNA, 148 bp, Homo sapiens; identical to SEQ ID NO: 22
  misc_feature (1)...(148): n = g, a, c or t

SEQ ID NO: 3417 - DNA, 373 bp, Homo sapiens
ctgtagcttctgtgggacttccactgctcaggcgtcaggctcagatagttgctggccgcgtacttgttgttgctttgtttggagggtgtggtggtctccactcccgccttgacggggctgctatctgccttccaggccactgtcacggctcccgggtagaagtcacttatgagacacaccagtgtggccttgttggcttgaagctcctcagaggagggcgggaacagagtgaccgagggggcagccttgggctgacctaggacggccagtttggtccctccgccgaagacgacatggtcattattacgatcccacacttgacagtaatagtcggcctcatcgccggcttcgaccctgttgatggtcagggtgg

SEQ ID NO: 3418 - DNA, 148 bp, Homo sapiens
ctgtttccttcatcttctggaagaagtccttgttgcagagtccctcggttgcaggtgttaaggagcaggccacgacgatgaaatcagattgggcagccagctcaggggtagacacaaactctgcctggaattccgctgcttcctcagg

SEQ ID NO: 3419 - DNA, 533 bp, Homo sapiens
  misc_feature (1)...(533): n = g, a, c or t
ctgggtgtgttgccaagcgacatcaccatctcctctgcttaattctgcttccaaaataacttcagtggcaccagaaaaatcagcataggagtgaagactgttatcgcctgtcggttctacttgtgctgtatcagatcgcaatttccattctactgttccagtctgaaaagtttgactacttgttctaatagaaatgctatctacttttaggccaactgacccacactcaaacttccaggaaatataagcaaaagatgatccttcctttcgggccaaatataccatgtgccagtctgtttcaacttttctgaatatagattccattttccacacgccattctcccatccagaaatggtttgattgttatttgaaactcgaacataacgatctttcacaatattgtaacaaaggtggagctgtttagaaatcttctcattttcacanggaataaacaagggttcttttctctgtaggacccatttcaccttggggctactcttccaagccactggacccagatattcttccccca

SEQ ID NO: 3420 - DNA, 166 bp, Homo sapiens
  misc_feature (1)...(166): n = g, a, c or t
aaggccccatttctcctcaccacggggtcgcttgtcagctccangagccagtctggccccactgagaacttttcagtcgagggcctgatgagtcttgggaatgcgcttctgcaagagggcccaggctttctccacctggcgttgggtgatatgcggtcccacaagg

SEQ ID NO: 3421 - DNA, 152 bp, Homo sapiens
aggtctgctatttggcaatatgaatcactgaaatccagggtccagagttattttgatggtataaaagctgattggttggatagcataagaccacaaaaagaaggagacttcagaaaggagattaacaagtggtggaataacctaagtgatgg

SEQ ID NO: 3422 - DNA, 214 bp, Homo sapiens
ctggggctgctgcccacccaccctgcccaggctcctgaaggtggcctcaccttccaggtgcttgacaatgccccgcaggctgttcccgtgggctgcaatgagcactcgcttgccggccttgatctggggaacaatctcctcgttccagaagggcagggcccgggcaatggtgtccttgaggctctcgcaggtggggagttccccgggcttcagg

SEQ ID NO: 3423 - DNA, 253 bp, Homo sapiens
  misc_feature (1)...(253): n = g, a, c or t
cctggacctgggatgaagatgaatgaagaacatggactcatgtggatgtggtttggctcanatgnccctgcaataaacaaggggncagtacttagtccctgagtgtggttgaggtttgaggtcctggtcgagcanggcantactggaccangtctacgtcagcattcaggntcaatggggacaccagtggcttcaaacttcctgatctaattatgtttttagacacttagaagntattgaggactttacctgc

SEQ ID NO: 3424 - DNA, 251 bp, Homo sapiens
aaatgaaattcgaaaaccaaatagtaagaaatggaaagagatagttgtaagaatccatttaccaattttacagctaaaaattaaagtgaagtagaaatagcaaaagataacagacaaatatattattttaggtcattaatttatagtgccttatcatcttaagttataaatagaataaggattttgttatataaaaactatcaaaaaagtatcagtgaaaagacatgacctccatgaaatgtgctgagtgg

SEQ ID NO: 3425 - DNA, 153 bp, Homo sapiens
  misc_feature (1)...(153): n = g, a, c or t
aagtccttggagactcangagttttgagagcaaaatgacaacacccagaaattcagtaaatgggactttnccggcagagccaatgaaaggccctattgctatgcaatntggtccnaaaccactcttnaggaggatgtcttcactggtggcccc

SEQ ID NO: 3426 - DNA, 199 bp, Homo sapiens
ctgctgagcttggagcatggcgctgtcactgtagtcgatggctgagcggtagctgctccgcaggcagaagaaccggaagacatcgggggaaaaggtcttcagaaagtccttaatagtaatgtagttctttaatgatttggacattttttcttctttgctttggcgtgcaaatgccctgaaacaaaaacaaaagcattca

SEQ ID NO: 3427 - DNA, 313 bp, Homo sapiens
  misc_feature (1)...(313): n = g, a, c or t
ncaggtaaatgattctttatttcaataaactttaacaaacaatatataatatttcttccttaaaaagctcattcaaagatcataggcagacttcttccccattgtattttagttggggagataaaggcaaaaagaggaaatgtaagctatcttacagtcattctgagaacctctggtttcatgctatactttcccagctaaaagttactaatttacgaagttcagatactgaaacttaaaaatcaagatccatatattaggatgtcctgctgcacactggtggnggcccattgtgtcggagtctggnaaatgg

SEQ ID NO: 3428 - DNA, 352 bp, Homo sapiens
cttgctgtggagctccactgccatgtacccagtagggtttgacatttcattagccatgcaacatggatatgtattgggcagcagactgtgtttcgtgaactgcagtgatgtatacatcttatagatgcaaagtattttggggtatattatcctaagggaagataaagatgatattaagaactgctgtttcacggggcccttacctgtgaccctctttgctgaagaatatttaaccccacacagcacttcaaagaagctgtcttggaagtctgtctcaagagcaccctgtcttaattctccaagcggatgctccatttcaattgctttgggacttcttcttctttggtttttt

SEQ ID NO: 3429 - DNA, 345 bp, Homo sapiens
  misc_feature (1)...(345): n = g, a, c or t
ccccgttggtccgcgcgttgctgcgttgtgaggggtgtcagctcantgcatcccaggcagctcttagtgtggagcagtgaactgtgtgtggttccttctacttggggatcatgcagagagcttcgcgtctgaagagagagctgcacatgttagccacagagccacccccaggcatcacatgttggcaagataaagaccaaatggatgacctgcgagctcaaatattaggnggagccaacacaccttatgagaaaggngnttttaagctanaaagttatcatttctgagaggnncccatttgaacctcctcagatccatttctcctccaatttatcatccaacatt

SEQ ID NO: 3430 - DNA, 462 bp, Homo sapiens
  misc_feature (1)...(462): n = g, a, c or t
ctgaaaaactgtaaaagttacatacatacatacctaatggcactaggaatgtacaatatcaattattggaaaaataagtgagtgactcagagtcgtaagaaattatttaatattagtattttttcttttatagacaaacataacatacacatggtttctaccttctataagacaaagtagaaaactaaccgttactgcatttacctcaaacacagcactgactgtgccacagataacatggtccaaaatattcaattctatagataggccatggtattgaatgcatggttaagttttaggaaaggcatatatttcctgaagtatgtatgttaaatacncaaatatctataaataacaaaaagttaccagcaaaaatgtttaggttataacattcccaaacttcctaacattttaagngtttaagatatatgttgnctgaccagttcgttnggttacagtttt

SEQ ID NO: 3431 - DNA, 228 bp, Homo sapiens
ctgctttccggcaaagatcaacctctgctggtcaggaggaatgccttccttgtcctggatctttgctttgacgttctcgatggtgtcactgggctccacctcaagggtgatggtcttgccagtgagtgtcttcacgaagatttgcatcccacctctgagacggagcaccaggtgcagggtggactctttctggatgttgtagtcagacagggtgcgcccatcttccag

SEQ ID NO: 3432 - DNA, 429 bp, Homo sapiens
ctgagcatgctgagaaacaagctgttcggtacagatttccttttctctcagcctttccccagccttagtcttttctgtccctctgtcctatctatcccaggacccctggcttccctcatcatctgtctgtggctatctgtcccacagggcagaactgtaggactgaggatccattattgtcctgggctgacttcactaaggtaactccctgaatcctgtggagctgctggatctagcccacattccaaatactggccttcccacgtccctccttccctacaccagaggcaactcctcagcttttgctacctttccattcctcctccagcgagagagccctcctggcaagttaccattctggacatggctggacaaaattctggagttggtacatgaccacctgaaggatctctggaatgatgggtaagg

SEQ ID NO: 3433 - DNA, 375 bp, Homo sapiens
  misc_feature (1)...(375): n = g, a, c or t
aaatatgtggaagagagcataacgaacgtctaggtgtttatcacttggcttaagcattatcagtttacctattgtattcatccatggatgtttcagaaggaaccaccatgtcatcatcacatagttacttaatatcaagtcgtcagtgttggaaccattctgatcgactaataaggtgttttgttctttggttcccttttcgcagttagttcaagtcaggatacacatcaagtcttttacctgcccgggcggcctcgagccctatagtgagtcgtattagaagggcgaattccagcacactgggggnncgttactagtggatccgagctcggtaccaagcttggcgtaatcatggtcatagctgttttcccgggn

SEQ ID NO: 3434 - DNA, 404 bp, Homo sapiens
  misc_feature (1)...(404): n = g, a, c or t
aaatttgtcttgtgagattttactatatctcagacagcataaatgctgttttagcactggattctttcactgagcacaaagagttgttggggctttagcatctgactgattttgttacggggttgattctgaccataggaantatgcaatgtgaatcactatttacagagaaacctacaacagatgcttgatgttgtagaaactgggacatatagataccaagcaaaattataagaaacctataaggtgttcaatacgcttgtgtttccaaaattcactgtacatgatcagtttggtgttcttgtaccacagtttttaactgaangaaccagttgtaacagtctcaattttaactaaaacttgaagaactaaaacaacaatgcaaacctttcagcattggttgg

SEQ ID NO: 3435 - DNA, 393 bp, Homo sapiens
aaactcgccagtgagactgaggacaatgataacagtttgggtgagtgaaagagcgacggtcagggataagccaggcatttggatatgtgggtgggaactgtcacaacaggagtgagaagtctctctttcctgctccaggggacatcctgcaagccagtgacaacctctcccgggtcatcaactcttacaaaacaattattgaagggcaggtcatcaatggcgaggtggctaccttaaccctgcctgactcggaaggaaacagtcagtgcagtaaccaaggcacgctcatcgaccttgcggagctggacacgaccaacagtttgtcctccgtgttggccccagcacctactccaccctcctcaggcatcccaatcctccctccaccaccccagg

SEQ ID NO: 3436 - DNA, 265 bp, Homo sapiens; identical to SEQ ID NO: 23
  misc_feature (1)...(265): n = g, a, c or t

SEQ ID NO: 3437 - DNA, 377 bp, Homo sapiens; identical to SEQ ID NO: 24

SEQ ID NO: 3438 - DNA, 399 bp, Homo sapiens
  misc_feature (1)...(399): n = g, a, c or t
aggtcatttctctcccacgcctagctacctccactccagttcagcacccagagacctcagactggatccactactggcccaagaatactgatgagaaacctagtctggattgggtcggaagctggaatttggtgctctgcagaccagtgctcaaaattgtggttatttttgaggactcgccttcaatccagaacatttgcgtttcaccttcctcgcccagatccagttaacaagcgcaccatcctgggaagtgcatgtctcagaccaactccaccttcaccttcaccacctgtcgcatcctgcatccttcagatgagctcactcgggtcacaccaagccttaactcagccccaactccagcttgtggcagcaccagccacttgaaatccacgccggngg

SEQ ID NO: 3439 - DNA, 183 bp, Homo sapiens
aaataacttacatacttttatccaggcaaaactgtctctgcttttcattaactctaattataaaataaatacagctccctattttgttttgctgttagtaattttttctgagaaaagtgttagggtacctgggtgccgctttgatgatgttgtccacacgcagaatcacctctgctgcttcag

SEQ ID NO: 3440 - DNA, 478 bp, Homo sapiens
  misc_feature (1)...(478): n = g, a, c or t
aaaaatgganagtctgaattttattagagctcacacaccatatattaacatatacaactgtgaaccagctaatccctctgagaaaaactccccatctacccaatactgttacagcatacaatctctgttcttggtaagtgttcttggtaagtgtgagattggatttctctccagggaggaaggatgacttgtttattatgagcatgaactctggatccagaccacctgagtttgctagttactgtctgtgtggctttgggaaagaattttaaccacactgtgcctcaatttcttcaactgtaaaatggggatggtaacactatttatctaatagggttgttctgaggaataaataagttaatatatacaaagcatttagaacagtgtttggtacacagaagtgctatataagcattggctttaacattaattattctcaacatcattaatggcattaatatttaccattatattaatg

SEQ ID NO: 3441 - DNA, 241 bp, Homo sapiens
ctgtcccctggtggcctgctgtgtggggtgggtgtggagggtgaggctgtgcagaatggtcctgccagccacagcagggccctggtggggatttgcactgggcactccaatcctggggaggatgccagggacggggatgctgaggaagtcagagagcttggtacggttgaagaaaactgagtcttgggcaatttgtgctaaaactaggtgagttgccaaacccaaggcatcttaccaacag

SEQ ID NO: 3442 - DNA, 269 bp, Homo sapiens
ggcaagctccaaatgagaagatgaagcaagtgttaaagaagactatagaagaagccaaagcaataatatctaagaaacaagtggaagccggtgtctgtgttaccatggagatggtgaaagatgccttggaccagcttcgaggcgcggtgatgattgtttaccccatggggttgccaccgtatgatcccatccgcatggagtttgaaaataaggaagacttgtcgggaacacaggcagggctcaacgtcattaaagaggcagaggcgcag

SEQ ID NO: 3443 - DNA, 433 bp, Homo sapiens; identical to SEQ ID NO: 26
  misc_feature (1)...(433): n = g, a, c or t

SEQ ID NO: 3444 - DNA, 362 bp, Homo sapiens
aaaaatggagagtctgaattttattagagctcacacaccatatattaacatatacaactgtgaaccagctaatccctctgagaaaaactccccatctacccaatactgttacagcatacaatctctgttcttgggcattttgtcagtgatgctgatctttgccttcttccaggaacttgtaatagctggcatcgttgagaatgaatggaaaagaacgtgctccagacccaaatctaacatagttctcctgtcagcagaagaaaaaaagaacagactattgaaataaaagaagaagtggttgggctaactgaaacatcttcccaaccaaagaatgaagaagacattgaaattattccaatcca

SEQ ID NO: 3445 - DNA, 419 bp, Homo sapiens; identical to SEQ ID NO: 27
  misc_feature (1)...(419): n = g, a, c or t

SEQ ID NO: 3446 - DNA, 288 bp, Homo sapiens
  misc_feature (1)...(288): n = g, a, c or t
ncaggtgggagggcggttgccgctgggcgcgacttggtgcgtttcgggcaggaccgactgactgtgtgtgcgcggagcagacgtgtcccgggccaggccgggccgtggaaggaggagaaggagagtcaaataaaataagaccaccccccaacaccaaaaaatggatagagttagtacgagaagtgcccagtgaagccaaatgacacgtcattttacagtgtgacctttttttccccttccagacttgcaggctttttcaaaagcagagcggagaattaattgtagcag

SEQ ID NO: 3447 - DNA, 210 bp, Homo sapiens
  misc_feature (1)...(210): n = g, a, c or t
cccagctacacaggaacctgaggcaggaggattgcttgagccccggaggttgaggggtgcattgagcagtggtcatgctccagcctgggcaacagacctgggtgagaaacccagaccctgtctccaaaaaaaaagctggcacttaatcacattagctataatnagcaangnctttagattctctgantcattctacaactttagncattc

SEQ ID NO: 3448 - DNA, 323 bp, Homo sapiens; identical to SEQ ID NO: 25

SEQ ID NO: 3449 - DNA, 207 bp, Homo sapiens
  misc_feature (1)...(207): n = g, a, c or t
ngtccacaggatcaaggactgtcagctttctaacccagagccagggatgtgatgtcccaattggtcccaagtccctcctacccgccgcctctgctccacctaagctccacacccactcctgaaccagccacctgtccaggaaatgaggcaccctaagcctatactagagctcctgatacctctgtggcactcgccagcctttaccag

SEQ ID NO: 3450 - DNA, 201 bp, Homo sapiens; identical to SEQ ID NO: 28
  misc_feature (1)...(201): n = g, a, c or t

SEQ ID NO: 3451 - DNA, 527 bp, Homo sapiens
  misc_feature (1)...(527): n = g, a, c or t
aaaaaggcggagatgactaatcaacaaagttcctaaccaacagcagcagccagttaatattaatatctcagtccagcatatctcatagaatccaatttacctcacaaattttaacagttctcatgttaaattcacaaatatttcagaaaagttctacataaaaatgttaacaatggttaactggggtgatgagatggaggggattggattttttccttcttaatctgtagttttccattttcagacatcatcccgcccctccgcgtatgtgctatctgtgtgaggaaatcctacacacggtcccattaccattcctcgttgggacgtcctcagacactggacacaccccatagtacaggggcggctccttagacgcagtcgctccagctctgtaggtgtcggtgtcactagggggcaccgagcaggtcttggatgtcacagcttcctcctctggaggattcaggcccacactgtaaccaaaatctntgtttcagaaaaaccagcctgatcagttgggttcccttcag

SEQ ID NO: 3452 - DNA, 422 bp, Homo sapiens
  misc_feature (1)...(422): n = g, a, c or t
tggtaagtggcttcgtggtctttatagctgttactcttttgtactttgtctttttcttttattttcttttgagcgattgtgcgaacatagcatagcacgcactatgccttctggggttggaactgcctggccagggcgactggcggataangtcttgtgcgtggnctcgaggcttaaaagtagcagtggggctttgtgaaggacaaaatggcgatggcgggcccgtgtaagtcccccttcctatgatgaggaccttttcacagacctgtactgagctccgtgaggataaataactctgaagagatgggccctgcaagcctcttgcttacccgctgttcanaaaatanccgttttcnaaatgccctgagttgacctaatgcttattgggctcctgtcttgcaggaatttacccccccctttgg

SEQ ID NO: 3453 - DNA, 426 bp, Homo sapiens
  misc_feature (1)...(426): n = g, a, c or t
ccaaatctcttcacatcctgttccatttctttttgcattcctgctaatgcttttactgtctaattaaaataattcactgtgatatcttgaatagagacaacagcttcttcanccccgtctgggtccattcttcagcttctttctccagggcaactatcctggagacgtaggacctacgtcatcctcatccaaggaattataaagttgcaacttctcgcatagccctaaatggctgcagtaagtactggaaaaacatggttgccatggtaactaattcctgggaggcttcatcttcctcttggtaaactttcattaatgctaccatggtgnttggcttttccatgncctttggataacctaaagagcaaaaggtgaataaaagcttaagtcagaacagngggaatacataccccnccaaccaaaact

SEQ ID NO: 3454 - DNA, 169 bp, Homo sapiens
ctagcattcacatggaacaaattgctgccgtgggaggatgacaaagaagcatgagtcaccctgctggataaacttagacttcaggctttatcatttttcaatctgttaatcataaatctggtcactgggatgttcaaccttaaactaagttttgaaagtaaggttattt

SEQ ID NO: 3455 - DNA, 313 bp, Homo sapiens
  misc_feature (1)...(313): n = g, a, c or t
ctgcggccagctagctggaggctcacgcatctccccagtcaccttcaacaggtacagcctgcggtcagacacaaccacaaggcacatgaactccccagtgtggcctgccaatgccactggcaccttgaggcagcactggaactcctcctgggcatcgctgaacacctcaacatccaggaagagccggagtcggtggtccacagagcggaggccacagcgctcaggggggggactgaggctccaactaccatggtcacgggtgctcggtgcctgaggtgggctgttcttggccctgtcaaggnggtcaccatgg

SEQ ID NO: 3456 - DNA, 278 bp, Homo sapiens
  misc_feature (1)...(278): n = g, a, c or t
taaagggaactgtcttctgtcgagaagtaaaggaaacttcatgaaggatgtagaagcttagctgcctcagagaagagagaacctgaagatctgaggcaagctggacaggaagaaggtggatatttgttgatggaagaattcaagtttataatcaattcccacttagcacctactgtgtgctaggaacttgaatgtgtatgtttgacaagtcctgcttggcctgatgggtgggagaaagaaccngacctggctganatggctaggcggagggcttttaa

SEQ ID NO: 3457 - DNA, 279 bp, Homo sapiens; identical to SEQ ID NO: 289
  misc_feature (1)...(279): n = g, a, c or t

SEQ ID NO: 3458 - DNA, 211 bp, Homo sapiens
ctgggtggatggtggttccacgtattcaggtggcaaacaggaaaaacatgtgttcgaagaagaatggaggtaggtggtctcttaagaatggttaagaggcttgggagtcagactgcttgggtttgcatcccagctttgccgttttctggctatcaaacttgtcagctattatttgttgagtacgtactatttgatttatgaccacaggcag

SEQ ID NO: 3459 - DNA, 434 bp, Homo sapiens
  misc_feature (1)...(434): n = g, a, c or t
ncaggtaaatgtgcgtaatggatctgtgctttgggggagtttgaaatgaagtccagcctgataaagcatttgtttgttaccaccttcgtgatgttggccgatgaagtgaaaacttgctattgaaagaccagtcctctgtagacgagaccttttctaatgtactgaaggacggccaggactgatatccatattcagatgcaaatcgagcttttgggaaaactttccagttccagcaatcatgccagtacgagctctctgatgtttttcacatagagtgtcacatagtccttgatgtanattggccggtcagtgaaactgatatgataccaattcatcatcagcgcctcctcattttcattattgccactccntatgatgatagaaggatgagaattcagtctcttgactggtaggcacttctgctgtcactgaat

SEQ ID NO: 3460 - DNA, 371 bp, Homo sapiens
  misc_feature (1)...(371): n = g, a, c or t
aaaacaccctaggatgcnttgaatcaggcttgattttgttagttgagttacaggagaattttaagggtgagggtatgggggtcagggaagaaaaggaaatgggaaatggaccaaaaaaaatcttgagtcatcatctaaatcaacaaagcactgatagctccaaatattaggtcagacactaaaacgactgatataggctcaagtggtttataaaacctataaaaagactacaccagcaaagtccctgtcaatctgtcagagttcagaaactaaaacagggagtaacattttagcttaaaaccttatctcaagagaatcatatacacttcacatgaataaaaatacctgaaaccaaacatttttacctcngg

SEQ ID NO: 3461 - DNA, 363 bp, Homo sapiens
ctgagaatagtggacacagggtcccagaaacaaggctgcaaagcctaaatatcttgcagcctattggcccagctcagtgggtcccgctgctttagaagcctgcacccacccactcagtctggtgtgatctgagcccctgctacgtgctcagtctgcactagacagcaaaagcaatgcggtgaaaggtgtttgaggtttggagtgagacagacttgggctgaatcctgactctgcgacctaattggttatatgtccttgagcaacttatattaccaacctgagctctagttttaccatctgtaaaataaggatgatcacaggtttcttccagggtcataagggccaaacacacttggtagctca

SEQ ID NO: 3462 - DNA, 278 bp, Homo sapiens
aaaactttccttagataaggaatcatattgaagcccagaagcttttgcaagagtccattccaaagctgcaggtcatagattttgtattctaaacacagctcagtcaccaatcttactgccatggactcgtggctgtggtttttccacagacccttaatcattccttctttaggactgctgcaaaataattcatatgtgatggggatattcaaagtctcaaatgatgccagaaaagttatacatctcaaataagatttcacttcttcaatgggtttttt

SEQ ID NO: 3463 - DNA, 409 bp, Homo sapiens
  misc_feature (1)...(409): n = g, a, c or t
aaatggctttaggcttatagggggtgtaaactttaagaatataattctcccattcaagtttacagcaaacatctagccaccttcaaaacaaagaatatacagaccatcatttancaaatactaatacatgattttccttggggatggcaggtttgagaatcctttagcaacaggacataattcccctaaattacagtgaattatttataacgagataaagctttcaggtacaagctgaaggtggggtgtctaacaactaaaaactatcactaaatctcaaagagaaagttcttgcaaaatatgtaaaggtcacaaggngcagacattctccttctttaggcttttatctaaggaaaggctatgaaactgggcccatctgtatacangctcaaatttacctttttacctc

SEQ ID NO: 3464 - DNA, 283 bp, Homo sapiens
aaatatatgggaggatgtgcgtaggttgtatgaaaataccaagtcattttatatcagggacttgcgcacccacagattctggtatctgtggaagtcctcggccactcccccgtggagacaggacaactgtgtgttgacagaagtcacatgggagaatgctcatagcagcccccacgcagtgacacaacctggaacaccgcccagtctgaccagcacagaaaagcagcacctgctgaattcatgccacgggggactccacagcagccaaaagagtgggctgtgg

SEQ ID NO: 3465 - DNA, 307 bp, Homo sapiens
aaagggaagctgtggctgggctgtcctcttgtcccttttttctgtaacactcaaccatgcctgagctcttctggcagccccaaccatctgggtgatacacacacccagatgtctgtaaaatctctgttgtagacccaactaattctaaagctgggactcagtgattaatataatgggtgaacaatcgaaatatagaaacatgggaacaacaaaaatgaagagaaggaggatttgcagattatatgttgacatgttgaagaatgaataaagttaatggggaaaacttgtgagatctgagatgaaattt

SEQ ID NO: 3466 - DNA, 235 bp, Homo sapiens; identical to SEQ ID NO: 290
  misc_feature (1)...(235): n = g, a, c or t

SEQ ID NO: 3467 - DNA, 208 bp, Homo sapiens
gcgagagccactcaccactctacatgcaccccccgaagtgcacgtcctgcggctctcagtccccacagcatgcagagatgtgcctccacaccgctggccccacgttcccttgaggagatgggagagacccagtctgagtactcagattctagctgtgagaacggggccttcttctgcaatgagtgtgactgccgcttctctgaggagg

SEQ ID NO: 3468 - DNA, 340 bp, Homo sapiens
cctcgtccagccgcacacggcgactctgcatgaggtatgccagacagatggtggcagagcgcgagatacccgcctggcagtgcaccagcacccggcctccgctgttctttacccagtctgcaagggagatgggggagtggtgtcagacggaatgtgcacagcccaggagacaggtgcccccagtcctctcctctggagcccctcgggatttctgggcagaggtgcccccttaccaatgaagcctatggcctcctggaaccaggcactgatctccaccatctggttgtcctccacagggatactcttgtagcggaaaaggccctcaaagtggttggggcag

SEQ ID NO: 3469 - DNA, 154 bp, Homo sapiens
ctgcattctattccactccagtgcctgggccagttagcaccagtgtggaagacagtgagctggctccggacaacagggatggaggaaaggtcccacattcacattcctgatacgtggacaaggtgaggggccgcaatcgctctggcagcatttt

SEQ ID NO: 3470 - DNA, 482 bp, Homo sapiens
  misc_feature (1)...(482): n = g, a, c or t
aaaacaagcaagcttaattcagtcaggcatatattgcaaataaaaacatgtttccaagtaggctggaataaaaatgctaaataagaactgggccaaaagatcatagataatgggcttcttctcttggtaatatgtgaatacatttacccatggggtagaagtatttcacctgccccatgaagaacctgatggcttgtggtgtctgtgctgtgtcaatactaacagatgtgaggagacagactatggaatggacgctgtggctatctgtgagatagtggaaggggttatacacactggccacaggaagttgcaaaaattagatggactctgtgtagctagccactcttgagtgtcaggnctgcatatgtgagttttaaagaaggngcaagatagcaataaattcccttaaagagcangatatgtcctggnagctctatagttncatgatcaangacctggacctgcccgggcgggcgctcnaa

SEQ ID NO: 3471 - DNA, 258 bp, Homo sapiens
ccatcatatagcccatggtggagttgtcccgaagtgcctgggctttcatgatccgctccatattggctgtccagccgtaggtgctggtcacaatgcagcaaggtgaagacacaaagtctattggagattgtcacctgtggacgatcacaaaagccttagattgacattaccactttgaaagagaaaacaggcattgtcaagcctaattccagcagggggaggaggtggacagaccacttgagtttgagaccatgctgg

SEQ ID NO: 3472 - DNA, 184 bp, Homo sapiens
aaaacaacaattaagtggattatgggaacaggaaaaccatcttactttggttccaggatatactggtaatatagctaaggatgtagatgcttatttattacagttacattgagaagatttcatctactaaagagcatttggtttttcaaaacatccctgaactgtataatttacaaaaaaaaaa

SEQ ID NO: 3473 - DNA, 364 bp, Homo sapiens
  misc_feature (1)...(364): n = g, a, c or t
aaagtaaaaacataaggcttttaatcaaacaaattcatagttagttgttctctaagccatcttggtattccaggcacagtcatatctggagagacaactgctaaatagccagagccctgaaatgttcaccctactcaatgcctggttttcttttctccctttacctgataatgagcctgggcttgctgtgcagagttcaaggtgacattgcagagtttgcagtacaggggcttacatagctcctccagggcacagtcttgctcccctcccttcgataactcttcttcccctgcaggaggcaaggaagcctcctgcccaaaangcttctgtggtggaagctgcaagggtcctgtagacctggtgg

SEQ ID NO: 3474 - DNA, 484 bp, Homo sapiens
ctgaacgccagtttgctgctcgatatggcaaacctatattagcaagtagggatgctcgaagctccagtcgagagcaagaagcaggtgttcttgctatggatgcgctgccccgccaagtactaccgtttcttttgagaagaatgaaagaagatgttttgcaggatcttccacctaaaattatttaagactattattgtactcttagtcctctccaggttcagctctatgaagattttgctaagtctcgtgccaagtgtgatgttgatgaaacagtttcttcagctacactttctgaagaaactgaaaaaccaaagcttaaagctacaggccacgtattccaggcattacagtacttacgtaaactgtgcaaccatccagcattagtcttaacacctcaacatccagaattcaagaccactgccgaaaaactggcagttcagaattcttctctacatgatattcaacatgcccctaagctctcagt

SEQ ID NO: 3475 - DNA, 441 bp, Homo sapiens
gcgtggggcgcccacaatttgcgcgctctctttctgctgctccccagctctcggatacagccgacaccatgggtttcggagacctgaaaagccctgccggcctccaggtgctcaacgattacctggcggacaagagctacatcgaggggtatgtgccatcacaagcagatgtggcagtatttgaagccgtgtccagcccaccgcctgccgacttgtgtcacgccctacgttggtcaagcagacggcttagtctggggctcatctaaactagttccagtgggacacggaattaagaaacttcaaatacagtgtgtagttgaagatgataaagttggaacagatatgctggaggagcagatcactgcttttgaggactatgtgcagtccatggatgtgactgctttcaacaagatctaaaatccatcctggatcatggcattt

SEQ ID NO: 3476 - DNA, 348 bp, Homo sapiens
  misc_feature (1)...(348): n = g, a, c or t
aaaaaatgggaaattttaatattaagtatgtccatgattgaaagaatcattccagaaatggcagcaaagaggctcaatgaattcattatcatttttcctttgaccaaacactttccttggagtttttctccgttgctgccaggagtgatccggaaataatatacataatgcctccccagagagggtaccacacagtcacacagatgggtgcatagatccctgctgggatcatcagaanaccccccanggcaatgtggaagagcccattcatagtctggacagcccccaaagtcttagattccctcatgaaaaagctttgcgggggcccnccagtgaagacatcctcct

SEQ ID NO: 3477 - DNA, 412 bp, Homo sapiens
ccgctgacacatgtgtctatgtatgctaattggaagctccccaatacatgtctatgacaaaacttttacacaaccaatcaacatttgacattttttacatcctcttcctctcatgaattatattccattttcaagaaaataatagttatcctttgaaaaggcaaaacgctcaagccactgaaaaacagtatctaaatttctgtaaagtgcaaaaatactaaggtggggggcaattattatattctgacaaataaatattctgaacttttcaacatgaccctttggcactagtggtttgggagccctgacattcgcctggtgtcagttcagcatcagggttgagctgcttggaagcaggaagttcagcgtcatttattacaaatccagtgcaacagaatccacgtgtttcaca

SEQ ID NO: 3478 - DNA, 408 bp, Homo sapiens
  misc_feature (1)...(408): n = g, a, c or t
ctgcatttcacatgccttgcaatggatcagccaaggccgagaccccatcttccagccacctagtcccccaaagggcctcctcacccaccctgtggctcacagtggggccaagcatactccgtgaggctgctgccatccatgtgctagtcactggcagcctgcacctggtgggtggtgtcctgaagctgctggagcccgcactgtcccagtagccaaggcccggggttggaggtgggagcttgccacacctgcctgcgttctccccatgaacttacatactaggtgccttttgtttttggctttcctggttctgtctagactggcctangggccacggctttgggatgggaggccgggagaagatgtcttttttaaggctctgtgccttggctctccttcctcctggct

SEQ ID NO: 3479 - DNA, 392 bp, Homo sapiens
  misc_feature (1)...(392): n = g, a, c or t
gtccttacagccgctcgtcagactccagcagccaagatggtgaagcagatcgagagcaagactgcttttcaggaagccttggacgctgcaggtgataaacttgtagtagttgacttctcagccacgtggtgtgggccttgcaaaatgatcaagcctttctttcattccctctctgaaaagtattccaacgtgatattccttgaagtagatgtggatgactgtcaggatgttgcttcanagtgtgaagtcaaatgcatgccaacattccagttttttaagaagggacaaaaggtgggtgaattttctggagccaataaggaaaagcttgaagccaccattaatgaattagtctaatcatgttttctgaaaacataaccagccattggctattt

SEQ ID NO: 3480 - DNA, 437 bp, Homo sapiens
cctggccctgaagcaggtgggtggcagagacccagagtgggcagtatggcagttccttggttccttttctggcatcttcccacagccgggacatcttgggtagcagagatgatgtgcgggctgagcaactcctcacatagagtcaaggcatcttgggctctgcctgcctggatcagtgctaccgctgcctccaaaaacacctcaggcatacagggccccttggctccgagctatccagcaacagggccagcaggtccaagtaatgctctgcagcgtctcctgccctccccgtctgtaggcacctgcttgctaatatgtgcttggtctggctctgagtgccacaatgaaagggtgaggctaggtcaagtggtggcagtagtaattctacctcaaatgagaaactgcggggctttggaacttgcatgggacattcaagg

SEQ ID NO: 3481 - DNA, 292 bp, Homo sapiens; identical to SEQ ID NO: 29

SEQ ID NO: 3482 - DNA, 381 bp, Homo sapiens
ccttatatttgtacctgtataaataccatatcacagcacaaaaacataccccatctggctctcttaaggtacatgataaatcagactaatgcacattcatcaaagtgggatcatctcaggatatgtgcatatttgacgtgggtatgaattcagggtttccttgggtctctttcaaggactctcctttctcgtcggtatttctatttccttattttccttctgtttatgaagaactgttatttttatatttaatgcccaattttcactacttgttcatgtcagttctctgaaatgttactgcctatgaaccgtgacatgtactctttataacagaaccagaagttaaaagatgtagacatcacacaaatcaatgattatttt

SEQ ID NO: 3483 - DNA, 318 bp, Homo sapiens; identical to SEQ ID NO: 291
  misc_feature (1)...(318): n = g, a, c or t

SEQ ID NO: 3484 - DNA, 265 bp, Homo sapiens
  misc_feature (1)...(265): n = g, a, c or t
cgaatagagctcttggaagtccctccaaccatggcctgggtctccttctacctactgcccttcattttctccacaggtctctgtgctctgcctgtgctgactcancccccgtcttacatctgccttgctgggagcctngatcaagctcacctgcaccctaagcagtgaacacaacacttacaccatcgatcggactttctgttgtttttgnttgtttctgtatcttgtctcaacttgtggtcagcctttctccctgcatcccang

SEQ ID NO: 3485 - DNA, 326 bp, Homo sapiens
ccttcctttcacacacatcagaaatagggaacccaagacctcgagagaggaaatgggcccagggacatgccttggcttggggtggcttaggaccagggcaagacgcctgaccccagagcagaccatgctgacactgggcaacacattccctgctctggacctcagttcctttggctactaaggaggcccaacgatcctcgcctgtgtgggacggggctacctgcagacatagagggcctttgagcacctcgtagcttgcttcccagccagcctgggtgtggaaatggccgtgctgacaggctctctgcgatagggcccagccatgg

SEQ ID NO: 3486 - DNA, 283 bp, Homo sapiens
aaacatgacttggtgctgaaagacacactgctgggacccaagttccctcccacatggacgggatggaggctggagcccaaggtttcagggaaacgtatgtggcctgtgcccctgggtgtgatcatgggcacacacatttatctggcagggccagccttggctgctgaggggtcatgggcacagaggaggaccatctggtgacactgaggaccagtgttgcccacagccagggagaataaggatgaagaatgagtgttgccacacccctccagatgagctcaag

SEQ ID NO: 3487 - DNA, 445 bp, Homo sapiens; identical to SEQ ID NO: 616

SEQ ID NO: 3488 - DNA, 411 bp, Homo sapiens
  misc_feature (1)...(411): n = g, a, c or t
ctgatcaggagcccagatgccagggtggattttctcagtgggatctagtattgctagaagagccttccttacatggcagaaacaggcacatgggcctcttcccttaaaatgcatctgtctcacatgcttggggactgctgtgcgggaacacctggtgtggcctggcgaggcagcgtatacatggcccccaaaaactggtctgcaattcttcccgcttcttgcagcccactcagcagagcaccatgcactgtggctgggtagttacggatcgtatgttctcccgcaaagaagagtcgtggaatcggctgtggggcacctggaatcgaggggccaggagtgattggctgagccattaaatcatagtcattttccagatgatccttgcagcaacnttaggaataagagccccga

SEQ ID NO: 3489 - DNA, 281 bp, Homo sapiens
ccaaaactgcgaagagatgcagaataatgttgacaataataagttgctgaatcgtcaggctgcagactggtgatggttaaattgaattgtgtcccagatccactgccagtaaatcttaatgagaccccttcttctaaactggaagtcgcataaattaggacattaggggctttgcctggtttctgttgatgccaggccaaccaccgatctatattctgagaggcccgacaacttattgtaactgtatctccgacagatgcagacagggtggaaggagattg

SEQ ID NO: 3490 - DNA, 216 bp, Homo sapiens
aaaatcataaatatttggtttcccctcaacatagcacatcacaaaaatacatttcaaaaacttttttcatatataattcctgtaaatgatcatatccctacttattaaggaaaacacctgatgacaagcactcaaacactcttgaaattttctgtacagtaattacaaaagtaaaaccaagagttctgttggccctttaacaggtgaaaccatttt

SEQ ID NO: 3491 - DNA, 376 bp, Homo sapiens
  misc_feature (1)...(376): n = g, a, c or t
ctgtcccttacaaaggatactgtgcgtggagtcctggcatggttcctggcacataggccccagcacgaggagaccgtttctgttactgctttaggagtgcataggggagtcaggctttgtaaccaacatgcgtaatgtttttgttttgtttggggggttttttggcggggaaggagggatagattcatagtctgcagccccttgctgtctggtggcacaaagtcccccagacgtgagactcccactcgagaaacaactaaagaatgccataaatcaacgtggacaaaaggnccctacattananactatcctgaggncccttttactttgganccaaaanccttatttnaaatggggggaaaaagggganntggaa

SEQ ID NO: 3492 - DNA, 454 bp, Homo sapiens; identical to SEQ ID NO: 31
  misc_feature (1)...(454): n = g, a, c or t

SEQ ID NO: 3493 - DNA, 240 bp, Homo sapiens
aaagcgggctgcatgtgtctgcatgctcagattagaaactgtgtatcttgaagtgtcttgaagctgattttctataaatgggcatttgggaaaatgtctcaggtgttctgacatagcattatccttcggttcccaattgctcaattttccaccacaggcaaagcaagccactctgtctccaggtcctatgtagtaaaagcctgcttttgccagatctgttggcgacagaaaagtcaatgg

SEQ ID NO: 3494 - DNA, 250 bp, Homo sapiens
  misc_feature (1)...(250): n = g, a, c or t
ctgcctctgttaccttgactgtctcagatttcgttgacccgagacgggtcctggcactaggaatgaaagactgtctctattattttggtttgctccaggttaggganaancccacgcaaggctcctactgaccatatgtttcatttctagctttgctgtctgggcaccaatttccctaggnttaactaattgctcaatgttaaggcagctctggggaaattcgtcttgtgtaactggggtgctatgcagg

SEQ ID NO: 3495 - DNA, 178 bp, Homo sapiens
ggatgaggacctgtacccagagcactaccggaaatactccgactacatcaaaggcagcaacctggatgcccctgagccctaccgaattggccggatcaaagagatcttctgtcccaagaagagcaacggcaggcccaatgagactgacatcaaaatccgggtcaacaagttctacagg

SEQ ID NO: 3496 - DNA, 191 bp, Homo sapiens
aaaaatacagttccccaggttgaggtatgtggtggcctgttgtcacggcagcatgagcacggcggcgcccagggcgggggcggaagggcctagctggagactgccatcacgtagttcttggaggggctgctccggcccagcagcacttggttcttgcaggtgaggagcccacaggaggcggccagtggggc

SEQ ID NO: 3497 - DNA, 417 bp, Homo sapiens; identical to SEQ ID NO: 30
  misc_feature (1)...(417): n = g, a, c or t

SEQ ID NO: 3498 - DNA, 219 bp, Homo sapiens
ctgtcacctctggggtgtggcttcttcccggaaccgcaccagaggcccctggagcccagggagggaccacggagggcaggtgtaacccctggcctggagcacagctctcagagccctgaggctcccggggacagaaacaagtaacaaagtgagaccacgagagaaaaagaatccacagtttctacaaaaagccccaccctccccaagcaccctggtcag

SEQ ID NO: 3499 - DNA, 476 bp, Homo sapiens
  misc_feature (1)...(476): n = g, a, c or t
aaatgaagagagaatcttagctttacagctttgtgggtggataaagaaaggaacggatgtagacgtggggccatttttgaactcccttgtacaagaaggggaatgggaaagagctgctgctgtggcattgttcaacttggatattcgccgagcaatccaaatcctgaatgaaggggcatcttctgaaaaaggagatctgaatctcaatgtggtagcaatggctttatcgggttatacggatgagaagaactccctttggagagaaatgtgtagcacactgcgattacagctaaataacccgtatttgtgtgtcatgtttgcatttctgacaagtgaaacaggatcttacgatggagttttgtatgaaaacaaagttgcagtacgtgacagagtggcatttgcttgtaaattccttagtgatactcagttaaatagatacatcgaaaagttgaccaatgaaatgaaagaggctngaa

SEQ ID NO: 3500 - DNA, 383 bp, Homo sapiens; identical to SEQ ID NO: 33
  misc_feature (1)...(383): n = g, a, c or t

SEQ ID NO: 3501 - DNA, 312 bp, Homo sapiens
  misc_feature (1)...(312): n = g, a, c or t
aaccanaaattttccgaagaagtaaaaaccccagaatttgtatcaagaagactcttaagggataatgcacaggccgctgagtttcgggaagcatggggccgtgagggcaaactcaaagagcgcgtgggaaattctgccgggcagagtttgaacaaacccaatattcacaagagagttttaacagaagctaccgtgggcagggaaagatctttgggagaaagaacccaagagtgtagtgcatttgatagaaacttgaatctggaccaaaatgttgttagacttcaaagaaataaaacaggagagagggtcttt

SEQ ID NO: 3502 - DNA, 232 bp, Homo sapiens
aaagagaattacctatattctcctgatactgattaccaagtcattcacctgaacaccagaattagaattaaacattgtaccatacaatttcattatcttatcagaatgaaaccaattcacagggaaactagagactacggctgtggtggtaacctgcagatatacacattcccatgcactgacataagttgaaaacacatagtactttctagatggaatttttttctttagg

SEQ ID NO: 3503 - DNA, 423 bp, Homo sapiens
  misc_feature (1)...(423): n = g, a, c or t
cgacaccgtaactatccgcactanaaagttcatgaccaaccgactacttcagaggaaacaaatggtcattgatgtccttcaccccgggaaggcgacagtgcctaagacagaaattcgggaaaaactagccaaaatgtacaagaccacaccggatgtcatctttgtatttggattcagaactcattttggtggtggcaagacaactggctttggcatgatttatgattccctggattatgcaaagaaaaatgaacccaaacatagacttgcaagacatggcctgtatgagaagaaaaagacctcaagaaagcaacgaaaggaacgcaagaacagaatgaagaaagtcagggggactgcaaaggccaatgttggtgctggcaaaaagccgaaggagtaaaggtgctgcaatgatgttagctgtgg

SEQ ID NO: 3504 - DNA, 184 bp, Homo sapiens
ctgatgcctcactactagatgcagtgctgggaccttcctcttttggagctgtcccatgtacagtggacccaagctcaggaccttcgtggagctgcttctccaacctgagaaacttcaagacccatcctcccgctgtcactttggacaatggaaatctacattttcttttccctttttttttttt

SEQ ID NO: 3505 - DNA, 430 bp, Homo sapiens
aaatcattcattcaatagataccaccgtgtgacctataattttgcaaatctgttacctctgacatcaagtgtaattagcttttggagagtgggctgacatcaagtgtaattagcttttgggagagtgggttttgtccattattaataattaattaattaacatcaaacacggcttctcatgctatttctacctcactttggttttggggtgttcctgataattgtgcacacctgagttcacagcttcaccacttgtccattgcgttattttctttttcctttataattctttctttttccttcataattttcaaaagaaaacccaaagctctaaggtaacaaattaccaaattacatgaagatttggtttttgtcttgcatttttttcctttatgtgacgctggaccttttctttacccaagggattttt

SEQ ID NO: 3506 - DNA, 324 bp, Homo sapiens
  misc_feature (1)...(324): n = g, a, c or t
ctgtgggaggctgaaaaggtcaaaatgcggcaaatcctggacaaacagcagaagcagatggtggaggactaccagtggctcaggcaggaggagaagtccctggtgagcaccccaggaaggatgtcggtgccctgcacccatctgtgtcctcttccacctccccaggtggctggggcaagggtcccctgcattcttggtgctttcagctccagaattcttagtccttcactcttgtttcttcctctgcaggaccccatggtttatatgaatgataagtccccattggtgagttgccaggagaggccgcctcctccatgccaagng

SEQ ID NO: 3507 - DNA, 240 bp, Homo sapiens; identical to SEQ ID NO: 617

SEQ ID NO: 3508 - DNA, 198 bp, Homo sapiens
aacctaccaatctaaagaaaactttgaaaactgaactgtgtaacgtggaacaacacgtcgaactctccgaggtgatcgctctcgctctcttcgtggagatctttcccgggaacgtttcctctgaggtgatctttctctcgatctacgtctttctctctctctctcacgacttcgatcatcttttctgcaagagcactt

SEQ ID NO: 3509 - DNA, 482 bp, Homo sapiens; identical to SEQ ID NO: 32

SEQ ID NO: 3510 - DNA, 339 bp, Homo sapiens
  misc_feature (1)...(339): n = g, a, c or t
ctgctgcccctcagtcttctttccttctccttttcttttcctttcttctctcttgtgcattcttcaggtcagtcatcacattcaaagtcttccatacccacataaccacaatgatcatggcattcaccancagtggggctgaaaatactatagaaatgaacatccccctggagtcgaaatactggtatttcgaaaataatctccagttcatcgcagccgcctcattgatgtattcagcacagtagactaagatgactagacacagaaagtgcccgatctgtagtctgtagcttcgggaggacaagcaggtgaggagcacgcanagcgcgtggaaggtgg

SEQ ID NO: 3511 - DNA, 184 bp, Homo sapiens
aaattcacaaaaaactgtacattatcaaaaagtcactaaaacaccacatttggttatataaaaagtcccttttgctgtaaaaggaacacagaaacttgttggtgttgatggtgtggtttcttcctgtcaaccagactgatgggagggaagcaaaagggcagggggtgggttgtctttttatttt

SEQ ID NO: 3512 - DNA, 381 bp, Homo sapiens; identical to SEQ ID NO: 292
  misc_feature (1)...(381): n = g, a, c or t

SEQ ID NO: 3513 - DNA, 323 bp, Homo sapiens
ctgggtcttgacgctgttcatcagagccagggcggaggacgcagcctccggaggctcctcgaagtttctccgagaggggctcagactgtaaaagatctgtgggtctaggtggggtgcctcatcgaagggaatggagatctcgaaggtctcatcgtccttcattgtccgcctccgactgctccggtcattcatggcgcggcttcctgcggaccccagcagccgagggcctcaggggcactgcaaaatggggaaattacaagcccttctaaatttattgtgaggatgcagtgatgcgacacacagaagctcagcccagcacctgg

SEQ ID NO: 3514 - DNA, 406 bp, Homo sapiens
  misc_feature (1)...(406): n = g, a, c or t
ctgtggtcaagtacacggatatgcatgtacaaggatatttattggtgttgcatataatgataaattattgagagttttctaaatgtacattttcctccttctggtagccatcttctctacgaagagtgactattgcctctttacccanaaatattggaaatgcaggaatggtaagacaattcctaagtgttcttagtcaaaggtaaattcattttcatatgacagaaaatataaacgtatattttatcatttcttttaacatttgaacttctactaaaggtggctgggatggaaaataatgatcgattcagtagaaggtcaagcangttggtaaagtgtaattttatggttcctctntgggaaccttactattttatacttggggctaaccttaaatgagtgctca

SEQ ID NO: 3515 - DNA, 190 bp, Homo sapiens
aaagtagtcttccgtggttgggaagcctcacctcccaagaccagagtcagttggagctggttgttgttggaagggagtgggttggggaactggggtgggggcagggagatccccccgctctgctggcggtcctaggtggagaagaactgcacttcacagagtctggggtttggtgggaaggggatgatgt

SEQ ID NO: 3516 - DNA, 329 bp, Homo sapiens
cctccgtgcatgatcagcactttgccgttgatgcactgggccaacgggagccactcgaacacctcgctaaagagctcgtacatctgggctgtgtacttggccttcacctcaccctcgaaaccgtagatctggttcatgttgtctgtctcgtggttgcctcgaaggaggtgaaagtgatctgggtacaggagcttgaagccgaaaagggtgaggatcacttctacagagaaggagcctcggtccacaaagtcaccattaaatatataggggttggtctccgagggtaaaccgttgagctcgaatatgttgaggaggtcatagaactggcc

SEQ ID NO: 3517 - DNA, 246 bp, Homo sapiens; identical to SEQ ID NO: 34

SEQ ID NO: 3518 - DNA, 515 bp, Homo sapiens
  misc_feature (1)...(515): n = g, a, c or t
cctacaaccctggatgcttgggttacttaagcgctcctccctcccaccagatccctgcctccagtgtccctcccactccaacgcatcctaccaggctcctttaagcctactgtcatgacattgctaacagctaacagcataacctgttctccaactccctatggtcagggcactcaccatcctttgcaacctggacccaccttatttgtccaatcataccaggaccttcaggtcccacattccctactctttagtttccgctggacagaaaactctcctcactatcccacaaatggaccgtacttgtgttaagctttgagtgacagcctctgtatttcctccctcccagcacataacatgtggtcctccaattctncagtattntataattttacccacctctcaaagcctacctcttaaaagtatcttctctatgaaacctcctcctgntactctaagtnttttcttacattccttctggcgcttacaggttgcattggnatnacccccgcccc

SEQ ID NO: 3519 - DNA, 315 bp, Homo sapiens
  misc_feature (1)...(315): n = g, a, c or t
tcgangtccaccactggatttctgattaagtcactgactaactctaaccaccactggaagtaccattcaacttctggacaacctctggttgtgtaaaataactcaatttantaatagcttaaacattaangttatctattattnngcaactnaaaggcatcatgattcagaaaatatattgcntgaatatcataaccagaccaaaactaacaaaagaaataatnttttgcaatatganaataatatttacaanaccaaaaacaanaacaaagtttttgctctttttanatttnnccctacaggaacttctgtgtg

SEQ ID NO: 3520 - DNA, 155 bp, Homo sapiens
ggaacaaattgctgccgtgggaggatgacaaagaagcatgagtcaccctgctggataaacttagacttcaggctttatcatttttcaatctgttaatcataatctggtcactgggatgttcaaccttaaactaagttttgaaagtaaggttattt

SEQ ID NO: 3521 - DNA, 309 bp, Homo sapiens
  misc_feature (1)...(309): n = g, a, c or t
ccatttaccagactccgacacaatgggccaccaccagtgtgacagcaggacatcctaatatatggatcttgatttttaagtttcagtatctgaacttcgtaaattaagtaacttttagctgggaaagtatagcatgaaaccagaggttctcagaatgactgtaagatagcttacatttcctctttttgcctttatctccccaactaaaatacaatggggaagaagtctgcctatgatctttgaatgagctttttaaggaagaaatattatatattgtttgttaaagtttattgaaataaanaatcattt

SEQ ID NO: 3522 - DNA, 273 bp, Homo sapiens
ctgcatctcctgccctgctgtcattacagggatgggcaggctggcatgggggcacccgctgcccctgcctgggtgttgctgtgtattcctgccggccaggggccactgccaggaccacgcctcccttttcatatcccgattcttaagttctgctattgtggtattctggtggagaaaaaagaaccgcgtggctgttttcgaactgcctggaacctaagaccctgaattcttttcccccccaaggggaaaatctatatggaaaacatttatttt

SEQ ID NO: 3523 - DNA, 301 bp, Homo sapiens
  misc_feature (1)...(301): n = g, a, c or t
ccaaggggctgaagaagatgcagagcagcctgaagctggtggactgtatcatcgaggtccacgatgcccggatcccactttcaggccgcaaccctctgtttcaggaaacccttgggcttaagcctcacttgctggtcctcaacaagatggacttggcggatcttacagagcagcagaaaattatgcaacacttagaaggagaaggcctaaaaaatgtnatttttaccaactgtgtaaaggatgaaaatgtcaagcagatcatnccgntggtcacttgancttgatctgggagaaagccacc

SEQ ID NO: 3524 - DNA, 306 bp, Homo sapiens
  misc_feature (1)...(306): n = g, a, c or t
aaaaattcttggtagttgagcagctctgggggaataagggcaaatatgcttgttatgaactacactgaaatctaccaaagttaatgtttactttgtgtagatccatttgtctattttatttatttttcccagtgaaaagtgtatttggatagagaacttttcattctataaatacactatgagntactaaaatatcatggattttgtttattcctgaaacatagttacatagttaaactgtacatatgacatggcttatgttaaaaatacccagtgctcagttttgaaagataggccaaaaaaaaa

SEQ ID NO: 3525 - DNA, 421 bp, Homo sapiens
  misc_feature (1)...(421): n = g, a, c or t
ctgcctcctctttctcccagagtctgagccgaaactacagtccagaggtatagccaggccctgggtcccgtaggcacagaccgttatcattattcagagtatgcagcagcttcagggcagtgtgctantcaagcagagcctagcctgtatttcatagaaacagaactcactttaactgaattattattttttctttatagagtgcaggatgtttttgttgttaacacaggcgtctttctcaggtccgtttgaatcctgaggagtgtgccnatgttttaaggcggngggttgaccacctttgttctncacaagtnaatcanaaatcaaaggctctcctggttctcctctctctgggctggttttttagcgaggcngnagacgcttcacangtaaaccgagagttcacatgggnttgctcang

SEQ ID NO: 3526 - DNA, 140 bp, Homo sapiens
aaacctgagactaacttaaacacttccttgaccttcttgttgcctgttcatttttgtgccaaggaagtagctgccccagtgtatgtcttgccttctccgcgtcattgttggaagaggagagatgcatcgagcagtcccag

SEQ ID NO: 3527 - DNA, 511 bp, Homo sapiens
  misc_feature (1)...(511): n = g, a, c or t
ccacgctctcacggaaccactggcatcagatggtgaagtgactgctacccggttgccatctgttgaacagacttttggatgaagtgtgttggggaagaggataaggttatatctaggacaactctttgagttggtccttcatataagaatcgtgacggtaagagaataaacacttgtactgggatcagaatacatgatggatgaaattctttacatgttttagcagaatgaatttgtttaatataataaagtttgctacttatctgtatgtaggttgctaaaaaggattttcttaactcagattttaagccaaataaccatttaacactagtatttgttaaatggggtatttttctgtatttgtatgtttcactataataagggaattaaggataatgtgcattgagaatattttgaaaaataattgactcaaattttatttcttggtcttttgctgtttacctgcccgggcggcctcnaaggcgaattccacacacttggcgnccgtcta

SEQ ID NO: 3528 - DNA, 513 bp, Homo sapiens
  misc_feature (1)...(513): n = g, a, c or t
tatttcccagttcgaggccgctgcgcggccctgcgcatgctgctggcagatcagggccagagctggaaggaggaggtggtgaccgtggagacgtggcaggagggctcactcaaagcctcctgcctatacgggcagctccccaagttccaggacggagacctcaccctgtaccagtccaataccatcctgcgtcacctgggccgcacccttgggctctatgggaaggaccagcaggaggcagccctggtggacatggtgaatgacggcgtggaggacctccgctgcaaatacatctccctcatctacaccaactatgaggcgggcaaggatgactatgtgaaggcactgcccgggcaactgaagccttttgaggccctgctgtcccagaaccagggaggcaagaccttcattgtgggagaccagaatctcctttcctgactaccaacctgcttggactttgctgctgaatccattaaggtcctaaccccctggnttgccttggatgccntttcc

SEQ ID NO: 3529 - DNA, 238 bp, Homo sapiens
  misc_feature (1)...(238): n = g, a, c or t
aaattttgaacttgtttcaatcaagttgtagccaaaacaaaaaggtcataattactgtgctcatataagagatgtgacgagggaaggagggagggagaaatgcangaaaggagtggggagaggaggaagggaggaanagagggaggaaagagtaaggtacacatcangttaaaaggggcagaattangaataaaactaagcacttaatctaatctgatcaggaagaaactctgccctt

SEQ ID NO: 3530 - DNA, 519 bp, Homo sapiens
aaaataaataattcagtatgttttattatactcagttgtgcaaccatcaccactacagaacatttttaccaccccaaaaagaaaccgtatactgactagtgctcattccccctgtcccatccttagcagtcaccagtctgtactttctgtctccatggatttgcatattctggacacttcctaaaaatggaatcatgtaattcgtggcctttcgtatttggtttctttcactccgcatgttttcaaggttcatctatactgcagtatgtatgaatacttcattcctttttattgccaagtaacatcctactgtatgaatgaatgcacactctttatccattcattaactgatggacactttgggttgtttccccttttaggctattataagtaatgctatgaacatttgtgttttttgtgggattatatagctaggagtgaaattgctgggtcatagggtaactctatatgaccttttggtaaccttctgaggaactgctagattgttttccaaagcag

SEQ ID NO: 3531 - DNA, 379 bp, Homo sapiens
  misc_feature (1)...(379): n = g, a, c or t
aaaagctaggaatggggctggttatggtggctcgtgcctgtaatcccagcactttgggaggccagggcagaaggattgcttgagcccaggattttgagatcagcgtgggcaatgtagtgagaccccgcctcttaaaaaataaaataaaagctagggacagaagaatggactaaaattgaggaaggctgtgaatggaggctaaagatgaacataaagattcatctctgcaaagattggtttttgtgccccctgtctggtgaccatgacagatgacacctgctatcccantgctgcttcctgcanagcacggctgtggtcactcttcaacaaagcagtccaacaaccagcacacatttgattctcctttgagtttttgaca

SEQ ID NO: 3532 - DNA, 388 bp, Homo sapiens
  misc_feature (1)...(388): n = g, a, c or t
cctctgagccccaccatgggcagcttgtactcggagtacctgaaccccaacaaggtccaggaacactataattataccaaggagacgctggaaacgcaggagacgacctcccgccaggtggcctcggccttcatcgtcatcctctgttgcgccattgtggtggaaaaccttctggtgctcattgcggtggcccgaaacagcaagttccactcggcaatgtacctgtttctgggcaacctggccgcctccgatctactggcaggcgtggccttcgtagccaataccttgctctctggctctgtcacgctgaggctgacgcctgtgcagtggtttgcccgggagggctctgccttcatcacgctctcggnctctgtcttcagcctcctgg

SEQ ID NO: 3533 - DNA, 309 bp, Homo sapiens; identical to SEQ ID NO: 35
  misc_feature (1)...(309): n = g, a, c or t

SEQ ID NO: 3534 - DNA, 363 bp, Homo sapiens; identical to SEQ ID NO: 36
  misc_feature (1)...(363): n = g, a, c or t

SEQ ID NO: 3535 - DNA, 291 bp, Homo sapiens
cctggggcatctctgtactgaactccaacaaaaccaaggtccagggaagctgtgagggtgcccatccccacctgcttctctcattcccctatggacacctcagctttggattcatgcaggacctccagcagaaggttgtctacctgagctacatggcggtggagtacaatgtgtccttcccccacgcagcacagtggacattctcggctcagaatgcatcccttcgagatctccaagcacccctggggcagagcttcagttgcagtaactcgagcatcattctttcaccag

SEQ ID NO: 3536 - DNA, 110 bp, Homo sapiens
cctgcgcagattcaagagccttagatactggctttccaggcttcccagaaaaagtagctgcaactcgagcaaagcaggttacacccctgaacatacccataggaaagagg

SEQ ID NO: 3537 - DNA, 416 bp, Homo sapiens; identical to SEQ ID NO: 37
  misc_feature (1)...(416): n = g, a, c or t

SEQ ID NO: 3538 - DNA, 360 bp, Homo sapiens
aaaatatattagaaatgtaaaaattgtatatggggctcacattatatttctattggacagctctgtcctagagccaagctcggactgccaaagattggacatcctgtgactgcaagtttccagtgagcccttactcagcagcttgcttaggtggtctgtggttcatagaaacagagaggaggccaagcatgcgaaaaaggaacgggagaaaacagctctcagggactttaataactacagtctgtaacaaataagcagtgaatgtttgaatttggttggtggaaagctgggatgcaagtcatctctgcctattacgacaaaagcctatcgaccccagcagccagcacaggcaggctgcag

SEQ ID NO: 3539 - DNA, 122 bp, Homo sapiens
ccagaggctgcggtccgtcaagggcttgcctcgcttcagaatcagtaacatagatcttaagtgtaattgattaataagcagtgagttactgtagcttcctttagctctaccgaactcttttt

SEQ ID NO: 3540 - DNA, 271 bp, Homo sapiens
  misc_feature (1)...(271): n = g, a, c or t
naggtctcgaatagagctcttggaagtccctccaaccatggcctgggtctccttctacctactgcccttcattttctccacaggtctctgtgctctgcctgtgctgactcagcccccgtctacatctgccttactgggagcctcgatcaagctcacctgcaccctaagcagtgaacacaacacttacaccatcgatcggactttctgctgtttttgtttgtttctgtatcttgtctcaacttgtggtcagcctttctccctgcatcccagg

SEQ ID NO: 3541 - DNA, 253 bp, Homo sapiens; identical to SEQ ID NO: 38
  misc_feature (1)...(253): n = g, a, c or t

SEQ ID NO: 3542 - DNA, 138 bp, Homo sapiens
gctcctgccttgcacgttagagagccggtacatgcaggtgggaagctccacacggagaggcgcgccgcgcccgtgataaggttttacctggtacatcggcatggcggaaccaaagcaagagagggtggcgcgtgccaa

SEQ ID NO: 3543 - DNA, 232 bp, Homo sapiens
aaagtcttaggacaaaaacactacgttaagctcaggtacaaactgggtgacaaaaattaaataccgaatgcttttaatgatgcgttattggtaccctgtgacactgcttatagtttctttacttttgaattacagaagcctgtcctggaagacagttttttaacatgctggaaaatcgtccaacatcgattaatttagtactcatccacttttcattttagaaataaacagg

SEQ ID NO: 3544 - DNA, 218 bp, Homo sapiens
gtgctttgcatttaggacacagcccggagccgcagaaggtcagcaggagcacgtctggcaccttcagtaccaggctgggtgagagagcccgagaggggggccgggggggcagtcagggccctgcttcgctgcctgggcccttgtagatggccttctccaggccgtccaccacctccctgtattccaggaacgattggtagtgtgtgcactcaaagcag

SEQ ID NO: 3545 - DNA, 537 bp, Homo sapiens
  misc_feature (1)...(537): n = g, a, c or t
ctggtccccttcatcttccccaggcaagagggggtaacccgtcaggagctctgctaaaatgcagcccaggctccacatatcaatgggcatgccatacctggccccaaggatcacttctggagcccggtaaaaacgcgactggatgtacgtgtagacacgctgatgctcgtaacaactggagccaaaatcaattactttaataccgcttctaccctgctgctttaacaaaatgttctcgggcttaaggtcacagtgaattattctgtttttgtgcaaagcatccaagcactgcagaatcgagtgggcaaacttgcgaaccaaaggcagactgaagccctggaatttattcttcttgatgagctcatagaggttcatgctcagcagctcaaacgtcatgcanatgtggttgcggaaggtgaaattctccagcatatggatgacattcattgngttatccttgtcctgcttcccaggtgttccaggattnngatctcctccctgnttcccggggaagcgctttcattccgncctttttag

SEQ ID NO: 3546 - DNA, 367 bp, Homo sapiens
aaaagggacccaaggtcaggggcagaaatgggaggcagaggggaggcacccatctcacaccccacccctagggactaaagccgtagccaacagagcagtagtaatccgcgtcgtcttcaggctgcacgggactaatggtgaggacacaggcattgtgggcctcatccttggctgccgagaatcgatcggggatgtcagcaggccggtggtgatcctcctccgagcggtagtagaggagatatcgaggggcactgcctgcccgctgctggtaccaggacacaccgtagtccctgatggtgacgtgctgggggctgagcgtgcaggagagttgagccacttggcctgggaagaccagcagtgcatccag

SEQ ID NO: 3547 - DNA, 268 bp, Homo sapiens; identical to SEQ ID NO: 618

SEQ ID NO: 3548 - DNA, 178 bp, Homo sapiens; identical to SEQ ID NO: 39
  misc_feature (1)...(178): n = g, a, c or t

SEQ ID NO: 3549 - DNA, 194 bp, Homo sapiens
tgaggagcttctgggagatggacacagctatagtcctagagctattcattcatggctgaccagggccatgtacagccggcgctcgaagatgaaccctttgtggaacaccatggtcatcggaggctatgctgatggagagagcttcctcggttatgtggacatgcttggtgtagcctatgaagccccttcgctgg

SEQ ID NO: 3550 - DNA, 317 bp, Homo sapiens; identical to SEQ ID NO: 294

SEQ ID NO: 3551 - DNA, 156 bp, Homo sapiens; identical to SEQ ID NO: 40
  misc_feature (1)...(156): n = g, a, c or t

SEQ ID NO: 3552 - DNA, 287 bp, Homo sapiens; identical to SEQ ID NO: 41
  misc_feature (1)...(287): n = g, a, c or t

SEQ ID NO: 3553 - DNA, 264 bp, Homo sapiens
aaagaattcttcaaccccccaagggacagttatggtcctttgattctctgctgtggcagtaggtgtgcctcatgcccttccagtgcaatgcaagccctccagcctcaccccagagaggatcactgatgtcagcagcagcctgaggctgaatccaggttgaaagaagaataacttgaaaaaatatatttccacacacagaattttgtttttcttccaagttggttaagacatatattttgtttctttttttttttttttttaaaa

SEQ ID NO: 3554 - DNA, 272 bp, Homo sapiens; identical to SEQ ID NO: 42

SEQ ID NO: 3555 - DNA, 252 bp, Homo sapiens
  misc_feature (1)...(252): n = g, a, c or t
ggcttccacgcgggtgagccttcaggacttcaggtccagtctgcccatttataaataggaaagcagaggcattgaaacctctaggtcctangctgcttgaaggcatcaaagtgcctgactggtcctcagagcctggcaaagtattcagcttacaacatacatttcatgaatatttgtngaatgaataaataaacggacaanaaggccagacgtggtggctcacgcctgtaatnccagnacttttgggaggcc

SEQ ID NO: 3556 - DNA, 219 bp, Homo sapiens
  misc_feature (1)...(219): n = g, a, c or t
gtgcctactatgagaagggcgntgcctttgtccagactgagaagttcacattcaccgtgcctgccatgcccgcgctgacccctgccccgagcccagcttcctaacccaagacacacctccccaacctcagtcttcccatctgaacgatgggtcctgaggcacagctctgancacagaggtcccttctgccacctaccatgcaccatgttccttgccang

SEQ ID NO: 3557 - DNA, 262 bp, Homo sapiens
gaaaagtacaggacattcctctgctcctattgcccctgtttccgttcttttcacactgtctgtgggtgctgtgccctgttggaactctctttaacgtcttacgttggagccgctaaccttccccaggtgtttgtcttcattgctttcacagggaaagaattactcgtcccactgacgagttctatgtatgtccctgggaagctgcatgatgtggaacacgtgctcatcgatgtgggaactgggtactatgtagagaagacag

SEQ ID NO: 3558 - DNA, 288 bp, Homo sapiens
ctgcaccgtgtcattggagaggaacttcccatctgcatcctgaagctggcaggtcacaatcttcccatggtgactccactgtggggagaacttgagctcgctccgggtgaagacagacttgatggtcaaggaggtcgaggtgacagcagcctgcctcattggaaccccctctaggagccactgcaattggatcggatacccatagcaggagaaattcagcaagcaggtcagagtgacttcctgggactcttgaatttctggagggagctggatatgaggtggaaaagg

SEQ ID NO: 3559 - DNA, 533 bp, Homo sapiens; identical to SEQ ID NO: 43
  misc_feature (1)...(533): n = g, a, c or t

SEQ ID NO: 3560 - DNA, 514 bp, Homo sapiens
  misc_feature (1)...(514): n = g, a, c or t
ctggctggcggagcatgagcgccccagatcccaagcactgcaagtccagatgcaacgggagcctggctcaagggacgacaagatccagccggaaagtgtagaagtcacaccccaatggcgggatagcagcccctgtgtgtgagcacccctccatgccaggaggagggccagagatggatgactacatggagacgctgaaggatgaagaggacgccttgtgggagaatgtggagtgtaaccggcacatgctcagccgctatatcaaccctgccaagctcacgccctacctgcgtcagtgtaaggtcattgatgagcaggatgaagatgaagtgcttaatgcccctatgctgccatccaagatcaaccgagcaggccggctgttggacattctacataccaaggggcaaaaggggctatgtggtcttcttggagagcctagaattttattacccagaactgtacaaactggtgactgggaaagacccactcggagattctncaccattgtggtgga

SEQ ID NO: 3561 - DNA, 324 bp, Homo sapiens
ccaggtcagtaagtggaaaaaccccaggggacttctatgatagacggacaactaagcctgagtttttgagacctggtcctcgaaaaactgaagatacctacttcattagttctgcgggaaaacctacaccaggcactcaaggaaaaataaaattagtaaaagaatcttctctgtcacgacaatcaaaagatagtaacccttatgcaactttacctcgtgcaagcagcgtgatctcaactgccgaaggaactacacgaaggacaagcatccatgattttttgaccaaggacagtagactgcctatatcagttgattcaccaccag

SEQ ID NO: 3562 - DNA, 281 bp, Homo sapiens
ctggggcacagctccgcctctcctccagcccctcggtcccatgaggccaaacaatgaggacagaggggctgaggggtgtgtccagggcccagtcccacctcagcaggaaggtggcgtcagcactcgcagtcccagcctcacgccgcatcgcagtcccgggggatcttcacacagggagggtgagctggttaagaaggcgggtgatcctccccccggatgcttcgatacttagccatgtcttccggaaatactttagaaagttcttgaatcaacaggctttt

SEQ ID NO: 3563 - DNA, 388 bp, Homo sapiens
aaaggccacgtgaggaagatgctgcggcatgcggaagcatcagccaccgtggagtacgcatacaatgacaaagccattttggagcagaggaacatactgacggaagagctctatgggaacacatttcagctttacaagtcagcagatcacccaactctggacaaagtgttagaggtacagccagaaaaattagaacttattatggatgaaatgaaacagattctaactccaatggcccaaaaggaagctgtgattaagcactcattggtgcataaagtattcttggacttttttacctatgcaccccccaaactcagatcagaaatgattgaagccatccgcgaagcggtggtctacctggcacacacacacgatggcgccagagtgg

SEQ ID NO: 3564 - DNA, 194 bp, Homo sapiens
cctagcaggtgtgagtttggttcccactgcagccagcaagaagatgatgctgagccagattgccagcaagcaggccgagaatggcgagcgggcaggtagccctgatgtgctgaggtgctcgagtcagggtcaccgaaaagacagtgataagtcccggagccgcaaagatgatgacagcttgtctgaggacctgt

SEQ ID NO: 3565 - DNA, 221 bp, Homo sapiens
cctgtctctgaggggaggctgtgaccggattcttccccgacagagtcaccctgggattcctcagagcaagtgctccggtcgcattccagatcatccactggcaaaagcatcacttcttacacgtggttttcagggaagtacctaatgcagaacgcaagggtggggtggcaggagcgaggctgtacagatacacagaggtacactgtacaaggccggggagg

SEQ ID NO: 3566 - DNA, 512 bp, Homo sapiens
  misc_feature (1)...(512): n = g, a, c or t
aaaatttctatccattctgtcaggttctgttggtttatcagttccagtggtagtgtatactgaacaagagcatagaagatcttgaatatctgtttctggatgaggacagactgatcagactggtcagaaagaagctggataaaacgatcctttagaactggcagaaaatgctgcattgctgctaccaatggactccgctcctctggttttttatactcataatttttcacaagctgataaaggcaaagaagaattcctagccaacaagcactgttatcggactgaagataaaagccaattttgtccacaatggcagtccagcggcttggataatcatgtttgatgatgtgatgaatgcatgtagtaagctgtaccctgatgagctcaggagaatggataatggcttctacaatattttctcgaatacaatggcgatcttcttctnggaatagtataagggggatatatcccctggtgctgtttcttcgatcaggccaantctgtgttatcat

SEQ ID NO: 3567 - DNA, 254 bp, Homo sapiens
gttaacataagccattttaattccctgggaagtgggagagtgggtctcccattttccccaagcaccctttttggtaattgtgttctgtgggttggaaggaggtgaagggggacctgggagcgagctgttggtgggtgggaatagggatttggccccgagtggagcagccgcctgttaggagcccaacatggcgcctgaaaagcacatgatgcgaaagggaagagaggagaatccattccctgccagccaggcag

SEQ ID NO: 3568 - DNA, 487 bp, Homo sapiens
aaatctgtttttctaactgggggaaaagattcccacccaattcaaaacattgtgccatgtcaaacaaatagtctatcaaccccagacactggtttgaagaatgttaagacttgacagtggagctacattagtacacagcaccagaatgtatattaaggtgtggctttaggagcagtgggagggtaccagcagaaaggttagtatcatcagatagcatcttatacgagtaatatgcctgctatttgaagtgtaattgagaaggaaaattttagcgtgctcactgacctgcctgtagccccagtgacagctaggatgtgcattctccagccatcaagagactgagtcaagttgctccttaagtcagaacagcagactcagctctgacattctgattcgaatgacactgttcaggaatcggaatcctgtcgattagactggacagcttgtggcaagtgaatttgcctgtaacaagccagatttttacctc

SEQ ID NO: 3569 - DNA, 532 bp, Homo sapiens
  misc_feature (1)...(532): n = g, a, c or t
agaatacaagtgtggtaaatgccatgtttgtactttatctaacatcttctctttcagtagtcttgttttttttatatcatgtgattgtttgtgtgtcccctttcctcttctttgcttaacacaattatcttgtgttaaggatctcaaagatttcatgagacaagctggggaagtaacgtttgcggatgcacaccgacctaaattaaatgaaggggtggttgagtttgcctcttatggtgacttaaagaatgctattgaaaaactttctggaaaggaaataaatgggagaaaaataaaattaattgaaggcagcaaaaggcacagtaggtcaagaagcaggtctcgatcccggaccagaagttcctctaggtctcgtagccgatcccgttcccgtagtcgcaaatcttacagccggtcaagaagcaggagcangagccggaccggacaagtcccgttctgttagtaggtctcccgtgcctgagaaganccagaaacgtggttcttcaagtagatctaagtctccancattggg

SEQ ID NO: 3570 - DNA, 509 bp, Homo sapiens
  misc_feature (1)...(509): n = g, a, c or t
aaaccttaagaaccacataatactatataatgcttttctgtacaaatctcaagaaacactttcattcattaaaacatcatgaaaatccttaaatgtgttaaatggaaaaaaatgaaaccatgaacaaaaaagctatacatgtaggtgcatatttatctcctcctgagttgggagaaatctttctaagcatagaaacaatggtagcaaaagagaagaatagatttggctggattaacaataaaaaatttctgccagaaatatgaaaattcaatttagacaaaattcaatataaacaaaattaatatagacaaaggtggtaaacaggtggttctcagagaagataaatacatgattatttaacataaaaagaaatgttcaatgtttctagaagacaaataattacaaacctaaacaaattgtatatttgttagattggcataaattataataatccaacattgagttangtggaatataaattggtaaaatatttctggaagacaatttgg

SEQ ID NO: 3571 - DNA, 396 bp, Homo sapiens
cctccagcgtccgggccactcgctcccagcagcacacacccgtcctctctagctctcagcccctccggaagaagcctcgaatgggcttctgaggacacaaggtgggctgccctcaagccccagagagcccctcatccttcctctgggaccagatgtgccttccacagttgaaacttgagaagcagagctcgccaccttctggaggccactgtgatgatgagccaagcaatttggagccaagttgaagggacagggcaacaaaatacagtagtagtttcttttgtattttgtatattcgcctgaagatcatcccgcaaggcaggctggaggtgccggtgggcctgtgttgctgggattttagtctgtgctgggaggcagggctccgctgcgtctcag

SEQ ID NO: 3572 - DNA, 162 bp, Homo sapiens
ccagcctggatctcctcaagtccccaagattcacacctgactctgaaatctgaagacctcgagcagatgatgccaacctctggagcaatgttgcttaggatgtgtgcatgtgtggaagtgtcactggcatgtatacacacacacacacacacacacacttac

SEQ ID NO: 3573 - DNA, 309 bp, Homo sapiens
aaaatcaagtctgttttgttttgacactaaattggtgagaattgaatgctgtcaacgttaaatatgaacataatttcatatcttctaggaaagtgctttaagtcctttttgtaagcttgggaatgtatccacggaaaggatttttcatagacggaatttccagaagtgaatcataactactgttagagcataagcatgcatgattgtgctgtgtagatcagttttgttgaaagtttagattgttgtgtttgtcaattataatttaatgtttcagtttttatatgaaatgttgtaaatgtataccttttt

SEQ ID NO: 3574 - DNA, 174 bp, Homo sapiens
ccacgtgcaggggcaggccctggcccgccatgagcagaagtggagtggatcttcaaatcccactttgtcctcctggacggatcacaggcgccgtaagcctggcgtttgagcacttggaaaattcctctggcaagccaagcccttcctttcccgtagctctctggttgtttcagg

SEQ ID NO: 3575 - DNA, 221 bp, Homo sapiens
ccaggattgagtcctatgaaggaagggaaaagaaaggcatatctgatgtcaggaggactttctgtttgtttgtcacctttgacctcttattcgtaacattactgtggataatagagttaaatgtgaatggaggcattgagaacacattagagaaggaggtgatgcagtatgactactattcttcatattttgatatatttcttctggcagtttttcgattt

SEQ ID NO: 3576 - DNA, 303 bp, Homo sapiens
  misc_feature (1)...(303): n = g, a, c or t
ccatggtgtaggcagtgcaatgtcttcgagtgagagtgaaggtggtaactcattgcatggattctagagttctgtttattctaatccaagttcttccacttaaaaacaatgttcttcctctcattgagtctcattcctcatctataggatgggaataagagcatgtacctggcaggttgttgtaaggattaaatggtgtaaaaaaatgtcaagtgcttgcaactttgaataccaaacttgagtgaaagctcaataaattgttacccaaaaaaaaaaaaaaaaaaaaangcccttcccgggggg

SEQ ID NO: 3577 - DNA, 531 bp, Homo sapiens
  misc_feature (1)...(531): n = g, a, c or t
aaaaaggtaattttcagcattttggcacctaaaagggaaactttcatctgcttacacaggccagaagcaaagacaaagattgcatgttgttcttacagatgacttaaatcatctctttgatgataaaaatatttttaagccgtgaaagttatgagatattctgggtaagcctgattatcaaagaataccacaaatagctttggagatcgtgtattgtttgtcactgagtcaaagagatctgtgggattgtgaggattcttgggtggaggggtgactaatcctgcacgtccctttgtgaagactccagtaagtactcgcacaacgtacatgtgctttctcccattgctgtctggcttggagtaggtgtccttggcagaataactggcatccacagcaaaataggttccttttccataggatacagcatttttcccacacaacttctattaaagccgtgctgattgacatatggcactgagtctgcatctgtcccatggaagaggagtctctcattattcntatggtcattct

SEQ ID NO: 3578 - DNA, 479 bp, Homo sapiens
  misc_feature (1)...(479): n = g, a, c or t
ctgggcccggtgccagcagccctgcccctaatctgcctgcccgggggctcctgagggagacaccctctccccagggctggaggctggacttcagcaggacccactgcagcccttaccccctttcccctgctgtactgtcaggaccccttcccacacaggaaccaccggcccaggctctagctagtcatgacagttccccagtgccaggcactgcaggaggctctgagaggggtcggtggcctctgtctcaactcagctcgctcagcggccctgggaagccaggggaggttctggagccaagctccagccagacccatcccatcagcattgctgcagctccccaagggctctgctgcgtgcttggaagtgaaaattgctgatggagggggtgggtccgacgagaagagaggaagggacagagtccagccacaggtggttctgggcattctccaactcctccanacctctctgaggacctc

SEQ ID NO: 3579 - DNA, 276 bp, Homo sapiens
aaaaaagagagctacctgtatgtcatgcatcccatccaaaacatgtcacaatattttatatatattacatagtatttacaacaaagccccttccatagtatttacaataaagctccttccaaaatcaccaagaggcttctttccagaatagcaagtgctttcaagttactgtaccaagtattctcactaatacagtagtgtatctaaatgggggaggtgggggagtatcaactgcctaatattagttactgaattttcagattagatccctagttt

SEQ ID NO: 3580 - DNA, 273 bp, Homo sapiens
aaagttttattatgaaaacacacagaatcaaatgtgttatccatgtatttgcaacagcagagaaacagtgacagtggaccatccccataggggacacttatcctttggctaaactaatataaataatggaaatgacacctaatacaataacacggcacataaaaaagattaaattaagagaagggacaggaactgcggagaggagtcctgggtatggaggagatgtgtctcatggagaagcatccgggctcaagtgacctttcctgaagactt

SEQ ID NO: 3581 - DNA, 225 bp, Homo sapiens
  misc_feature (1)...(225): n = g, a, c or t
ctggagcagcttgagttagaacggaagcaagcacttgagcagtacgaggaagttaaaaagaagctggagatggcaactaataagaccaaganctggaaggacaaagtggcccatcattgaaggattaattccgactgatagaaccaggttcaaagaaccctcacctgatcactaactggggacctgcagcttttcactgaggcagaacttgaagagagagaagaa

SEQ ID NO: 3582 - DNA, 486 bp, Homo sapiens
aaactctccagagacactactttgaagtgctggaggtgggttttgaaagacaggggtgcataggacctctccgacatcctttcagaatatttcaggtaccaagaagaggtagcaagctcctaactagcttatggaactacctcattctagcatcagggcattctccacttgcccaaaggctctctttgcaataaacatggtttgaaaataactttagggtgcaacaggcaaacaatcaatcatatatacaaataacatgtgtctatcacaaaatttacagaaggtaagaaaacgtgttgttgtgtttccttacaaagtccatattaataaacggaagcagcattttcagctatgaaactgaagcacaaagaaagctgaagaaatccacctcttttattaaaattcttgtaaagttcaattccataaagaaattctagtgtctcatcaagattttcacaaaatatatagaaaactgttcatgtattt

SEQ ID NO: 3583 - DNA, 175 bp, Homo sapiens
ccagacacacacgcccaggcgggagctctcactcttttgggaggggtcattcccaggggaccacagcctctggggaaacatctggggtgggggcagggttgcgtgggttgacaatggcctccttggtctgcgccatgtccgagatgaccccatcagtaatgatgaacagcaccga

SEQ ID NO: 3584 - DNA, 421 bp, Homo sapiens
  misc_feature (1)...(421): n = g, a, c or t
ccacngangacttggggagatacgtaatacaaataaagaccttaaccaatcccaacactttcagaaaaactttcacctgtggggaagtgggggcatgtgactggagagcaatgaacggaantttacactggatctgaattgttactaaaaaagtaactgacacgcacacacaagtggccttcctggcggagcatcaacaaagccaagaggtgcgagtacccaagactcccagagttgttccacccctggggctagctgtatttatgccctcgctcaaagaccagctttttcaaacactaatacctacctgccctnggtggtaacaacactgtaangngctgctcattccactgtaggattttacatttttctcaccatggcacagcctctttttanttcatacccaatagtctagcctggg

SEQ ID NO: 3585 - DNA, 195 bp, Homo sapiens
ctgcttcatcagatcaattctacccgagactttgaaagcatccgattggctcatgaccacttcctgagcaatttgctggctcaatcctttatcctattgaaacctgtgtttcactgcctgaatgaaatcctagatctctgtcacagtttttgttcgctggtcagtcagaacctaggcccactggatgagcgtgga

SEQ ID NO: 3586 - DNA, 429 bp, Homo sapiens
  misc_feature (1)...(429): n = g, a, c or t
aaagcaaaccgtgccccttggcttgccattctttcagcagcacatgccacgttctaagcagatgggcttccgtgatcccgttttctagtttggggtaactgagtcttgaatgctttactagtccggcaatctttggacttaggcttctgccctttgagactcacatgactttctggtttggggtctggtcatttccctttcaatttttgaatctccttctctgttcagttggcttggcaaagtaccctctgttctcatgtcactaattcctgctctaggtcatctttcctttgtgcaagcccacattcccaccatcctgtgaactttgttgtacttggtgttgggcaactgggtgagtgttgtgacaggctcagacctgaatccttnctcaggagcaattnggagaacncaaaattacctggccgggcn

SEQ ID NO: 3587 - DNA, 244 bp, Homo sapiens
aaataagacaatattatcacattaaccaccaaaaaataactagtataacaattcacctggatgatttgcagactatcatttctgtgttctccccatcaaatacaatgaaaagctgatctaaagatatttacaactggagtggaatacacatttttttgaggctagttatatcatggagaatcacacttaatgagatctgactccatcactgtaccaaagaagtcaaggagtcagacgtaaacag

SEQ ID NO: 3588 - DNA, 536 bp, Homo sapiens
  misc_feature (1)...(536): n = g, a, c or t
aaaatatgcatattctaaaagctcttagcagagttgctgttcagaaaggctgggtgagtgtctgtcttcctagtaacagggcagaggtcagcctgtcctaccacactctcctactgcactctagccagtgttagtaacgtgcttctggtcacattttcacatgaaggctattaggagctattgacaaagtttaagtagacaaatcacataaccagatttgcatttttgattccggcttcagagcctaatagctctattagtcttatgtggcccctaggaggcattcaagataatggtgacactaagcaaaggagggcaagttgaggtggagtgtctgaacaagcaggtctctaacctgcagctatggagaagcaattcagtgtttcctgtggcgggtggagggcatacttacccagcagagcatgtgagactctttgatatgcaccttcatgtattatcttgttcaanttctctgaggttgggatcattattatttcccattttgcagatgagaaaattgagcananaaaggtcac

SEQ ID NO: 3589 - DNA, 332 bp, Homo sapiens; identical to SEQ ID NO: 44

SEQ ID NO: 3590 - DNA, 529 bp, Homo sapiens; identical to SEQ ID NO: 297
  misc_feature (1)...(529): n = g, a, c or t

SEQ ID NO: 3591 - DNA, 253 bp, Homo sapiens
aaaagcacaaagtgaccttcagccccggagctctccctgcttgccttaaccccttgggcggcgccaggagttacacgagacctctgtcccggagccctgcgctcactcttccctccgccctcactccccagacactgccgaggcgacccctcccagcgtcacctcgaagcccagccaggagtagggggacagcacgtcatagaagagctccacggtgcgcggcaggggccccatgctgcaggctccggaagag

SEQ ID NO: 3592 - DNA, 394 bp, Homo sapiens
ccttagccctgctcctctcaattccatcctgtagagaacaggagtcaggagccgctggcaggagacagcatgtcacccaggactctgccggtgcagaatatgaacaatgccatgttcttgcagaaaacgcttagcctgagtttcataggaggtaatcaccagacaactgcagaatgtggaacactgagcaggacaactgacctgtctccttcacatagtccttatcaccacaaatcacacaacaaaaaggagaagagatattttgggttcaaaaaaagtaaaaagataatgtagctgcatttctttagttattttgagccccaaatatttcctcatctttttgttgttgtcatggatggtggtgacatggacttgtttatagaggacaggtcag

SEQ ID NO: 3593 - DNA, 451 bp, Homo sapiens
  misc_feature (1)...(451): n = g, a, c or t
aaagtttgattacatcagctataggagtaaagtgctaacttacaaagcttacagtttgtgacaccagtgataatgcatgcatactgctattttcaccaccaactggtgaaacaatgaaaagacagtttacttttactgagataccgaaatgagtcaaagactatattagccaatataattcctttgtttttagtgtgaaatactatggtagggcctaattaaaaataaaaacaatatggagaacagtaaaacagtcatcaagtgactctaagcttgtatttactctaagcttgtattaagcttgtattgactctactgcctcttgtattttttttttttaatttctattcagggatccaanaattttagtaattattaactgagcagcagattgccactggactgttttaagatttactatcaccaggtcttacatanatacataaatttt

SEQ ID NO: 3594 - DNA, 411 bp, Homo sapiens
cctcaggaaactgacaatcacggcagaaggcgaaggggaagcaggcacgtccggaagcgctcctccagcagggacagctcgctgatgaggtcggtgatggcgttggtaaaggcttcctgggggctgtagtccggcgtggtctgcactcggatgatgatcttgtgctccaaggggtgggggactttgtagccagcaaatagcacttgcgggtcttttaggagttgtgatttaatgatgtttcccagtgtgtggtcttctttgttgatggtgaataaacaggcattgggtaccttggtgtccttgttaatggtgatcttctcgccctcgaagagcaagaacgactcgaagctggaggggcgttcatgctcccgccgccgttgcgtccagaccccaagtgtccgccaccgccgc

SEQ ID NO: 3595 - DNA, 349 bp, Homo sapiens
ccatcctggattggcttcatcagaggaggctgaaggccggatgaggggccccagtgttggagcctcaggaagaaccagcaaaagacagtccaacgagacttaccgagatgctgttcgaagagtcatgtttgctcgatataaagaactcgattaagaaaggagacaagttccatgggatacaacctccctcttgttttgtttgtctctccttttcttttgttactgttcttgctgctagaacttttttacctgcccgggcggccaagggcgaattccagcacactgcggccgttactagtggatccgagctcggtaccaagcttggcgtaatcatggtcatagctgtttt

SEQ ID NO: 3596 - DNA, 345 bp, Homo sapiens; identical to SEQ ID NO: 298
  misc_feature (1)...(345): n = g, a, c or t

SEQ ID NO: 3597 - DNA, 305 bp, Homo sapiens
ccaggatggtctcgatctcttgacctcgtgatctgcccgcctcagtctcccaaagtgctgggattataggcgtgagccaccatgcccagcgtcagaacatttagtttttgatagtgaggtcggccagccttcaggacagaatggggcaaagggtttgagcatcattctgagactccaacatgacagccacaggcaccgaccttgagccggtccagtgcagtgcagtgcagcccataagccccttggcttccactagaccaggacacctccctctcacccagcctccccttgctctcaccctttgg

SEQ ID NO: 3598 - DNA, 532 bp, Homo sapiens
ctgctcgacagcatatggcaccagcccattttcaatttgctgagcatcggccaaagcctgtatgcgaaagccaaggagctggacagagtgaaggaaattcaggagcagctcttccatatcaagaagctgttgaagacctgtaggtttgctaacagtgcattaaaggagttcgagcaggtgccgggacacttgactgatgagctccacctgttctcccttgaggacctggtcaggatcaagaaagggctgctggcacccttactcaaggacattctgaaagcttcccttgcacatgtggctggctgtgagctgtgtcaaggaaagggctttatttgtgaattttgccagaatacgactgtcatcttcccatttcagacagcaacatgtagaagatgttcagcgtgcagggcttgctttcacaaacagtgcttccagtcctccgatgcccccggtgtgcgaggatcacagcgaggagaaaacttctggaaagtgtggcctctgcagcaacatgatgcccctgagtactgtgaaa

SEQ ID NO: 3599 - DNA, 272 bp, Homo sapiens
ccagcagaatctgtgatcttgaggtggctgcgcaggccgccagcgcccccagactggtcggagatctcgtacgcgccagtcactagcaggtccttgtgaatctcctcacggaggcacttgcgagagttaatgggcagatggaaggagatggcaaggaccaatctggggccgagcaggaacaaaagcagcaacgctaacggaaaagggccgcgccgggctggtgggccagacaaaccagacatggtgctggagactcgttcgccaccgaaggc

SEQ ID NO: 3600 - DNA, 508 bp, Homo sapiens
  misc_feature (1)...(508): n = g, a, c or t
ccaaggtgtcggtgctgaacgtggcggtcctggagaacccgagccctttccacagccccttccggttcgagatcagcttcgagtgcagtgaagccctggcggacgacctggagtggaagatcatttatgttggctcggctgagagtgaggaatttgatcagatcctagactcggtgctggtgggccctgtgccagcagggagacacatgtttgtctttcaggccgacgcccccaacccatccctcatcccagagactgatgctgtgggtgtgactgtggtcctcatcacctgcacctaccatggacaggagttcatccgagtgggctactacgtcaacaacgagtacctcaaccctgagctgcgtgagaacccgcccatgaagccagatttctcccagctccagcgggaacatcttggcctcgaacccccgggtgacccgcttncatatcaactgggacaacaacatggacaggctggaggccatanagacccaggacccctcctggg

SEQ ID NO: 3601 - DNA, 342 bp, Homo sapiens
atttcctacagtgcgaaacttgtcattctagatgttctgttgccagtatcaaaaccggcttccaggctgtcacgggcaagcgagcacagctccgtgccaaagctaactaatttgctaatcactgattttgcaaagcttgttgtggagatgtggctggacaggtttgccatcagagtggatataccgttgtattaaaaacaagataaaaaagctgccaagatttttggcgagtggttggtctgaagtccttgcaagacgctgatgctcaagctgttgacatactcattgcctactttaacacctgtcagagaaacgtgatatggggtaaggaggtgctttttt

SEQ ID NO: 3602 - DNA, 272 bp, Homo sapiens
ctgcgaggagctcactgcggtcctaaccccgccgcagctcctcggacgcaggtttaacttctttattcaacaaaaatgcggattcagaaaagcacccaggaaggttgaacctcgaagatcagacccagggacaagtggtgaagcatacaagagaagtgctttgattcctcctgtggaagaaacagtcttttatccttctccctatcctataaggagtctcataaaacctttattttttactgttgggtttacaggctgtgcatttggatcag

SEQ ID NO: 3603 - DNA, 545 bp, Homo sapiens
  misc_feature (1)...(545): n = g, a, c or t
aaaatgttttccacatcaactacttangaagaagttacagcaatatgatcttccactgctcaggaagacagagtgaacttggatatgatgaatattaaaaacaaacatacagagcacctgggtctggacttgtgggctaaagaaatgcttcctgaatttgtccgaggtgatgtgttgagcaaccgtgccacagttcaccagcagtgacactctagttcttcagtatattcctgttgtgaacctatttctttgaatttaatcatctgggatgattgctgcagtgtgagtctttagcattttgaaaatcccacagaagagattaagaaggttcctcttcccagaagacactcatataaagcatgcttctatagggttaactgttcagaaattgtaaggtgcatggtcatcaccaggtaagcagctctacaggggcccatggcccatactcatccttgcgtgcccaggggagccagcgtgcatatgaacagtanggaagtggcataaccacgcanaagggctcaggacaacttggcatttttgttgtg

SEQ ID NO: 3604 - DNA, 277 bp, Homo sapiens
ctggacttgcacttgtttgcctgactgctgtccccctaccacagtaccagtctcgtgggctggtaaaggcccctggcaagagctcgttcacgatgtttgtggatctagggatctaccagcctggaggcagtgggaacagcatccccatcacaggtgaggacaggaggacagacctgctgtgaggccagggtccaggggcagcctggaggggagcacagtggtcttgagacgcagcctcacaaagcatagccacaggacctctcccttgggccctagc

SEQ ID NO: 3605 - DNA, 287 bp, Homo sapiens
aaagtagtcttccgtggttgggaagcctcacctcccaagaccagagtcagttggagctggttgttgttggaagggagtgggttggggaactggggtgggggcagggagatccccccgctctgctggcggtcctaggtggagaagaactgcacttcacagagtctggggtttggtgggaaggggatgaggcaggagcagcaagctggggagatgggacccacctcagtccccagcttcattttcttctaatgtttccccactggtggcattctctgcagtcttggagg

SEQ ID NO: 3606 - DNA, 396 bp, Homo sapiens
ccattgggagctcttccacattggctcctgtgtcctttgaccttcctccatcttcttctctttttattttttagcactgccttaatttcggcgctgaggtgggtactgcagagaaaagcaaacactccagaacccatgcactggatccaggagtgggtggtagaaagggatgtggagggaggggtctgagctctaatactaaagacagagacttaggagactgtgaaggggtgtttatggaaagtcagggaattttacctccccgaggagaggaatcctgtgtcatccacctttgtgtcccctcccctgggctcacaacagtgaaccatggggtgaacaaggaccattccactgcctctcccaggttctccaactctgtggcttactatggcctgg

SEQ ID NO: 3607 - DNA, 182 bp, Homo sapiens; identical to SEQ ID NO: 299
  misc_feature (1)...(182): n = g, a, c or t

SEQ ID NO: 3608 - DNA, 140 bp, Homo sapiens
cttacggcctgccccgaggccacaacccgacccaggccacgccatccgatccagaccctttctcgcagactcggtccccagaaccacactctgcttcactgactgtcctgcccccatcccgggccgcaccagcagcatgg

SEQ ID NO: 3609 - DNA, 425 bp, Homo sapiens
ccatgtcggagctgaagcttaccagctctctaaagcatttgctagggaatcatgcagagggtccaaaatattttttagaaaagcattcatctgtcccgggatagaagtagaggaagctggtaggcaggcgctagaccctaaagaaggactgctgagccagttcttaagcctgtggtcctgtcggtgaggaaagtgagagcagtccagagcaggtgaaaagagcagagctcattcctgcagtggctcttttgcctaaagcagcattcctcaaacttctcactcgaagcattaagttacggtgagatgctaacacacgctttagacttaagtcaaaatttactgtgaagccacagcaaaccatggcttcacagatgaattagttgctacacaaataagttcgatacataagtacagtaattgctttt

SEQ ID NO: 3610 - DNA, 195 bp, Homo sapiens
aaaacagcctgggtaggaaaattagaagcaagctggatgcagtggctcatgcctgtaatcccaacacttttgggaggtccaggcaggaggatcacttgggcccaggaggtcaagcctgcagcgagctgagatcacaccactgcactccagcctggggtgatagaacaagaccctgtctcaaaaaaaaaaaaaacc

SEQ ID NO: 3611 - DNA, 350 bp, Homo sapiens
cctgtctcagtcagacctctttgctcaatctcatttacacaatgcacaacaatggaggggatcattggagaagtctgggacacaaagtctgccagcattccctctccaatcttgacaggtgttcctatcagggtaggaatgcagggaaggggacagcggtcccgacattctggatgagagaccacacgacagtctcgacacttcagagataatttgccaaattttatccgctttccacatggaacacaggattcaggtttaataaccgtcttagaaacaaagtcatgcaggcgcatccctccattactctgtggcgtgcccacactgtctgtctcagttcttggctccag

SEQ ID NO: 3612 - DNA, 391 bp, Homo sapiens; identical to SEQ ID NO: 45
  misc_feature (1)...(391): n = g, a, c or t

SEQ ID NO: 3613 - DNA, 311 bp, Homo sapiens
aaaaaaatgaaacaaacacaaggcattgctgcagtgactgggacatgctgatgacccagagtgactatgagaaggaacggtgacaagtgtttggatttaatggtctcaccaaggaatgttgggttagaaaagtaaaataactcaacaccaaacatgaaaaagtatgcctggcatccccaaactttatgccattatttttaggttcataatatgaacaactaagtgataaaacctttagattccatattgtgctcagaagattgcgtttcttctgcagatctctagtaaaaaaagatctcttccatattcag

SEQ ID NO: 3614 - DNA, 222 bp, Homo sapiens
aaaggctcacctgattaggtcatgctcacccacaaaaatctcctttttgtaacgccaaatgtggtcaacacacaatccaatcacagtagtgattattccatcatatttgcaggttctacccacagtcaaagcaaatgagttttagaaggcatgtacaacaggaggtaataggtattcttaggggccatcctcaaattttatttgccatattcacccctctgg

SEQ ID NO: 3615 - DNA, 346 bp, Homo sapiens
ccaggttctttacatgtgcttgttttgttcacagcgggccaatccgagcctacatccttgcccacaaggatgccatccagctctggaggacgctcatgggacccaccagagtgttccgagcacgccatgtggccccagattctatccgtgggagtttcggcctcactgacacccgcaacaccacccatggttcggactctgtggtttcagccagcagagagattgcagccttcttccctgacttcagtgaacagcgctggtatgaggaggaagagccccagttgcgctgtggccctgtgtgctatagcccagagggaggtgtccactatgtagctggaacaggagg

SEQ ID NO: 3616 - DNA, 469 bp, Homo sapiens
  misc_feature (1)...(469): n = g, a, c or t
ccacggaagtgggaaagtgaaggcaagaagtgtgtcctgaataaagcttggctggttttcagacaaaaggtcttctgggtaataaatgttgtctggagcagccctcaggagaagaggtaagagcctgtatgggatggtgtcgctgccaacatccttccctgtgatcccacttactcttccctggctgatgagatacttggggttgtgattcatgatgattgaatttccttttgaggatttgtctttgggcagatgaaggaggctcagagaaaagcccctccctgcatgtgctggcccaagtgacctcattttgaagtcaagtggcaaaccagcggcatattttagggtgccatttgctgaatgctttcagcatccctaatccngtcaattgttcccatttgtttcctgaatagcaaacacttccttgaaattcttctcaaactcagcctccagtcttaaatccatttgg

SEQ ID NO: 3617 - DNA, 535 bp, Homo sapiens
  misc_feature (1)...(535): n = g, a, c or t
ccaaccgctcggacgggactttcttggtgcggcagagggtgaaggatgcagcagaatttgccatcagcattaaatataacgtcgaggtcaagcacattaaaatcatgacagcagaaggactgtaccggatcacagagaaaaaggctttccgggggcttacggagctggtggagttttaccagcagaactctctaaaggattgcttcaagtctctggacaccaccttgcagttccccttcaaggagcctgaaaagagaaccatcagcaggccagcagtgggaagcacaaagtattttggcacagccaaagcccgctatgacttctgcgcccgagaccgatcagagctgtcgctcaaggagggtgacatcatcaagatccttaacaagaagggacagcaaggctggtggcgaggggagatctatggccgggttggctggttccctgccactacgtggaggaagattattctgaatactgctgagccctggtgccttggcagagagacgagaaactccagctctgagcccgcgtgggn

SEQ ID NO: 3618 - DNA, 256 bp, Homo sapiens
ccatgcccagggccacagccgagggcacaagcgtgtagtagcgctcccagtagttggtggagacaaagagggcgtagatgcccacagcgaggaacatcatccacttcgttccaaaaaacctgatgagcacaggtgtgtagagcagggcggcgatgggagtcacgttgatgcccatcagcattttgctgtcgatgtcgggcagccccatgttgccatacttcacctcgcggtaggtctcgtcgtagtgcaggatcag

SEQ ID NO: 3619 - DNA, 235 bp, Homo sapiens; identical to SEQ ID NO: 3257

SEQ ID NO: 3620 - DNA, 324 bp, Homo sapiens
aaaataaaactttatgaaagaaaaaacttatatgttacagagaagctaaagcacctgtaatgctaccagaaagttatcatttatgatatatttcatgcacagccctaatttctcggtgtaatatttctgatactttaagtgatcgtttattttaattaccataatttctaatgcactgttttatccttagctttgtttgttattatgttttggaatgaaatttggtcagataatatgattacggtgagttctgtaacagctactggtaatatttttgtaaatcacgtgaaagcattggagcaactgtcttggaaaatgctcttt

SEQ ID NO: 3621 - DNA, 363 bp, Homo sapiens
  misc_feature (1)...(363): n = g, a, c or t
cctagattntcatcaaaaatggttctagcaagttcttacaaggaataactaaataatatgtaggttctaaagaataatgtaataattaggtcaattagatttatctattttccccccttggtagtaccttttaattccgtattttggaaaaatttctcacttccaaggncgtgaaacttaatgatcttccaaagggctgaaattcaacatattcttttataaaaaanaactttcttcanccttcctgagaaaaccangatntacaatttttaacaattttatntgattttagaatatccacttacnggccagaccccatgggtcacatcttgtnatcccaaccttttggangcttgaagtggg

SEQ ID NO: 3622 - DNA, 478 bp, Homo sapiens; identical to SEQ ID NO: 46
  misc_feature (1)...(478): n = g, a, c or t

SEQ ID NO: 3623 - DNA, 188 bp, Homo sapiens
  misc_feature (1)...(188): n = g, a, c or t
cctctttcacatcaatatccattccccagctntggaaggggtgggcatcanggctggtgaatgctacacaattaaagccaagaagatttaccatagcacttaatgaacatactagccatttgtggagtctccactttgtggaggcccttcaantactaaaaggatctcagcanggntaaatgacttgt

SEQ ID NO: 3624 - DNA, 533 bp, Homo sapiens
  misc_feature (1)...(533): n = g, a, c or t
attgttatccgctcacaattccacacaacatacgagccggaagcataaagtgtaaagcctggggtgcctaatgagtgagctaactcacattaattgcgttgcgctcactgcccgctttccagtcgggaaacctgtcgtgccagctgcattaatgaatcggccaacgcgcggggagaggcggtttgcgtattgggcgctcttccgcttcctcgctcactgactcgctgcgctcggtcgttcngctgcggcgagcggtatcagctcactcaaaggcggtaatacggttatccacagaatcaggggataacgcaggaaagaacatgtgagcaaaaggccagcaaaaggccaggaaccgtaaaaagccgcgttgctggcgtttttccataggctccgcccccctgacgagcatcacaaaaatcgacgctcaagtcagaggtggcgaaacccgacaggactataaagataccaggcgtttccccctgggaagctccctctgcgctcttctgtttcgaccctgcgcttaccggatccng

SEQ ID NO: 3625 - DNA, 534 bp, Homo sapiens
  misc_feature (1)...(534): n = g, a, c or t
cctataccattcaaggacagtatgccattccacagccagatttgaccaagctgcaccagttggcaatgcaacagtctcattttcccatgacgcatggcaacaccggattcagtggcattgaatccagctctccagaggtgaaaggctattgggcaggtttggatgcatctgctcagactacttctcatgaactcaccattccaaacgatttgattggctgcataatcgggcgtcaaggcgccaaaatcaatgagatccgtcagatgtctggggcgcagatcaaaattgcgaacccagtggaaggatctactgataggcaggttaccatcactggatctgctgccagcattagcctggctcaatatctaatcaatgtcaggctttcctcggagacgggtggcatggggagcagctagaacaatgcagattcatccataatccctttctgctgttcaccacccccatgatccatctgtgtatttctgaacagtcagcgattccaggtttacctcggccgcgacccnctaanggcga

SEQ ID NO: 3626 - DNA, 329 bp, Homo sapiens
ccaactcgcatattgttagtgcaggaggggatgggaagattggcattcataagattcacagcaccttcactgtcaagtactcggctcatgaacaggaggtgaactgtgtggattgcaaagggggcatcattgtgagtggctccagggacaggacggccaaggtgtggcctttggcctcaggccggctggggcagtgcttacacaccatccagactgaagaccgagtctggtccattgctatcagcccattactcagctcttttgtgacagggacggcttgttgcgggcacttctcacccctgagaatctgggacctcaacagtgggcag

SEQ ID NO: 3627 - DNA, 440 bp, Homo sapiens; identical to SEQ ID NO: 300

SEQ ID NO: 3628 - DNA, 244 bp, Homo sapiens; identical to SEQ ID NO: 47
  misc_feature (1)...(244): n = g, a, c or t

SEQ ID NO: 3629 - DNA, 343 bp, Homo sapiens; identical to SEQ ID NO: 48
  misc_feature (1)...(343): n = g, a, c or t

SEQ ID NO: 3630 - DNA, 537 bp, Homo sapiens
aaagagaaacttaaatcctgttgtattctttcaacacaagcaatgatacttctcagagtctgctcaaaagctcagctctgtggactccgtgacaaaatgtacgcgtccactgccgaccctcttggtttctgaaaccaacctttcttcctgctctcctctttaagagcaaaccccaacatgtataaggtcacagcaagtggtagccaggaaaagctgtgggacccctcatttgagtcacatccatatggcatggagaaagaaaacctctctgccagaaggaactgaactctggaagtcctaaggaaggtcaccatgctcagcagataggaaagcattgccaagggctgtccctcaagagcttagttttcttagggagaccagaaagacatcagatcctgactgccctgttttgctcaagttctgaaatgagtggcatgatgaagagctggtggagctgagggaaagagtcaaccatgtggggtggggtagtgaggaaggtgtatgaggaaacaaactgggccctgacgaaacagcggg

SEQ ID NO: 3631 - DNA, 137 bp, Homo sapiens
ccagtactttcttaatctctttaggggcagctaaaggaaattctgaatatgtgactcttagatccaaccaccatctctcaagaagaaatactactaccaccatttctgccctcaaaactcactaccgtgactatggg

SEQ ID NO: 3632 - DNA, 335 bp, Homo sapiens
caccatcttccccttattgctgtggacttcagggctctgctgctctgtcctccacagaacttgtcaatcagcttcctaccagctaagatctggtgctgtctgatatatcctccctgcggcttgtcactcatgctgtctaatggcgtgaggtgcattgagttgtattctgatgtctttgtccttttgaagccaccgagtaaggtcacacaactttgaaacgagcagggtaccatctgaggatgctggacattccttttaacaattacctaggggagaggcagtcctcagacaggactcaggtgggtgggcctcaaagaggaagggaaagggggcag

SEQ ID NO: 3633 - DNA, 175 bp, Homo sapiens
ctgaaggagcatttgcggaaaggtgacagcctcgtcaacaagccagacgagcgcggcttcacccccctcatctgggcctccgcctttggagagattgagaccgttcgcttcctgctggagtggggtgccgacccccacatcctggcaaaagagcgagagagcgccctgtcgctgg

SEQ ID NO: 3634 - DNA, 441 bp, Homo sapiens
aaaattgggacaagagtaaaactagaccagatgcgacttggctgaccaccaccaaatgtgactttgtgggacgataagtgaagagaaataaatggttctctttgaaggcacactacataaaatatttttgtgggaccacctcgaaatttccatcagacacaccaacacagtgaaatacagtacttgagaattcatgcaccaggtcagaaggttgtaaagtcaacatcgagttttaacaaacccttctgtatatgccctgataaacaagtgaacttaagagcttctagctagtaaataaataagtcagtcctgtggcaaatattacaagtttgaatcacttactagaagaatacttaattccgaaactcggttgggctgtttttatttttttatcatgtggagttgccaaacattaaaccagaagttgcatggaagtttttt

SEQ ID NO: 3635 - DNA, 326 bp, Homo sapiens
cctcaggcgcctttgtctacctgcggcagccgtactatgccacgagggtgaatgcggctgacattgagaaccgagtgttggaactgaacaagaagcaggagtccgaggatacagccaaggctggcttctgggaggagtttgagagtttgcagaagcaggaggtgaagaacttgcaccagcgtctggaagggcagcggccagagaacaagggcaagaaccgctacaagaacattctcccctttgaccacagccgagtgatcctgcagggacgggacagtaacatccccgggtccgactacatcaatgccaactacatcaagaaccag

SEQ ID NO: 3636 - DNA, 446 bp, Homo sapiens
  misc_feature (1)...(446): n = g, a, c or t
cctggagcagcttctcagggcagccctggcccactaaggcccagtaatgagggcagaggggtgcagagccatacctggctacacccacaggtggacacagggagcaagctacttcgctgttctctgggctcattcccccagcacaggagggcctccatgcacactcattccacaggccccactggccctgtcacactcacacggcacgcacttggcgctgcctgctgtctgccttccacctgggggtacaagaggtcacccaagggggcaggcgtgcagggcctcttggatcttctggcggcaataggagtacttctgcaggatctggcggaggtgctcctcctcctcccgctgcaggatacgtaggaagttatgtagttcaggcatgctgaaggcgtcccactgcaangggcaaaaggggagtgtacaggctgcagaagggatgg

SEQ ID NO: 3637 - DNA, 373 bp, Homo sapiens; identical to SEQ ID NO: 49
  misc_feature (1)...(373): n = g, a, c or t

SEQ ID NO: 3638 - DNA, 308 bp, Homo sapiens
ctggagactcaaactcctgtacagctaccttctgggaaatagtttttgacacctatttttcagattcttgtccggaatttctgctgctcttttcaaaaaagggcattaacaattctctggaaataaagcacctgttagcctgacatatgcaaaaagcagggcggcatcacccattacgagctcccccagccagcagtcagtattggattggccttgcctggctggtggcagtttgggagaaacagccaaagaggttagtttatttcaacaccaaattagaccatggcccatttccaacgggtctcttt

SEQ ID NO: 3639 - DNA, 533 bp, Homo sapiens
  misc_feature (1)...(533): n = g, a, c or t
aaaaaatttaatgaataaacactggggtctacagtagtatttgaaggagatctcacaaacaggtttggtttttgaaggttagaactggtggtctagagaattcatttcattccagagaaataaagagaggaatttcttgggttccttcaggaatgcatctagctttgcctcatctttgtttgaactatggatacggcagaagaaaacatgaggatttcacagatttaaggtgcaaaaagtcactgggttctctaagaagtctgggattcttctgctggaaaaataagtttgttgagaaaaaatgagttggaggaggctgttattgaagtgaagcagaattgtttttactaatctgcttattacccactctgtagtgtggaaacaaattattcatgcacaaggtcctcttactgttcctcctaaatgtctcccaaatcccttctctcccttcaatgtccaggccaccagcatgactttttgctgtgtgtagcacctccgcccaggacctaaagatgcaaatctagtcgtagctn

SEQ ID NO: 3640 - DNA, 285 bp, Homo sapiens
ccaagacccaaacacaccacagggatggcacaggatgttggggcagggagatgagcaggtggggctcaggaagaggagaggcaaaggaataagaaaggaaaaggaggaaaaagagaaaaaggcaagatggggcaggggcaagggagagatggggaggtataggagacagacagaaaaaggaaagagaaagcaaagaaaaagagaaagaactacaaggcaaaaaagcatctagaaaaatgagggagaaaagggagaaagacaccctgacacagccctttctttcag

SEQ ID NO: 3641 - DNA, 418 bp, Homo sapiens
  misc_feature (1)...(418): n = g, a, c or t
ctttggatccatttccatcggtccttacagccgctcgtcagactccagcagccaagatggtgaagcagatcgagagcaagactgcttttcaggaagccttggacgctgcaggtgataaacttgtagtagttgacttctcagccacgtggtgtgggccttgcaaaatgatcaagcctttctttcattccctctctgaaaagtattccaacgtgatattccttgaagtagatgtggatgactgtcaggatgttgcttcagagtgtgaagtcaaatgcatgccaacattccagttttttaagaagggacaaaaggtgggtgaattttctggagccaataaggaaaagcttgaagccaccattaatgaattagtctaatcatgttttctgaaaacataaccagccattggctatttacctcn

SEQ ID NO: 3642 - DNA, 371 bp, Homo sapiens
aaaaaagccacacttgaacaggatgaccagaatcacgatcaacaccagaagtccaccaacgctgcctttaatgatgataggcaaagaatggtacttctcatctttcaggaagacgacagtgatcttagttctgtggttctctgcattcagtccctcatatagagatttgttgaaagatatttcaccaaggatctgcagttcagttacatcttttagtaactcctcagagtgatcccaggagatctctgcagccacggtgacattttctttatctgaagcgatgacacagctcactgaatgccattcttccacatgctgaaccgaactgtacgcacaagcgcgctcctgactccaggtgcacaccgtggagg

SEQ ID NO: 3643 - DNA, 345 bp, Homo sapiens
cctggtacctagtaggttcatgatacgtatttattgaatgaatgaggcacaagataatgatgcgaaaaaaatccccaccaagaggggaacaaaaagacctaaccagataatccccaattcatgtcatggcttgaggatggaccattttattctgttaggctagagcaaatctttttcccgaaacaccagggctgacaaggcggcgtgaccagggctggaggatgccgccgtctgtgcaggcttccccctgccctgggtgcatgccccctgcggggctggggagaaggtgacacagaccttgcccttcccacaggcatgccggggagactcacgcttcacgttcag

SEQ ID NO: 3644 - DNA, 289 bp, Homo sapiens
ctgcttggacttcaaagccctccgcctagccatctcagccaggctcaggttccttctcccacccatcaggccaagcaggacttgtcaaacatacacattcaagttcctagcacacagtaggtgctaagtgggaattgattataaacttgaattcttccatcaacaaatatccacctctcctgtccagcttgcctcagatcttcaggttctctcttctctgaggcagctaagcttctacatccttcatgaagtttcctttacttctcgacagaagacagttccctttagg

SEQ ID NO: 3645 - DNA, 538 bp, Homo sapiens
  misc_feature (1)...(538): n = g, a, c or t
cctcctacacctacctctctctgggcttctatttcgaccgcgatgatgtggctctggaaggcgtgagccacttcttccgcgaactggccgaggagaagcgcgagggctacgagcgtctcctgaagatgcaaaaccagcgtggcggccgcgctctcttccaggacatcaagaagccaggtaaaagaaactggcatttttaggaaattgttctacatagacatgaaccataaaagggaaagtaacctctgggggactagcacctgtttgtattccttaaagtgaaatgatggcaatcatctttcgggactgacctgaaatgaagagaatactcattgctgatcacttgattatttgggcataatgttccaaatggaatacatggtgtgaagtagaagtgacaatttgatgtgggatcggtaaatgtgtatcctactttttttagggtatgatgtgattgctcaagctcagtcaggtactggcaaagacagccacatttgctatttccatcctgcaaanttggagattgagttcaangana

SEQ ID NO: 3646 - DNA, 283 bp, Homo sapiens
ccaagaaacaaaagcaaaatcgtcccattccccagtggattcggatgaaaactggaaataaaatcaggtacaactccaaaaggagacattggagaagaaccaagctgggtctataaggaattgcacatgagatggcacacatatttatgctgtctgaaggtcacgatcatgttaccatatcaagctgaaaatgtcaccactatctggagatttcgacgtgttttcctctctgaatctgttatgaacacgttggttggctggattcagtaataaatatgtaagg

SEQ ID NO: 3647 - DNA, 390 bp, Homo sapiens
cctcaagtctttaccccacccctttcttgttcttccaagaagcagatgcccagttgctcagcagcagcggtagagacttgaatctgcccaccagtcacaaggcgggtcacagattcctcttcctctcttctcctcgttcctctgaaccctccaccaatgtgcctcagcctgtgtgctgtgtggcaacagcattctggttcccactgccaagatctcccaccactctgctgggatctgcagtggcagggagtgggggttgtgtaaaggggaagtcatcttttgagatccagatagacatggtttgtgcacttacgtccagatgggaagcatccttcctgcaaccctaaaataatcatgcagcctctcagacggacgccatcggtcccaagg

SEQ ID NO: 3648 - DNA, 199 bp, Homo sapiens
ccaggctccatgaggtgagggtctcgccttggactccggatagggggtgctcgaccccgcgcccaggcccctccgccttcagccagcgcatcttctgtcggtactgctggacagcatcttgcacacaggcgtccatcatggcctcagtgaggaccccgtccttggaggcatatgccgtggcctgccaggacacggccag

SEQ ID NO: 3649 - DNA, 202 bp, Homo sapiens
  misc_feature (1)...(202): n = g, a, c or t
ctgatgcctcactactagatgcagtgctgggaccttcctcttttggagctgtcccatgtacagtggacccaagctcaggaccttcgtggagctgcttctccaacctgagaaactcaagacccatcctcccgctgtcactttggacaatggaaaatctacattttcttttccctttttttttttttnnaaaaaaaattttccc

SEQ ID NO: 3650 - DNA, 290 bp, Homo sapiens
  misc_feature (1)...(290): n = g, a, c or t
ccagagggatccccttgaggagctcgctggtgacacatttgtcgtcctccccctcctcctccacctggtcggcccaactgggcttcgaatcaaagtctccagtaggcatcgcaaaaagtattctccacgcagcccaacttgaagatgatgaggatgatgatgtcgataccaagaagcagaagaccgacgaggatgactagacagcaaaaaaggaaaagttaaactaaaaaaaaaaaggccgccgtgacctattcaccctccacttcccgtttnaaaatntaaacgtggtc

SEQ ID NO: 3651 - DNA, 519 bp, Homo sapiens
  misc_feature (1)...(519): n = g, a, c or t
ccatgctgcgtcttctgacttgggtgatcgggacgggctcgcctcgcttacaggttctggcttcagacaccctgaccaccctgtgtgccagcagcagtggtgatgatggctgtgcctttgcagagcaggaggaggtggacgtgctgcttctgtgccttgcagtccccgtgtgccancgtgcgggaaaccgtgctccgggggctgatggaactccacatggtattgccagcacctgatactgatgagaagaatggcctgaaccttctgcggagactctgggtggtcaagtttgacaaggaggaggagatccggaagctggctgagaggctctggtcaatgatgggcctagacctgcaagccagacctctgctccttgctgattgacgacgtgatctatcatgaggcggctgtaaggcaggcaggggccgaanccctctcccaagcagtggcacgttaccagcggcaggccggcggangttatgggcaggctcatngagatttaccaggaaaagctctacc

SEQ ID NO: 3652 - DNA, 207 bp, Homo sapiens
cctaagcctcagtgtgggccaaggctcaaaggtgctggcacaggcttcccagggagaacagaaactcagcagtgaaagccgcagaggggaagaagcaggctgatgtcaacagcgtggggctctgtccctcaccccaaagagagggagtgtgccagatcccaggccaccaagcggggccagctccagcctgggcgatcgtcccagcag

SEQ ID NO: 3653 - DNA, 478 bp, Homo sapiens
  misc_feature (1)...(478): n = g, a, c or t
aaacatgcgatgtccttcagtttacatttgcagattttggtgaaatagcatcttccagtgaagtccactgcgttggtaggagggatgtctgtagagaaaaggtctatttcagtatcagccagcaaaacagccttcattcccctagagctgacacttgtttacagaatttgcaacacaggatggacacgcacctgtccttgaaactacaaatgttggtagacatggcgtcgcaggaaggatgaggtgcgggattttgaaaaaggaaacaagagtaatgctcctactattttgattcccctaggctaaaattcaagtttgcgggacctagagcttttctaagtcctaatattgggaaggaaattangttttttttttttcttgttttccccgggggcggagtanaanaatatttattggattnggaacaggggagcggggcaaacttggnttttcnttttancttttggaaaaaggggag

SEQ ID NO: 3654 - DNA, 364 bp, Homo sapiens
aaataataacagaatttgtcttttttttcctgccacagcaccaaatgccaaagagccactcatctgtagagcttgctgtgctgctggcggaatctgcaaacctgtaccctctgcaagtcttgccattaactgaagacgaccagttgttcccaaatcaattccagtcctttccagttcatcactgtccaaaaatgaactagcactcgaagcatcagtacgttcagtaacatgaccaactttcattggtcttcctgctagttcaaatccattaagttgttccaaagcctttttggcacattctgagtcagaaaatgtaataaatccatatcccttggatcgaccagtttcactgtcccatcatcag

SEQ ID NO: 3655 - DNA, 220 bp, Homo sapiens
gactccaaccagttcttccgggacgtcacggcggactttgagggccagagtcccaaatgcacccagggtgtgcgggaagcgttccgacagatcaaggacttgttcctacagggagcctacgacacggtccgctgggagttcggcacctgccacccgctgtcagacgagaaggacctgacccagctcttcatgttcgcccggaatgccttcaccgtgctgg

SEQ ID NO: 3656 - DNA, 283 bp, Homo sapiens
ccagtgtatatgtttataactagaaagaaagaaaacagagcaccaatcgtggagggagtgacctctgctatattgatgctggcattcttggctcagtatgccagattgcttttaagataacctgaacctaagggctttccagcatcggaaaaccttggaaaagactaaagcttgtttataggcagagatggactaaaggacatgggtgtaagatttggggtggaggccctttgagaatgttcactgcttacattcctgttacagcttgtgtaacctgaagagg

SEQ ID NO: 3657 - DNA, 541 bp, Homo sapiens
  misc_feature (1)...(541): n = g, a, c or t
ctgaaaagcatgcttgatatagtagagcatgatctcctcaaacctcacttgccctctgtcacttatttgagattaggtggcagcatacctcctggtcagaggcattccattgtttcccggtttaataatgatccatctatagacgttctgttacttaccactcacgttggtggcctgggacttaatttgacaggcgctgacacagtagtatttgtggagcatgactggaatcctatgcgagatctacaagccatggaccgggcccatcgcattgggcagaaacgtgtggttaacgtataccgattgataaccagaggaacattggaagaaaaaataatggggttgcagaaattcaagatgaacatagcgaatactgttattagccaagagaattctagtttgcagagcatggggactgatcagnttcttgatctgtttactcttgataaggatggcaaaagcagaaaaagctgacacctttacttctgggaaagcaagtattgaaatcaattttgaaacctgatgatctttggatcaagac

SEQ ID NO: 3658 - DNA, 248 bp, Homo sapiens
ctgttgtggactcttcttaaggagcttcaggctccacagtggtttgtgttcctctctgctcgtgtgtctgacatggagtgaccaagtcccacacactgagtcccctgtgtcccggggctgctggcgcctgggtccttggagaggctgtggggttgggagctagaggtcctcatgggtagagctcaggtccaccctctgagcctgtccaaacaccaggaaggtgcacagccccaggttgctgatgatgg

SEQ ID NO: 3659 - DNA, 165 bp, Homo sapiens
aaatgtcaaaggttttgaggtgtccagaaccacctccagaaaggggtagggtagaatgccacctgttgcctggtgtgtgctaacctggagcaggtaggggtaagactcaatagtcatcttttaccaaatgggtttgccccaggttaataagaggggtctagtagg

SEQ ID NO: 3660 - DNA, 301 bp, Homo sapiens
ctcctcttcctcctcctcctccacctccggcttttgggggatcactgtcctctctcggcagcagaatgagccggcaggtggtccgctccagcaagttccgccacgtgtttggacagccggccaaggccgaccagtgctatgaagatgtgcgcgtctcacagaccacctgggacagtggcttctgtgctgtcaaccctaagtttgtggccctgatctgtgaggccagcgggggaggggccttcctggtgctgcccctgggcaagactggacgtgtggacaagaatgcgcccacggtctgtgg

SEQ ID NO: 3661 - DNA, 256 bp, Homo sapiens
aaaatatacatgactaataaagtgaacattcagaggagccactgctcagcatgttccatgtcggccacttgtggacactgatctcatccaaagaggacagaagtttcaaacatctgagcagtttaagttaaaaataggatgaaggggaaataagagaacaggataagtgtcctcccaagacagcagtggctgatgcccacatggcgcaaacaggctgacttcaatgagtgttcacgggatgtgtgataaagcccag

SEQ ID NO: 3662 - DNA, 148 bp, Homo sapiens
aaatacttatgaaagctttcagacaaaaataaactttcacgttaccatgatgaaactggggttgtttctgttcctccaactgaaagatgggacgctgagctcggggactcggcccccgtggtgcacctcgcaggcgctgtgcgtgtgg

SEQ ID NO: 3663 - DNA, 336 bp, Homo sapiens
ctgacggctatcctgggcacagtggggcgggctgtctcaggcataaagggatggctatcctgggcacagcggggcgggttgtcctggaggcgggctgcaccatcctcatgggggccctccagtggggctttcctgtctcctgagtgtacacaggccccagtgaaggagcccggtgtggagccccataccacagcatgtttcagtgtctgctatattgtgagcctaagccacccaccacagggcttgaccctgcgaccgtcctctcatttctagaacgggaaagcacagtgcttctccttgagggttaaaaggatgctgctgggtgtcagggactta

SEQ ID NO: 3664 - DNA, 361 bp, Homo sapiens
ccaccatgcctatttcttgacttgtgtcttcaggatcaaatgttttacatgtcaggaaagtcactatccgtcctttccagggcaaattatccgacccaccttgacagaacaacttcccacacatggtatcactgaggaaaaagccaaaatgtattgcaggattcaaattgcagttttacataaatgctctaggactatggatatttaactgatggtatttttccctgtagccgagactcttagttgtactttacactcattttcccttatttctcagtaataggatgcctgaacgttagcacaatatattattgctcaaataaacagtattacctagatccctgtacacctaatttttcca

SEQ ID NO: 3665 - DNA, 260 bp, Homo sapiens
ccactcctggaaacccactgatagatgagtttcccccattcttctggcctccgccacatgatcaggaagctggacttgctcttatccaaccactcgaggttccctttcttcctcagttcctctaatacaatctggatcgactccacaggaagctttcgctgtagcttgacgttgttgaagagcgggctctcctgagcttccatcaccgtcatgctggactgtttgtgcaggcggcagaaggacaggaccagcgagcacca

SEQ ID NO: 3666 - DNA, 338 bp, Homo sapiens
ctgcagagccagatgatccacaggatgctgtagtagcaaatcagtacaaacaaaatcccgaaatgttcaaacagacagctcgactttgggcacatgtgtatgctggagcaccagtttctagtccagaatacaccaaaaaaatagaaaacctatgtgctatgggctttgataggaatgcagtaatagtggccttgtcttcaaaatcatgggatgtagagactgcaacagaattgcttctgagtaactgaggcatagagagctgctgatatagtcaagcttgcctcttcttgaggagcaccaacatctgttatttttaggattctgcatagattcctttt

SEQ ID NO: 3667 - DNA, 296 bp, Homo sapiens
  misc_feature (1)...(296): n = g, a, c or t
ncaccctaggcccacttttccacatggcaacaggcgtggagctgggggctactgcccctactgtgtaggcggtgggctccccatagtctcctctgccctgctgccgtgtacctggctcccttcactcatccacatcaccggccctaggccagggtctgaaccacacacacagaatggctgcagtaagcaggaacgggaagagctttcacattcagaacaagaaggggttttttagttactcaaaagcaatctgagcatgttccagcacttcaaccttactctttcagagctttggg

SEQ ID NO: 3668 - DNA, 373 bp, Homo sapiens
ctggcttccagagcaccataataaatagtttcaaagatctgcttattcagtaactgggcttctgcactctcaaaagggtatctcatcaggataaaagcatctgccagaccttgtaccccaattccaatggggcgatggcgtttatttgataggcatgcctctggtgcaggatagtagtttatatcaataattttattcaagtttcggacaacgactttagtgacttcagccaacttcttaaagtcgtatgtgtgttctgatgtgacatacatattcagggccagggaagccaaattacaaacagcaacctcatctttgctggtgtactccactatttctgtgcacaggttgctgcatttgatggttcccaggt

SEQ ID NO: 3669 - DNA, 396 bp, Homo sapiens; identical to SEQ ID NO: 301
  misc_feature (1)...(396): n = g, a, c or t

SEQ ID NO: 3670 - DNA, 418 bp, Homo sapiens
  misc_feature (1)...(418): n = g, a, c or t
ccaccagcaagcacgacattaatccttggatctggcagcaacaccaaaaaagagcgtttgctcttcacaggcactccctaaaacgaatctgctcattcgcctggaactcactgagactgcttcacagcatgaccaagcatcgaccacctctcaccaccccaggcgtcccaggtccaacccagcgccctcttctctgcctcctgtctccctgctccttggcccaggacacctgcagccagctaccatgatcctattaacacccaagtcagagcacggcactcacctgctgacaaccctccaacagctcccatctgactctggatagaagccgaagtctcgccatgaccccccaactctgnggcctcactcctccaggtctctccacctggcctccctgccatatctgaagtattagang

SEQ ID NO: 3671 - DNA, 455 bp, Homo sapiens
  misc_feature (1)...(455): n = g, a, c or t
tggggaggaaagagcttccagggggcgaacgcagcacagaggaagaggcctgctccacttgtctgggaacctgggcaggaggcacagaggaagccaaggcctggagctgcaggtcccccggcatctctctctgtcccggcagcccaggatggcctggtgcccccacctgctgcagcaggagccccaaggagtgctagctgagggtggttgctggggtggtcctcatggacagtgaggtgtgcaagggtgcactgagggtggtgggaggagatcacctgggttccaggccatccttgctgagcatctttgagcctgccttccngtgggagcagaaaaggccagaccctgctgagttagaggctgctgggatccactgtttccacacagcgggaagctgctgggaacaggtggcagagaagtgccatgtttgcccttgagccttgcacttctttcag

SEQ ID NO: 3672 - DNA, 402 bp, Homo sapiens
aaaaatgtatatatataaaataaagtgacagattcagagtcactgttcattgtgtgtttgggggctgcacaaagacacctagccaaagaagcaagtgaaagcctgcattctgctcaccatgccatacatcctggcatagggctgtatcctcccaaaggggattcctttgtctaattcataccaggccactgtattgactagagaaggccatggatgggtttctcactcttagaagggaaagaggaggaatggctacagcctccccaagccatagatgggactgcctcccactatccccagacacaaatggtaaattggaaaacctgtatccagacatttcttcagccacttcattggcaccaagcgtctctcaaaatgtcttctgttccttaacctaccagg

SEQ ID NO: 3673 - DNA, 375 bp, Homo sapiens; identical to SEQ ID NO: 50

SEQ ID NO: 3674 - DNA, 150 bp, Homo sapiens
aaataaaataattttatttcataaaaagaaataaactagaaagaacaatgcccttaaaaaaaatgtttgcttcactaaaaccatgttgtgaaggaaattcatcaaaggctgttaccttattcaacacgcgtagaaattgggttctgattt

SEQ ID NO: 3675 - DNA, 548 bp, Homo sapiens; identical to SEQ ID NO: 302
  misc_feature (1)...(548): n = g, a, c or t

SEQ ID NO: 3676 - DNA, 547 bp, Homo sapiens
  misc_feature (1)...(547): n = g, a, c or t
ccaaagtgatggagctcctgcccacgcacgccttctccacactgttccctgttcttcaggacaatttagaagtttatttgggattacaacagtttatagtcacttcagggtcaggacacaggttgaacatcacggcggagaacgactgccggcggctgcactgctccctgagagacttgagctccctgctgcaggccgtgggccgcctggccgagtactttatcggggatgtgtttgctgcacggttcaatgatgccctcacagtcgtggaaaggttggtcaaagtcactctgtacggatctcagataaaattgtacaacattgaaactgctgtgccatcagtattgaaacctgacctcattgatgtgcatgctcagtccctggctgcgctgcaggcttactctcactggttagcacagtattgcagtgaagttcaccggcagaacacgcagcagttcgtgacactcatctctactaccatggatgcaatcacacctctaatcagcaccaaggtccaagacaactgctgctatctgcgtgccacttn

SEQ ID NO: 3677 - DNA, 279 bp, Homo sapiens
ccacacccagatcatactgatatctacagcatagtcctggctacaggggagctcaactctaactcgtgaagcgggcctggtttagaaagtaacaatgaggtagtaactcatgatagtgctagctgttatcaaaaattaacaactttaggtatttttgttttgggtttttgcggtttaggtacatccaaaatttcttcatagtctgcactcattccctttgcccagcgaccaactgtgaccattcgctctgaattctgactttcagggcaatctttcttt

SEQ ID NO: 3678 - DNA, 232 bp, Homo sapiens; identical to SEQ ID NO: 303

SEQ ID NO: 3679 - DNA, 492 bp, Homo sapiens
  misc_feature (1)...(492): n = g, a, c or t
ctgtttgcttttctaggcaaaaagcaagcctgacctggccctggcacccccattatgtttgcagaggggtgaaaagggacttgacagatgtgggcggaggggagggagagcagtgcccttcctggacacctggaggaaccgcacaccccgaactctcgccctttgcattaggcgtggccttgccattgcacctgccaataaaatgtgggcagaaatgttaagacccagggcatgattccgcaggttccggctccctcgtggcatctgggacagcatgctggggacagcttccatcagagcacctcacaacacccacactggacataaaatgtgagcaagaagtaaatatctttttttttctgtttttgagatggagtctcggtggctcacccttggctcactggcaacttctgcctctgggttcaagcaattctcctgcctcagcctccccagtagcttggattacagganacctgcccggcgggcngtcaa

SEQ ID NO: 3680 - DNA, 373 bp, Homo sapiens
ctggggtggcaaacctagtcccttttcaaagctggatcccaaggtgaaagcagccttcacaagagcttacaataaggaagcccaccttactccatactcacttcaagctataaaggcatctagacacagcacaagcccatccctggattcggaatacaatgaagaattaaatgaagatgactctcaatctgatgagaaagaccaagatgctatagaaactgatgccatgatcaagaaaaagacaaaatcttcaaagccttcaaaaccagaaaaagataaggagcccagaaaaggaaaaggaaaaagttcgaagaaatgaaaccatttttcactagcgacagccactttttactctccctcctgaccagtccag

SEQ ID NO: 3681 - DNA, 345 bp, Homo sapiens
aaaattgaacaattttacttattcaaatgaatctgtgaatataaccaaatagttgaaatcccttctcaattaaattgcaaataataatatcacaaagtatcagttctcctttaacaaaagccattctcaagatattaaaggaagaataatcatatataccttacctatcccaagcagtccgccattctgtaatgttaatactcgtcttatattactcaccacaatttaatgacccaataaatgttaagtgttatttgtacttaaaaggacagtaaaatggcatttagttaaatatgataagattagccaagaaaaaggctgttgcaaaaaatgtacagtaatttt

SEQ ID NO: 3682 - DNA, 266 bp, Homo sapiens
ccagaggaacagaccagcttttgcacaatgaagcgcaagggaacaagtggtttgcctggtgtcctacctgtcctgaacctggtcctgtgggccattgaaaagttagatctgtgatctctggggtttttgtggctttgttcaatgcttccactctagggcaggcagagcagtctatactctcccaagcctgcttgacctccaagtagagctgatacagagatctgtgaatattgtgatagaaattctttggtattcatacacttcag

SEQ ID NO: 3683 - DNA, 158 bp, Homo sapiens
aaaaaaacttctacaaaactctagtatgggcttctgactttttccagggtgtagaatttgactcaaaagtaaaaataattttgttttagtatattctactttcattaatgtttttttgttctgaaagtgatattatattgtacatgtaaaattaattt

SEQ ID NO: 3684 - DNA, 412 bp, Homo sapiens
cctgtgagcttccccatggctgggggttatggagtgatgggtgacgatggttctattgattatactgttcacgaagcctggaatgaagccaccaatgtttacttgatagttatccttgttagcttcggtctcttcatgtatgccaaaaggaacaaaaggagaattatgaggatattcagtgtgccacctacagaggaaactttgtcagagcccaacttttatgacacgataagcaagattcgtttaagacaacaactggaaatgtattccatttcaagaaagtacgactatcagcagccacaaaaccaagctgacagtgtgcaactctcattggaatgaaacctcagaaaaagagcaacagaagtaattgtttcaagctcctgattctttctactaaatcatgaacagcttt

SEQ ID NO: 3685 - DNA, 316 bp, Homo sapiens
ccaccttaggagtctgacctctcacttttccagcacgggtcagggaaccatggactttacctccaagcatgcggcctgctacttccagggtagtcagggcctccaccccgcactggcccagagtggcctcatcctccaggggcgcgcctgccaggagcacgacttgatcttccggggcaatgccctccagtgaggctacatgagccttgatctgggcgaccgtttcctggccggtcacctcgaaggtgtgtagctcctgggcgcggacaaagagctgcatattggcgactgaacggcggtcccagctaccgcgaag

SEQ ID NO: 3686 - DNA, 136 bp, Homo sapiens
  misc_feature (1)...(136): n = g, a, c or t
ctttccccaccaaaanaagatgcactgacattttgaaagaaaattagtttgacatcagatttttcaacagcaatgccttatgtcagaacaaaatggagttacatattcangccaagtgtggtggcncacaccttgt

SEQ ID NO: 3687 - DNA, 312 bp, Homo sapiens
aaaatatattttgtgcaaaataccttactatgctataaaccaccattaaaaaccagtgttttgatttggtacttaaatatttttggagtgaaaattatcactaaagtaacatgactccaacaaaagtatggtttcattataaaagagtactatattgatttgcccaagttttgtaacttagtaaaggtattaacttccttggatttgtactttgtgatttagtatgctgtatcgtgggctggttatgttaactgaaaaaaataaagtcattacctgagttttgcagtgctctaacttaaacagaaagaacag

SEQ ID NO: 3688 - DNA, 290 bp, Homo sapiens
  misc_feature (1)...(290): n = g, a, c or t
ngttcgangtgccgtgtggacagccctgtcggggacagtgaggagactcagtgcctgtcctgggggacagctctgcctggaggctggggtctctttgaccttcctgagacatcctgatgcctccaccctacttctgtgtcccggcaggagtgagagcgcagagagccctgagacagcccctactggagcacctcctggggagcagccagatgtcatccccgcccagggcgacctgctgggngacctcctcaacctggacctcggccccccagtgagcggcccacccctgg

SEQ ID NO: 3689 - DNA, 418 bp, Homo sapiens
  misc_feature (1)...(418): n = g, a, c or t
ccaggcaagtggcagagccagacctgggtcttcacacactttcctcttcttgactgtactggcgcaggtgcttaagatttgggggaaggtgggtgggtatctggcctcttctttgggactcaaattgtgatatctctctgagaacccacaggctccctctttagggctgaggtgagaagttctgaaagtcaagcagacacatccaggcatttgggcaagaaacttcttccttccaaatcaaaggtgaaatgaaaacgattatgagcccacgggggatgaacagaggtgaatggtgggctagtctcgaggatggcctaattcanggtttcctaagtgtcagccattcatggaaccacccctgnggatttttgctacctctctggatctgtgcccacttttacngttatgttttttcttt

SEQ ID NO: 3690 - DNA, 184 bp, Homo sapiens
ctgattgaaggagaaaatatggtccttatttgctcagtagcccagggttcagggactgtcacattctcctggcacaaagaaggaagagtaagaagcctgggtagaaagacccagcgttccctgttggcagagctgcatgttctcaccgtgaaggagagtgatgcagggagatactactgtgcag

SEQ ID NO: 3691 - DNA, 382 bp, Homo sapiens
  misc_feature (1)...(382): n = g, a, c or t
ctgaagaaaaaagctcaaatgatctagtcactttcgatactgtacttcagatgcgaaatggatattcgagtggaaacctgacaaagtgcgcctgctttgatgtgaactggtatagacaatgaccagtggctgggtcaagtgggatgtctctctgtgagcacaaaggcttatcaaatgacactaaagataagttcaacaaccatcacattggaagggagaaggcgaacatttcatgtttggcgggcatgtgagtgcacaagatggaaagagcgattggagcatcctggtataattacccccattgtgctcttaatggaaatttcaaaggacgggagtattcttgttggntggtgtccaggtttgtggcacttgttccaagang

SEQ ID NO: 3692 - DNA, 408 bp, Homo sapiens
  misc_feature (1)...(408): n = g, a, c or t
ctggtggggctgccagggtacacgcccctgaggatgccattcttgatgcggatcaggcgtttcttccaggagttgatcccagacaggtagacgtgtttcagggcctcccgactgagccggaagtcgaccccgtctggggtcaccgtgaactggaagccacggcctggtgagcttccgccatcctgggggttggtcggcaccttccgcggtgggaattgcanggcgcggctgggtttctgtgcggtgaaggttgctcaaaggtctgggagcctggggggccccagagtctcgtgaggatggtggcattagagtcaaactcaggaacaggccggtctcctgaacctcagtttcacttgggggctcagcccaatcgccagggccttctgctcttgttcctccctccaaggt

SEQ ID NO: 3693 - DNA, 160 bp, Homo sapiens
aaattatctcaaaagtgctttgttgtaaaaataaatttgtgactaaacaaagactttcatattaaatgggttcaattgaactcatttcttattttccaagtgtcaatgtgaaaagaaaataaatgctagcactactgactagtcagtatatctccacttt

SEQ ID NO: 3694 - DNA, 373 bp, Homo sapiens
  misc_feature (1)...(373): n = g, a, c or t
ctgtttggagaaattgccgacgtagtacttcttgaagtcccacatcatcaggattcgggcagggatgcacgactctgcatatgagtggcagcagtcacagaaatacttccctaggtattcgcagtaccggagccgcttcacaaacttaggctctactggagttccacagccggcacagaaaaaattctgggctgccaccacaaggtccctcttgagtggtggatgaatattaaatatgatttgaaatctaggaggagcccagtcttcagtccctctgatcctagacttaaatttaatttcctgtactacattcatactggattcaaagtcttttcggacacgctcttcatttacgactatngagccagacctc

SEQ ID NO: 3695 - DNA, 184 bp, Homo sapiens
aaaatgattacacttcaaataaaggtactaaaatcacgccccccaaatttgtaagcgcttttgttgttattgggtactcactgtgaatagaagtaaatgtacttgacctgtatgagaataaacattttatcaagtacagcaaaaaaaacggaattgattgtgaaagccatggggatgggacttt

SEQ ID NO: 3696 - DNA, 347 bp, Homo sapiens; identical to SEQ ID NO: 51
  misc_feature (1)...(347): n = g, a, c or t

SEQ ID NO: 3697 - DNA, 143 bp, Homo sapiens
  misc_feature (1)...(143): n = g, a, c or t
ctgctantctgcaacctanttttccctctcacctttaactgacgttttgtcctcaataattacacaaggacctagagtacctataggacaaaaagtatanaataaaaatatgcctttagtcatttggtttttcttaaaaaggt

SEQ ID NO: 3698 - DNA, 311 bp, Homo sapiens
  misc_feature (1)...(311): n = g, a, c or t
ctgctgctgccgttgaccatcctgaactctgggggagaggaggagtcagcctggcttgcagacggccgacccagaacatggctgtctgtggtcatttccttccttcacacccagtgggatgggcacagagcccaaccttggtcttaccaantcccccaccctccttntgcatcagcatccaggctcacacagctctccagaagaatttgatcttagctgcagccttggggtacatcactctacacccagtctcttccctgcgcttctttcaaccaacagaagcaaacatcaaaagcacccacacctactgg

SEQ ID NO: 3699 - DNA, 219 bp, Homo sapiens
  misc_feature (1)...(219): n = g, a, c or t
ccaacagagcacttatggcaaggcatctcgagggggtggcaatcaccaaaacaattaccagccatactaaaggagaacattggagaaaacaggaggagatgttaaagtaacccatcttgcaggacgacattgaagattggtcttcttgttgatctangatgattattttgtaaaagactttctagtgtacaagacaccattgtgtccaactgtatatag

SEQ ID NO: 3700 - DNA, 168 bp, Homo sapiens
aaagaaacaccaccaaaaggggattagcttagtccatcccttcctcagtcatctgcttcccaccttcctccaaatgttatcccagaacattctggaggcagggagaaggggaggcagctaatcagagtctgagagcacgatgatctctttctggatcgcattgtgtgg

SEQ ID NO: 3701 - DNA, 313 bp, Homo sapiens
  misc_feature (1)...(313): n = g, a, c or t
gatgtgatggtgtccaccttccacaagtactcgggcaaagagggtgacaagttcaagctcaacaagtcagagctaaaggagctgctgacccgggagctgcccagcttcttggggaaaaggacagatgaagctgctttccagaaagctgatgaacaacttggacagcaacagggacaacgaggtggacttccaagagtactgtgtcttcctgtcctgcatcgccatgatgtgtaacgaattctttgaaggcttcccagataagcagcccaggaagaaatgaaaactcctctgatgtggttggggggtctgccan

SEQ ID NO: 3702 - DNA, 385 bp, Homo sapiens
  misc_feature (1)...(385): n = g, a, c or t
aaaatacattcaaataaaaagatataagttacttgcagtgaatgcacacatacaacagcagggagagctgagaacataattaaccaatactcttgtgttcagagaataaatagtctgaaaccgtgggactgaggcttgttccttaggggcttttctcaaagtatccttggtggacataaggttaccctcactcaatggaaggacacatcttctgctgccggggaggacacagcatgacagtttcatttatatgggatgttttccttccataaatgtctggaacacggtgtcacaggacaccatggngtacagtgcagccctcanattagaataaataagtcacatggntggactggaatgccacnnacncactattgacttgaaa

SEQ ID NO: 3703 - DNA, 141 bp, Homo sapiens
  misc_feature (1)...(141): n = g, a, c or t
ncgaggtaaaagatactttggattcaattaagaagagtttttaagaaaaaagaggaaggttctggcatggggagctctgcaacccactgctgggtgccagaagcgagctgtggagcggaagatgaagatggcaccatgtgt

SEQ ID NO: 3704 - DNA, 230 bp, Homo sapiens
  misc_feature (1)...(230): n = g, a, c or t
ccaatcaaggcttgctggagtgtctcccagccaatcagggccttgaggaggatgtatcctccagccaatcagggcctggggaatctgttggcgaatcagggatttgggagtctatgtggttaatcaggggtgtctttcttgtgcagtcaagggtctgcgcacagtcaatcanggtanagggggtatttctgagtcaatctgaggctaaggacatgtcctttcccatgagg

SEQ ID NO: 3705 - DNA, 286 bp, Homo sapiens
  misc_feature (1)...(286): n = g, a, c or t
ctggatgatggtcttcagcctctttctgtcccttctgtccctcacagcactagtatttcatgttgcacacccactcagctccgtgaacttgtgagaacacagccgattcacctgagcaggacctctgaaaccctggaccagtggtctcacatgggggctacgcctgcatgtaaacacgcctgcaaacgctgcctnccggtaaacacgcctgcaaacgctgcctgcccgtaaacacgcctgcaaacgctgcctgcccacacaggttcgcgtgcagctcaaggaaagg

SEQ ID NO: 3706 - DNA, 239 bp, Homo sapiens
  misc_feature (1)...(239): n = g, a, c or t
ctggnacacggcagggtcagggttctggatatcaggtaaaacagtcaattgtgtcccagatccaaaggtcagttgccttgcagaaccagaagactccatgtcacccacgaggcagtagtacacagcagtgtcgctcagggaaacccggggcaggctcagagtgctggactttctgtcggcagggataaacagggaggccacttcgtttgtaactnttgtcttgnatccttgaataataa

SEQ ID NO: 3707 - DNA, 208 bp, Homo sapiens
  misc_feature (1)...(208): n = g, a, c or t
aantttgaacatgtactgtgacacttttgacacttttctgaagatttatcccgtttttctagcctttaaggtaatgctgaaggaatacatatactttaatatcaccttttttagaaacttaaaattgaatcaaaataatcagttttaaggaagctttttctcctccttccttttttgtagaggaaagaacacttgataaaaattagat

SEQ ID NO: 3708 - DNA, 354 bp, Homo sapiens
gttggatgcactttatgaaatagcaatggcatggaacttagtaaaaccagttaccattagcagagcatggaagaagattctccctatggtagaggagaaagagagcctggactttgatgttgaagatatttctgtggctactgtggctgccattttacaacacaccaaaggattggaaaatgtgactactgagaaccttgaaaaatggcttgaagtagacagtactgaaccaggctatgaaggtgtaaactgatagcgaaatcatcagaagagcccaaggcccgggcagatgaatccagtgaaaatgaggaggaggaaatagaactaattccagacaaacatattaatctgcaa

SEQ ID NO: 3709 - DNA, 242 bp, Homo sapiens
ctgagacccctgccctgtgagcccttctatccccacaagttgtcaggacaatcccttgtggttagggggaggggcggggagagagctctatttctcagccagtgccgagctaccctccctcctgggctgtgatttcatttgtgcaatgggggtgtgcaggagtcactagcttctcggggcctgtcccgcacatacacgcacttatgcgacatccagacatttgctacattttccaagggctt

SEQ ID NO: 3710 - DNA, 444 bp, Homo sapiens
  misc_feature (1)...(444): n = g, a, c or t
ctgagaagatccttgaggacaattttggcctattcagaagaggacacagccatgcagatgactccttttcccacccaggtggaggaacttctctgtaatctgaatagcatcttatatgacacagtgaaaatgagggaatttcaggaagatcctgagatgcttatggatctcatgtacagaattgccaagagttaccaggcatctcctgatctgcggctgacctggctccagaacatggcagagaacacaccaagaagaagtgctacacggaggctgccatgtgcctggtgcacgccgctgcgttagtggctgagtatctgagcatgctggaggaccacagctacctgcccgtgggcagtgtcagcttccanaatatttcttccaatgtgctggaggagtcttgnggtcttntgaggacaccctgtccaccttgccccggggcgg

SEQ ID NO: 3711 - DNA, 227 bp, Homo sapiens
  misc_feature (1)...(227): n = g, a, c or t
ccaagggttgggagtgtcccaaagttcaagtcctgggtttctgggtctttggggttggggtcgcagtccccaagttcagaatcaggagtcgtggggtcaaggtgataacatccagattcctagatgactggggtcaaggctggggtcaagggtcccaggttcctggagtcaaggtcattaggcttgaaggtcactgaggctggcagtcatgangaccttggtcacta

SEQ ID NO: 3712 - DNA, 167 bp, Homo sapiens
ccaggctcaggccctggggtgaaaggagacaggtgctgccaagacctggagaaggacaaaagaagacagaatcaagggtgaaggaaaggaccaggcagtggcgaggggtggtgctgctggagcaggtctaagtgggaagcctagtggtcagggatggcccccagagg

SEQ ID NO: 3713 - DNA, 236 bp, Homo sapiens
ctgttgatgaactcatgaaaaaaattatccttgaattcaaagaaaaatgtaaagacaagaagaatcctttaggaaactgtggagatataaatttagtacgactgggtccagaaaagtctattaatagtgaggttctaaagttcagtttggacagccaagtaaaccacagaatgaaaaaagagttaccttctcatgttcaggcgatgcataaaagaaaggaatttctagattatcag

SEQ ID NO: 3714 - DNA, 323 bp, Homo sapiens
ctggctgataagaagggcctccatgttgtggaaatccgggaggaatgtggccctctgcccattgtggttgcgtccccccgggggcccttgaggaaggatccagagccagaagatgaggttccagacgtcaaactgactgggaagatgtgaagactgcacagggaatgaagcgctctgtgtggtctaatttgaagagagccgccacgtaacctctctggccttgtgcaccagttcctgtctgcctgcacctaggagagactcagcccctcacagcttgggatgttaccttgccttttgtttgttttgagggaagtttaatcttt

SEQ ID NO: 3715 - DNA, 251 bp, Homo sapiens
  misc_feature (1)...(251): n = g, a, c or t
cctggaaggtgtgcaggagtttggtagaggagtgatctaggtgaggggaatggaaggtgcanagaccanagctgagagggcctgaggcactttccagagcgtggggaggggcctccaccaaggcgagaagggctgcaggtccagatcaccagcgnttgtagacagtanngtggcgcttggagtttacctgagggccagtggagctccngggacctntccggacgnggacctgtggtgactgggaaggacct

SEQ ID NO: 3716 - DNA, 199 bp, Homo sapiens
  misc_feature (1)...(199): n = g, a, c or t
ccagagggaaggcccaagagacgtctctgaagccaccgttcctgattattcagaggcagggtccacagtgagtgactcggtggggctggaggaacccagggtgacccagagggggctctggagcgggtccctaacatctgaaaaagtcctcccagggaactcggagctggaacttccaggcancttcgggggtgacatt

SEQ ID NO: 3717 - DNA, 176 bp, Homo sapiens
  misc_feature (1)...(176): n = g, a, c or t
cttnggtaatggaaatctcgcgagggttaatcttctcttgagaatggcagtcaagaaatgagatggttcacttgactactgagcagttacaccaaggagagcgtgaaggagatgattgagccagagaagaaacgggttgtgatggcaatggtgtgggggaaatgaacttgagcttt

SEQ ID NO: 3718 - DNA, 187 bp, Homo sapiens
  misc_feature (1)...(187): n = g, a, c or t
aaggtgtgcaggagtttggtagaggagtgatctaggtgaggggaatggaaggtgcagagaccagagctgagagggcctgaggcactttccanagcgtggggaggggcctccaccaaggcgagaagggctgcaggtccanatcaccagcgtttgtagacangtagtgtggcgcttggagtttacctga

SEQ ID NO: 3719 - DNA, 181 bp, Homo sapiens
aaaagcctgagggaacctggaggggggctcccactctctaccttctttcctccgagtttgtgactccgagatggacaaagtgtgtgctgtttttggaggctcccgagcattggcagagctgtggcccaattaatggcccggaaaggctaccgactgggcggtcattgccacaagcctgtaa

SEQ ID NO: 3720 - DNA, 236 bp, Homo sapiens
  misc_feature (1)...(236): n = g, a, c or t
aaatttaacagtgtcctcttgaaaaaccttaatcacagttaagtgatggcatgggcaatgaattttaatcatatttaggaataaaatactagatattagtgtataacaattagatatatgttaattgagcactacaaagcctgaaagcttaacaaagtggggctataactagtaattttttggtaaaaatatagtgatctttttctacngggnattattattangggacaaattat

SEQ ID NO: 3721 - DNA, 333 bp, Homo sapiens
  misc_feature (1)...(333): n = g, a, c or t
ncgaggtcctcaggcgcctttgtctacctgcggcagccgtactatgccacgagggtgaatgcggctgacattgagaaccgagtgttggaactgaacaagaagcaggagtccgaggatacagccaaggctggcttctgggaggagtttgagagtttgcagaagcaggaggtgaagaacttgcaccagcgtctggaagggcagcggccagagaacaagggcaagaaccgctacaagaacattctcccctttgaccacagccgagtgatcctgcagggacgggacagtaacatccccgggtccgactacatcaatgccaactacatcaagaaccag

SEQ ID NO: 3722 - DNA, 168 bp, Homo sapiens
aggtcctcctgcagtgttccgcacagcaaaccgcacgctatggctgacagccgggatcccgccagcgaccagatgcagcactggaaggagcagcgggccgcgcagaaagctgatgtcctgaccactggagctggaacccaagtaggagacaaacttaatgttattaca

SEQ ID NO: 3723 - DNA, 377 bp, Homo sapiens
  misc_feature (1)...(377): n = g, a, c or t
cgccaacatgggccgcgttcgcaccaaaaccgtgaagaaggcggcccgggtcatcatagaaaagtactacacgcgcctgggcaacgacttccacacgaacaagcgcgtgtgcgaggagatcgccattatccccagcaaaaagctccgcaacaagatagcaggttatgtcacgcatctgatgaagcgaattcagagaggcccagtaagaggtatctccatcaagctgcaggaggaggagagagaaaggagagacaattatgttcctgaggtctcagccttggatcaggagattattgaagtagatcctgacactaaggaaatgctgaagcttttggacttcggcagtctgtccaaccttcaggtcactcancctacaa

SEQ ID NO: 3724 - DNA, 125 bp, Homo sapiens
  misc_feature (1)...(125): n = g, a, c or t
ngaggtaaatnaacacattccaggcaatgtaaaacagtnaaaagacaaactcaaatccctgagaatggctgggaagggaaaatggtggtaaaaattccaaatgagtgaaacttacaaagggcagt

SEQ ID NO: 3725 - DNA, 190 bp, Homo sapiens
  misc_feature (1)...(190): n = g, a, c or t
cctgggacctggcctgcacccagtctgtggcccagggaggcatggcaccctagcagcaaagcctgggcaaaggctgagccataccagacacagtagcccaggctacacagggcagagctgcgagtgctacctagccctggggccaaggcggggcaccacaatgctgaangagggcactgcccacagccag

SEQ ID NO: 3726 - DNA, 243 bp, Homo sapiens
  misc_feature (1)...(243): n = g, a, c or t
aaatgaacacattccagacaatgtaagacagtcaaaagacaaactcaaatccctgagaatggctgggaagggaagatggtggtaaaaattccaaatgagtgaaacttacaaagggcagtctcccctgcctgggctctgtcctagacagaagtgacagtgatgactttggtgatgttctccccantgcaagagaactgcattcagaattagacaacctcagtgacnagtatctctcctgcctnc

SEQ ID NO: 3727 - DNA, 321 bp, Homo sapiens
  misc_feature (1)...(321): n = g, a, c or t
cctgcttgatccataggctcacatttgatcccaactggcggctgcttcttggcattaactttggattcccaaccagtaaatcttagcaagatctgagtttctccaggtatgatattattttgtttgaccatccttatcttcaagggctgtgggatctggcagctcttcatttggcccacaccgtgtgaggttgctcttggtgcaccgaatggggaagtttctacatcagtacctcggagagtccactggaagccctggacagtgggaattggtggcacccccancatggaggccaanaacacacagactgaanctccagga

SEQ ID NO: 3728 - DNA, 116 bp, Homo sapiens
  misc_feature (1)...(116): n = g, a, c or t
ncaggtctgttgatgaactcatgaaaaaaattatccttgaattcaaagaaaaatgtaaagacaagaagaatcctttaggaaactgtggagatataaatttagtacgactgggtcca

SEQ ID NO: 3729 - DNA, 151 bp, Homo sapiens
  misc_feature (1)...(151): n = g, a, c or t
cctctcctgtgggttccagaccctgttccagcaacaattgctgggacacctgggccgactgctccacctcgccaggccctggccctctccatctcagccctgacagccaccnagtgataaacacancaggcttnctaaacaatgtgacnna

SEQ ID NO: 3730 - DNA, 174 bp, Homo sapiens
ctgagcaggacctctgaaaccctggaccagtggtctcacatggtgctacgcctgcatgtaaacacgcctgcaaacgctgcctgccaataaacacgcctgcaaacgctgcctgcccgtaaacacgcctgcaaacgctgcctgcccacacaggttcacgtgcagctcaaggaaagg

SEQ ID NO: 3731 - DNA, 228 bp, Homo sapiens
  misc_feature (1)...(228): n = g, a, c or t
ccaaagtcccacggctgccctcggtgtgcactcaggctctggaacatcatggctcatcacgtttaacctcctgtntccatctgggtgatgaaaacctanggggagttaacgcnccgctgcagctcattgncaaagccagcttcaggcagagaacgaaggagggagcgacttcngggctgggtgagctggattctgttcctgctctgccaccaccgtaagcggtcccag

SEQ ID NO: 3732 - DNA, 241 bp, Homo sapiens
  misc_feature (1)...(241): n = g, a, c or t
ctcggaagcgcggcancaggcatcgtggggaggtgaagagcttccctaaggatgacccatccaagccggtccacctcacagccttcctgggatacaaggctggcatgactcacatcgtgcgggaagtcgacaggccgggatccaaggtgaacaagaaggaggtggtggaggctgtgaccattgtagagacaccacccatggtggttgtgggcattgtgggctacgtggaaacccctcgagg

SEQ ID NO: 3733 - DNA, 269 bp, Homo sapiens
  misc_feature (1)...(269): n = g, a, c or t
aaatactttnattttcatttcacaaaaaaagcaacagtgtttgcagctacacatgcctttcagtcagtgttggtcatatgcaaaacaagttatcacaaatataaagaaaaataagccttttccctttacaagtgaaacaacacaatttgcatatacaatattatatacacatattttcaaaatgtttcacaaaagacagattatgatacaaatttagaattccacccacaagctcanactcaaggaattgaagatctctataggtgttt

SEQ ID NO: 3734 - DNA, 375 bp, Homo sapiens
ctggtacacggcagggtcagggttctggatatcaggtaaaacagtcaattgtgtcccagatccaaaggtcagttgccttgcagaaccagaagactccatgtcacccacgaggcagtagtacacagcagtgtcgcccagggaaacccggggcaggctcagagtgctggactttctgtcggcagggataaacagggaggccacttcgtttgtaacttttgtcttgtatccttgaataataaatcgtggtccttggctgggaaactgttggtaccacgtgatataatcatttgtagcaatgttgttgtggctacaggttatgttcacttcttgtctttcatatgagtccatggagatgggctgggtggtcttagcgag

SEQ ID NO: 3735 - DNA, 273 bp, Homo sapiens
aaataacatcacccttccatgtatagtaaactgttcatatttctacaggtactaagagtacactggaattacgtgttacatataaatggagaggtggagggaagggggaaaacttgcactaagtcgcctaagagataaactgataatgttagtaagacagctttgtattaaaaactttttatactacaagttactgcagaatcatctactgtaagttttatctccccaccagaaaactgaaatgttgatttacaatattaatgtaaaatattt

SEQ ID NO: 3736 - DNA, 579 bp, Homo sapiens
  misc_feature (1)...(579): n = g, a, c or t
aaaaggcactagttttaagtgcacagctcataaattctgctgacattttggattaaccttatgtaggttgccagctaatgaattgtaattgatttcaatcttagctgataaatctaattggtaatttatagaacaaatatttgataagctcctattaattgtcaccccaccaagcggacagctaacatgaattgcacttcactgcagctttagagatcggtttaggctgagacattgcgcctgccttaggttgctgacttctttatttcagagctctggagacacctagtttgaaaaatgttattctgtttttttgtgagaacttagtaaacaagaaaatactcttgagtgaaatgcaatgtatttcttttgtaatcagtgcatttgaaaattcaagccagcatattcctagtagatggaagcaaaattaagttgtctttgtagaaaatgaagagcctttcttccaccaaaaatccctgctgtatgcaaatagccctgattaaccctctcccttctgctgtttcccatattacanacttggagactgtcctcattcccatatgtaatagacatccaaga

SEQ ID NO: 3737 - DNA, 158 bp, Homo sapiens
ccttctagcatggcatcaattccgatataggttcctgtgcgcccaacaccagcactgcagtgcaccacaatgggaccactgaagaaattgctgaaggcattcactctccttctcagtttgaggagcaagtgaggatcctcaggcaccccgtggtctgg

SEQ ID NO: 3738 - DNA, 310 bp, Homo sapiens
aaaaatattaacagttattcatttaatatttttccacactttgaaaccacctttgcaaaaattacaatggagaaaactgtatcagtgaacaagatctgatctaactgactccatcttgcttttaacctccaagctgtccttgttcattcctgggtggataccaaactaactttgggaggaacttagttgatagtttcactttgaaagaaagactgtaacaaaaaccctcttcctgactgggactacactgcctttgcaggactaacaaattagctacaaaattaaaaattatggtttagaagctgtgcag

SEQ ID NO: 3739 - DNA, 325 bp, Homo sapiens
  misc_feature (1)...(325): n = g, a, c or t
cctcagccntccggccaagaaaacagaaaatatggggacagaacagtcattcgtgcacatcccagatctcagagagcagcggtgggagctttttgtcctgcagacgcagtgcaaacacttgctctgagtggacgctgctcagggtccggaggctcaccagtttcattagcatccgtgggaacatcantcggtcatggggatggnggatggagacgtaggcatgcagggcttccacatatgtgtgctgcaggctctctacctggagctggtcctgcacgttgggcgcggtctataggtcaccaacanagttgaggancaggtctgg

SEQ ID NO: 3740 - DNA, 420 bp, Homo sapiens
ccatttccccccgcagctttctgccagcactcccaacagtctttccacagaaccgagcactgctcggtgaatgaggactggacgctccagggcacccgcctgccccttatactggaggtcaaatctcaggggcagttggaagtcaagctgaattgtcccacactgatgtggccggcccagggcatcgtggaggtgcacgtcaatcttaggtccatagaaggcaccatctccagagttgaggtcccagggttctccaaattccttcagggcctgtttaaggacctgttcggcctggtcccaaaggcaagggtcccccaggaagccagatggccgggtggacagtgccaggcggaaggagaagccaagaacggcatagacggaacggaggaaatcaagacagctttggatctctgcttccag

SEQ ID NO: 3741 - DNA, 225 bp, Homo sapiens
ccatctctctcaaagcaatgaagaaggagatgaagattggggcctattacacaagataaacagtgtcagcatgctttaccagagagaacattttcatcaccccactactgaaagccatgtataatccaccaccacctgttttttgggggacctgggacacatgaaacacagagaggaaatttcatgggtactggatgaaacaaggaaggaaatgtttttgctcac

SEQ ID NO: 3742 - DNA, 315 bp, Homo sapiens; identical to SEQ ID NO: 3124

SEQ ID NO: 3743 - DNA, 304 bp, Homo sapiens
ccaggccaaggggagctcgctggctgcccatggtgcccggaagaatgggggtggcagtggcaagagtgcaggcaaacgactgctgaagagggctgccaagaacagtgtcgacctggacgactacgaggaagagcaggactacctggatgcctgcttcaaggactcagactacgtttacccctcactggagtcagatgaagacagccccatctttaagtcccggtcgaagaaaaggaaaggctcagacgacgctccctacagcccaacagcaagggtcggcccatcggtgccaagacaggacagg

SEQ ID NO: 3744 - DNA, 273 bp, Homo sapiens
ctgcatctcctgccctgctgtcattacagggatgggcaggctggcatgggggcacccgctgcccctgcctgggtgttgctgtgtattcctgccggccaggggccactgccaggaccacgcctcccttttcatatcccgattcttaagttctgctattgtggtattctggtggagaaaaaagaaccgcgtggctgtttttgaactgcctggaacctaagaccctgaattcttttcccccccaaggggaaaatctatatggaaaacatttatttt

SEQ ID NO: 3745 - DNA, 313 bp, Homo sapiens
ctgcgtcgtgacattgaggacttaaggaccaccatgtcaggcagatatgcccaggacatgggagaaaactgtgtcacacagtgaggaattctgggggattcccccagggaggagctgggctgctgagagcctagtccagcaggtttctgccctgacattctcttgtctgctattcccagagaggtctcagaggggaggggagagcctgcatctgggggccaagggcgaattccagcacactggcggccgttactagtggatccgagctcggtaccaagcttggcgtaatcatggtcatagctgtttcctgtga

SEQ ID NO: 3746 - DNA, 557 bp, Homo sapiens
  misc_feature (1)...(557): n = g, a, c or t
tagcttggcgtaatcatggtcatagctgtttcctgtgtgaaattgttatccgctcacaattccacacaacatacgagccggaagcataaagtgtaaagcctggggtgcctaatgagtgagctaactcacattaattgcgttgcgctcactgcccgctttccagtcgggaaacctgtcgtgccagctgcattaatgaatcggccaacgcgcggggagaggcggtttgcgtattgggcgctcttccgcttcctcgctcactgactcgctgcgctcggtcgttcggctgcggcgagcggtatcagctcactcaaaggcggtaatacggttatccacagaatcaggggataacgcaggaaagaacatgtgagcaaaaggccacaaaaggccaggaaccgtaaaaaggccgcgttgctggcgtttttccatagctccgccccccctgacgaagcatcacaaaaatcgacgctcaagtcaaaaggtgggcgaaaaccccacaggactatnaaagataccaaggcgtttcccccttggaagcttcctcgtgcgctcttcttgtt

SEQ ID NO: 3747 - DNA, 301 bp, Homo sapiens
ccacatcaggaggttgcaggttaaccagaactcaccgacacagcaggagagcagcttggaacctgcaacctagccaaaacctagtgccttggattgggggagaaaacatgcagccattcctctctctctgctggctagaggggattctggcttttcctcccagagccacccctttccctcctcctaaagttgatggtggttctttaaggaaagggagaagtgcacagtgtgatagggcaggaagagaaggaaacggaggagaggaggggactttcccataagcaggcagaagaaaaggcag

SEQ ID NO: 3748 - DNA, 262 bp, Homo sapiens
ctgcctgggccccaccctcctgactcctgctgatggttaagggccgggagcagatgctgccaaggccacatgtaccaaagcaggctgggcccagggttctatttattgccttgctctgccctctcccttccccggttgtgggacaagagccctccctgaacccctgcaaccctccctgaacccctgcaaatgaaaccaaacgtccacctgggtgtgttcattccttcctgtccttcaaagtacttgatagcctttcataagg

SEQ ID NO: 3749 - DNA, 271 bp, Homo sapiens
aaatatttgttcttttaattttgccatatccaaaaacaagtttgtagagtgtccttctagatgcctttttattctttcccaaattttgatcttattaagaacatctaatagtttccacaaatccttatgttaagcttctagagcaggccatatcatttgaggttgaggtgccactataccgccacggttccagataataggaacttttgccatacttcttatcatttctaccatctgaccgttttgttcagatcatctgaacatagtgtgg

SEQ ID NO: 3750 - DNA, 186 bp, Homo sapiens
  misc_feature (1)...(186): n = g, a, c or t
ctccagcagacccctgnatacntaaaggngcaaaccaacaanatggtgatgctgtcctgcnaggctaaaatntccctcantaacatgcgcatctactggctgagacagcgccangcaccgagcagtgacagtcaccacgagttcctgnccctctgggattccgcaaaagggactattcactgagaa

SEQ ID NO: 3751 - DNA, 283 bp, Homo sapiens
aaaattaaacctaaagaataggaggaccccagcaggcagaggaagggcctgcaggaagatgtaaataattaacataaagaacttttcctttaatagaggagctgaaagaagatcagggaggctacatagagagtgtcagaagggtaatgctagctgaggctggaggtgggccagaccatccagggccatggaaactggatttctttctgagtgcattgggaaacctgcagggttttaagcaggaaactgaaggatccaatttatattaaaaacattactctgg

SEQ ID NO: 3752 - DNA, 362 bp, Homo sapiens
  misc_feature (1)...(362): n = g, a, c or t
ccattttgngtcttttgaggttgtgctgtgggggtttgggtttgagggaagggagcagggtggcggttgaggaacgcttcagccttagctgctacctttcggcagcagtgaaatacaagctgcagcctcggctgccagggctcccttttgacttattgtcgccactgccccttggtgctgtgtggtcccagtggaaggaggggaagattttggaaacctggtagccaccagtaaggtgattctctgccctgttggggcctaaatttgggggcttttgggcaacctctccgtgtactgcgtctgtccacactcgattgggccccaggtgtgtatgaggcgctctggtaaggtgctcaggccag

SEQ ID NO: 3753 - DNA, 240 bp, Homo sapiens
  misc_feature (1)...(240): n = g, a, c or t
ttgtgctgccgttcgtgttttgtggggaggcgcagtgtctgtaggccgtgtggcttgcagagtgtctttcggcccaggtaaacgccgctgtgaaggactccaggaaagctgctcccatcacaatccccctgcctgacagccacaggtaagaacacagaatgcacccacaagatggaactgaaagcaaattaatttataaaaaaaaaaaagaanaaagaaagaaaaaaagagaaantttac

SEQ ID NO: 3754 - DNA, 303 bp, Homo sapiens
  misc_feature (1)...(303): n = g, a, c or t
aaaggtatccgggagattggcagtttgtaatacaagaattatgtgcccccnagaaggtttctggcctcagtgtctctatctgtctaatgggcagcagatcagacaaggtctgtcggctctgacaggttcaaggccatctcctctaaatgactcactgtctctggagaaatatgtgagcattttcacaggggaaaagaggggtgcattccacagcccctgccccgaggaggtctgagaaggtgaaggaaggccagatgcagagagacaggggatgacaaatgacagctcanatttctcccatgg

SEQ ID NO: 3755 - DNA, 441 bp, Homo sapiens
ctgctccaaagacacccagtatctcaaggattctctggcactggggaaaacagaggaggaggcactgaagcacttccgagtgaagtttaacgaagccctccgtgagagctggaaaaccaaagtgaactggctggcccacaacgtgtccaaagacaacaggcagtagtggctcctcccagccctgggcccaagaggaggcggctgcgggtcgtggggaccaagcacattggtcctaaaggggctgaagagcctgaactgcacctaacgggaaagaaccgacatggctgccttttgtttacactggttatttatttatgacttgaaatagtttaaggagctaaacagccataaacggaaacgcctccttcatgcagcggcggtgctgggccccccgagctgcacctggctctcggctgaggattgtcaccccaagtcttccag

SEQ ID NO: 3756 - DNA, 311 bp, Homo sapiens
cctccacgaagaatatttttggccgatactcttcacagcggatgaaggattggcaggagattatggctctgtatgagaaggacaacacctacttaggtaaagtggcccggcctgggagccctggtatccatggggaagcccactctcagagttctgagataccaggcttataggaggcacagtctgtgagtgggaagagactggagtgtagatgttgcccatttgtaggtggtaaaatcaattgtttttgatggaattgattttccctgagtggagtgctgggggaaggaggaggtccaggccggtagtgg

SEQ ID NO: 3757 - DNA, 290 bp, Homo sapiens
ctgcctgcgcccccgggcttcgcagccttgcttgttttctctggacagcaacagaacagtgttcacagcgattcaaagggtggcattgggttggacgttctgggtacaagccaacctagtcccacgttgtacgtgaatgtttaatgtgctctcaaaacatggaaaataagtttagtgcacatagctaaatcacaaaacatccaatttctctgtttcctcaggaagtcattactgcgccaccacatcacatgaccttaacatgatcaatgtatttctctgccttgacattt

SEQ ID NO: 3758 - DNA, 490 bp, Homo sapiens
  misc_feature (1)...(490): n = g, a, c or t
attgttatccgctcacaattccacacaacatacgagccggaagcataaagtgtaaagcctggggtgcctaatgagtgagctaactcacattaattgcgttgcgctcactgcccgctttccagtcgggaaacctgtcgtgccagctgcattaatgaatcggccaacgcgcggggagaggcggtttgcgtattgggcgctcttccgcttcctcgctcactgactcgctgcgctcggtcgttcggctgcggcgagcggtatcagctcactcaaaggcggtaatacggttatccacagaatcaggggataacgcaggaaagaacatgtgagcaaaaggccagcaaaaggccaggaaccgtaaaaaggccgcgttgctggcgtttttccataggctcccgcccccctgacgagcatcacaaaaatcgacgctcaagtcaaaagggggcgaaaacccgacaggactattaaagataccaggcgttnccccctggaa

SEQ ID NO: 3759 - DNA, 319 bp, Homo sapiens
ccaaaacctgcagtaggggttgcactactgatactcatgccagccatctgctgattcatctgtgagaggctccactggggctgctgagcttgcggcaggccaaacttactctggggtgcacccatttgtcccaccattcctccttgggggccaacaacgttctgaggaagtggcatcacaccagtttgtgcatttcccataaacccattgggcatgggcatgcccaccatcatgcttggactctgtcccatcacatttcctataaggccaggagctgcaggcacaggcacgcccatcgatggaaagccctgaaatgcag

SEQ ID NO: 3760 - DNA, 291 bp, Homo sapiens
ctgatgcagtccgagagctagatggaagaacactatgtggctgccgtgtaagagtggaactgtcgaatggtgaaaaaagaagtagaaatcgtggcccacctccctcttggggtcgtcgccctcgagatgattatcgtaggaggagtcctccacctcgtcgcagagtcaccatcatgtctcttctcaccaccctctgaatctgcattagccagccaactagccctttcagcgtcatgtgaccagcgcgccccattcagcttggctggtgtcgtttcacatgacccaggctgg

SEQ ID NO: 3761 - DNA, 269 bp, Homo sapiens; identical to SEQ ID NO: 2613

SEQ ID NO: 3762 - DNA, 319 bp, Homo sapiens
  misc_feature (1)...(319): n = g, a, c or t
gtccatgtgactgaactttagacagtgagatataagcagatatcttctgtggcagtgttaggaaactattaaagacagtaagaacattgccctttgccttctttttcctttcttcatttttctgcctggaatgcaagtgtgatggctaacaccctancagccattttagattatgaagatgagagtcactccccangaagggtggacctgaaagctggattctagatgtggaatgacaataccaccctggaccacctacctgtangctgtgtgtgtgtgtgtgngattgacanagagagaaganagatagagagattcc

SEQ ID NO: 3763 - DNA, 198 bp, Homo sapiens
ctgcaaccctgtctacagtaacatctggggatctagatttattcactgagcaaactacaaaatcagaagaagtggcaaagaaacaactttccaaagactccatcttatctctgtatggcacaagaaccattcaacagcaaagtactcctggtgtatttatgggacccacaaatataccatttacctcacaagcaccag

SEQ ID NO: 3764 - DNA, 428 bp, Homo sapiens
cctgggcaccttcaggaaggccacctcctatcaggagcccttttcgtacatgggggagctcttttccaactcttgttacccctatgacagaatcctagtgcctagcattgaatgagctatgtggaatatcaggttaccagggagaaggtagcttggagtcaggagatcaagaaattctcatacctttcatctcttcccagttttccttgtagacagctagccaagcccaacgtccagagcttaccattatcaaaccaaggcacacacatgcacgcgctcagcttagaagacctctatccagcacagatgtccacaaagatacacccttttgttgggagttaatgtccatgttctttcttgttctcattacggtcccaccccctcctccagatcgggcagggctccaagagaaaaggaaagtagaacag

SEQ ID NO: 3765 - DNA, 265 bp, Homo sapiens
ctgtgaaacagaaggcactttgtgctaaaattcagagggtctctcaagagagaacgccacagcagagagacccaatccgcctaagttgcaggcgaccctttagggtggggaggagtatcccccaggaaggcatctgcaaaggaaaaaattgtaatcatgattccaaggcaaaatggctaaagttgggagagaagaaataccaagagagaagacaaaacatggctgtgccaaggactgaggagtgagctttacaaggacttatcag

SEQ ID NO: 3766 - DNA, 216 bp, Homo sapiens
ccaggctcaggccctggggtgaaaggagacaggtgctgccaagaccatacatcagtcatctggcagcagctcgagaagcatgtcctccacgccgtcaatcttgatgtggtacactaagcgccagaaactggagtctgaggatcggtatcgtccatcagggtagagctgccacatgataggcagcaggcttgggcctatctgggtgggggtcatagg

SEQ ID NO: 3767 - DNA, 334 bp, Homo sapiens
ctgaagcaacttgggattaattgcttgattagcttcacgaagcacagagataaggtcgctcacttgctttatgttattaggtgtaaagaaagtgtatgctgtgcctgttttggtactgcgagcagttcttccaattcgatgaatataatcctctgaggagttagggtagtcataattgatgacaaatttcacatcttccacatctgtaaggtgttgcagtgtggcaaaatagcaatgtacggagttttgcacaccacaacagccagaccaaaaataaaaagttagacaattgtattcccaagaaggtacgggctgcaaaaaatacagttaaaat

SEQ ID NO: 3768 - DNA, 235 bp, Homo sapiens
cctaccataacaacatctttacacacagtcaggtaggtctggataatttgctgataaatgaccctatgaagcttcaggtagtcttcttcttgatcttgaataaaagataaaattttgctttctaaccaaaagccagtgtcttccaacatggacaaatacacctttccttctgagcagaacttgtgctgaagatggatgctcaggcgacagtggagaccaaaggctcgcggggcag

SEQ ID NO: 3769 - DNA, 221 bp, Homo sapiens
aaagtggcccagggtcaagctctgagccttcagcatcctccggtatggaatttcttccccacagaaaaagtaagtgacaaccaactcactggcctggagcgcgtggacacctgtcagtttctttggctctttgtgatcttctggagccaggcttggattggagaagggtgtggctcccgtctgaacagtggccgaatgattcctgtccctctgctgactgg

SEQ ID NO: 3770 - DNA, 445 bp, Homo sapiens
aaaaagccaaatacatttctgacaaatggaatgtctgataattatgtgactgaatctcacatttactaattctgaaactagttaataccaaatagttcttaaaagacaaaggaagagaggtgatttctctgtggaaaggttgggcctaagggtcaaggatggttctaagtcatcagactacagagttttaatctaaacatttttcttcattttttactatgttagaaagagcaccctgagatattaaactactacccaaagcatctttttcaaaaagtgaaaaaaggaaaagggaggcactccatcatggattcgcactaaaacaaatatcttctatatatttgaagttgaatgctcttaactaccaactgaatggcacgttcacatatgaagacttcttgtgattcctgcaagacagtgggagtgtgaatgacccctgctgtgg

SEQ ID NO: 3771 - DNA, 203 bp, Homo sapiens
ccaggatggcagagacttccttgtcatcatggagaagtgccagcaggggactgggaaaagcactctacccagacctcacctcccttcctccttttgcccatgaacaagatgcagtggccctaggggttccactagtgtctgctttcctttattattgcactgtgtgaggtttttttgtaaatccttgtattcctatttttttt

SEQ ID NO: 3772 - DNA, 246 bp, Homo sapiens
cctggaaggtgtgcaggagtttggtagaggagtgatctaggtgaggggaatggaaggtgcagagaccagagctgagagggcctgaggcactttccagagcgtggggaggggcctccaccaaggcgagaagggctgcaggtccagatcaccagcgtttgtagacagtagtgtggcgcttggagtttacctgagggccagtggagctccagggacctatcaggacggggacctgtggggactgggaag

SEQ ID NO: 3773 - DNA, 394 bp, Homo sapiens
ctggctcccagcctcgtctacctctgcagagcaaagggccaagatgagaacggtatagccacatgtgtgcgcgcatgtacatgcacacagacacactcatgcattcacgcactcacacacaccaagatctgacggttgtagctggataggggagattctgggaagatgaacagaatcctgaggatgtcaggatgaagaagccataggagcatgatcttacaacttcaaattgatgtccatgagtaaggaggaactgaaggataaaggcaagactactggggtttcagcaaaggtaaagatggctgggtggtgagatgagtggagagagtacctgtgtcatagccctgagggagtccagagatgaaactatgggccccagactttactgcagcag

SEQ ID NO: 3774 - DNA, 183 bp, Homo sapiens
aaacaagaatccactgttgctactgaaaggcaaaagcggcgccaggaaattgaacaaaaacttgaagttcaggcagaagaagagagaaagcaggttgaaaatgaaaggagagaactgtttgaagagaggcgtgctaaacagacagaactgcggcttttggaacagaaagttgagcttgcgcag

SEQ ID NO: 3775 - DNA, 219 bp, Homo sapiens
ctgcaggacatgtagagaaaccaaaccgggaaatcttacaaggagttgaaaagattaatgtcccaacctgatgagattacggccttgagacaataaggtggagcaacagaacaatgggaaagaggactgggagaggaatctaagaaccagatggcttcagctctctagaggagctgagcctattcacagtgcctaacctggaagcctgtgaggaacagg

SEQ ID NO: 3776 - DNA, 357 bp, Homo sapiens
ctgagttcccttcccgaaggtcagctcggggctcccgacgatcatgcagaagtagatgccactgtcttccggcttcacgcttgtgagattgagaatgaaccggcttgcatcccgaaacacagctatcttctcctgttccacctcttcaccgtggatagtcccttttgcggaatcccagagggccaggaactcgtggtgactgtcactgctcggtgcctggcgctgtctcagccagtagatgcgcatgttactgagggagattttagcctcgcaggacagcatcaccatcttgttggtttgcacctttatgtatgcaggggtctgctggaggactgagttgccatggagaactgtcag

SEQ ID NO: 3777 - DNA, 349 bp, Homo sapiens
aaacttgttaaaataccttgttgctagtgctcagaacatctaggtacagtctttatttttaagacagtatctatcctaggcaaatgagagcttgtttttatgtatttaagagtttcctcttgtcatttcaatgtcaaattgatttgactcaatttcatgatttcatctcgctcaaggccatcaaccggtcagagccagagcccttcaaaggctgtatgtgagtatatgagggaaaactttccacataattttacatcatttctatctcatagcagttttagttttctcatagctatctcatagcagttttagttttctcaaattctatgctgtttttgtactactgcag

SEQ ID NO: 3778 - DNA, 370 bp, Homo sapiens
  misc_feature (1)...(370): n = g, a, c or t
ctggtctgggaagaggtggtctgctgacctgtggtatctcagaggggacgttcctcctcctccctgtgcaccaggtgggctgcaccctcctgcctattcaggatgtggatgccacaggagagcagcaggcagtggaaacttcagttgcactggttctcctggtggcaaaggcatgaagcacaggggtcgattaatccaggctactagaaagctccagagcaaagtgtgcgggtcccacaaatgcttggctggtggggtctggatcagtgctgagatagagttggcagaagaagcagaggcactctgcttgctttcctagccagtcctcccctacacacacacacacacacacacacacacacaatctcan

SEQ ID NO: 3779 - DNA, 370 bp, Homo sapiens
aaaatactatttctttggaaatcgaaattcaagaaaattggaataataataattaaaaaaaacctctttgggtaaattttacctgcgttcattggttttaacatgctgccactttttctctttctctctccctctctctttctgcaccattttcaggtaggtggcatatattgtctcctttcaccctttaacacatcccaagaacaggacattatcttctgtaaccgcaatatgcttaccaagttgagaacattttctgcccagcagtccatgttccgggtccatcagttctttgttagtcagtttccgtctgaggcagcgatggcaaggggtcaaggtggacagcagccagtggtagacttgtggattt

SEQ ID NO: 3780 - DNA, 240 bp, Homo sapiens
aaaaaacaaataggtggaaattgggagtttgtaatcagagatagtcaaacactaacgaggtacaatttgaaagtaacattattcagcttctcaaatcaacctattattttttttaccaacttactgtgtttcccaaggtcttaacctcattctagattgttaactacagctaggtttaccagggttcaaggagttgaatgtgaaatactagaggcttatcttgaaggcaaaactttaagg

SEQ ID NO: 3781 - DNA, 320 bp, Homo sapiens
  misc_feature (1)...(320): n = g, a, c or t
ctganaccacaaacaggtactttgagggagatagggtgggataggagttttatgccaaacaggttggctaaacagacatattcaacaggtcacagggggaactatgaatattcatgaaagggggtcatatgtgtgcttgataagcaaacatatgtgttacatacatcccatgttcaccttcgagtggagaattaacattaaaatgcagtaaaattaggttctgtatgttgaaaggtgaaacacaggacacgaagacactttgtacacagcctcggtgaaccagccagaaccagcccatggttgaatactttgtagcctag

SEQ ID NO: 3782 - DNA, 285 bp, Homo sapiens
  misc_feature (1)...(285): n = g, a, c or t
ccatngggnangcccaagagacgtctctgaagccaccgttcctgattattcagaggcagggtccacagtgagtgactcggtggggctggaggaacccanggtgacccananggggctctggagcgggtccctaacatctgaaaaagtcctcccagggaactcggagctggaacttccangcagcttcgggggtgacattngtatccggccagnctagctgggaaaggagaccttgtgtcctggcaacagggagagncaggactgggatggacctcngncgcnact

SEQ ID NO: 3783 - DNA, 441 bp, Homo sapiens
ccagagatggcccttcaagcaacagctcattccacagcagcgaagaggaagggactgaccttgaaggagacatgctggactgcagtgggtctcggcctctccttatggagtctgaagaagaagatgagagctgcagaccccccccggggaagctgggaggagccgttccattcgctccaccagaagtctctcctgagcaagcaaagacagtgcaaggtggaagaaagaaccagtttcaagccttcacacagccagccactgatgggctcagtgagccagatgtttttgccatagctcccttcaggagctcaagggttccaaatgatgacatggacattttctccaaagccccatttgtctccaagagcagtatggctccttcccagccagaggagtcagacgtgtttttgagagctcctttcactaagaagaaaagcatgg

SEQ ID NO: 3784 - DNA, 380 bp, Homo sapiens
  misc_feature (1)...(380): n = g, a, c or t
ctganntcaaacaccttgcacaccagctcctctccgctgtgcagatgcacggcacgaaaaacgtggtctccctccagaggttccaacaataagtatttcccgatacaagaaacgcaatgcgacaagttcggagtctcgggcgggctcggggagccgaggttcgggctgaaactctggctgggctccgcggaccttatagacgacaactcttcgaaatcctgggttttgttccgcgatctcccatatctcgctattgtgatgggggtagacctgtgtatgttcatgagtgtgaggatcgcacacgacaaacaaaaaaaaacccgctggagagatgagtcgctggcgagtgcggttgcaggcgcctcggtgccactgatttt

SEQ ID NO: 3785 - DNA, 274 bp, Homo sapiens
ctgctcattgaggagtgttgaacttcaacctgagggggccgacagtgccctccaagacagagacgactgaacttttggggtggagactagaggcaggagctgagggactgattccagtggttggaaaactgaggcagccacctaaggtggaggtgggggaatagtgtttcccaggaagctcattgagttgtgtgcgggtggctgtgcattggggacacataccccttagtactgtagcatgaaacaaaggcttaggggccaacaaggcttccag

SEQ ID NO: 3786 - DNA, 351 bp, Homo sapiens
aaatgtgtttggtaactattggaaaattttctcttcttaattatgttctgtgtattgtattgatcctgaattgtatagttaatagtgacttttcaagatggggcatgctcaagatcgaacagataataaaagatatgcacatagaatactaattgtagcttttttttcttctggaacatttcagttcttcaccctctagcttcttccaaatatcagtattcccacttgcatagaagtgcagaattgaagagttgggtgttacataaataggctaagtgtttggatgacttgttcaaggtgacaaaattttaattccagttttctgactcctagtacaccacacacaccttt

SEQ ID NO: 3787 - DNA, 169 bp, Homo sapiens
aaaaacacaggttgccaaggcaggctgcctagttcctatcatggccctgccacttggcagttctatgccctccacttctctgtgcctcagttccctcaggaagaactgagtattcactctttccgtgcgctgagcacagtggagggcatgagggcactgagaggagcag

SEQ ID NO: 3788 - DNA, 237 bp, Homo sapiens
cctgaccatggagaccccggcttggtcccacctaatctctgcagaccacaggttggtgacgggtctctgggatgaggctggagctgggagcacctcaggctcaaaggaacttagcatttggctccaggaatggatagcccagggtgggcggcagcgtttccattttcaacacacccaacctcagcacaagactcccagatctgcaacggggatggtgacagtctcagtcgactgtgg

SEQ ID NO: 3789 - DNA, 446 bp, Homo sapiens
ccattattcagttccaaagctgcttccacgttttcaggtatctttacagcaatacccttctgctctggtaccaatcttctgtattggtctgttcttatactgctgtaaagacatacctgtgactgggtaatttataaagataagaggttgaatcagctcctgttctgtgggctgttcagacttctgcttttggggtggcctcaggaaacttacaatcatggtcaaagttgaagaggaagaaggtacatcatcacatgacctgagaaggggagacagagagagagaaggaggaggtggtacacaatttcaaacaaccagatcttgttaaaaactctatcatgagaacagcaagggggaaatccaatcccgtgattcaattacctcccacgaagaccctcctccaattctgagaatgaaaacttgacatgatatttgggtgggataac

SEQ ID NO: 3790 - DNA, 376 bp, Homo sapiens
cctgaaggacccagggccctctggctggatgcgtttgcctatcaggacccagaattacttacagacctgtttagggctaggcttggcctctttcttgagctcatctggaggggtgtggcaacactcattcttcatccttattctccccggctgtgggcaacactggtcctcagtgtcaccagatggtcctcctctgtgcccatgacccctcagcagccaaggctggccctgccagataaatgtgtgtgcccatgatcacacccaggggcacaggccacatacgtttccctgaaaccttgggctccagcctccatcccgtccatgtgggagggaacttgggtcccagcagtgtgtctttcagcaccaagtcatgttt

SEQ ID NO: 3791 - DNA, 298 bp, Homo sapiens
aaagctcgtaaattatctcaggaattttccatttaatattttcaggctgtggctgaccgtgagtaacaaacccaggaaagcgaaactgcagaacagtggatgggagaaagggtgaattactgtatattcatgagggatattagtccatagtttcttttttcccttttaacaaatttttgggttttgtatatagtttgtctggttttggtatcagggtaatactagcttcataaaatgaattggaaagcgtttcttctgttttcctaaaaagattatatggaattagcattcattcttt

SEQ ID NO: 3792 - DNA, 117 bp, Homo sapiens
  misc_feature (1)...(117): n = g, a, c or t
aggtgcaaaccaacaagatggtgatgctgtcctgcgaggctaaaatctccctcagtaacatgcgcatctactggctgagacagcgccangcaccgagcagtgacagtcaccactagt

SEQ ID NO: 3793 - DNA, 322 bp, Homo sapiens
ctggatcatacggttgcagtccgtctaagaaataattactaatgaaactggcagagctttgactgttttagctttgcaagaaacccaaatgaggaatgctatctatcagaaaagactggccttagactacttgctagtagctgaaggagtttgtggaaaatttaacttaaccaactgctgcctacaaataaatgatcaaggacaggtggttaaaaacatagtcagggacatgacaaaggttgcacatgtgcctgtagaggtttggcacgagtttaatcctgagtctttatttgaaaaatggtttccagctataggaggattt

SEQ ID NO: 3794 - DNA, 390 bp, Homo sapiens
  misc_feature (1)...(390): n = g, a, c or t
ctgcngcatcatctcctcctgcccagggccccatgctattgtcctagttctgctgctgggccgctacacagaggaggagcagaaaaccgttgcattgatcaaggctgtctttgggaagtcagccatgaagcacatggtcatcttgttcactcgcaaagaagagttggagggccagagcttccatgacttcatagcagatgcggatgtgggcctaaaaagcatcgtcaangagtgcgggaaccgctgctgtgcctttagcaacagcaagaaaaccagtaangcntagaaggaaagtcaagtgcaggagttggtggagctnatatanaaaatggtgcattgcaacnaaggggcttactttttctnatgacatatacaangacacacacgaaa

SEQ ID NO: 3795 - DNA, 323 bp, Homo sapiens
  misc_feature (1)...(323): n = g, a, c or t
ncgaggtggacnnctccatcctgcagttcctgccatgagcctcgggctcctgtgctgtggggccttttctctcctgtgggcaggtccagtgaatgctggtgtcactcanaccccaaaattccgggtcctgaanacaggacagagcatgacactgctgtgtgcccangatatgaaccatgaatacatgtactggtatcnacaanacccangcatggggctgangctgattcattactcanttggtgagggtacaactgccaaanganaggtccctgatggctacaatgtctccanattaaaaaaacanaatttcctgctngggt

SEQ ID NO: 3796 - DNA, 219 bp, Homo sapiens
  misc_feature (1)...(219): n = g, a, c or t
ctgacaagaggcacanncacagagctatgaggacagtcttatttaggcaaaccattcttatactcatgcgtaccagaaaaatgtctttgtctcttctgtgacactgctagatgctggggatataacacacatcgctgtccctaccctcacattaggggtagctgtaattatattctggtcaagaactgtgatgctaaatttcaattcttactagctttt

SEQ ID NO: 3797 - DNA, 240 bp, Homo sapiens
ctgggtgtgtgccgcgtagtgaaaatcctcttgtcagggggtatccggggagcttcgtaacccgaatggatgcgctctgcaatcagcaggcagcacggctgtgcaggggccccatctgagacccggatcttggtcacatacggggttaggcggaatggctggtaccgaggccctggatcccggtcaggacctcctctgatacggcagaagacggacttctcctgggtaaagtccctgagg

SEQ ID NO: 3798 - DNA, 333 bp, Homo sapiens
aaaaattcagatttccagttcgtatacatataagcagagcaaaaatttcattaatctaataatggaattttcaatttgctggctaacaaataaattgatctaatttttagaaactacaagaacaaatgtgcatgaatttaaccgtgttcaccaggaatcaagaggatgaatgttactaggtacaaagggtcttctgtgtgtgtgacaagaatctaggcaacaccattattcataggttaaggatgctatttgctccgtatctgaaaaaaagaagatataaattcaatgtctagaatgtagccatgacagggaaaatattagagccactatttt

SEQ ID NO: 3799 - DNA, 134 bp, Homo sapiens
tccgccagtgagtccttggtttttaataatgagaagtcctttcccccaaggtgtgagcattgcagcgcagtgtgtgtgtgtggttagagccagcttagtccttcactttgtcgaccgaagtgggagctcaacag

SEQ ID NO: 3800 - DNA, 184 bp, Homo sapiens
cctggaggcccagggtggacgtggtcctcagccagaccaagggcctcctctagtggaggggcttcctgggctctctctgcactgcccctcagggtgctttctggggtccagtcaatggatcttacacacccatgaacactgagcccttggggagacgtgtccaggcttcagtttcccctcccag

SEQ ID NO: 3801 - DNA, 163 bp, Homo sapiens
cctctagaacctgcgtcaagaatgtctccatcgccaccacaaattgaagggaaaccacccttatcacagagcaggaggcattgaaactggccttgcagagctgaacaggtggtgagagcagagcagtgcaggtggacagagatgaggaagtcttagcagtcag

SEQ ID NO: 3802 - DNA, 171 bp, Homo sapiens
gcttgaggctagcccagtgaagaaaaaccagagactcatgtttccaggggtcagtctgtcaggcaggaaggacccaggatttgaacccagcttcagtgtgcaggctccgaggctgcccaggacgggaaagtccaaggaaggggcctggtggtgctccacttgcagttcttt

SEQ ID NO: 3803 - DNA, 344 bp, Homo sapiens
aaattatatatattatatatgtaacatgatcagcaagtctggaaacataacgaagttttatagtattgatttattcctatcactctgagatatggtgacattacatgatatgttcaacgtgttgttcctcattagcaatgtgttatgcataatggggaccaacatgggacattaatacaacatttctatcagtgcctgcacatgcttctgtgatacgttgcctccaatgatttttgtctctaattttcagaatataaacctgctccattagcattttctggaagaagcaatcaaatgggttaatctgtgaaagtaaatgttatctatatttcccaacattatgg

SEQ ID NO: 3804 - DNA, 208 bp, Homo sapiens
aaagcgaattctctactgaaaggtctgctctgcttaaggagctacaaactgctctcaaaagaatgaaatactgagttccaattcagtgaggcacagtgttggactatggcacatttagttggagtcggggggaggtcaggaatatgatcagataatggattttataccttagagcaaaatctattagtctctctcagtttatcaattt

SEQ ID NO: 3805 - DNA, 410 bp, Homo sapiens
ctggggcttccattcacgactttctggtccctggcaggacagagcgggatgccaccagcttgtccaaagggaagttccaggagctcctggtgggcatcgttgtggagaatgacgctggccgcggcgagatcaacgagttgaagcaggtggaaggggaggcttcgtgcagcagccgcaaaggaaagctgattttcttctatgagtggaacatcaaactgggctggaaaggcatcgttaaagaatctggagtggagcacaagggattgattgaaatacccaatctttctgaggaaaatgaagtagatgacactgagaatttacaacgggaatgattttaccaacgaaagctatggcaacccaggaattgactgtcaaaagaaaactgagtgggaataccctgcaggttcagg

SEQ ID NO: 3806 - DNA, 420 bp, Homo sapiens
aaaccttccagaaagcatgaatccaaaaggaaatgtccaacaggtgatatgaaccagatattttatggcctttcctgtttcagtctcaaactttctaaacatcaatggggaaaaaaaattctctagagtttttcagttttattcttctagagcacaattttccggcctgttactgagtacggtcttctaacaggtacacaattaactcataagtagacaacacaatggcagtatttgggatctgccggataagctgggcaaacagtcctctataaaaggcaaggtggccttcttcccggaacaccaggcgcgccgtctggacaaaagacttgtacttggtgccctcttcccggagcctcgtccttatgacttcgtgtggataagcaatgcaggaggcacagcccttagaaagagcagcag

SEQ ID NO: 3807 - DNA, 227 bp, Homo sapiens
tgactacttcgtgttggcctccttcgagcccccacctgtgaccatccaacagtggaacaatgccacatggacagaggtctcctacaccttctcagactacccccggggtgtccgctacatcctcttccagcatgggggcagggacacccagtactgggcaggctggtatgggccccgagtcaccaacagcagcattgtcgtcagccccaagatgaccaggaaccagg

SEQ ID NO: 3808 - DNA, 269 bp, Homo sapiens
ctgcctcctgagggtgtggggttattagggtctcaatactttctcaaggggctacactccccatcaggcagcatcccaccagcctgcaccacaggctcccctgggaggacgagggaaacgctgatgagacgctgggcatctctcctctgtggctctaggacatctgtccaggaggctgggcggaggtgggcaggatgtgagaggtggggagtactggctgtgcgtggcaggacagaagcactgtaaagggctctccagccgcagctcag

SEQ ID NO: 3809 - DNA, 259 bp, Homo sapiens
ccttcaaggtgatctgccatcttaccggtttgttctctggcttgtctacgacgagtcctcctggcctcccgctctgcaatgcgacgttttgcatgctcctgatacagtgcccgatcgcgtccaaaggagtcaagatttggtgccatcagagctttgtcttcaagatggactgacttgaatggcttgaaaactccgaagattcatctttaatatcatcttgtcgtctttggacaaggcgggaagctcgctgtttgtacag

SEQ ID NO: 3810 - DNA, 402 bp, Homo sapiens
caaaattccgggtcctgaagacaggacagagcatgacactgctgtgtgcccaggatatgaaccatgaatacatgtactggtatcgacaagacccaggcatggggctgaggctgattcattactcagttggtgagggtacaactgccaaaggagaggtccctgatggctacaatgtctccagattaaaaaaacagaatttcctgctggggttggagtcggctgctccctcccaaacatctgtgtacttctgtgccagcgcggggtacgagcagtacttcgggccgggcaccaggctcacggtcacagaggacctgaaaaacgtgttcccacccgaggtcgctgtgtttgagccatcagaagcagagatctcccacacccaaaaggccacactggtgtgcctgg

SEQ ID NO: 3811 - DNA, 210 bp, Homo sapiens
ctgaataggcacccaaaagtccgtgactaaatttcgtttgtctttttgatagcaaattatgttaagagacagtgatggctagggctcaacaattttgtattcccatgtttgtgtgagacagggtttgttttcccttgaacttggttagaattgtgctactgtgaacgctgatcctgcatatggaagtcccacttcggtgacatttcctgg

SEQ ID NO: 3812 - DNA, 201 bp, Homo sapiens
ctgttttccagcaaagatcagcctctgctggtcaggagggatgccttccttatcttggatctttgccttgacattctcgatggtgtcactgggctcaacctcgagggtgatggtcttaccagtcagagtcttcacgaagatctgcattgtcaagtgacgatcacagcgatccacaaacaagaaccgcgacccaaatcccgg

SEQ ID NO: 3813 - DNA, 234 bp, Homo sapiens
gtgtgaggacagccccatcttcatctgccctgcactcacaggagccaatggggtcacggtgcctgaagagggcctgacacttcacagagtggggacccaccagagcctatagaatcaattccttggtctcacagccatgtagacaagccctggtcatctcagcagccaccgcacaacacccctggtggaagacacgccctcctcccctctggtcacacaagagaacatcttcca

SEQ ID NO: 3814 - DNA, 300 bp, Homo sapiens
gtgcagcaagtagctgctgaatattgtagagcatgtcgcttgaagtctacttgtatctacggtggtgctcctaggggaccacaaatacgtgatttggagagaggtgtggaaatctgtattgcaacacctggaagactgattgactttttagagtgtggaaaaaccaatctgagaagaacaacctaccttgtccttgatgaagcagatagaatgcttgatatgggctttgaaccccaaataaggaagattgtggatcaaataagacctgataggcaaactctaatgtggagtgcgacttgg

SEQ ID NO: 3815 - DNA, 462 bp, Homo sapiens
ctggcttctggtgtctctcatcacaccactgcggacgctgtctgtagagcagccttggtgtgggtgactctgaagctggagtgatgggaccccagctatccttgttttttaccgccttgtctggcactgtgaccacgcttcagggctgcttctgggggtcttggtccctggatgtgccatttccttgcccttctgaccctcacacttcttccaaagtcttgagcagagttgggggccaatggtagcattgctgtcatctctgggaggagagtgagtatacaagtcagtgacagttcagccaggctcccttgggtttgggaagaggcactgcccttctgtgctgtggatcctgcttgtctgctctggagtccccccacccttgccaggagcttcacaaaccagagacgggctgtcagcaagagctcagacaggatgtggtacaagtgcaggtgcacgagttta

SEQ ID NO: 3816 - DNA, 469 bp, Homo sapiens
ccagtgagaggcactccctgcagggatttcacagcccaaatggcgggaccgtccaggggctccaagaccaacaggagcatgtggtagccacgtcacaacccaagaccatggggcatcaggacaagaaagatctatgtgggcagtgttccccgttaggctgcctcatccggatattgattgacgggatctctctcgggctcaccctgcgcctgtgggacgtgtatctggtagaaggcgaacaggcgttgatgccgataacaagaatcgcctttaaggttcagcagaagcgcctcacgaagacgtccaggtgtggcccgtgggcatgtttttgcaacccggttcgttgatacctgggccagggatgaggacactgtgctcaagcatcttagggcctctatgaagaaactaacaagaaagcagggggacctgcaacccccagccaaacccgacaagggtcgtcggcatccag

SEQ ID NO: 3817 - DNA, 290 bp, Homo sapiens
aaatgtcaaggcagagaaatacattgatcatgttaaggtcatgtgatgtggtggcgcagtaatgacttcctgaggaaacagagaaattggatgttttgtgatttagctatgtgcactaaacttattttccatgttttgagagcacattaaacattcacgtacaacgtgggactaggttggcttgtacccagaacgtccaacccaatgccaccctttgaatcgctgtgaacactgttctgttgctgttcagagaaaacaagcaaggctgcgaagcccgggggtgcaggcag

SEQ ID NO: 3818 - DNA, 280 bp, Homo sapiens
aaacttttctgaaacgattagctgtagccaaattatgtggttacgttttgctacattagaatttgaaaatgcaatatgtgtggtaaatctactgtttgaaatttataatggtctctgatatgattcgaattttggtaacttttgaaagttattttccccctttagtcatggatttctatttgttttttaatgttaatttttctagaaagcatctgaattgactaggcttttcctatataaaaaactcaaaacttgttaactctgtactttaataaaattt

SEQ ID NO: 3819 - DNA, 465 bp, Homo sapiens
ccaggaaaagactgaccattggtctccaaagatgctggatagcattgccagatcacatctaaacaactccgactgcagtttcacacaggtggtggtccaaaatttgtaaaaaagtgaaagtgatgtgtgaagatagggctgagatgagaggaaatggattcaagcctcattggaaaagctgagttagtttgttactttaatttgagcatagacaatggggtcaaagtctgcagaatggttctcagccaagtgattgctcttttcttctgagagtttgaaagttgtgctggcataggtaagtgattcccctgggatggatgaaagcttggctggaggatctgagtgaggatctggggcctggggcttggagtgatattttctgtagctctttatgatgaggaagataaaggctatcagcagcagtgtcagtagaaccccagcacaaaaggcaaggattaaatgttt

SEQ ID NO: 3820 - DNA, 318 bp, Homo sapiens
ctgcatgcctctctgcctcctctgtctgcccaccagcctcctgcagtgtgctactctgctctgtgactgctcctcatgcagctcgcagccatgtttcctctctgcttcttgatttgcttcagctccttctagtgccttgaaactgaagctggcctgtagttgggatcaaagatggagggagaggggagattgtactatggatagtgtagggcaagaagtgaattcttacactggaatgataaaaggaacctgcttcctgagtttcttaaaattgtgtctggaactcagatttgcactgcctagtatagtagctgctgg

SEQ ID NO: 3821 - DNA, 294 bp, Homo sapiens
ccaggaagtagtcacagcgagacacagcctgcacctctgcaatgttaagcaggtaactctgctcctctaccacttgactattggacttctcaacttcagccaaagagcctgtgaagaacttccgagagcgagccagctcatcctggaccctgcgctcctcatgcccatactcctggagaactgctttataccttgcctgaaggtccttggagacaccttccaaggctgccttccgccgctgcagctcccccataagttcccgcagacgagttaacttctctccaaagtcccgac

SEQ ID NO: 3822 - DNA, 211 bp, Homo sapiens
ctgctttgctttctctttgcccaaatctgaagccaaaacaagaaagtgggcatccaggactgcttctcttgctcgggacacttcattaaacagagtgttagcctcttcaaggacctctgttaatttgtcaccggcattcagtatgtcctcacggttttgttggacggagttgatgagcgcccggtactgatggcggatctggcggcacagg

SEQ ID NO: 3823 - DNA, 208 bp, Homo sapiens
ctgggaagtctggcaaagatccagtggcccacatatccctgcttgtcttgtcccctctcaggaggatgtgttggctttcaaagctgatgtccaagtggaagagccactgcagagtggagaagcaccgaaccaaacccaacacggcatccagggacaaaccgttctcactgaggttcaaggactgcagagctcccagccctgggagcag

SEQ ID NO: 3824 - DNA, 283 bp, Homo sapiens
aaagctgcctttctggtgagtactgttttatacttttatatattataattttatcttctaaaattaactgaaataggacactttgattaaagaggtgagcactctgaatttctacatctttggatattacttgaatcaagaatattagaaaattattttaccacctggcatttcccttttaatttgctagttcacttttttctgaccttcacttaacagactataaatacaaaaactttgaacacataaattatttcattttggtgagatggaataaatgttt

SEQ ID NO: 3825 - DNA, 351 bp, Homo sapiens
cctctggaggctcgggactggaggcaaagcccaggagaggtgggagacaggagctcccgactgtcagaggcatggaaatggaggctgagtcctggagaaactccagagcggagtctgagactagcagagtctcgagagcaaagccccaggagaaaagaggtggaaagtagactgagcccaggggaatctgcctaccagaagttgggcctgacagaggcccataaatggagacctgactccagagagtctcaggaacagagtttggtacaactggaggcaacagagtggaggctgaggtcaggagaagaaagacaagactactcggaagaatgtgggagaaaagaagagtgg

SEQ ID NO: 3826 - DNA, 460 bp, Homo sapiens
  misc_feature (1)...(460): n = g, a, c or t
aaaaacgaaacaaagttatggggttaatctcctacacaattcatttacttcatttgaatgttagagctactcatgattatttgtgtttctaatttatagtttaagtttatttgtaaaaagttaaaagagagtgggtctctgtggctctcactgatgttcactctggcatccttcagcatttttcttttttcatttcataattgtaggtcattagcatgcatatcgagtttgcccttacgtggtgggagttcaaacacacaaagacccactctttgcacaaaactgttctcgctggtttggaataggctcccgtgcttttctaatgttattgcagcatggatgtccattacagaattcagataaaatttgctaatgttctgctatgatgtttgatctcatcttaatcacagtgagctcttctatagctcaatatgcggnttgccctcnagtgtgcactgtn

SEQ ID NO: 3827 - DNA, 415 bp, Homo sapiens
ccaattgaaacaaacagttctgagaccgttcttccaccactgattaagagtggggtggcaggtattagggataatattcatttagccttctgagctttctgggcagacttggtgaccttgccagctccagcagccttcttgtccactgctttgatgacacccaccgcaactgtctgtctcatatcacgaacagcaaagcgacccaaaggtggatagtctgagaagctctcaacacacatgggcttgccaggaaccatatcaacaatggcagcatcaccagacttcaagaatttagggccatcttccagctttttaccagaacggcgatcaatcttttccttcagctcagcaaacttgcatgcaatgtgagccgtgtggcaatccaatacaggggcatagccggcgcttatttggc

SEQ ID NO: 3828 - DNA, 337 bp, Homo sapiens
cttcacggaggttactgtgtgagacgaaagacagttcactgttcatcactggaaatactgtacgtgctactgaaaaacaaggattttattgaggatctatcttgggatcccatggctttctttactgggctctggggccccttcacctgtgtaagcagagtgctgagccatcactgtttcagcaccactgggagtctgagtgcgattcagaagatgacgcgggtacgagtggtggacaacagtgccctggggaacagcccataccatcgggctcctcgctgcatccatgtctataagaagaatggagtgggcaaggtgggcgaccagatactactgg

SEQ ID NO: 3829 - DNA, 153 bp, Homo sapiens
cctgaggtcacctggctaggaattcatagggcaggatttaatccgggtgcctgagtccagaaccttgactctgaagccctgttttgagctaaatgcagcagcagcataaacagcccgttttgtgcctcaaaaggtgaacagtgggaggcacag

SEQ ID NO: 3830 - DNA, 473 bp, Homo sapiens
  misc_feature (1)...(473): n = g, a, c or t
ccgacgtctgtgggttctggagcaactgccctcctaaggtctgtccttagcagggaccttcccctgactcatgaatgctggaatcaaggaccccaacaccataatcatcaaggtgatacatctgtccttcattgtcatgtgcttcacaacagagtaagtgctggcacacagggtcccaggctgggatggcccatgtgtggatggtgcttccagtaacgaggtggggcacacttctacctggggcttgaaactcccagtgggacaagaaaacccagaccccactcctcaccccttccctacctgagctcttcctcctacacatcacaacagccaccacagctcctaggacagctaggacagccaggacagccaggccagcaacgatgcccacgatggggatggtgggctgggaagatggctctgggaaaggaggggaaggtgaggggccctgacccccaacctcagccctgacn

SEQ ID NO: 3831 - DNA, 227 bp, Homo sapiens
ggccagtggaactgtacagcttggagaaaatggcaagatctgttgggttaaagaggaatgaagccttttaattcagaaatggggccagtttagaaagaattatttgctgtttgcatggtggttttttatcatggacttggcccaaaagaaaaactgctaaaagacaaaaaagacctcacccttacttcatctatttttttaataaatagagactcactaaaaacaaa

SEQ ID NO: 3832 - DNA, 265 bp, Homo sapiens
ctgaaacgcatgacctcgtgggtcctgaactgacctctggtcacaacacccagggcctggttctcccattgggtaaatcttcagaggaacggatggagaggaacgcagtggcttgctttttctgctgatgctgcggaacttccttcagggtcacatggtgaaccaagagagcctggtgcagtgccaggggcctgccatcatcggggccctcctgcgaaaggtcccaagctgggccatggacatgaacgtgctcatgtccgcccag

SEQ ID NO: 3833 - DNA, 329 bp, Homo sapiens
  misc_feature (1)...(329): n = g, a, c or t
ccaatacggctatgggtgtaggcagctttcagaggaaattagtggtctgggcttgcctccagctccccaggggcagccccagtagctacactgtccagacagcacaagaccangcttggtgtcacgtccatccgagcgctgcctcagggatcgataaagtttcactgcagaaagtctccactgcggtatgctgacatctgccctgaaccttcaccctacagcattacaggctttaatcagattctgctggaaagacacaggctgatccacgtgacctcttctgccttcactgggctggggtgatccttggtgcctttgtttccacaagg

SEQ ID NO: 3834 - DNA, 194 bp, Homo sapiens
ccagcttatgaggcagatggtctcagttacaacttcgctgctttcccaaactcctgcagccctcctgagtccgacttccgttgatagcaaggcactgggtggcagcaacctttttttctagtagttttttcccagcagttttccatttctccacagtatccttttcatttagaggagcttaataaatgcttttt

SEQ ID NO: 3835 - DNA, 159 bp, Homo sapiens
cctgtgcagtcttaggctatctgtgctttcatttttcttcacacggtggcaggtctacactgcccagccccaggggtgggccttcctcacctcttccctcttgattttcagtctcagcttttccagtcccctcccccaaaccagcaatagcagaagcag

SEQ ID NO: 3836 - DNA, 328 bp, Homo sapiens
aaaaccaccgacagcccttgggttggcaagaaggcaggagtatgtatgaggtccatcctggcatgagcagtggctcacccaccggccttgaagaggtgagcttggcctctctggtccccatggacttagggggaccaggcaagaactctgacagagctttgggggccgtgatgtgattgcagctcctgaggtggcctgcttaccccaggtctaggaatgaacttctttggaacttgcataggcgcctagaatggggctgatgagaacatcgtgaccatcagacctacttgggagagaacgcagagctcccagcctgctgtggaggcag

SEQ ID NO: 3837 - DNA, 212 bp, Homo sapiens
gggaggatggcctaagcctgagaaattgagactacagtgagctgtgactgcaccacttgcacttcagcctgggtgtcagagtgagaccctgtctcaaaaagaaaaaaagaaacagttacttcttgtcttatacaagtcattccagcaaacagaaaaagtgtgaaagctgtcaacctctttaggctgaagaatcctgattcccaaatctgtgg

SEQ ID NO: 3838 - DNA, 356 bp, Homo sapiens
ttttttaagaaagacatctggattgtagggtggactcgataacctggtcattatttttttgaagccaaaatatccatttatactatgtacctggtgaccagtgtctctcattttaactgaggggtggtgggtctgtggatagaacactgactcttgctattttaatatcaaagatattctagagtggaactcttaagaccagtatctttgtgtgggctttaccagcattcacttttagaaaaactacctaaattttataatcctttaatttcttcatctggagcacctgcccctacttatttcaagaagattgcagtaaaacgattaaatgagggaacatatgcagaggtgctttt

SEQ ID NO: 3839 - DNA, 272 bp, Homo sapiens
ccacagaaaaatgggcagttaacattccttttactttagttttgagggagggggaatggagagagggagagaggacacagggaaacttacagcaaccattttcgctgtttatatttttcttgaggaagaaaacaaacgcacaaatcctggtgttaggaatagtttaagcatatatcttcagtattattcttccaggaccaaagtaagtcctgatgcaggaaatgagtgagtttcacagcttttggagcccttactccatccaggaagcccag

SEQ ID NO: 3840 - DNA, 205 bp, Homo sapiens
ctgtggtggtgccttttggagaagagcagagatacacatgccatgtacagcatgaggggctgccgaagcccctcaccctgagatgggagccgtcttcccagtccaccgtccccatcgtggggcattgttgctggcctggctgtcctagcagttgtggtcatcggagctgtggtcgctgctgtgatgtgtaggaggaagagctcag

SEQ ID NO: 3841 - DNA, 168 bp, Homo sapiens
ctgccatgtggcagcagcaggagctactagaatattctcagcacaggaatgaggcttccttggtttccatgtctgtaagggttactgatcacttaccttcttctctttcagacttgaaatctgtagacatttctttattgatatggcaaattgcttgcagatattttt

SEQ ID NO: 3842 - DNA, 251 bp, Homo sapiens
aaagaagacagcgtctgctttgaacaggccctttctgagattagcctcaccttaatactctttgctctgcaataggccaatcaatatccacatctatatccacactatgttcagctcgcatttcgtagtatgccatttttccaccctgcaagtaacccatctctatcaaatgtcttttagcaaaataaaatgagccattttcatataattctccatcccagtcttgtcgacgaggccgtttagctggattt

SEQ ID NO: 3843 - DNA, 409 bp, Homo sapiens
  misc_feature (1)...(409): n = g, a, c or t
aaaatggtttgaaatgtagggaggttttgtctgtttgtgtgaagaatattttgcttcctttgggaagttctggggtttagaaacctttcttctgcctgggcgggtgaggaggttggcctctggccttggacctgcctctggatgttgactgggggaacggagttcagcccgcctgtggtctgcggatgccggattctaggctgtgaattctccacccactgatttgggtggatgtaagtgagtctccctgtcccctctttctctcctcatgtgtgaacataaaggtactcatgcatcacaggactttcctgtaggtgctgatgtctatacaagcactttgctgttataaaggactgctganctgttgaagtcagtaactctttctgtcttcctgtatgtaaaataaaat

SEQ ID NO: 3844 - DNA, 232 bp, Homo sapiens
tgagagttcctgtgctgtgtggaattcaacactaatctgctgtaagtatggagctgggtatgtggaacatttgcagggaagtttgtttctccgcttgtttttccaggggtattcgagatgacattgaagaggaagatgaccaagtgagttcctatgcagtatttctatcttttatttttatccacaaagtctatactggggacaagctagagcttgccttcactcaaaatgg

SEQ ID NO: 3845 - DNA, 103 bp, Homo sapiens
taaaaaaatgaaagctagacaatagctgcaattttttgttaacaaagcaaatcacttcaacgtgaataggagtaatctcatctctgcacctccatggacctca

SEQ ID NO: 3846 - DNA, 190 bp, Homo sapiens
  misc_feature (1)...(190): n = g, a, c or t
aaaggtatccgggagattggcagtttgtaatacaagaattatgtgcccccnagaaggnttctggcctcagtgtctctatctgtctaatgggcagcagatcagacaagggnctgtcngctnttgacagggttcaanggcatctcctntaaatgactcactgtctctggagaaatatgtgancattttcaca

SEQ ID NO: 3847 - DNA, 287 bp, Homo sapiens
ctgccgttgacagaaggaaagattgtccattcggggggtgcccgaacgtcgccccttctccggcccagaacctttttgtaagttacaccctcacgttctgctccttccacttctgcaaactttccagggttgggtaggcaaaaaggcggcttcgctgaggactgtttactgctttaggtttttttggaattcaaaactgttaactgctgacatgaatggtgtgctatgacctagttatacaagacaaagatggattccaagtcataaggaaaaatccagatcttttt

SEQ ID NO: 3848 - DNA, 244 bp, Homo sapiens
ccttggtgaccatcagtttcagatgcaactcttacagcggagtcttggaatcatgcaaacagtgaagggatttttttatgtttcattacttcttgacattctgaaagagataactggaaagttccttgattcagaaaacagattcagatgaagaagttgcaatgctgttggacacagtccagaaagtatttcagaaaatgttggaatgtattgcacggagcttcaggaagcagccggaagaagg

SEQ ID NO: 3849 - DNA, 232 bp, Homo sapiens
ccgatatggctgagatcgagaaattcgataagtcgaaactgaagaagacagagacgcaagagaaaaatccactgccttccaaagaaacgattgaacaggagaagcaagcaggcgaaatcgtaatgaggcgtgcgccgccaatatgcactgtacattccacaagcattgccttcttattttacttcttttagctgtttaactttgtaagatgcaaagaggttggatcaagttt

SEQ ID NO: 3850 - DNA, 330 bp, Homo sapiens
  misc_feature (1)...(330): n = g, a, c or t
aaaaaaaagatccaagatgggcattatattcattgtatgtttacaaattcttacattttagttattcttcagcaaaaaatccagatggatgtttttttcagaaagtgttgaatgggtttacaaagtttttttgtaaggaacaatattgcaaattactaaaattgtatttttataggctgtttgctcttttgtggatattgtgcctgtcaggattcttgaagttttttttttatagtganataatggagttggtcttagccgctgcaggagcccttcttttctgnggattcatcatctatgacacncactcactgatgcataaactgtcac

SEQ ID NO: 3851 - DNA, 175 bp, Homo sapiens
ctggaaatgcagaaatcacccgtcttctgcttctctcatgctagtagctgtagactggagctgttcctatttggctatgttggaaccctcccagtcccagtaaaatttttcatttggaaaacagaagatgggaaaaaaacacagaagtcactgatccattgcaatagtggaattc

SEQ ID NO: 3852 - DNA, 353 bp, Homo sapiens
ctggcacgtgctcagactcggcatgagaacaaaaccggaacagtgctttcccacgtgcccctgcctcccaccctggccctgaacagtaagtccagaggcagagacgtggggcaagtggaaaaagaatctctgcaatagctagcctcagcacaggaagaaacacttccacccatccacaaaatctgggctgaagttctagatgcatatggcctacctttgggtatgaaccttctaataccttgtgatctgtctcagtggcgtctggcagaaaagctccacgaaaggggcaaagggacagaagagcaggcagtggcagtttccaggtaacagtgctgccacccaggtgaccatgg

SEQ ID NO: 3853 - DNA, 401 bp, Homo sapiens
  misc_feature (1)...(401): n = g, a, c or t
aaggaattggacagaancttcttcanaagatgggctacgtccctggacggggcctcgggaagaatgcacagggtatcattaacccaattgaagccaagcaganaaagggaaaangtgctgtgggggcttatggatccgagcgcaccactcagtccatgcaagacttccctgtggttgactcagaggaagaagctgaanaggagtttcagaaggagctgagccagtggaggaaagacccaagtggaagcaagaagaagcccaaatactcttacaagaccgtggaagagttgaaggccaagggcaggattagcaagaagctcactgctccccagaaggaactttctcaagtcaaggtcatagacatgacaggccgggagcagaaggtctactacagctacagt

SEQ ID NO: 3854 - DNA, 341 bp, Homo sapiens
  misc_feature (1)...(341): n = g, a, c or t
cctgggccccggtcacgtcgccaaccatcttcctgtccctagacttcacggagtaggcgaatgctatgaagcccagacagcaccagttcaagaagagggtgttgaacagggaccagacgacatggtcgggcacggaggtctcgctgtggatgttgatcacggtggaccttggaaggatggtgctggggggtgcccccancacagccacctcatgttcctccttgtgcatcttctggctttggggaaggaagtgttgagtgaaggtttgagaagtgtggttttctgcgtggagcgaanggccgctgtggtgtccggatgctgggacggtgctcanttgagac

SEQ ID NO: 3855 - DNA, 218 bp, Homo sapiens
ccattgggctgggagcaggcggggccgtgggggccgggggcctttccccctgcaggtggtttctgtcggaggaccagctagagggcgtccaagaggagttatttccaccccagtgattagaacatttggaagaggtggaaggtactatggcagaggttacaaaaaccaggcagcaattcagggcagacctccttatgctgcttcagcagaagaagtgg

SEQ ID NO: 3856 - DNA, 417 bp, Homo sapiens
ctgtccaacttgcaatgacttccatggacttgtgcagaaaatcatggagctacaggatattttagccaaaacatcagccaagctgtctcgagctgaacagcgaatgaatagattggatcagtgctattgtgaaaggacttgcaccatgaagggaaccacctaccgagaatttgagtcctggatagacggctgtaagaactgcacatgcctgaatggaaccatccagtgtgaaactctaatctgcccaaatcctgactgcccacttaagtcggctcttgcgtatgtggatggcaaatgctgtaaggaatgcaaatcgatatgccaatttcaaggacgaacctactttgaaggagaaagaaatacagtctattcctcttctggagtatgtgttctctatgagtgcaaggaccagaccct

SEQ ID NO: 3857 - DNA, 186 bp, Homo sapiens
  misc_feature (1)...(186): n = g, a, c or t
ctgaggcgctgtcctgggcagcctggttctgtgtgtgtggcctcaaggggccagagtgaggccggcttcctcctgggctcagtgcccctggatgggaggtgggcatgaacaggagaggcttccgagaatcagagtgtgctcagccaggaaaggcggaggccacctattcangaaacggggctgcag

SEQ ID NO: 3858 - DNA, 194 bp, Homo sapiens
ctgagggtgagtcctggagctccctgtgtcaactcaagcaagccacttagcaattctgggcctcagtttccccatctggaaaagggaggtcctcagggtgttgccatcaaaagatggttgtaatgtttcaatatagttccgcatattacacattcagcacagacccgggcatcggagcagtcccgaggcaccag

SEQ ID NO: 3859 - DNA, 306 bp, Homo sapiens
ctgcaggtcttgcacagacaaaaacaaaaaacaaaacccagaaaacaaaacaaaaaaccacaaaagaaagtttactacacaaaaccagtttctgataaagattctcctccccctcattactccacagtgaggatgataaggcgaggaatcccgccccaagagtcagaaaacattccaaacaccaaattctcatgcagaatggggctttagataggagctgggtattactgggagtgagatggtaaacctggttagcttgtctagggcgcaagaatcagtgacagttcaaacactggaatgttgcag

SEQ ID NO: 3860 - DNA, 168 bp, Homo sapiens
aaggctcctctgtctaccgcatcttcaagcgctggcaggcagtgaaccagcagtggaaggtcctaaattatgacaagaccaaggacataggaggagatgcagggggagggacggcagggaagtcaggccccaggaactcacggacgggccccacctctggggccacga

SEQ ID NO: 3861 - DNA, 333 bp, Homo sapiens
taattgagtattcagtaaacactgtgctcatctgctttttcctggcctccctccatttcctcctccctctccctctgcccttgcacatctgctttccttgtagcaaggggaagttgattgttggcccctgccttgcccagatgtggagtgtgaattcagcattctcccagagaatgagtgctgcccgcgctgtgtcacagacccttgccaggctgacaccatccgcaatgacatcaccaagacttgcctggacgaaatgaatgtggttcgcttcaccgggtcctcttggatcaaacatggcactgagtgtactctctgccagtgcaagaatgg

SEQ ID NO: 3862 - DNA, 311 bp, Homo sapiens
  misc_feature (1)...(311): n = g, a, c or t
aaagcttctgggngtgcctttcaaattttgaacaagctgccttgtctaaacatcaatttctactactctgtagccttaaaatgngctctatttanatccacaggacccttctactggtgatatgaaaaacagaatacagaaattaagagaatcactttttactcaacaattaggggaagtaagtcaaagccctcctcttgcgacagcanatttcctgcgggccacctgttcancgccttgataggggatagggtgatcaaggcactcncnaaaacagttnattcaggtatggaatgtcagaattcctttgg

SEQ ID NO: 3863 - DNA, 194 bp, Homo sapiens
  misc_feature (1)...(194): n = g, a, c or t
ncagaagccctacaagaagatgaaagggccggaggtcatggccttcatcgagcagggcaagcggatggagtgcccaccagagtgtccacccgaactgtacgcactcatgagtgactgctggatctacaagtgggaggatcgccccgacttcctgaccgtggagcagcgcatgcgagcctgttactacagcctgg

SEQ ID NO: 3864 - DNA, 417 bp, Homo sapiens
  misc_feature (1)...(417): n = g, a, c or t
cncggcagccgncaaggaagaccagcctgcctctggtcggttcctggcgctctgcgtttcgtgaccttgtccagtagaaggctatttaattttcacaactgcttgaattttgacatacaagatgaagcaagatgcctcaagaaatgctgcctacactgtggattgtgaagattatgtgcatgtggtagaatttaatccctttgagaatggggattcaggaaacctaattgcatatggtggcaataattatgtggtcattggcacgtgtacgtttcaggaagaagaagcagacgttgaaggcattcagtataaaacacttcgaacatttcaccatggagtcagggttgatgggcatagcttggagcccagagactagacttgattcattgcctccagtaatcaaattttgtacttgag

SEQ ID NO: 3865 - DNA, 269 bp, Homo sapiens
tggtattgctgtgccagaggggaggggatgaggggctctgcgaggaaggagaggagggtcccatcctcagatacagcagtgtgcggtgagaagaccccagtaccgcgtattgtagagattgaggtggggagagaggaagtcagggagaggcgcctgtggccccaggggcaactgaccacgaatccccttcccacccaagccttgtcctgacggtgtgcgtctcccagacccaggccaatgccagggccatccacaggctccggaagcag

SEQ ID NO: 3866 - DNA, 328 bp, Homo sapiens
  misc_feature (1)...(328): n = g, a, c or t
ccaagcccaggntanaaaggtgggcagactaatggtgggaatagcctgagaagggaaggccattcattcatttattgagcacctatcattcaactattcacccattcagcatttattgagtgcctactatgtgccaggcactgggcgaggctctggggacgcatgcatgaacaagattacaccctggcttctttcaagccctggatcgaggctcatcagtttttgaaactccgtctagaagcctgcaggagaggtgggaaggctggacgtgctgtccccacccagtcagcggattggggttaagagtgagtaagtgatcactgctcag

SEQ ID NO: 3867 - DNA, 485 bp, Homo sapiens
  misc_feature (1)...(485): n = g, a, c or t
ctgctttctcntccgcaaaaactacgctgcttctctttgtcctcttcttggacctccgcagcttgacctcaggcagggtgctccccggggagatcggttcctcctgctccactctcggcgtcttgggtgatgctaattccaggtcaaagctctctgaggtaggcttgctgggggtgctgcagtcagaattcatggaagccagagagatgatggacatctgtctgtatgagcgcagcatagacctgggacggcccactctcctgtcgtcaaagtcaggcatctctcggacaccgtactccttctccaccttcattttcaggttcttgaaacattcctccatccggtcatggaagggtcgcaagttatctgacacccttttctcatggatcttaatcccagctcccaagaaggggatctgccatgcaatcaggtccttgaggtgggtcagcttgtcctggtcctcagggtggcccctgacatactct

SEQ ID NO: 3868 - DNA, 312 bp, Homo sapiens
  misc_feature (1)...(312): n = g, a, c or t
ctgcagaggttngtccagtggctaaaagaggcagaagaggagtcatctgaagatgactgaagtcacactgcctgctcctttgggtgtgattgagtgccctcctggctcctgggctgggacaagtgaggaactagctgtagagggatgagtgaccaccatccaggctgagactgaaaggagcagaggctggaactacagtattctttcccctgctagcaaccatgtgcctcccatcctgactgtggagttgggatgtggaagtggggctggaacaaagcttctgccaagggaggagctaagcaggcccggcag

SEQ ID NO: 3869 - DNA, 278 bp, Homo sapiens
  misc_feature (1)...(278): n = g, a, c or t
tgtaaccagtgtgtgttgagaaggaccaacaccaaaccaccctggggaagggggacagggaaacatttaacacagacgatgatcaggatttgccccaaaccaccccaagagagaggactgagtggaacaaaaaagtgacccccagaacctctcttantgtgagggtgggtagaataagaactgacacacctgcccgggcgggcgctaagggcgaattccaacacactggnggnccgtactagtggatccagcncggtccnagcttggcgtaatcatgg

SEQ ID NO: 3870 - DNA, 269 bp, Homo sapiens
cttcgaaccatggaccaggcccccaagtccctgatggcctcagaggaggagtaaatgtggggacctagaggaggagctgaaaattgttaccaacaacttgaaatccctggaggcccaggcggacaagtattccaccaaagaagataaatatgaagaggagatcaaactgttggaggagaagctgaaggaggctgagacccgagcagagtttgccgagaggtctgtggcaaagttggagaaaaccatcgatgacctagaagagaccttgg

SEQ ID NO: 3871 - DNA, 453 bp, Homo sapiens
agattgaacacaggtgacctggtatagatacacactgtactgtgggccagaaccatggactacattttaagccatgttgtgggcccttcctgcctacagaaaaggacacttgagtggagtcacacttgggttgcctaatttattaccttaactagaaacattctaagtatgggagcctgttctggaggatagcttctaaaccaaatctaaaactatctttgcacacaagtgttgtgaagaggtaagcaggggatcagagctccatcttctgtgaccacttctccagggactgccacctatagggctcaggttggtaccaacagccctgcatagtagagtcactgtcaatcatcttcccacttgtaagcaggaagacaaaaagtctcatgaaatagaaacgaaaacactgaacatggccttcatcgtcctaatgccacaagtttcctgggatgg

SEQ ID NO: 3872 - DNA, 436 bp, Homo sapiens
  misc_feature (1)...(436): n = g, a, c or t
ctacctaccaagggtgaaaactatattcacagaattggcagagggggtcgatttgggaggaaaggtgtggctataaactttgttactgaagaagacaagaggattcttcgtgacattgagactttctacaatactacagtggaggagatgcccatgaatgtggctgaccttatttaattcctgggatgagagttttggatgcagtgctcgctgttgctgaataggcgatcacaacgngcattgtgcttctttctttgggaatatttgaatcttgtctcaatgctcataacggatcagaaatacagattttgatagcaaagcgacgttagtcgtgagctcttgtgaggaaagcattggctttatcctctttanagttanactgttggggtgggtataaaagatggggtctgtaaaactttctttcttagaaatttat

SEQ ID NO: 3873 - DNA, 471 bp, Homo sapiens
  misc_feature (1)...(471): n = g, a, c or t
ccagttgctntaagtggattggatatggttggagtggcacagactggatctgggaaaacattgtcttatttgcttcctgccattgtccacatcaatcatcagccattcctagagagaggcgatgggcctatttgtttggtgctggcaccaactcgggaactggcccaacaggtgcagcaagtagctgctgaatattgtagagcatgtcgcttgaagtctacttgtatctacggtggtgctcctaagggaccacaaatacgtgatttggagagaggtgtggaaatctgtattgcaacacctggaagactgattgactttttagagtgtggaaaaaccaatctgagaagaacaacctaccttgtccttgatgaagcagatagaatgcttgatatgggctttgaaccccaaataaggaagattgtggatcaaataagacctgataggcaaactctaatgtggagtgcgacttgg

SEQ ID NO: 3874 - DNA, 234 bp, Homo sapiens
caggagtttggtagaggagtgatctaggtgaggggaatggaaggtgcagagaccagagctgagagggcctgaggcactttccagagcgtggggaggggcctccaccaaggcgagaagggctgcaggtccagatcaccagcgtttgtagacagtagtgtggcgcttggagtttacctgagggccagtggagctccagggacctatcaggacggggacctgtggggactgggaagg

SEQ ID NO: 3875 - DNA, 247 bp, Homo sapiens
agtgggcctcctactccccagcacaggtgcaggaggaactctggaagcactgctctctgtcagtgatacagcttccaaggtgttcttgagtagcagacattgtccctcagaaggggtgaccccacgggcatgcgcaccctgttccagcgggggccttttttgtagatgggcttgacggagccaggagcccagcgcgtcaggtaccggttgagttggggtttgctcttcggaacaactccttcaggaa

SEQ ID NO: 3876 - DNA, 272 bp, Homo sapiens
aagcacaacattctctacttcctcacctacgccgacgagtacgccatcggctacttcaaaaagcagggtttctccaaggacatcaaggtgcccaagagccgctacctgggctacatcaaggactacgagggagcgacgctgatggagtgtgagctgaatccccgcatcccctacacggagctgtcccacatcatcaagaagcagaaagagatcatcaagaagctgattgagcgcaaacaggcccagatccgcaaggtctacccggggctcag

SEQ ID NO: 3877 - DNA, 311 bp, Homo sapiens
  misc_feature (1)...(311): n = g, a, c or t
ccactaccgggntggacctcctccttcccccagcactccactcagggaaaatcaattccatcaaaaacaattgattttaccacctacaaatgggcaacatctacactccagtctcttcccactcacagactgtgcctcctataagcctggtatctcagaactctgagagtgggcttccccatggataccagggctcccaggccgggccactttacctaagtaggtgttgtccttctcatacagagctataatctcctgccaatccttcatccgctgtgaagagtatcggccaaaaatattcttcgtggagg

SEQ ID NO: 3878 - DNA, 175 bp, Homo sapiens
  misc_feature (1)...(175): n = g, a, c or t
ccctcccctgntcagaatctgataccaaagagacagggcccgggcccaggcagagagcgaccagcaggctcctcagccctctcttgccaaaaagcacaagatgttgaggtgagcagggcaggcccccggggaggggccagagttttctatgaatctatttttcttcagactgagg

SEQ ID NO: 3879 - DNA, 327 bp, Homo sapiens
gctactttattgcaacaactctagcaaattaatgcacaaatggcagaatggtatttttcaacttttatgagaaaagtaaaggcagttatagtagaagagagcatcatgagtcgactgtgctcagatagggctatttgcttttccccaactatgctccatacttttttcttttcatatgttttttttgagtcggggtcttgctctgctgcccaggttggagtgcagtgtcatgatcatagctcactgtaacctcgaccttctgagcttgagtgatcctcctgtctcagcctcccaagtagctgagactgcaggtgcatgccaacacag

SEQ ID NO: 3880 - DNA, 230 bp, Homo sapiens
acgtgtatgcaaatgagtgatggataaggatgagtcttggagttgcgggcagcctggagactcgtggacttaccgcctggaggcaggcccgggaaagctgctgtttactcatcgggcagccacgtgctctctggaggaagtgatagtttctgaaaccgctcagatgttttggggaaagttggagaagccgtggccttgcgagaggtggttacaccagaacctggacattg

SEQ ID NO: 3881 - DNA, 256 bp, Homo sapiens
caagagacgtctctgaagccaccgttcctgattattcagaggcagggtccacagtgagtgactcggtggggctggaggaacccagggtgacccagagggggctctggagcgggtccctaacatctgaaaaagtcctcccagggaactcggagctggaacttccaggcagcttcgggggtgacatttgtatccggccagccgagcggggaaaggagaccttgtgtcctggcaacagggagagccgggactgggatgg

SEQ ID NO: 3882 - DNA, 315 bp, Homo sapiens
aaaaccacctccacctctaaccttgggtaaaactgggcttagtcgctcagttagttgtgacaatgtcagcaaagtaggtcttcctagtccaagtagtttagttccaggaagcagcagccaactaagtgggaatggaaatagtggaacatcaggacctagtggaagtactaccagcaaaactacttcagaatccagcagctctccctcagcatcccttaaaggcccaacttcacaagaatcacagctcaatgctatgaagcgattacagatggtcaagaagaaagctgcccaaaagaaactcaagaagtaatgtgg

SEQ ID NO: 3883 - DNA, 261 bp, Homo sapiens
ctggtaaaggtgactgtacagatgcgcattttccttttggtataaatggtccacagcactaactggtaaggcttattgtacagtatattgtcagtattcttctggttcagcataccttatagttcatatataacctgtattaattgtatagattgtgcattaaaagctgttaccaagttgtcagaacataagagcgaaaacaaggtcatatgtaatattttgtttgtaagtatcctttgtatcatagcaaaggaaatgttt

SEQ ID NO: 3884 - DNA, 295 bp, Homo sapiens
  misc_feature (1)...(295): n = g, a, c or t
ggtgcctaccaacaagatggtgatgctgtcctgcgaggctaaaatctccctcantaacatgcgcatctactggctgagacagcgccangcaccgagcagngacagtcaccacgagttcctggccctctgggattccgcaaaagggactatccacggcgaagaggtggaacangacaanatagctgtgtttcgggatgcaanccggttcattntcaatctcacaagcgtnaacccngaagacagtggcatctacttctgcatnacctcaagganccccnagctgaccttcggggaa

SEQ ID NO: 3885 - DNA, 297 bp, Homo sapiens
  misc_feature (1)...(297): n = g, a, c or t
aactaaatacantgttggtcttgcctgtccttcaaaatcaacaacagattgtctctcggctccagggaggtgtcatttctatagaaattagaagctttctgatttctagatgaggttttacaattgtttcttacagtcatgtgcactaagtactctttttgtaagcagaggtggctggctctgcagccttaaggccattttttaagtcaccacgtctagaagtcacatgaactctgctcagcaataatctgttctcagaacagacttttcaacctgctgccggatttctccattcag

SEQ ID NO: 3886 - DNA, 147 bp, Homo sapiens
  misc_feature (1)...(147): n = g, a, c or t
ctaagtttgctgggggccttcatttctcangaccaaaggtggaaggaggtgtgaaaggaggtcagattggactccaggctcctgggctgagtgtgnctgggcctcaaggtcacttggaaagnggatctggaaaacccacattcccta

SEQ ID NO: 3887 - DNA, 184 bp, Homo sapiens
  misc_feature (1)...(184): n = g, a, c or t
tgagaacaccttggatgcctttctcttgcaatgtcctccatgtccatgtaaaatccagtccttccaggccctgcctggctctaaacctcatccccttcgagggccatctgctgtggacagtngagctgtgnaaccttcagatttcccacacattacagcaaatgcaaatacacatagaaatcag

SEQ ID NO: 3888 - DNA, 286 bp, Homo sapiens
  misc_feature (1)...(286): n = g, a, c or t
atgggccaccaccagtgngacancaggacatcctaatatatggatcttgatttttaagtttcagtatctgaacttcgtaaattagtaacttttagctgggaaagtatagcatgaaaccagaggttctcagaatgactgtaagatagcttacattncctctttttgcctttatctccccaactaaaatacaatggggaagaagtctgcctatgatctttgaatgagctttttaaggaagaaatattatatattgtttgttaaagtttattgaaataaagaatcattt

SEQ ID NO: 3889 - DNA, 234 bp, Homo sapiens
  misc_feature (1)...(234): n = g, a, c or t
aaagatgtggaanatggggtacaattaaaaccatgagagttgtgcanggaacagccgtagggcctgtttgcaccttcagatattgcctgctcccaaaaattcagacccccagatgcagggcaagacaataagaaagggtgagtgcaagcaaggagagcctcctgctaagaggctgaggtcccctctggttccaaggatgggatgtcagccttgaccttccggggtctgcagtgg

SEQ ID NO: 3890 - DNA, 218 bp, Homo sapiens
aaatgaaagccctttagtctgtactgaatcctttaatcatctccctccatctttttttttttttctggtcacagcgattgaacaggagaagcaagcaggcgaatcgtaatgaggcgtgcgccgccaatatgcactgtacattccacaagcattgccttcttattttacttcttttagctgtttaactttgtaagatgcaaagaggttggatcaagttt

SEQ ID NO: 3891 - DNA, 438 bp, Homo sapiens
ccaactaaatcatggcctgtctgcttacccattcaatgtgctgggaaggggccaatgatttcttaaactgtttcctagagcaggggctctaaaaccctgggtagcagaggactgtggtccaaaccaagccaaaagaaacaggctggggtagggaagcatggtgactgcctggcagaaaaggcaaactctgggccccatagggaaaagtgcattctttgcacctcagagatattgcagaaccagtgttaacactatgagactttgttaggaggggaaaaaataaaaccctggaagaatctttcacctgaactcaacttgactggagttcagtccaccagtctcaggggaagggggaagcacctagctccacagcagcactgagtctggccctcccgccccatctccccagcccctctcagcaactaggccaggcttcag

SEQ ID NO: 3892 - DNA, 576 bp, Homo sapiens
  misc_feature (1)...(576): n = g, a, c or t
tcaaaaatacctattactttagattaacatacttttcctaagagcttagcatttgctaaattgtttcctctaaaattctgctcatctggaccagtgacagttgaatctcagtccttccactgtcagagagtactgagagagcacaccatatctgctctgctcaggaactgaaaagtttatccagtaataagattatggactgccagtctggcaatgcaatatgaatccatgttgagcttgacagatgttagtctctgcaccagtagtagctaagaaatctgattggttagcagccaatgagcaatttctcacatactgccacaataaactaaccacagaaatggaaaaattttttttcctacattaaaatgaaaatatctcataagcacattatctcaagtttttcctgagagggctactcaaagagatacatatatatatatatagcaagttcgatctgaattacataatcagcgagactcaaagtacaatcatcacagaagattgngaattataagcagcattatatcaaattaaaacttgtactagcaaagaatttccttatatatcaagctc

SEQ ID NO: 3893 - DNA, 187 bp, Homo sapiens
aaagaaagaaaagaggaggactctcatacaactctgcatgaaacaccaacaactgggaatcactatccgagcaatcaccagccttgaaaggcagcagggtgcccaggtgaagctggcctgttttctaaaggaaaatgattgccacaaggcaagaggatgcatctttcttcctggtgtacaagtcttt

SEQ ID NO: 3894 - DNA, 310 bp, Homo sapiens
cctcggccgagcccgccggccagcctgagaagccaggctggctgctggtgaatgtgaacgctccgggtaaggctcggtggctgctgcggtcccagacccttcaccggcccttgggacccagggctaggcgtaacctgttggtgctgtcccccaaaacgcaggcttaagtccactccccgccctaagttctctgtgtgtgtcctgggggaccagcagcactgtgacgaggctaaggccgtggatatcccccacatggacatcgaggcgctgaaaaaactcaacaagaataaaaaactggtcaagaagctgg

SEQ ID NO: 3895 - DNA, 331 bp, Homo sapiens
ccacggtggggcagggtaccaccaagatccttcagtctgagctcagcgagtgtcccatctccacacttactgtgcacccggatcacggcctccagagagcggatggcattgaggttgggtttctgtttccagccttcttctgaaaggggatccacctatagaaaacagtacatcagccaccagtctctcagggacccacaggcccagctcactcccaccccaggggccccagccttctagccacaagcacactctacctaggccaggagatgctgcctggacctaacttggaacagaggctttcgcttcgcctaccttgtttcaggcttgg

SEQ ID NO: 3896 - DNA, 387 bp, Homo sapiens
ctgtggttctccaccacagagagaagaaaagggagggagatggagtgcgcaggtctgagaaggctttcattctggagcatctgcaggagcctgcaccatggcccagtagcacccctttttctccgtgagctgctggtgggttcccccctcccggatagcgcctccttccagaaagaggatgtggtcagcctgctccaccaggctgaggtgctgggtgatgagaagcactgagcgggagtaccgctcagggctttcgtacaggagctgctccacctgtaactggctgtttgcatccagggcactggtggcatcatccaggataagtacacacggtttccggatcaatgctcgggccaacgccactgcctgtcgctgaccccctgacag

SEQ ID NO: 3897 - DNA, 452 bp, Homo sapiens
aaaacttgctttgtttagaattcccacctcatttttccatggacaaaagtattctttatgtcctagtgcacttacaatttggtattacctgggagtgaaaagaaatattacagccatgcctaactgacttcttgaggtaagattgttctgtcagaaaaccctctcccagttcccctgcagcttttcaggaatccacatctctccagagctctttgttctcatgggtggcacctccagagtgaagaagatcctttgtcaagaagggaaacagaggggaaatgagagggtcctgcaggcagagctggaatcaacttccactctgcctcttgcaagctgtgtgaccctgggcacaatttctccttcctctggaaacctctgttttcttagatttggagcagggtggtcacactgaccttgcagagttctgagaatcagagacagaacataaaagg

SEQ ID NO: 3898 - DNA, 318 bp, Homo sapiens
  misc_feature (1)...(318): n = g, a, c or t
ctgccctctgtaaatnagaggtggggaaagcacccaccctagaagctctattgcccgaagattgtaaccctgaggagcctgaaaatgaagacttccacccttcctggtccccctcaagcctccccttccgcacggacaatgaagagggctgtgggatggtgaagacctcccagcagaatgaggatcggccccctgaagattcttccttagaactccctctggcagtgtgacaggcgctagaggtcctgcctcttacccattctctatttattcccttattttatctaacaccatttcaaaacaaaactgtagaagcag

SEQ ID NO: 3899 - DNA, 128 bp, Homo sapiens
  misc_feature (1)...(128): n = g, a, c or t
ctggttactttgtnaccattagaatggtaaaaatttaattaatgtaattaaattattgggagaaagcttaaaactttcgacaatactgctttgttaataacttgttacaaattaaattttatgttttt

SEQ ID NO: 3900 - DNA, 289 bp, Homo sapiens
  misc_feature (1)...(289): n = g, a, c or t
ccatgtccccagaattgaagccagagaatcgctcanatatccctgagggccggncgttatcaaaagagatgattaggacaggggcctggcctggcttctggtaataccagtgtacattgttactcccaatattgtttcccccacaggtaatcttggccgtctttcctggggccactgacactgagggngnntgagtcaacacataggaggtcacagagtctgtgcagtgagagaggaggccgaggaggagaacggtccaggccatggctgaggcaccaccagtgctgct

SEQ ID NO: 3901 - DNA, 452 bp, Homo sapiens
ctgggctgtgcctcggtctctatgcgcctcggtctctgtgcgcctcggtcccgcctcaagcaccgggtggcgtctccgctgtagtgttctgagttcaagttgcctcggaagtcccagttggggatacgctctcgcgcaccaggtacgcctggtgtttctttgtggtttttcggattctttttggggagtgcggggagtcacagttagaaggcggccgggtgttgctggaggaaagtgctgaggtccagagcgtagtccgagggctccgaagtcagattaaagggctcgaggacggcggacacaggggtgggcgccagggatgcggcgttaggggcgtcctctggaggcaggggcgccggcacaccctcttcagccatcaggatctggcagaagacgatggtgagcagcagaaagagaagccttttggctgggttcggttcctcgactggcag

SEQ ID NO: 3902 - DNA, 203 bp, Homo sapiens
ctgtcaagggcagcagattatcagcgcaaatccagaaaaaccctgtgcatcatcattcttatccttgtcattggagttgcgattatcagtctcatcatatggggattgaaccactgaagttataaaggagcacactgtcgcactacattgtctaaattatgtaggaagattcctgtaatcatgttttttttaattattatttt

SEQ ID NO: 3903 - DNA, 633 bp, Homo sapiens
  misc_feature (1)...(633): n = g, a, c or t
aaaatgttttaatgtatatgtgttatgggtcataggtactcattagtatgcttcataatttattcacgttagatatactctttatagatatcaaatattacatattataatttcttaaaatctgctgtggtggaaataaatgaacacatgaagtctccctgaaagaaaatcagtgtttcttgggaagaaccaagattccctgacagaagctaccctatgtagaggacaaagtaggtcttcaataaatattagttggtttactgcttctcccaaggatacatctggagggtctgcattcctttctcattggtgccgcctgaccacagaactagctttttccgtgacatctaacctaaaccccgcagtcctaagtcctgacacgtatgacaagatgctgccacctggtggatacagaatagatttaatgaaatggctaggaagtctttcactctagttggtggaactggcaatagggtgagagggaagcaggaatgagaagacaaaaattaagaaacaggaaaaggaaggagctccatctctaatatggaggtaggaaaaaaangggactatcatctaaatgagactgaagagtccctagaggagaatggcttccctctccttncttctgagact

SEQ ID NO: 3904 - DNA, 294 bp, Homo sapiens
cctatgaggagtatgttttatctgttgggaatttagatgagcgggtatttcttggagaggatgctgaggaggaaattgggactctctcaaggtgtctgaacgctggttcaggaacagagactgctgaaagggtgcagatgaaaaacatcttacagcagcattttgacaagtccaaagcacttagaatctccacaccactaactggtgttaggtacattaaggagaatagcccttgtgtgactccagtttctacagctacgcatagcttgagtcgtcttcacaccatgctgacag

SEQ ID NO: 3905 - DNA, 225 bp, Homo sapiens
ctgccctccggtgggccggatctctagattcacattagacacagggactctctgtacacgtatctgagatctcaggctcctttttttgatgctgtgagtcactgtctccacctcacaccagtaagaccctgagtcttcagtccacatggcagggatctggagtctgggggacctgctccagcccaatccgagggtctggctatctctgaagagggagaattgcag

SEQ ID NO: 3906 - DNA, 268 bp, Homo sapiens
aaagatatatgaaaagggttttatttatttaacagacagacaatggaacaagcaaacaatgggagcaagtcctttgccaaaaggaacacagagggtcatgatgatgctactcctccaaggatttcagagttcccagacgcctagttttctgtctagttcttctggaagatgttattcttggggagcaataggtcctcgagtttggggctctttcaggttctctctccatttccccattctgcgctctaatctctctggttttccaagg

SEQ ID NO: 3907 - DNA, 219 bp, Homo sapiens
aaagcctaaaaatgccataggaggtcaccagtccttatgttgtactctgaattcctaggatttcaccttggaggtcacagcagtgctatgtagaaagaagaatgtactagggggagattattcttagaaaaggacagtactttggttggagtagaatcagtccacaccattcataacacaaacaccaggctctgtgggctgtgaggtggggagcagagg

SEQ ID NO: 3908 - DNA, 268 bp, Homo sapiens
ctgcctatcaaaacagtacaacttttctaggaaatgcaattggcaaagacacttacgatgctgagaagtacacaaggtgaaactgctccagtttttctcatagcagggtcagcaggaaagcaagtggtgcccctggtcccatctcacacaggtgagactgcaccgagaggtaacgtggccctcacagcccaccacgcctggccttcgcccaattctgaaacttcgtaggatagagctggaaagtgccacatggtgaagcgagatccag

SEQ ID NO: 3909 - DNA, 373 bp, Homo sapiens; identical to SEQ ID NO: 142

SEQ ID NO: 3910 - DNA, 285 bp, Homo sapiens
aaagtgccacatttggcagtacaaatgagtctgagtgtaatagcccagagatttatatatagttgaatgtctaaaatggtaaaatgtgccactgtgtcaagttacagtggcttatgtttttcatagtaattcaaatgaacttcctatttttgatagtaaatgtcatttaatagtatacttgccatttgagcctcactgcaaaattagtgcagaggagaaaacaatttttaatgtaatcttgattttacctcatatactgtacattccaaaaactctaaacttttt

SEQ ID NO: 3911 - DNA, 192 bp, Homo sapiens
ctgtggccccacgaggcaggacttcaataactcgcggcttgtcaatgatccgggccgttcggtttcccttttccacaatgccaacgatccacgcttggtgaccctctccgtacttggaggatttgatttcagaacaaaagcgagccgcctgttctcttggcagacaaatcagtaatcccccagaggtttcag

SEQ ID NO: 3912 - DNA, 308 bp, Homo sapiens
attctctcctgacggaagagtttttcaagttgagtatgctatgaaggctgtggaaaatagtagtacagctattggaatcagatgcaaagatggtgttgtctttggggtagaaaaattagtcctttctaaactttatgaagaaggttccaacaaaagactttttaatgttgatcggcatgttggaatggcagtagcaggtttgttggcagatgctcgttctttagcagacatagcaagagaagaagcttccaacttcagatctaactttggctacaacattccactaaaacatcttgcagacagagtgg

SEQ ID NO: 3913 - DNA, 535 bp, Homo sapiens
aaagagaaacttaaatcctgttgtattctttcaacacaagcagtgatacctctcagagtctgctcaaaagctcagctctgtggactccgtgacaaaatgtacgcgtccactgccgaccctcttggtttctgaaaccaacctttcttcctgctctcctctttaagagcaaaccccaacatgtataaggtcacagcaagtggtagccaggaaaagctgtgggacccctcatttgagtcacatccatatggcatggagaaagaaaacctctctgccagaaggaactgaactctggaagtcctaaggaaggtcaccatgctcagcagataggaaagcattgccaagggctgtccctcaagagcttagttttcttagggagaccagaaagacatcagatcctgactgccctgttttgctcaagttctgaaatgagtggcatgatgaagagctggtggagctgagggaaagagtcaaccatgtggggtggggtagtgaggaaggtgtatgaggaaacaaactgggccctgacgaaacaggc

SEQ ID NO: 3914 - DNA, 575 bp, Homo sapiens
gagcacggagatctcgccggctttacgttcacctcggtgtctgcagcaccctccgcttcctctcctaggcgacgagacccagtggctagaagttcaccatgtctattctcaagatccatgccagggagatctttgactctcgcgggaatcccactgttgaggttgatctcttcacctcaaaaggtctcttcagagctgctgtgcccagtggtgcttcaactggtatctatgaggccctagagctccgggacaatgataagactcgctatatggggaagggtgtctcaaaggctgttgagcacatcaataaaactattgcgcctgccctggttagcaagaaactgaacgtcacagaacaagagaagattgacaaactgatgatcgagatggatggaacagaaaataaatctaagtttggtgcgaacgccattctgggggtgtcccttgccgtctgcaaagctggtgccgttgagaagggggtccccctgtaccgccacatcgctgacttggctggcaactctgaagtcatcctgccagtcccggcgttcaatgtcatcaatggcggttctcatgct

SEQ ID NO: 3915 - DNA, 221 bp, Homo sapiens
aaaacattagatggtgctgaaaagccttctccctccctggatgaagcagtcaaacagacagctactctgcgcatacactccacgcattagcatgcgcgtggggctcagagcaacaggtgggagtttcagaagcattctggtttctccccactcctcacccctgcagcgcggttgcgtaaggtggcttgtaacaagacaactgcatttataaatttaatttt

SEQ ID NO: 3916 - DNA, 230 bp, Homo sapiens
aaatactgagctgggaggcagggaaggaagtagtggggctggcttaagggtatagccgcctcaggggagtcacccagcagcagtcacctggtaggtccagagagtgagatgggatcaggaactggcatagacctcagtcattggtcctcaagctgaggggtggaactgtagctgggcagggcccgggcctcccgaggtgcccatgtcccactgacccaaggacaagatgg

SEQ ID NO: 3917 - DNA, 373 bp, Homo sapiens
aaacacaacagaaatccattaatgtacgctgcagatttttttaagtagccttgaaaatcagcttcagtagttggagcagtgctgagctagaagtacttgtcatgttctctgttctctcaatgaattctgtcaaaacgctcagtgcagaaaattcagcgtttcagagatcttcagctaatcttaaaacaacaatcataagaaggcccagtcgatgacactcagggttctacagctctcccacatctgtgaactcgggtttggggatgttggttaagtttgtggctggtcctctggtttgttgggagttgagcagccgcagagtcacacacatgcaaacacgcactcttcggaaggcagccactgtctacatcag

SEQ ID NO: 3918 - DNA, 624 bp, Homo sapiens
  misc_feature (1)...(624): n = g, a, c or t
ctgtggtcaagtacacggatatgcatgtacaaggatatttattggtgttgcatataatgataaattattgagagttttctaaatgtacattttcctccttctggtagccatcttctctacgaagagtgactattgcctctttacccagaaatattggaaatgcaggaatggtggctgggatggaaaataatgatcgattcagtagaaggtcaagcagttggcgtattttggggtcaaagcagagtgaacaccgtccctcattacctcgatttattagcacctattcctgggcagatgctgaagaagaaaaatgtaaactaaaaactaaagatgactcagagccatctggagaagaaacagtagaaaggacaaggaagccaagtctttctgaaaagaaaaataatccatcaaagtgggatgtctcttcagtttatgacacaatagcttcctgggcaacaaatctcaagtcctccatcagaaaggctaataaggccctctggctctctattgcattcattgnactggttgcagctttgatgagcttcctcacaggccaattattccagaagtctgnggatgccgctcccacacagcaagaggactcatggacgtctntagaacata

SEQ ID NO: 3919 - DNA, 537 bp, Homo sapiens
cctcaggagggtgttggcaaggctggggcggggcctccaggctcttcccacaaaaggtgtggcgaggccagcaagtgtgggagagaggtgggaaggaggcagaaaggccatgcagagccagcgcatgaagccagaggcgcgttgcagacggcgctgggtacctaccgcctctgtctgctactctgcaaaatgctaccagcgcctgctaatcctgaccttcatgcccccaggtgaatcccacaaccatcctgaagccgggtttcctcattcctgataatgggattaaaaagaccttcctgggtgttatttgtgaggatttcataaaatagtgtaaaaatgctgactcatacccagcatggagaggccgctgggactattctgccatgactgtggtctcttggtttagagcatttagggccaaactgctggcatggttgaccctaagctggagattggaggctgctttaaccaggctgtggccctagaatctgtgggccatggcaaaaggatcctgaagaagtttccggccggcctctg

SEQ ID NO: 3920 - DNA, 412 bp, Homo sapiens
ccttacctgggaggccagacccatcctctccttaagccacaccctaactcatctctacatgctgggtggtgacaagcaaggacaccccaatctgcttggctccttggctggcagcagcacccacacatccctgcccaccacctgctcaggctccagatcccaaggaggaggtggaaggtgcctgccctccattatcaggcatgcaacatttattagaagccgcacagtctctcttgaccagtgttccgcatctgagccacaggatgcagaaaatgacttgagtgattctcgtcaattcttccaaggatggtatgtaactagtctcattctagaaagaagttaactcattatacacagtggatggcttaagggattagggcttcattctctcccagaccctggtagtaaaagg

SEQ ID NO: 3921 - DNA, 247 bp, Homo sapiens
  misc_feature (1)...(247): n = g, a, c or t
ctgcgggccccttagcctgccctgcttccaagcgacggccatcccagtaggggactttcccacactgtgcctttacgatcagcgtgacagagtagaagctggagtgcctcaccacacggcccggaaacagcgggaagtaactggaaagagctttaggacagcttanatgccgagtgggcgaatgccagaccaatgatacccanagctacctgccgccaacttgttgaggtgtgtgtttgactgtgag

SEQ ID NO: 3922 - DNA, 229 bp, Homo sapiens
  misc_feature (1)...(229): n = g, a, c or t
ggaaaanggatggcaaattccctgtctttctggatccaaatcttacgattgctaggggcctggcagttctaaaaactgacttcgtggtcaagtagctttggagtcactgactgtctccagacgtccatttttgcacatgagaaatgaggatataatactacagaagaggcatcttacccaaccaatgcaccttacttctctgtgaaacacaggggatgctgggcgcagg

SEQ ID NO: 3923 - DNA, 543 bp, Homo sapiens
cctggcagcactggagggcaggcagggaaagtagggtgggtaacccagcctggcaaatgcacggcagctagaaaacctcttcaggttctggggtggctgggccatgagaggggaggccaggcagggctgtcaaggtaaccggggtcagatcatggagttgcctgccaggctccacaggagtgggggacagaagcagagcaacccagctaccagccgggccctgagctccctcagggtgaccagggaggagctgtgactggctggggaggcagggctggggccgaggttccccaggacgacaggagggagccaaggcactctaagaggtggaagaagaggaccagaagctggtgagtgcatcactggagcccataggagggctcctgactgtcctcaaaagcctcagacctcagtgtccactttctccatccaagaaatggggctgtgatctctgcttatgacagcacaagcttgcacagaagtggaggcgggaaataagcacaagtgtgccttcccagcccggcctgggtccaggcagaacag

SEQ ID NO: 3924 - DNA, 181 bp, Homo sapiens
  misc_feature (1)...(181): n = g, a, c or t
aaaagcaacaagaagaaaaccaaacaatgctgatagactcagaaaaggagtggggggcagtcaccactgctgggcgtggcatccgccttgggcctttctccgaccttctggtgtggccgccctgggggccaggccctcgccatcctccccatccttgttcctcancaaatggcattagcag

SEQ ID NO: 3925 - DNA, 482 bp, Homo sapiens
ccacaagatatgttctagagacgtccatgagtcctcttgctgtgtgggagcggcatccacagacttctggaataattggcctgtgaggaagctcatcaaagctgcaaacagtacaatgaatgcaatagagagccagagggccttattagcctttctgatggaggacttgagatttgttgcccaggaagctattgtgtcataaactgaagagacatcccactttgatggattatttttcttttcagaaagacttggcttccttgtcctttctactgtttcttctccagatggctctgagtcatctttagttctgtaaataaatgttgtttttaatatttgaaactagggataatatgctataattattcataaaatattgctgaatcttactgtaactcaagaggctcacaaatatttgttctgttttagggaaagttgataaatatctaactctaaaaatcaaatcaccagatttataattt

SEQ ID NO: 3926 - DNA, 168 bp, Homo sapiens
tttgaaattttctggcaggatcagtgtgtcaatctcctccaagatcttcataaactgctctattgtggcttttactctcctatcaagtttgcagagagcttcagcttgcaaatccttgggcagaaaaccctgctggattccagtaagctctttattcaactcttccag

SEQ ID NO: 3927 - DNA, 196 bp, Homo sapiens
aaaaattatgagttaatgctgcctgtgtctatggggttctgtcttctttgatagccatctattcatctggatcatgggaccctctctaatccctccaccaatcaaataagctattgctattggtttggagttgagatatcagtctcggaaacttctgaaaaatgctaataattacccaaggattatgtcaaatttt

SEQ ID NO: 3928 - DNA, 528 bp, Homo sapiens
ccagcacgctacaggggcttcctatgcgcttgggatacacaggggctggaggcttcccaggagtttgtcttgaacatctggaggtttgaatttgtcccactgaccttttctttcagcaagttcccctgaaatttgggctgctgcttgggtgaatatcccaggatgggggttccattctaggagtggactggcaggctgagcctcccatggagctgatccagccaggatacagagaaggggaggcaaaggctgagacagaaccagcttgagagcggaggcgcaactcttgtctcctggtggccttgagcatttcacaatagggggataaaggataggagcagaaaagtggggctgacttcagaaatggggtcctctagagctcacgggagggtgttagattggagtgggagcttagtggaggtgagccttagaggcaaaagtctccagaccaatccagggcccctcttctatccgggggcccctcttctatccagggcccctcttctgtctgggagcccctcttctatc

SEQ ID NO: 3929 - DNA, 520 bp, Homo sapiens
  misc_feature (1)...(520): n = g, a, c or t
ctaattcgggaaacgtgcaccttgactaattcggttttctgtggctacgagagcaggcttggcgggcggaggcgccagcggatgtctcatgcaaggatcgtctctgtggctaagcctcactttccgctccgcccgggtgctctctagagcccggtttttcgagtggcagtctccagggctgccgaatacagcagcgatggagaacggcaccgggccctacggagaagaacgtccacgtgaagtccaggagacgacagtcaccgagggggctgccaaaatcgcctttcccagtgccaacgaggtcttttataacccggtgcaggaattcaatcgggacctgacatgtgctgngatcaccgagtttgctcgcattcagcttggggccaaaggaatccagatcaaggttccaggagagaaggacacgcaaaaagtggtcgtggacttgtcagagcaagaggaggaaaaggttgaactgaaagagagtgaaaacctggcctcaggagaccaacctcgcacagcg

SEQ ID NO: 3930 - DNA, 519 bp, Homo sapiens
  misc_feature (1)...(519): n = g, a, c or t
ccaacacccacttctctggntgtataanacagggacctaaaaagggaaaggatgggaggaggatcatcctgcagnngatcatgtagggcttnatgctntaaatggttntgcatttccggagatgaaacangtctcttnaccacanaactactgcagatcatagccctatggtctggctggttttgtcaatctggcagttcagggncagtgcaaaggacatncccaacacctcaatcacacatacacagatggngatgattccgatatacaggaaattggaatgaaaccacantcttgctttcgnatancaaccctccacttttcgatctgaggggcaagatgctggtgggccactggnccaatcactcntgccatttataccacaacactgcagaaatgactggntggagtcccacgctgccttggtgctattgnctgagtggtaacggtggatgctgncggncanacccttanccacatactcattcancttntgntcatatacaaagagcaggatgg

SEQ ID NO: 3931 - DNA, 411 bp, Homo sapiens
ccaagtcgggaaggagccgtatatatgcatatgggattcctataatgtccagactgtgtctcttcttaaagatgtccatacacatggagttgcctgcctggcttttgactcagatggacagcgtttagcctctgtggggttggatgccaaaaacacagtctgcatttgggactggaggaagggaaaacttctggcgtcagccaccggccattctgacaggatttttgatatttcctgggatccatatcagccaaacagagtggttagctgtggagtaaaacacataaagttttggacactgtgtggaaatgccctgactgcaaaaagagggatatttggcaaaacaggggatcttcagaccatcctttgccttgcatgtgccaaagaagacatcacctactctggtgcttt

SEQ ID NO: 3932 - DNA, 532 bp, Homo sapiens
  misc_feature (1)...(532): n = g, a, c or t
ctgggcgtangtcacatcctggggggcttcagatgcagcagcctcagtgtccatctgcctgtcctcttccgcctgtctgtcctttgtgtccaggaattccccagacagtggggaaggaggagaggccatttctctcctangtctggagtgtttcacctcggcatacgtcactgcctgggggtcttcatcgtgtgggctctgctggagagagacagtggtgggggtgtccctgaatcctcctgaccccctggagtcaattttcctnactgttccccgggtgatccgattacatccctttcccgatggactctcanggacgccctaaggccgnggagggtctggccgctccctcgctgtggttctggcctctgctcctcactctgacgttgcccatttggctgcagcctcacgggccttcctgcaagagctcgctgctgcctgggggcctttgcanggttgtttcctctgcctgcaggggctcgtccatcagaggatcgtgtgccccactctgtccaggcttctcanatgacag

SEQ ID NO: 3933 - DNA, 390 bp, Homo sapiens
ctgaagtacaaaatttgattactggaggcaatgaatcaagtctagtctctgggctccaagctatgccatcaaccctgactccatggtgaaatgttcgaagtgttttatactgaatgccttcaacgtctgcttcttcttcctgaaacgtacacgtgccaatgaccacataattattgccaccatatgcaattaggtttcctgaatccccattctcaaagggattaaattctaccacatgcacataatcttcacaatccacagtgtaggcagcatttcttgaggcatcttgcttcatcttgtatgtcaaaattcaagcagttgtgaaaattaaatagccttctactggacaaggtcacgaaacgcagagcgccaggaaccgaccagaggcag

SEQ ID NO: 3934 - DNA, 550 bp, Homo sapiens
cctggcagcctggctggacagtcaatgtggagggcagtggtgagggccgggctggggcaggggcaggaggagagaagggaggccaccatggacagaagaggtccgcggccacaatggagctggagagaggggctggagggattgagggcgaaactcggagctaggtgggcagactcctggggcttcgtggcttcagtatgagctgcttcctgtccctctacctctcactgtcttctctctctctgcgggtctttgtctctatttatctctgtctttgagtctctatctctctccctctcctgggtgtctctgcatttggttctgggtctcttcccaggggagctgttccggtggaatgtttcggacctaggtggcctgggctgtggcctgaagaacaggtcctcagagggccccagctccccttccgggaagctcgtgagccccaagctgtatgtgtgggccaaagaccgccctgagatctgggagggagagcctccgtatgtcccaccgagggacagcctgaaccagagcctcagccaggacctcacca

SEQ ID NO: 3935 - DNA, 387 bp, Homo sapiens
atttttagtagagacggtgtttcaccatattggtcaggctagtctcgaactcctgacctctggtgactcacctgcctcagcctcccaaagtgctgggattacagacatgagccaccatgcccagcttacctcttcatggtttcattaatcagcaaagaacacctaatcctgacatccagctgttttttcctagctgccaagactgttgaggaagatgagagaattccagtactaaaggtattggcaagagacagtttctgtggatgttcctcatctgaaattttgagaatggagagaattattctggataagttgaattgggatcttcacacagccacaccattggattttcttcatattttccatgccattgcagtgtcaactagg

SEQ ID NO: 3936 - DNA, 270 bp, Homo sapiens
cctgcctagcttctgcatagcccggggctgggcggtccccgggagtgctgccacctcccctacactttcatcctgaggcaggatttgctagacgtcggcttgcctctcttccccagcaggagggcaggagtcactaagtgctgcagaaaagatccgcgctggagattgcccgtcccccccatgcctttccccagaaacagttgagagaatgggtagctggtgggaccagaccggtttcccagaggacaggaaggccaataaaaatatcag

SEQ ID NO: 3937 - DNA, 601 bp, Homo sapiens
  misc_feature (1)...(601): n = g, a, c or t
aaaaaggtctctctctttttcacaagctagaaagtatccttcgtatgatgaagattcaaattgcatcttattatcatgtcctgggacacttctctgaaagaatatgatgtcactttttgtatccttgatgttatcaggaggattcatttccttaaaggaaataattttgttctcacaggagagagttgaaattttctcacacttcacagagatagttacagccatacctctaggctggctatctttatacatacttataataaatatggtccggggtgcattatctctacagtcagaatcagtcatatcttcaaatagaggccgatttccttggtcaatgaagagaacttggtcattcaaatttcttatgactgataatttagattcaagcttgccaaagtaatcggattccaggttttcatcatcttcagctataaagtaaagcgtattgtcaataaatttcattgccacaaagttgatgcaattgtcttctactggttcagcagccatctttattcctgcgacaaatagtttgttgcgagaggaagcgatctggaaggnctgaggttcctttcctcttcccgaagctgtgtagactgca

SEQ ID NO: 3938 - DNA, 323 bp, Homo sapiens
gtgacaggagccgaagcagcagcgcaggttgtccccgtttcccctcccccttcccttctccggttgccttcccgggccccttacactccacagtcccggtcccgccatgtcccagaaacaagaagaagagaaccctgcggaggagaccggcgaggagaagcaggacacgcaggagaaagaaggtattctgcctgagagagctgaagaggcaaagctaaaggccaaatacccaagcctaggacaaaagcctggaggctccgacttcctcatgaagagactccagaaagggcaaaagtactttgactcaggagactacaacatgg

SEQ ID NO: 3939 - DNA, 222 bp, Homo sapiens
  misc_feature (1)...(222): n = g, a, c or t
atgaatnaagagtttcctatggngaagttaacnttctaccattgcacataaattncgacgctctggccctnangtgcccctgaagcgaanttctggaagacggctgtgtgtgtacccccagcccatttctctaaagcacgtctgcacaattccaagtntgcttttctttttatgatgaggaangaaacaataacagtnatcattcagtagatatttgaattg

SEQ ID NO: 3940 - DNA, 430 bp, Homo sapiens
ccttaaaggagaccagggggaacctgggccctctggaaaccccggcaaggtgggctacccagggcccagcggccccctcggagcccgtggcatcccgggaattaaaggcaccaagggcagcccaggaaacatcaaggaccagccgaggccagccttctccgccattcagcggaaccccccaatggggggcaacgtggtcatcttcgacacggtcatcaccaaccaggaagaaccgtaccagaaccactccggccgattcgtctgcattgtacccggctactactacttcaccttccaggtgctgtcccagtgggaaatctgcctgtccatcgtctcctcctcaaggggccaggtccgacgctccctgggcttctgtgacaccaccaacaaggggctcttccaggtggtgtcagggggcatggtgcttcag

SEQ ID NO: 3941 - DNA, 172 bp, Homo sapiens
ccttgacttgcttgtaagatgattctcagagatcggctgagttaaaaaagatgacgacttgattaccaaagaaagtagggccaactttgacaaatctggctctgctgaccctgtcactcccagatgtagcatagactcctaaacagaacctcaagtctgattgaggataagg

SEQ ID NO: 3942 - DNA, 516 bp, Homo sapiens
  misc_feature (1)...(516): n = g, a, c or t
aaatgacnaaactggaattatttcaacccggaaatnattgtttcaaatttccatggttaaaggtttgctcaagcaaatcttaaaacacaggtatgtatttcagaagatcaaccaaattcgagtttgcatcccattttgggtacattgtaaatagaaatttcaaaatcttcctcaaaaatatctgcatttgttttccagattcttgcaacccaaaacaaaacttcacagaaactctgcacaagagttggcagacagctaaaccttctccaaattgagttatggacaataaggtcttgattatagcagaattggaaggtctatttacaaacctgcacacagtgctgtgtaaattgggtgctggggcacattgattggcagggaaaggccagggaggcagttgaatccctggcatttttcaaagcttttttcctaggntcattattcctagaattttgaagcttattaagacattccctatcctatgtcatactctagagcactctagtnagaatcctg

SEQ ID NO: 3943 - DNA, 118 bp, Homo sapiens
  misc_feature (1)...(118): n = g, a, c or t
ctngatgcctcatgaatcaacggnggagcacacacacgtnnatatcaatgagatggagtctcctcttgccacccggaaccgcacatcagtggatttcaaagacactgactacaagcgg

SEQ ID NO: 3944 - DNA, 219 bp, Homo sapiens
  misc_feature (1)...(219): n = g, a, c or t
tttgtgccnnaactggacctgcnggttggtaccaanggctgntgccanccagccggagtacaggtcatctccaaatttgctgaacttggcaaagctctggaaaacagccccggcctgggatgngagtgtgatgctgctgttccagggttcttggctaacgtggtggcccttgaccacattctccaagtcggggaattcctgggcaaagatcccttccag

SEQ ID NO: 3945 - DNA, 504 bp, Homo sapiens
ctgtctgtcatctgctgcgatccggcagcctctcttcactgctacatgtgctggaaggacaaataaataattgtggttgtgttcttaatggggacgagcagacacactgatctgaacatctggcccaagtgaagcatggcatatagtgcccttggaagaaaattaggcctcaaatgacagtagcattgaagtgtttgctgcagagttgagggaaacccccagccaccctcccggaatccgagatagggtggcacatctgtcctgacagacgaggagtgtaactgaaccaggaatatttcctccattcctgctctcccactgcacacagggtggtggcacattatccctctggggggtggggacgcctgttgttttggctcaatttgggtttgttggtcacatggagctcttccatttcgtttagctgaataatgagttgttcctagaggagacagcctgtctctccttgttgcccccaaagcccatgccctgccgtggtggcag

SEQ ID NO: 3946 - DNA, 393 bp, Homo sapiens
ccttctacaccacggaccgggtcatgactgtgtcctttcataagtatggagagtacttcccaggaactggggacctacgggatatcggggctggcaaaggcaagtattatgctgttgactacccgctccgagacgggattgatgacgagtcctatgaggccattttcaagccggtcatgtccaaagtaatggagatgttccagcctagtgcggtggtcttacagtgtggctcagactccctatctggggatcggttaggttgcttcaatctaactatcaaaggacacgccaagtgtgtggaatttgtcaagagctttaacctgcctatgctgatgctgggaggcggtggttacaccattcgtaacgttgcccggtgctggacatatgagacag

SEQ ID NO: 3947 - DNA, 452 bp, Homo sapiens
  misc_feature (1)...(452): n = g, a, c or t
ctgggctgtgcctcggtctctatgcgcctcggtctctgtgcgcctcggtcccgcctcaagcaccgggtggcgtctccgctgtagtgttctgagttcaagttgcctcggaagtcccagttggggatacgctctcgcgcaccaggtacgcctggtgtttctttgtggtttttcggattctttttggggagtgcggggagtcacagttagaaggcggccgggtgttgctggaggaaagtgctgaggtccagagcgtantccgagggctccgaagtcagattaaagggctcgaggacggcggacacaggggtgggcgccagggatgcggcgttaggggcgtcctctggaggcaggggcgccggcacaccctcttcagccatcaggatctggcagaagacgatggtgagcagcagaaagagaagccttttggctgggttcggttcctcgactggcag

SEQ ID NO: 3948 - DNA, 506 bp, Homo sapiens
  misc_feature (1)...(506): n = g, a, c or t
ctggagagggggcttacgacagtcgctcatgcagtgccaggacttccaccagttgagtcaaaatctgctgctgtggttagcgagtgccaagaaccggaggcagaaggctcatgtcaccgatccaaaggcagacccccgggctctcctagagtgtcggagggaactaatgcaactggaaaaggagctggtagaacgtcaacctcaagtggacatgttacaggagatttcaaacagccttctcattaagggacatggagaagactgtattgaagctgaagaaaaggtgcatgttattgagaagaaactcaaacagttacgggagcaagtgtcccaagatttaatggccttgcagggaacccagaacccagcctcacccctgcccagcttcgacgaggtagactcgggggaccagcctcctgcaacatccgtgtcagctccccgagcaaagttcagagcagtgagaactacagaaggcgaggaggagacaganagcagggtccccggca

SEQ ID NO: 3949 - DNA, 177 bp, Homo sapiens
ccacatataacattattttgagaaaggaaagaaagtgcatgccccaaaagggatgccttccttcaccttgcaggtagctggaactttgatagtggcagaaaccacaatggagtagggttcacagaaatggcctgtgaaacagaccctattcctagagagacagaggaaaaacctcag

SEQ ID NO: 3950 - DNA, 361 bp, Homo sapiens
  misc_feature (1)...(361): n = g, a, c or t
cgggaaacacaggccattaacagcagcctgtccacgctggggctggttatcatggccctgagcaacaaggagtcccacgtgccttaccggaacagcaaactgacctacctgctgcagaactctctgggtggtagtgctaagatgctcatgtttgtgaacatttctccactggaagagaacgtctccgagtccctcaactctctacgctttgcctccaaggtgaaccagtgtgttattggtactgctcaggccaacaggaagtgaagacggatccagatctctgtgtgtgtgtgtgtgtgtgtgtgtgtgtgtgtgtgtgtgtgtgtgtccctatgtntatgtatcnggtgaggggtgggag

SEQ ID NO: 3951 - DNA, 446 bp, Homo sapiens
  misc_feature (1)...(446): n = g, a, c or t
aaacaaacaaacanacaaacaaannaaggntgggggagggagggaaagagannagctctncactnncctttgttgnantctcacagtataacagatattctaattcttcttaatattcccccataatgccagaaattggcttaatgatgctttcactaaattcatcaaatagattgctcctaaatccaattgttaaaattggatcagaataattatcacaggaacttaaatgttaagccattagcatagaaaaactgttctcagttttatttttacctaacactaacatgagtaacctaagggaagtgctgaatggtgttggcaggggtattaaacgtgcatttttactcaactacctcaggtattcagtaatacaatgaaaagcaaaattgttccttttttttgaaaattttatatactttatgatagaagtccaaccgtttttt

SEQ ID NO: 3952 - DNA, 393 bp, Homo sapiens
ctggcagatggaagcctggttctctttggcagcaacatgcatcacgttgtacctgcacccttcctgcacgatagtggggttgtctcctgagcctatcagataccgggggttgctccagataaggtcagaaaaggtgtcctcctctcccttctccacagctttccgaagcttggcggtgaggtcctgcgtgcggggatttttgtaactgttcgctcgctctttgttgactgtttctgattccgacaagcacaaaccatctttcaacctgtcattgctaaagagtggagctgttttcacaggagacagtggtaaggacgttttgcttggagaagggaaataatcacaaattcctctagcaaatttctcagcgtcttctctggtagaaaaagcttt

SEQ ID NO: 3953 - DNA, 621 bp, Homo sapiens
ctggtgaaggaactcaaggaggctttaggtattccagccgctgcctctttcaaacatgtcagcccagcaggtgctgctgttggaattccactcagtgaagatgaggccaaagtctgcatggtttatgatctctataaaaccctcacacccatctcagcggcatatgcaagagcaagaggggctgataggatgtcttcatttggtgattttgttgcattgtccgatgtttgtgatgtaccaactgcaaaaattatttccagagaagtatctgatggtataattgccccaggatatgaagaagaagccttgacaatactttccaaaaagaaaaatggaaactattgtgtccttcagatggaccaatcttacaaaccagatgaaaatgaagttcgaactctctttggtcttcatttaagccagaagagaaataatggtgtcgtcgacaagtcattatttagcaatgttgttaccaaaaataaagatttgccagagtctgccctccgagacctcatcgtagccaccattgctgtcaagtacactcagtctaactctgtgtgctacgccaagaacgggcaggttatcggcattggagcaggacagcagtctcgtatacactgcact

SEQ ID NO: 3954 - DNA, 295 bp, Homo sapiens
cctctgagcagaacgaggtaaatcttcactgttagctacaaagagcactgcatgaaagtgtgtgcaagatgactccatgaggttttctttttaagtttatgtatatttacagaaaagtgaaatgtgttggaagaataaacaccccttcttgtggacacttttagagaggagaatttgggctgggaaaaaaggagatcctttttatttttttgctgttctctactgtttgtcttttctgtagttaatattaatattaattgtattaatattctgactttaatattagaaacttttt

SEQ ID NO: 3955 - DNA, 295 bp, Homo sapiens
  misc_feature (1)...(295): n = g, a, c or t
cctctgagcagaacgaggtaaatcttcactgttagctacaaagagcactgcatgaaagtgtgtgcaagatgactccatgaggttttctttttaagtttatgtatatttacagaaaagtgaaatgtgttggaagaataaacaccccttcttgtggacacttttanagaggagaatttgggctgggaaaaaaggagatcctttntatttttttgctgttctctactgtttgtcttttctgtagttaatattaatattaattgtattaatattctgactttaatattagaaacttttt

SEQ ID NO: 3956 - DNA, 319 bp, Homo sapiens
ctgtcaagtttccatgaacttacacttatttatgattgcgtttctgacctgagatgtatgctgcctgttattgcagtagcattagtttcagattcttttgccattgcaaagtaccccttataaaccagcaatgtcatctgtgaggaagcaaattctcaagtgtctgtcatttacttggttctttttctttgtggtcttcacccttataccctggaaaagtctgtaattaccttagccaggaagatagatggtcatggcaagcgcacagcaccagacttactggctcaccaagatgatggaaaaaggcagatgatttttt

SEQ ID NO: 3957 - DNA, 515 bp, Homo sapiens
ccatccctgagcttgaatagcagtgggttcagtgaaattctgtcttgcaataacatccatgacatttgcagggaaattggcttcataaaaatttagaactggcttcgggcagttgtgacctctaactgtaatttccttgcttcttctgtatgtttccacctcttgtgctgtgcgcctagccaaatcagggtgctcttgataaaaattcttctcaaatttaggcagctcatcaagattccacttctttttaactaatttctccccagggtttccaaacttctttccagataagggccctgccctacttcctccaaatcgaggtgcaccaaaccctcggtcccggccgcggtctcggtcactcgaataacccgacatggcgtcaatggttgcggttggcggggaacgaagtatatagaaaagcgtgcgacaagtcgctggaaatggcctcgatgacggcgaagccttgcgggggcggcagcggaggaaggacaccgatgacaccagccgaagctgca

SEQ ID NO: 3958 - DNA, 499 bp, Homo sapiens
ctgctcccggttcacgagggaggagtggtggtagcgatcccgagtggcgaagtctgcattctcctgggtgagctgagtcgtctccatgtcaaccttagccagggacggcgccaagatgatctgctcctgaggggaccgcaagctcctgcaggaggggagcaagagagacctcatccaccggaaaaagctgaagttggaggctgatccaaggtgaagccctggactggcccggccaatgtagaaatacacgatggcagcaacacccatgttaaccagggtatacacccactgtatcacaaacatgatgagaagggacccaacagcccccaacagggggacccaggggttgcacatgtgggtatagaaagaagtggatcttctccagacatcttgttcttggagcctggacttcaggaagaaatctaaaaaatagccaaagatttggctgccaaattgctatcaactctctactgttttttaggaaaatatacctatgagc

SEQ ID NO: 3959 - DNA, 349 bp, Homo sapiens
  misc_feature (1)...(349): n = g, a, c or t
aaaagactattttactaaatttggagaggtcnttgactgtncaataaaaatggatcccancactggacggncaanagggtttgggtttatcctgttcaaagatgcagccagtgtggagaaggtcctagaccagaaggagcacaggctggatggncgtgtnattgaccctaaaaaggncatggctatgaanaangacccggtgaagaaaatcttcgttgggggtntgaatcctgaagccactgaggaaaagatcagggagtactttggcgagtttggggagatngaggccattgaattgccaatggatccaaagtngaacaaaagacgangntttgtgttnatcaccttt

SEQ ID NO: 3960 - DNA, 582 bp, Homo sapiens
  misc_feature (1)...(582): n = g, a, c or t
aaactaccatggggagaaatgaccacacctatcaaaaaagcagtgtcaaactaatttacatttttatacagatcagatgtttatttagtattgttttcatatatgcattgagtatgtaaggacagagttagatgagcctctgaagacatctcatatactctgggctcccaccgtttcaggttcttttagtgtctcagaatttccagctaattcttcggtctgcatttcacatatttcaccagataaatggtttttctgttcttcttctaccattttctttcttagatctgcctctgaatatattgtcagtttcagtggtaaatcttcaacttttacaaaatcttcttcatcagacttttgacttatattaccagattctgcttcatagtcattcactaacactggagattcagtatcaggacttccagccagagagctttcaggagtttcctgagcagatttaacttctttgactctaggcactaagggttccatttcaggtaaacgtnacggcnaanggttangctgntgagttgaatcaacagtaggaggngactccttatgggcagcactatttacctg

SEQ ID NO: 3961 - DNA, 289 bp, Homo sapiens; identical to SEQ ID NO: 3644

SEQ ID NO: 3962 - DNA, 528 bp, Homo sapiens
aaaaatatatgattttgctccttttcttcccatgtgcatcaggcccactctacaaaggttgaatcctggcttgtctgagcccgtgtgatcccacggtcattccaatgtataagaaagtgggtactgggaacactctggaaacagtttagttgatccttctaaaggcacacaggagaaaggagtatccttttcctgcctttgggagttgttgtgaatgattaacaaacctaaagctgctgcatgggtcaccctaccatctcaggaaagctgacgtgctgtgtgtgatagagagatgagctacgaaattccaggatcactggtgatgacactggcctgctgagttgagcatccctggagatgcccagccttggatctatcggctatgtgagataatgggttaaagaaaaataaagccactagatgtaatttcctgttattagcagcagaacacatcttcactgaaatactcattccacacattttggttctaccttgtaattccacaccacgagtctcatataaaatgag

SEQ ID NO: 3963 - DNA, 295 bp, Homo sapiens
  misc_feature (1)...(295): n = g, a, c or t
cctctgancagaacgaggtaaatcttcactgttagctacaaagagcactgcatgaaagtgtgtgcaagatgactccatgaggttttctttttaagtttatgtatatttacagaaaagtgaaatgtgttggaagaataaacaccccttcttgtggacacttttagagaggagaatttgggctgggaaaaaaggagatcctttttatttttttgctgttctctactgtttgtcttttctgtagttaatattaatattaattgtattaatattctgactttaatattagaaacttttt

SEQ ID NO: 3964 - DNA, 341 bp, Homo sapiens
ccaccctcccacacgggatattctaagccgctgacaccatctaacttttctgaaagaaattaacaactcagccgatctttaccaggctaaaatcacagaactgggtcccctgaaagccaggctttcatgccacatccacagctactgctgtctagccaagtctataacatcttcttgcccttattaatacatatgttacataggtttacgtatgttaatccctaatgacttgacttaaccttgtcacagccaggcgcggtggttcatgccctacaatcccagcactttgggaggccaaaatgggtagatcacctgaggtcaggagttcaagaccagcctgg

SEQ ID NO: 3965 - DNA, 598 bp, Homo sapiens
  misc_feature (1)...(598): n = g, a, c or t
cacgtcgtgccaatggcccgctatgaggaggtgagcgtgtccggcttcgaggagttccaccgggccgtggaacagcacaatggcaagaccattttcgcctactttacgggttctaaggacgccggggggaaaagctggtgccccgactgcgtgcagggtgaggccgggattcgggggctgctgtccaatggaaatggcaggaaggtcgagcctacggccagaaggggggcttagcggaggcagagtcttggttccagacatccgcggagcaatctgagctgtccccaagtctccttctattaaatcctaccccgccctgccaagagcgctcttccttttaccaccttacccggatgatcttggaatctagttccttaaaacttctcactcccccagtaccattagtgtcttacaggatacgtgagttggtcagcaaatacatgtgctttccattgttacgggcgcggtggtgcaggggcaaatcgggactgggatttggtccttacccttaacgtggctctaagaccagaagggaacacctgacttctgttgacctcttcagttagctgcaggttaaagnctgagtgcttaccaagac

SEQ ID NO: 3966 - DNA, 344 bp, Homo sapiens
aaacatcatcttttcatagttttgatctgtttttataattcctgcattcaattcactggcaaaaactctatcattgaaagtgctggcaggaccacttcttaggctgtcccagttggcaaccatttctttcacccactctacccaggtgtacagacggagaatacctgcatctgccatggcttccacaaagttggcatcttctacagtgtcaccagcatcagccagagccaaacgcactccatctgctgaaaatttgtcaatagcttgggtcaaagtgaggaagttgcctgtggattttgacatcttctcagagttcaggaggagatgtccatttgctctcacag

SEQ ID NO: 3967 - DNA, 387 bp, Homo sapiens
  misc_feature (1)...(387): n = g, a, c or t
tatgtgcatantttcataaagcagacatttccatgaggaaaagaggatggtggtgaaaggggaggggtgaagggacatctccaagtcacagaggctgcaaaactcagcatgacttgtggacggagccacaggccacccagggcaacaacacccacataactcaccaagtggttaacggctctaaaccagggtcaacaggagaggggacaaaagtcactccttgattttgctgcagcttaaagataagttctacctcagcttatgctagcccttatggggcaaaaaagggaaagtcattctccccaagtccaggctgggccgtcaaacagggagtggggtgtcagccccagacctcaatgaggtccccagattccatgcccaggtcag

SEQ ID NO: 3968 - DNA, 458 bp, Homo sapiens
ctgtgaccttgccaaggagcagggcccatacgaaacctatgagggctctccagttagcaaaggaattcttcagtatgatatgtggaatgttactcctacagacctatgggactggaaggttctcaaggagaagattgcaaagtatggtataagaaacagtttacttattgccccgatgcctacagcttccactgctcagatcctggggaataatgagtccattgaaccttacaccagcaacatctatactcgcagagtcttgtcaggagaatttcagattgtaaatcctcacttattgaaagatcttaccgagcggggcctatggcatgaagagatgaaaaaccagattattgcatgcaatggctctattcagagcataccagaaattcctgatgacctgaagcaactttataaaactgtgtgggaaatctctcagaaaactgttctcaagatggcag

SEQ ID NO: 3969 - DNA, 433 bp, Homo sapiens
  misc_feature (1)...(433): n = g, a, c or t
gcggcagagacagaagagcggggtcggggccggctgaccaggaacctgggcgagcagcggcgggggcccgagggattctgaaggaagatttccattaggtaatttgtttaatcagtgcaagcgaaattaagggaaaatggatgtagaaaatgagcagatnctgaatgtaaaccctgcagggtattttccctaattctccatggtgcttcaatagcatgttattatcataaaaatgaacagttttgtggaatagatgaccaaataaaatgctgggactgaggaagtaangaatgaaataaatggaaattggatttcancatcctccattaacgaagctagaattaatgccaaggcaaaaaggcgactaaggaaaaactcatcccgggactctggcagaggcgattcggtcagcgacagtgggagtgacgccctt

SEQ ID NO: 3970 - DNA, 275 bp, Homo sapiens
  misc_feature (1)...(275): n = g, a, c or t
aaactgagagaaattgtngatantttggntactttnggttnntgtattgtactcctttgtatgactcttctccaatttatctattatactatcggttgacaccagggttttatcaagtttggaatgtatgctactatgacattcttggcacctgtcctagaatanaatttttaggccccaggatatgctttttgtcaactttaagaaatgacaccaccaggccaagcacctgtaatnccagtactttgggaggccgaggcaggcggatcacctga

SEQ ID NO: 3971 - DNA, 222 bp, Homo sapiens
  misc_feature (1)...(222): n = g, a, c or t
aagccctttaagtaatgatataactagaaactacgtttcatctcaaaggaaaaaccacaggtgatatattctcatgcttnaggttaaaaacctctcttaaaaggctaggtttgcgaaagccttcctaaaattatgcttctgttgttactatcaatttgatattcagccagaaaaattaaaaataattattaatcccaaagcatactttcaaaatttctacta

SEQ ID NO: 3972 - DNA, 290 bp, Homo sapiens
cctgtaaagactttaagagaagaaacagcacctggactgtgagaaaaagagtctctgaagacatctgacctggacaggctgccatctcttatgattatttcctgtgtggctgtgaaggttaacgggataaagccctcactgtcagcagagagaagaatccagtgggaatcatgtagcatttcaatgagagaaaggccaaaagtctgctgaactgtactgagccttagtttaccatcacagagaagcaccgctcttttttcaacaacaggacctagataataaggtttctg

SEQ ID NO: 3973 - DNA, 321 bp, Homo sapiens
ccatttgacataaaggagacagcccctggtcccagcttgtcagctctgctgccgacttgctgacttatcaacttcctctaggtgtttccactccaccctggcctgctcagagcctcagtttacccctgcattaaaatggtggggggactggtcaaaggactcttatgtcactgcagtgtcccattctaggattgtctgaaggccagagtaggggttggggggagtgtggacaaaccccgcaaatcagagtggggaaggtgagtggtagagagggggtctctgaaggcccttggggctgacagggccaggcagcctccccag

SEQ ID NO: 3974 - DNA, 554 bp, Homo sapiens
  misc_feature (1)...(554): n = g, a, c or t
aaatgtttacttccaagacatttacttgaaagttgaatgttttgatgttctgtcccatggggtccttattgtaatctagaccatcttgttctagatgggcacttaagccctgtttcttcatagtctgttatgctgtcatttggacctggatgcttcctgtttcttccagcaatttttgtttgtgttttttgttgttgaagagaggaacatttaaggagttagataaactggtaattttcagatgtgtagaaaattgcataggtggtgaaagccaatgccataggctctgaaattttactatttcctacatcaggaaatgtgtaccaaaagtgctaaaatgccaagaataattttgagtatctaaagatagataaatcttttcatctgagtggaaatggcattatgactttatattctcatggttttccttgtaccttgaaattgagcatcacttgaattggagccccagaagcaaggttaaagtgagttactactgagtttctggtgttcctaacttatcccttnnggtatatatgtagaagataacaaagcag

SEQ ID NO: 3975 - DNA, 442 bp, Homo sapiens
ccaacatagtgaaaccccatctctactaaaaatacaaaaattagccaggcatggtggcgggcgcctgttatcccagctacttgggaggctaaggcagggagaattgcttaaaccggggaggcgggggttgcaatgagctaagatcgtgccgctgcattccagcctggttgacagagtgagactccgtctcaaaaaaaagaaaaggtagcattaagcctggtatgttttattttcctgtttgttagaaacctagattcatttttaatcttcaccagcatcacatttgaaaatagtgaattgggcagcttggcatttgtgctgaattccttataaggcgttgtgtaggagggaagattacatgattacaccaccagacccctgggtctttgatattaggagagcttggcatgtaaggagttggggagttgggcttgtctcattt

SEQ ID NO: 3976 - DNA, 569 bp, Homo sapiens
  misc_feature (1)...(569): n = g, a, c or t
ccttccagactcagaccagaccctctggtggtaaatggacattttcctacatcggcttccctgtagagctgaacacagtctatttcattggggcccataatattcctaatgcaaatatgaatgaagatggcccttccatgtctgtgaatttcacctcaccaggctgcctagaccacataatgaaatataaaaaaaagtgtgtcaaggccggaagcctgtgggatccgaacatcactgcttgtaagaagaatgaggagacagtagaagtgaacttcacaaccactcccctgggaaacagatacatggctcttatccaacacagcactatcatcgggttttctcaggtgtttgagccacaccagaagaaacaaacgcgagcttcagtggtgattccagtgactggggatagtgaaggtactacggtgcagggacttgcatgtcctaaagcactggctgaaggaagccaagaggatcactgctgctccttttttctagaggaaatgtttgtctacgtgctgactccatattttcctacttgnggcagcgactgcatccgacataaaggaaca

SEQ ID NO: 3977 - DNA, 411 bp, Homo sapiens
  misc_feature (1)...(411): n = g, a, c or t
ctctctgcctcttgctccctccccagttcccactctgcctcctaaacagcaatttctgccgtcctctcctgggctggtgttggaatcaccctctaaaccccttgcccctgctgatgaggatgagctgccgcctctgattcccccggaaccaatctctgggggagtgcctttccagtcggtcctcgtcaacatgcccacccctaaatctgctggaatccctgtcccaaccccctctgccaagcaacctgttacgaagaacaacaagggtacttgccttggtttgccgtgtgcatggtgtgtctgtcgtccacacccctcttgggcgctacccaccaatactaaccctgtgatgcgccgctttctccagtgaatctgcttgggcttgnatgtagaacatagaatgataatttt

SEQ ID NO: 3978 - DNA, 412 bp, Homo sapiens
  misc_feature (1)...(412): n = g, a, c or t
tgacattgataccanatctgaattntacaaacacattgtgctttntggagggtctactatgtatcctggcctgccntcacggttggaacgagaacttaaacagctttacttagaacgagttttgaagggtgatgtggaaaaactttctaaatttaagatccgcattgaanacccacccngcagaaancacatggtattcctgggtggtgcagttctagcggatatnatgaaagacaaagacaacttttggatgacccgacaagagtaccannaaaagggtgtccgtgtgctagagaaacttggngtgactgttcgataaactccaaagcttgttcccatcatacccgtaatgctttcttttttcctttattgccaatctttgaactcattcaactccaggacatggaagagg

SEQ ID NO: 3979 - DNA, 378 bp, Homo sapiens
cctgcagcacgtggggctgtatacgcctaacattgtggaggccactgagggggtggcaactgctggaggccagttcctggctccccctggggcatactaccagcagccaggaaaggagaggcagatccgagctgcagggcacgagcctcatctgcttgctcgacaggggatcctgctagatggtgataaaggcaagtttctgcttcaggtcttcaccaagtccctttttactgaggacactttcttcctggagctgattcagaggcagggggccactggctttggtcagggcaacatcagagctctgtggcagtccgtacaggagcaatctgccaggagccaggaagcctaaggatgcccagggctgggtgcagccag

SEQ ID NO: 3980 - DNA, 216 bp, Homo sapiens
ccaggctcaggccctggggtgaaaggagacaggtgctgccaagaccatacatcagtcatctggcagcagctcgagaagcatgtcctccacgccgtcaatcttgatgtggtacactaagcgccagaaactggagtctgaggatcggtatcgtccatcagggtagagctgtcacatgataggcagcaggcttgggcctatctgggtgggggtcatagg

SEQ ID NO: 3981 - DNA, 349 bp, Homo sapiens
ccaagtgtttgtgttacaggttccaaggagcaggggcctcgacaaaggaagggagcagccccagcagagaagaaatgtggagcggaaacccagcacgaggggctagaactcagggtagagaatttgcaggcggtgcagacagactttagctccgatccactgcagaaagttgtgtgcttcaaccacgataataccctgcttgccactggaggaacaggtggctacgtccgtgtctggaaggtgcccagcctggagaaggttctggagttcaaagcccacgaaggggagattgaagacctggctttagggcctgatggcaagttggtaaccgtgggccgggaccttaagg

SEQ ID NO: 3982 - DNA, 277 bp, Homo sapiens
ccaatgagttcaaaaagcacgtttgcagggcttcctgaatgccgtcgaggcatggcttcatgagggccatcgcgggcaccccgatgtctctgtgattccctggcaggctgcgtttctcaatactgagaccctagtttgctctgacttctaaatgagctctctcatccttcatcagaaggataaggaacctggcctgcactctttgggttaaacatgggtagagaccgtctcaggatgaggacctcttggggaaagtacaaacctctgctccctgtgg

SEQ ID NO: 3983 - DNA, 447 bp, Homo sapiens
  misc_feature (1)...(447): n = g, a, c or t
aaattgtaaatggagctaagtccaagaaagtacttgaagctctcttccagcgagcttaattgcgtaatccctgttgtcctccagggtaagctgacacgtctacataactggttttccacaggcatcttcagttattgcttgtcaggtggactgttttggatttaaccatgtaatccatgggaccaattgagagtcagctacttttataggcatcaaagtattctcagacacctttaatatctttatgaaaacttaatttttggccttttatcaatatgtcataacagcattctgaagtcagacattgttaaattgagctattaaactaatgagttttatgtaagttatatggtcttaatttggtacttgtaaatagcactagttagactctttagaatactccaagagttagggcagcagagtggagcgatttanaaagaacatttt

SEQ ID NO: 3984 - DNA, 288 bp, Homo sapiens
ccagtcctggcgcagcacccccagccgcagcaggcactgcttcttggctgtcatcacaaagtagtgggtgtcgtccttgtagtacacaatgttctccagatcaatgcctgggggtacagggcaggggacagtagatatgtctcctgataatgcatcaccttccctaaacatcccaacatggcctgacctctgagctgggatcccagcttaggctgcggtgagtgctccacgcatagaaccccacgagtcctgatgacacaaacaaccatctgtcccaggcccaggagg

SEQ ID NO: 3985 - DNA, 504 bp, Homo sapiens
gtcacaccaagcccgttcacaccaagatcgtgaacatgcctgatcacgtctgaagggcacgtgaccctgttctgaagtggcctgcagctcccgtggccctcagcaaagccaatggacgtgtactctgcttcctccaggaagccctccccccgctcccccctctggtagacacgtcttgtggttggtgtccacaaggaagttcctgattagcctcggagctgcccgatggcctctccactcctggcacatggcctgctggctggcctggggcagaactacagagggccggagctggagatgtggtctctgggagtcactctgtacacgctggtctttgaggagaaccccttctgtgagctggaggagaccgtggaggctgtcatacacccgccatacctggtgtccaaagaactcatgagccttgtgtctgggctgctgcagccagtccctgagagacgcaccaccttggagaagctggtgacagacccgtgggtaacacagcct

SEQ ID NO: 3986 - DNA, 443 bp, Homo sapiens
atgaccacatggatgatatggatgatgaagatgatgatgaccatgtggacagccaggactccattgactcgaacgactctgatgatgtagatgacactgatgattctcaccagtctgatgagtctcaccattctgatgaatctgatgaactggtcactgattttcccacggacctgccagcaaccgaagttttcactccagttgtccccacagtagacacatatgatggccgaggtgatagtgtggtttatggactgaggtcaaaatctaagaagtttcgcagacctgacatccagtaccctgatgctacagacgaggacatcacctcacacatggaaagcgaggagttgaatggtgcatacaaggccatccccgttgcccaggacctgaacgcgccttctgattgggacagccgtgggaaggacagttatgaaacgagtcag

SEQ ID NO: 3987 - DNA, 503 bp, Homo sapiens
ctgggcacaaccctcaccctggtctgtcatgcctgtttttcctacactcagcggcaaagctgcaggagcagggctgagcctggaatagcccttcctagtcccctcttctcagcccactacccatccatcagtcaccagccgtcacctcccctcccgtgctccaggctgggggagggagagcccagtggtggatccagcctgaagtcctgccctctctcatctgtctggaaaggaggtagcacctttttcgggaaacgggttagggagtaaagactgcaccctacatggtcctggtggtgggggggataacagtaaaggaatttgcaacgttttaatgccatgcctgatttttgggtcaggagtggtgacttgggtaaccacttggcgggggggcctgggattccctgctgtgtgccgtgataacagcaaatggtgataaggagaaagccaagacctgtggcctgatgcagggctgggggcggggggtgatcacttcagcaggc

SEQ ID NO: 3988 - DNA, 214 bp, Homo sapiens
ccaagttgggccgcttggtcaaggacatgaagatcaagtccctggaggagatctatctcttctccctgcctattaaggaatcagagatcattgatttcttcctgggggcctctctcaaggatgaggttttgaagattatgccagtgcagaagcagacccgtgccggccagcgcaccaggttcaaggcatttgttgctatcggggactacaatgg

SEQ ID NO: 3989 - DNA, 387 bp, Homo sapiens
gcgcctgctccccggacgaaatccgcggaccgggctttaggttcgccggaatcccacgctcccgacttctgcttccgggtcggagccatggcggtggcaaattcaagtcctgttaaccccgtggtgttctttgatgtcagtattggcggtcaggaagttggccgcatgaagatcgagctctttgcagacgttgtgcctaagacggccgagaactttaggcagttctgcaccggagaattcaggaaagatggggttccaataggatacaaaggaagcaccttccacagggtcataaaggatttcatgattcagggtggagattttgttaatggagatggtactggagtcgccagtatttaccgggggccatttgcagatgaaaatttt

SEQ ID NO: 3990 - DNA, 104 bp, Homo sapiens
  misc_feature (1)...(104): n = g, a, c or t
ccantgtccatncacagttgccnngatgtggnaggccancgtgtggaaatggatcctggtgagatccgaggctctgnttttactcctcccatgttctttcaaga

SEQ ID NO: 3991 - DNA, 315 bp, Homo sapiens
  misc_feature (1)...(315): n = g, a, c or t
aaagtaaatacagcttttagatataaatctttcaaaggttttctttgaagagctgtgaggtgactatttcagatttgatgaacagtaatttngtcagtaaacttntcaaaaaaccaatccaagaaagaattgttttctttttccctccatgtggtcggtttcattcttaaggaaggtctgatgcagtaagaagatgcntttnacaaacctttacacaagtttgtgaactgtcaactaaagacaccacctntgatgtggatggtttcattcaatccatgttcgaccagctttatatcttctanatcgtctttaatg

SEQ ID NO: 3992 - DNA, 509 bp, Homo sapiens
aaaccttaagaaccacataatactatataatgcttttctgtacaaatctcaagaaacactttcattcattaaaacatcatgaaaatccttaaatgtgttaaatggaaaaaaatgaaaccatgaacaaaaaagctatacatgtaggtgcatatttatctcctcctgagttgggagaaatctttctaagcatagaaacaatggtagcaaaagagaagaatagatttggctggattaacaataaaaaatttctgccagaaatatgaaaattcaatttagacaaaattcaatataaacaaaattaatatagacaaaggtggtaaacaggtggttctcagagaagataaatacatgattatttaacataaaaagaaatgttcaatgtttctagaagacaaataattacaaacctaaacaaattgtatatttgttagattggcataaattataataatccaacattgagttaggtggaatataaattggtaaaatatttctggaagacaatttgg

SEQ ID NO: 3993 - DNA, 228 bp, Homo sapiens
ctggaagatggccgcactctttctgactacaacatccagaaggagtcgaccctgcacctggtcctgcgtctgagaggtggtatgcagatcttcgtgaagaccctgaccggcaagaccatcactctggaggtggagcccagtgacaccatcgaaaatgtgaaggccaagatccaagataaagaaggcatcccccccgaccagcagaggctcatctttgcaggcaagcag

SEQ ID NO: 3994 - DNA, 215 bp, Homo sapiens
ccagaacttcctatactatgttgaataggagtggtgagagagggcatccttgtcttgtgccggtttccaaagagaatgcttccagcttttgcccattcagtatgatattggctatgggtttgccataaatacctcttattaatttgagatacattccattgatacctagtttattgagagtttttagcatgaagggtgttgaattttgtcaaagg

SEQ ID NO: 3995 - DNA, 396 bp, Homo sapiens
  misc_feature (1)...(396): n = g, a, c or t
aaagctggctcaagactggcccaggcataatactgtcaatctaaaggtaaccggcaacatcaaaaagtacatctcaaaagaatcaggcttaaagataaacaggagaactggaaatatctaagagtaagaagtgtaaacaatanaaaagaggtagggtttagggttctcatcttgggatttccccaggtcttcaagcttctatccttcctgggttctgggtcatgggcctccagattccggccgttagtcttgagatacctttttcgcttgggtcctctatccatctaggtaggctttgtgacaggggccttccatccttgggttgtaggtcttccagctacaaccctgggctaatcttaggtcgnnggcctngtgtcacangtctcagttcttagg

SEQ ID NO: 3996 - DNA, 281 bp, Homo sapiens
ccaccataagtcctgatacaaccacggatgagctgtcaggagcaaggttgatttctttcattggtccggtcttctccttgggggtcacccgcactcgatatccagtgagctgaacattgggtggtgtccactgggcgctcaggcttgtgggtgtgacctgagtgaacttcaggtcagttggtgcaggaatagctgtggactgggttccaatcaggggctggctctccatatcatcgtgcaaggcaaccacactgactgtgtactcagaacccggtctgagg

SEQ ID NO: 3997 - DNA, 262 bp, Homo sapiens
ctgatgcggaaggagttcaccctggagttctcccgagaccggaaatccatgtccgtgtactgcacgcccacccgccctcaccctaccggccagggcagcaagatgtttgtgaagggggctcctgagagtgtgatcgagcgctgtagctcagtccgcgtggggagccgcacagcacccctgacccccacctccagggagcagatcctggcaaagatccgggattggggctcaggctcagacacgctgcgctgcctggcactag

SEQ ID NO: 3998 - DNA, 218 bp, Homo sapiens
ctgctctgatgctctgctccaggtcatggtaaatggctttgtagctaaatcagagagaaacgtggctcttttagaaggcaggggccagctaccctttgtcccagcccagtgccagccacagcaggtcccgtggtctctgccctctgtgagttggtttcacagacagagccagaacactcctcccttggctcaggtggaaggtcacgggccgccacgtg

SEQ ID NO: 3999 - DNA, 528 bp, Homo sapiens
aaaccggggtttgagaagtataataacttggatctgtttcggtatctcttaaatattccaggaccaattgacattccatctcgtttatgtaaagggaattttgatgatgatatgtttaaccaccaagttccttatttgtggctgatttactgcctttgtcatcctcttcaatcaagtattaaagaaacagtggaggcatatgaggcagcattaggggtggctatgagatgtgatatagtacagaagatatggatggattatcttgtctttgcaaataatagagctgctggatccagaaacaaagttcaagaattcaaattttttactgatttagtgaatagatgtttggttacagtccctgcccgataccccattccttttagcagtgctgattactggtccaactatgaatttcataatagggttattttcttttatttgagctgtgttccaaagacccagcattccaaaaccttggaacggttttgttcagttatgccagctaattctggacttgcattgaggtta

SEQ ID NO: 4000 - DNA, 182 bp, Homo sapiens
aaagtatattggaattcgtaactaaagtaataaataaatgcttgaaatatacccagtagaaacttatttttattatccaatccttttgataagaaatgcctctagtgttatgtacaaacttgatcttctttgaaatgtgttgtccactgcttttctgtttctgtcacagtagctataaacag

SEQ ID NO: 4001 - DNA, 311 bp, Homo sapiens
ctgaatatggaagagatctttttttactagagatctgcagaagaaacgcaatcttctgagcacaatatggaatctaaaggttttatcacttagttgttcatattatgaacctaaaaataatggcataaagtttggggatgccaggcatactttttcatgtttggtgttgagttattttacttttctaacccaacattccttggtgagaccattaaatccaaacacttgtcaccgttccttctcatagtcactctgggtcatcagcatgtcccagtcactgcagcaatgccttgtgtttgtttcattttttt

SEQ ID NO: 4002 - DNA, 505 bp, Homo sapiens
  misc_feature (1)...(505): n = g, a, c or t
ccagtatcgttttggtacttttgtacctctatctgactccatgcccctgcaagtgtaaaaccaagagacagaaaaatatgctacgccaaagcaatgcccattcatcgattctcagtcctggccccgctagtgatgcctccgctgatgaacggaaggcaggtgcaggtaaaagagtggtgtttttggaacccctgaaggatactgcagcagggcagaacgggaaagtcaggctctttcccagcgaggcagtgatagctgagggcatcctaaagtccacgagggggaaatctgactcagattcagtcaattcagtgttttctgacacaccttttgtggcgtccacttaatttgtgcctatatttgtatgatgtcataatttaatctgttcatatttaactttgtgtgtggtctgcaaaataaacagcaggacagaaattgngttgttttgttctttgaaatacaaccaaattctcttaaaatgattggtaggaaatgaggtaaagta

SEQ ID NO: 4003 - DNA, 460 bp, Homo sapiens
cctctctttatctctttcaggatttccttcattctgccgtttgtaggaggcaccaggacgcacggactctatggaaaggtgggcagggaggaattaacagcagcacctctgtgcccaagaggaacaagagaggaactcagaagtaggagtgatgagaacaggggcttctgagcattttctggtggccctaaactctttcctaccctactttcaagttgggctgcctgagcaatcaccagtgaaggggaataaataatgggagaaaaaaatctccatttaaggcaagaagccaaggggaactgtcaggataagaccagtcaaggataacaagggcagaaaggaatgagaaaaggttcatagaaagacaagacattgaaagttgaagacaaagatcacatcttattcatcactgaaagtacctagtcgaattctctccatccataaagctgacactggaagg

SEQ ID NO: 4004 - DNA, 324 bp, Homo sapiens
  misc_feature (1)...(324): n = g, a, c or t
aaatcatgtntaataaatgnttgtatntaaatgcatatgtacagaancctatttcaaaaggaaatcaaagttgctagtaaaatgtttgagattacatttagaactaactgataatgcatatagattgtagaaaattttgtgatttgtttctgtgtgataagggaagctgttggtctttgaattcatttaattatgtcaaaatagttccccaaagatttaattttaagttgcttcttaaagagtaattttattttttatgtcatgtggcttcatattagtattgtgtgagttacatgttttgctttatattttataaaatttttt

SEQ ID NO: 4005 - DNA, 508 bp, Homo sapiens
ctgataacgttcacagccccatcctcagcacgtggattcgagtcaccgtgagaattccggtatctcaccctgtcctcaccttcagggctcccagggcccacactgtggtgggggacctgctggagcttcactgtgagtccctgagaggctctcccccgatcctgtaccgattttatcatgaggatgtcaccctggggaacagctcagccccctctggaggaggagcctccttcaacctctctctgactgcagaacattctggaaactactcctgtgatgcagacaatggcctgggggcccagcacagtcatggagtgagtctcagggtcacagttccggtgtctcgccccgtcctcaccctcagggctcccggggcccaggctgtggtgggggacctgctggagcttcactgtgagtccctgagaggctccttcccgatcctgtactggttttatcacgaggatgacaccttggggaacatctcggcccactctggaggaggggcatc

SEQ ID NO: 4006 - DNA, 397 bp, Homo sapiens
ccaccatcacagtccaggatgaagaggagtacagggtcctgtgagctgtttgaccactgttctaagaaagactatgtgtgcccaaaagcacataagcatctatgttgagagtaagtttgtatcctgcgttggtctcagaaagaacgtgaatgcttaagattttgaaagtacataatattttatactttgggagagagctttaagagtccctggaaatactttttaatttttttaacttaaaattcaagagactgaatcacttttctcattgattaaatgtaaagattattgagaaacctatagtaaatgaaatttgtaagatgttttctcaaatatatgctgtgcctgtacttatatacagtctttcaagagagatacaaacaaggcagaaacattt

SEQ ID NO: 4007 - DNA, 466 bp, Homo sapiens
ccacgttcctggccgaggacccgaaggttaccctgaccatcttcgttgcccgcctctactacttctgggacccagattaccaggaggcgcttcgcagcctgtgtcagaaaagagacggtccgcgtgccaccatgaagatcatgaattatgacgaatttcagcactgttggagcaagttcgtgtacagccaaagagagctatttgagccttggaataatctgcctaaatattatatattactgcacatcatgctgggggagattctcagacactcgatggatccacccacattcactttcaactttaacaatgaaccttgggtcagaggacggcatgagacttacctgtgttatgaggtggagcgcatgcacaatgacacctgggtcctgctgaaccagcgcaggggctttctatgcaaccaggctccacataaacacggtttccttgaaggccgccatgcagagct

SEQ ID NO: 4008 - DNA, 399 bp, Homo sapiens
ctggggactggtgcttgctgaaacccaggagctgaacagtgaggaggctgtccaccttgcttgactcactgggaccagcaaagcctgtctttggttaggctcgtgtacttctgcaggaaaaaaaaaaaaggatgtgtcattggtcatgatatttgaaaaggggaggaggccgaagttgttcccatttatccagtattggaaaatatttgacccccttggctgaattcttttgcagaactactgtgtgtctgttcactaccttttcaggtttattgtttttatttttgcatgaattaagacgttttaatttctttgcagacaaggtctagatgcggagtcagagatgggactgaatggggagggatcctttgtgttctcatggttggctctgactttcag

SEQ ID NO: 4009 - DNA, 325 bp, Homo sapiens
tgctgctctggctcccaggtgccaaatgtgacatccagatgacccaatctccttccaccctgtctgcatctgtcggagatacagttacaataagttgtcgggcctctcagaatatagatcggtggttggcctggcatcaacagaaaccaggcaaagcccctaatgtcctaatttatgcgacttccagtttagaagaaggggtctcattaagatttactggcagtggatctgggacacaattcaatttaaccatcaccagtctgcagcctgacgattcagcaacttattattgtcaacattattctgcatctcttcgcagttttgg

SEQ ID NO: 4010 - DNA, 494 bp, Homo sapiens
aaaggctacgttcagtttcctataggtgatattgttaggatctactagcaaatgatttggtaacctgacatctttgtattcatgtccaaaaaaattcttttataagaacaaaaatggtactcttagcctcattcactggagtattactaaaaagcatgatattcttactctattttgggtacattatgacagagaggttattattaccaactgtcagtagaactgaggcttcttgagtaaaggggattgaggtaaacctttggaagctggtgaatacatttcaagacacaacatggcacctgtgtctagctctatggtacaacatggtactatgacacatataatgggttgccagatggggaaggcagcttctctgcaactgagctgagatctcaaaatagacaatgtcaagatggaatgagaagggaaaaacagcatgtgtagacaggtagtgacaaaaggctaattaaggactgaaagaaaccagtggacct

SEQ ID NO: 4011 - DNA, 481 bp, Homo sapiens
ctgaaaagcatgcttgatatagtagagcatgatctcctcaaacctcacttgccctctgtcacttatttgagattagatggcagcatacctcctggtcagaggcattccattgtttcccggtttaataatgatccatctatagacgttctgttacttaccactcacgttggtggcctgggacttaatttgacaggcgctgacacagtagtatttgtggagcatgactggaatcctatgcgagatctacaagccatggaccgggcccatcgcattgggcagaaacgtgtggttaacgtataccgattgataaccagaggaacattggaagaaaaaataatggggttgcagaaattcaagatgaacatagcgaatactgttattagccaagagaattctagtttgcagagcatggggactgatcagcttcttgatctgtttactcttgataaggatggcaaagcagaaaaagctgacacctcta

SEQ ID NO: 4012 - DNA, 445 bp, Homo sapiens
  misc_feature (1)...(445): n = g, a, c or t
aaatgaagaacttttccttgaattttttgttgtcttcgttggttcttggcttgctttttggcttgtttctttgcttttttctgtaagtgcttacttgttccagaaggaatatcacttctctcttttatgtaactgncgttatctttttcttcctcactatcttgatcttcatcctccactgtctttttcagatttttatcatttacacttttcttaccactctgatcatctaaaactgggagggacaaatcaaggaaagattcatgaaccaaggagacagttctgcattgatcacacatgatcatactagttagttcaccaccaaagatgcggtcaacaaaacttggcattgattttttcttctcataattnggtgttcttctgctctcatcccatccaataagtagcgaagcagctcctggctgtcttgctgctgatagccttt

SEQ ID NO: 4013 - DNA, 539 bp, Homo sapiens
ccaggtacagcagcatggcctccatgacctggtgcttcttcaccaccaggtggctgtccgtgcccagcccgtgcaggatgggcagcaccttctccgcaaagtgcagggggcgctctgcctcctccctctcgttgacctcaaagcaggtccaatagtccttctccctgatgcccacgttccggcgatccaggatctccagggtgagctcctcagcagtcatggatgctgggaccttgatatgctgctcagtctctgccttcttctcttccagatacactgtgcagatgaagtcaccggcatgctgggtcccactggcagtgccagccacgcgcatcttcacaatggcagtgatctcctcccgctgcttcctgagctcttcctcatccacactaaacaccaccacatagtggttaatgaggtcttccaccacacggccagccttgtagtcctgcccatctgtctggaagagcgtgggcccaaacacaattgccaagttgtgcacgttcatctggttcgtgtctgagaagcactgaacacag

SEQ ID NO: 4014 - DNA, 528 bp, Homo sapiens
  misc_feature (1)...(528): n = g, a, c or t
cctgggctggcgccctgtgtacagaaatctctggacaccgaatggtttcagacgccgagcaatggcctggcctatgcgccccagcccgatgatgccgacagtgctctgcgtgagtccatagccacacagccagaggggcttccacgaggtccagccaccattcttcacttcctcgatggcctccggcaaccggcggcaggtggtaagtagcggggagactgcgagttcggcggtggtatctgtcaggacatctggggtgtagccaactcggatcccacgcttcttgatttcatccaaagccaagtggtcgatgcccacagacatggtgctgatgactttgagattggcccctgcagcatccaggatcctcttgtccacgtggtcggagaggaggcagagcaggccgtgggcccccgccacacctcgctctagctccttggcagggatgggctcatccgagtcccactgntccacctcacagcctcggcgggtatcctgcgggtgacgaacaccttcatgagtcgcacc

SEQ ID NO: 4015 - DNA, 486 bp, Homo sapiens
  misc_feature (1)...(486): n = g, a, c or t
ccagtgggatggttaggctcaagtttgacaaaggcacctgccacagtaggcttgaataaagtgggtgagtcttagacctatcgaaaagcatactaacagggtgctgatagatgggccacataacaccccggaagatcagcagggccttgtgtaggctgctgcagcatttttttttttttttcttttttgagatggagtctcactctgtcgcccaggctggggtgcagtggcgccatctcggctcaccgcaagctccgcttcccaggctggggtgcagtggtgcgatcttggctcactgcaagctccgcctcctgggttcacgccattctcctgcctcagcctcccgagtagctgggactacaggcgccaccaccttgcccaactaattttttgtattttttagtagagacgaggtttcaccgtgttagccaggatggtctcgatcttctgacctcgtgatccgcctgcctcanactcccaaagtgc

SEQ ID NO: 4016 - DNA, 492 bp, Homo sapiens
aaaatctcccactttttaatgggacatgtccaggtaggaaaggacagattttatgtactgaaaatcttgaaactataaagtatgcattttgtctgactttattacattagataatttaggccactcctacctatttgcaattatattttttctgaaaaggatttcaatttaggtagccatttaagataacctttccaaatgctctgagaactagacattaatagttactggcctcagatatcagaacacaaatgcttagttacactggtaattactacctatgaggaagaaagtgtagtggaatctgacaattaatgagaatcaacttgcagggtctaaatgaataaacaaagaccaaaaataaggtgaaacatttccttcaagtatatattaaaaaactacacgaaaaaaattctacctgaaataaataatatttatacttttgtgccagtcttgaataattagaggaaaaaatgaagtaaacaaagaaac

SEQ ID NO: 4017 - DNA, 270 bp, Homo sapiens; identical to SEQ ID NO: 3318

SEQ ID NO: 4018 - DNA, 504 bp, Homo sapiens
aaaatattttgaacacttcttgttggattatatcagaggtgtgactacattttaacaaaagtggactttttaagataagtctggtcaaagaagtgcagaaacagtaagtcaatatgatagaaatagtaggtcaaaatatgatgtgttagttcaattaatgtatgaactcctgccaccatcaaaagacaaatattaaaaagctacatctttagtctagttctgtattttaccagaggcacatttagaagaaaaacaaaagggtcacccaaatactaaattgttttcaaccattacagtaaatagagccaaacctagaaatttcaaaaacaatccattttatattccagaaatctcctttatccatgtgctaatcatccagaacacaattttctaaaaatagtaagacaacagtttcacattaatcataacttttttaattaacaagtagtgaatcgggcactttaagatattgtttactacatactgaaataaacagatctgttt

SEQ ID NO: 4019 - DNA, 233 bp, Homo sapiens
ccttgagattttgctgcctggactgtaaatctggccgaggctgagaagagcaaacaaaggagcaactgtgggaactgacagctcaaggactctggcatcagggtaggcccttggctgactttctcaggaggtgctgtcggggctggtcttcccgccggccaccacatacatcttaaaattacagagggtgtgagtgaccctaagatggttcagcaggcactggaggaaggagg

SEQ ID NO: 4020 - DNA, 403 bp, Homo sapiens
aaagccagtgctctaagacctcagcttttatctcagaaccccatgggttccagaccaagagtacaggaaatcaaattgttgtcctgtctgtctatagcttggaacagggagctttgattactgactccggttccacacactgtaagatcaaaaaaccatctccacatttgaaagagatgtaaggtgtattcatagggatggtggctcaacaaatcaagcaaactggaatcaaggggagggggaagggaatgaaatggaaagggaggctgattcccttcccctgacttaccactaatttactaggctacctactttcatgagtaacctctcacagctacccagcacatgccacaatcctatgctcttgccttcttttatctgcactgtgtgaagggactctttt

SEQ ID NO: 4021 - DNA, 357 bp, Homo sapiens
ctggggctgaggatggagtccaagactgagaaatggatggaacgaatacacctcaatgtctctgaagggccttttccacctcatatccagctccctccagaaattcaagagtcccaggaagtcactctgacctgcttgctgaatttctcctgctatgggtatccgatccaattgcagtggctcctagagggggttccaatgaggcaggctgctgtcacctcgacctccttgaccatcaagtctgtcttcacccggagcgagctcaagttctccccacagtggagtcaccatgggaagattgtgacctgccagcttcaggatgcagatgggaagttcctctccaatgacacggtgcag

SEQ ID NO: 4022 - DNA, 307 bp, Homo sapiens
aaagccacagtaagttacaaaaggcaaattcatagatgctctttgaaagtgaatgtaactactatacttggtattctacttcccccacgcccccagaagtttttgatgctatagacactgatatatagtttgaaactctcactataaaattactaggctaagtctatcaagacttgaaagtttgttttgctgaggtaggtgaaagggtaatctctgttctttccaggtgactgcatctgcacaggcttccctgggaggacttcatcaacagcacagttacacatcaaagtcctttagctctccccag

SEQ ID NO: 4023 - DNA, 175 bp, Homo sapiens
ctgcagtgtccctttttatatcatgctagtgttgagacatacttgactaacttgggaacagttcgatatattgacgaccgtcaacttaagaaaatcaacagcttttggccccagcgtccaagtgaacttttcatggagtgcagaatctcaaatggacaaaatactttgtcttttt

SEQ ID NO: 4024 - DNA, 307 bp, Homo sapiens
cacaaagccaatgctgaggagatgaccaagtaccacagcgatgactacattaaattcttgcgctccatccgtccagataacatgtcggagtacagcaagcagatgcagagattcaacgttggtgaggactgtccagtattcgatggcctgtttgagttctgtcagttgtctactggtggttctgtggcaagtgctgtgaaacttaataagcagcagacggacatcgctgtgaattgggctgggggcctgcaccatgcaaagaagtccgaggcatctggcttctgttacgtcaatgatatcgtcttgg

SEQ ID NO: 4025 - DNA, 271 bp, Homo sapiens
aaaaataatattacattaagttttcctggtctaataaccaactttgagaagtacagtggaagggtatagaacttcctatatcttctatacttttaatgccaatttgatttttattgtgatgtgatatttaacagtatgctaaaaataaaattgactgaattgtatgattttgtccacaacattgaagtctctttttgctaaaatattacaaaatgaatccagtaaacactttccaatggcctaagttagagatgaattcaacttttttttt

SEQ ID NO: 4026 - DNA, 407 bp, Homo sapiens
ctgctcccggttcacgagggaggagtggtggtagcgatcccgagtggcgaagtctgcattctcctgggtgagctgagtcatctccatgtcaaccttagccagggacggcgccaagatgatctgctcctgaggggaccgcaagctcctgcaggaggggagcaagagagacctcatccaccggaaaaagctgaagttggaggctgatccaaggtgaagccctggactggcccggccaatgtagaaatacacgatggcagcaacacccatgttaaccagggtatacacccactgtatcacaaacatgatgagaagggacccaacagcccccaacagggagacccaggggttgcacatgtgggtatagaaagaagtggatcttctccagacatcttgttcttggagcctgg

SEQ ID NO: 4027 - DNA, 443 bp, Homo sapiens
tttctataaagaaaagaagtttaattggctcatgattctgcaggctgtacaggaagcatagcacccaaatcactgggctttggggatggtctcagggagctttttcaatcatggtggaaggcaaaggggaagcaggcacatcatatgacaaaagcaggagggagagagagagagtgtgtgtgtgtgttggagggaggtgccacacttttatatgaccagatttcatgagaactcactatcatgaagatagcaccaagccataagggatcagcctccatgatccaaacacctcccaccaggccccacccccagcaatggggattgcaattcaacatgacatttgggcagggacaagtatacaaactgtaccactggcctgatgaagacacagcccatggtgcctacaaattctcactacctagtaggcaattaatattggaaaa

SEQ ID NO: 4028 - DNA, 525 bp, Homo sapiens
aaatacaaaatagaatgttatatatcttgtagacagtcaaatatttgatgttttatgggacataatcatttgggaagtttttgttgtaaatgaagagttagtttgttgctattaatttgtttgacacataagttcattcctaaaagttagagatgttacataaagaagggttgaggactttatttcagaagtcatttaattttttctttattttctttcagattttgtatggtttattcagaagtgccaaatttcagtgaacccaacccagattatcgaggacagcagaacaaaggggcacagagtgaacagaagaataattccatgaatagtaatatgggtacaggtacatttggaccagtgggaaatggtgttcacactggccctgaatcaagggaacaccagttttcacatgctggcagaagcaatggccggggacttataaatccacaactacaaggaacagctagtaatcaaacagtgatgaccacaataagtaatggcagggaccctcggagagccttt

SEQ ID NO: 4029 - DNA, 330 bp, Homo sapiens
ctgaactattgacaagttttccttaataaggcaaaatccccaactgtgatagatgcataacggtagccgctccacttaagcagtacagtttaacccgccaccattcgatgtcttaacatgttccaagaagaacaatgtcatcttggttttaaggtgatgcatcttgtttttttctgatagaaaaagaataatgtgctttttattctcctagagatttggtgtctgtgaatggttgtagctctgtgacatttaccatacatttctcagcttccacccatcaatttgctgagaaaaaaaggtatgctacaaatcgcagcaatagagcacttt

SEQ ID NO: 4030 - DNA, 493 bp, Homo sapiens
  misc_feature (1)...(493): n = g, a, c or t
ctgctgccatttcatggtgaagctcttggatgatgggactttcatgatccccggggagaaggtggcccacacctcgctggacgccctggtcaccttccaccagcagaagccaattgagccgcgcagggagctgctgacacagccctgcaggcagaaggatcccgcaaacgtggattacgaggatctcttcctctactccaacgcagtggccgaggaagctgcctgcccggtgtctgcccctgaggaggcctccccaaagccagtcctgtgtcaccaatcaaaggaaaggaagccgtcagcagagatgaacagaataaccaccaaggaagccacttcctcctgccccccaaaatcccctcttggagagacccgccagaaactctggaggagcctcaaaatgctccccgagagaggccagagggtccggcagcagctaaaaagccacctcgccactgngaacttgtcgtcactcttggatgtccggagatccacg

SEQ ID NO: 4031 - DNA, 240 bp, Homo sapiens
aaaagtattgtgttttatttctttatttcaccaccatttatatgtatgaactatgatcaaggcttgcctatgtcctgtggagcaaggccaagaaatatgctttatattggttatttgatcttcagcatcagattatcactattgcagaggtgggcaaaaccatgcaaaaagaagaggaagtatatttgcattaatggcattaaatgaagtacagttgaagctgcagagttttaccagtgg

SEQ ID NO: 4032 - DNA, 285 bp, Homo sapiens
ttcagattctgtctctgcttccgaaagggcagggccttctagagcaaggcatttttcagagcaccccagcacatctaaaatgaatgctcaagaaactgcaactggaatggcgtttgaagaacctatagatgagaagaagtttgaaaagacagaagatgggggagaatttgaagaaggtgcttctgaaaacaatgctaaggaaagtagccccgaaaaagaggctgaagaaggctgccctgaaaaagaatctgaagagggctgccccaaaagagggtttgaaggcag

SEQ ID NO: 4033 - DNA, 499 bp, Homo sapiens
aaacccatgagtttatgccctgggctccttagcccacaatagtgtaataaaagtgccccgggctggtttgtgcttatttctgccattgtccctcccacgttcccagagaggtcattctttttggtccaactcttgctgtcctttcttaccacctgtgcaccccacttggagcagtgggaggaaatctgggtttgtggccccacaaaggctgtatatgtaaagatacacctatgtatgtggtggaactcacctttacacacaactgcagcttttccttggagtctgtaccaggtggtggttatggggtctgaaccaaaggatagcagctcttcattcctcttctgacatgtgcatgctgctccccccagccctgggctttcctgaattgccaagcctggtgcctttccaaaggactagcagggcctgtggtggagccagcagaaccacaggagagtgccctgcctgtctcagtggaagtgtattattgttttaaggatag

SEQ ID NO: 4034 - DNA, 615 bp, Homo sapiens
ccttgcctcagatccaaggtcactcggaagaggccatgtctaccctcaatgacactcatggaggaaatgctgagagaagcattcagatgcatgacacaaggtaagactgccaaaaatcttgttcttgctctcctcattttgttatttgttttatttttaggagttttgagagcaaaatgacaacacccagaaattcagtaaatgggactttcccggcagagccaatgaaaggccctattgctatgcaatctggtccaaaaccactcttcaggaggatgtcttcactggtgggccccacgcaaagcttcttcatgagggaatctaagactttgggggctgtccagattatgaatgggctcttccacattgccctgggggtcttctgatgatcccagcagggatctatgcacccatctgtgtgactgtgtggtaccctctctggggaggcattatgtatattatttccggatcactcctggcagcaacggagaaaaactccaggaagtgtttggtcaaaggaaaaatgataatgaattcattgagcctctttgctgccatttctggaatgattctttcaatcatggacatacttaatattaaaatttcccatttttt

SEQ ID NO: 4035 - DNA, 254 bp, Homo sapiens
aaagcgctgatcctgtttatttggcaggaaaacgagacaatccagcagcccaggagggacaggtggacttaatcctcctcctcgtcgtctccagccccagccccaccctggcccttcttggcattcttcctcttcacgcggcccgggcggccacccccgtagggagagcgcagagagaagtcgacgtgcttctgggaatccaggcggacaatgaaggacgggatgttcaccacctgcttgcggaccctgtccag

SEQ ID NO: 4036 - DNA, 360 bp, Homo sapiens
ctgttgtgagaaagccttcagcagcaagtcataccttctagtgcatcagcaaactcatgccgaagagaaaccctatggttgtaatgaatgtgggaaagacttcagtagtaaatcatacctcattgtacatcagagaattcatacaggagagaaactacatgaatgcagtgaatgcaggaaaacattcagtttccattcacagcttgttatacatcagagaattcacacaggtgagaatccctatgagtgctgtgaatgtgggaaagtcttcagtaggaaagaccagcttgtttcacaccagaaaactcattcaggacagaaaccatatgtgtgtaatgaatgtgggaaagcttttggttt

SEQ ID NO: 4037 - DNA, 242 bp, Homo sapiens
ccaagaaggatgtccacatgcctaagcacccggagctggcagacaagaatgtgcccaaccttcatgtcatgaaggccatgcagtctctcaagtcccgaggctacgtgaaggaacagtttgcctggagacatttctactggtaccttaccaatgagggtatccagtatctccgtgattaccttcatctgcccccggagattgtgcctgccaccctacgccgtagccgtccagagactggcagg

SEQ ID NO: 4038 - DNA, 373 bp, Homo sapiens; identical to SEQ ID NO: 142

SEQ ID NO: 4039 - DNA, 504 bp, Homo sapiens
cctcgaggagtcaatttgcctctgtgtgcctcagtggagacaagtgggaaaacatggtcccacctgtgcgagaccccctgtcctgtgctgctcactcaacaacatctttgtgttgctttcaccaggctgagaccctaccctatggggtatatgggcttttacctgtgcaccagtgtgacaggaaagattcatgtcactactgtccgtggctacaattcaaaggtatccaatgtcgctgtaaattttatggcactatttttattggaggatttggtcagaatgcagttgttgtacaactcataaatactaactgctgattttgacacatgtgtgctccaaatgatctggtggttatttaacgtacctcttaaaattcgttgaaacgatttcaggtcaactctgaagagtatttgaaagcaggacttcagaacagtgtttgatttttattttataaatttaagcattcaaattaggcaaatctttggctgcaggcagcaaaaacag

SEQ ID NO: 4040 - DNA, 410 bp, Homo sapiens
aaaatgttcatgtagaaaattaatgaactataggaatagctctaggagaacaaatgtgctttctgtaaaaaggcagaccagggatgtaatgtttttaatgtttcagaagcctaactttttacacagtggttacatttcacatttcactaatgttgatatttggctgatggttgagcagtttctgaaatacacatttagtgtatggaaatacaagacagctaaagggctgtttggttagcatctcatcttgcattctgatcaattggcaagaaagggagatttcaaaattatatttcttgatggtatcttttcaattaatgtatctgtaaaagtttctttgtaaatactatgtgttctggtgtgtcttaaaattccaaacaaaatgatccctgcatttcctgaagatgttt

SEQ ID NO: 4041 - DNA, 405 bp, Homo sapiens
aaacaggccgagaagaacgtggagaagaaaattgacaaatacacagaggtcctcaagacccacggactcctggtctgagcccaataaagactgttaattcctcatgcgttgcctgcccttcctccattgttgccctggaatgtacgggacccaggggcagcagcagtccaggtgccgcaggcagccctgggacataggaagctgggagcaaggaaagggtcttagtcactgcctcccgaagttgcttgaaagcactcggagaattgtgcaggtgtcatttatctatgaccaataggaagagcaaccagttactatgagtgaaagggagccagaagactgattggagggccctatcttgtgagtggggcatctgttgaactttccacctggtcatatactctgcag

SEQ ID NO: 4042 - DNA, 349 bp, Homo sapiens
ctgacaatctatgggggcgggggggggggcgcggcaaaaaagcaatgatggaccttggctgatccccccgacccctttcttaacaatataggtagatgtctatcgtcagcttgcctctttgccaagacctagggggcggctctgccatgagctgctgtgtgctgccctccccaccttcagcacactcatctacacacacacaggtagcacccacctcgatgagaccgccttgctctggcctgccccaaccctggaagttgaaaacatagaaccatttatttctgcttctactctctgtgcccatgtcttgtccacgaaactttgctgaacttccaggaccttacacctg

SEQ ID NO: 4043 - DNA, 373 bp, Homo sapiens
ccaaaactgcgaagagatgcagaataatgttgacaataataagttgctgaatcgtcaggctgcagactggtgatggttaaattgaattgtgtcccagatccactgccagtaaatcttaatgagaccccttcttctaaactggaagtcgcataaattaggacattaggggctttgcctggtttctgttgatgccaggccaaccaccgatctatattctgagaggcccgacaacttattgtaactgtatctccgacagatgcagacagggtggaaggagattgggtcatctggatgtcacatttggcacctgggagccagagcagcaggagccccaggagctgagcggggaccctcatgtccatgctgtgtcctg

SEQ ID NO: 4044 - DNA, 368 bp, Homo sapiens
aaatttccaaccttaagtgaatttgtggaccaaatttcaaaggaactttttgtgtagtcagttcttgcacaatgtgtttggtaaacaaactcaaaatggattcttaggagcattttagtgtttattaaataactgaccatttgctgtagaaagatgagaaaacttaagctttgttttactacaacttgtacaaagttgtatgacagggcatattctttgcttccaagatttgggttgggggcactaggggttcagagcctggcagaattgtcagctttagtctgacataatctaagggtatggggcaaggatcacatctaatgcttgtgttccttatactctattatatagtgttattcatgattcag

SEQ ID NO: 4045 - DNA, 289 bp, Homo sapiens
catttagcaagttggttttggttttttcttctttacaaaatatttttatttttgttacccttatgtttatggtttagatttctttggccttatcaagcttttcttattttgtcttcaacaaagttaaatccagcatataaaacaagatttctacaaactgggtatctttttaatactttgtttccaaaggatgcaaggtgttgtaaaccgactgtccaagttactgaaacctgggggaatgctgttatttcgagactatggaagatatgataagactcagcttcgtttt

SEQ ID NO: 4046 - DNA, 309 bp, Homo sapiens
gtcggagccatggcggtggcaaattcaagtcctgttaaccccgtggtgttctttgatgtcagtattggcggtcaggaagttggccgcatgaagatcgagctctttgcagacgttgtgcctaagacggccgagaactttaggcagttctgcaccggagaattcaggaaagatggggttccaataggatacaaaggaagcaccttccacagggtcataaaggatttcatgattcagggtggagattttgttaatggagatggtactggagtcgccagtatttaccgggggccatttgcagatgaaaatttt

SEQ ID NO: 4047 - DNA, 132 bp, Homo sapiens
ctgtgagccaccctgcccggccacttttgtatgatttctaatgtatttgtaatttacctaacaaattgcctaatctgctatgttaatgtatttatgaattaaaataaatacgactgcaaaaaaaaaaaaaaa

SEQ ID NO: 4048 - DNA, 456 bp, Homo sapiens
  misc_feature (1)...(456): n = g, a, c or t
aaataaataggagtacactgtaaaataataaaagtatattgtatagtaaatacataaatcagtaatatcttttattatcactatcaagtattatgcactgtacataattgtatgtgctagacttttatatgactggcaatgcaggtttgtttacaccagncatcaccacaaactcatgactaatgtattgtgccacattacaatgtcgctaggtaacaggaatttttcagctccattataatcctatgggaccaccatcatatatacagtccatcattgaccgagatgtcattaagaggtacatcaacagaaataatgtatattatgtacaaaaataaatgaattaaaattaaatgaatacttgataaatgacaagttataaaagncnatttctgattctaaaanatacatgnnaatattttttctacagagcatggaaaatacattagatgttat

SEQ ID NO: 4049 - DNA, 435 bp, Homo sapiens
cctgttgaggagaaactgaggccagccctggcggagacctagcccagcggggtaaggagggtgggggaaaactgggtctgaaggaatgagggccccctccctctgggctttcctcctagagggcctcagtccctcctgctggctgggctgcacgacccccaatccttgctcccctaacccggaggagggggccagaccagggagggcagtggacagggagcctgggggagttggggagcgcagggcagggtccatggtgtgcagagggggtggcagccacctaggtggtcagttcctggcagcgatgaccacagagagtgccacaccccccaaggcaacagcagtcgccccaaacagccacttccatgggatggactgtggataaaaaggaggggagagaagggtggagggaggtcaagactggcctctggggcc

SEQ ID NO: 4050 - DNA, 206 bp, Homo sapiens
  misc_feature (1)...(206): n = g, a, c or t
ccaccccagtaactgacctgctctcctgttggagctctacatgggacaccagctcccatgcatttatccctcttcanacctcactggtgagaagctgggcttctgggtccccatgctgcttcatcccacctcccaaccctgtcttcaggcccactgctgatcccagtctagaaccacagcaccgcccccatcctgcatgaagaagg

SEQ ID NO: 4051 - DNA, 163 bp, Homo sapiens
  misc_feature (1)...(163): n = g, a, c or t
ctgtttgccggcaaatatcagacgctgctggtcaggtgggataccctccttgtcttgaattttggccttgacattctcaatggtgtcactgggctcgacctcaagggtgatggttttgccagngagggtcttcacaaagatctgcatgtttgcgtcagctcgg

SEQ ID NO: 4052 - DNA, 379 bp, Homo sapiens
ctgatggagatgactctactgcaaaaatgacaaccagcaagaaagcgggtggtgcccgtttcctccctggggaccctcagagggccaggccattctcttccttggtgtgactgcggatccagggtaagaagtgtgagactctcgtgtagacgcctggcttgtccttcagggcacatccacggccccagctcacaattccagtcaaagtcatgcggccttggagggaacagacgaggggtccccctgagtctccctggcaggaatctgttttccactgtgggtcagcagcacacagcattttggtggtgacttcagagccgtagtagtggggctgctgacactcccggtgggaaatcagcttcacaacagtcattttcag

SEQ ID NO: 4053 - DNA, 373 bp, Homo sapiens
ttgaactctctgagataaacggagatgcagggtcaaactacataaatgccagctatattgatggtttcaaagaacccaggaaatacattgctgcacaaggtcccagggatgaaactgttgatgatttctggaggatgatttgggaacagaaagccacagttattgtcatggtcactcgatgtgaagaaggaaacaggaacaagtgtgcagaatactggccgtcaatggaagagggcactcgggcttttggagatgttgttgtaaagatcaaccagcacaaaagatgtccagattacatcattcagaaattgaacattgtaaataaaaaagaaaaagcaactggaagagaggtgactcacattcagttcaccag

SEQ ID NO: 4054 - DNA, 382 bp, Homo sapiens
ctggccctgattgcgggcacggcagtcgtgggtgtggtcctggtcctggtggtcattgtggtcgcagttctctgcctcaggaagcagagcaatgggagagaagcagaatattcggacaaacacggacagtatctcatcggacatggtactaaggtctacatcgaccccttcacttatgaagaccctaatgaggctgtgagggaatttgcaaaagagatcgatgtctcctacgtcaagattgaagaggtgtttggtgcaggtgagtttggcgaggtgtgtcgggggcggctcaaggccccagggaagaaggagagctgtgtggcaatcaagaccctgaagggtggctacacggagcggcagcggcgtgagtttctgagcgagg

SEQ ID NO: 4055 - DNA, 306 bp, Homo sapiens
ccactggcatcgcagcttcctgtctgtttatatattgaaagttgcttttattgcaccattttcaatttggagcattaactaaatgctcatacacagttaaataaatagaaagagttctatggagactttgctgttactgcttctctttgtgcagtgttagtattcaccctgggcagtgagtgccatgctttttggtgagggcagatcccagcacctattgaattaccatagagtaatgatgtaacagtgcaagattttttttttaagtgacataattgtccagttataagcgtatttagactgtgg

SEQ ID NO: 4056 - DNA, 255 bp, Homo sapiens
ctgccctgtggtttcacatgataaggcactacttccaaaatcttccacttccacaaaacatctgtttcccagaagacctgagaagcatattccaacaggcggacacgcccgaccctccccaacttaaaatccacaccaatggcagcaccgtgtggaaagtgagacattcgttcagtgacctggggtttttctgggctgttggagcagccatagcaaatggcaagttctgctgtctgggctgctgtggttctctgg

SEQ ID NO: 4057 - DNA, 332 bp, Homo sapiens
  misc_feature (1)...(332): n = g, a, c or t
aaagaactaatttgtaaattatgacacaaaattttattaacaaggaaatatccattaattgactactacagtaaaaactttataatgcttgtatcatgaagaaagaccttccttttccttatatattaattgaactacataggcttgctgtacattttgttattcatgttataagaattctagattccattgcttttgaaatatgtttctttttaggaactaanagtcaacttatagtttgatttctgttttatttgtactgtgtttctgattttgtgggtttctaaataaaaagatcnancccaccacttncantatactgtnttctattt

SEQ ID NO: 4058 - DNA, 229 bp, Homo sapiens
  misc_feature (1)...(229): n = g, a, c or t
cattatgggtaangnggggttgggcggggctttaattccatccagataatgctggatggcttgggaccacttggcagtccttcgctgcttttctgtgctgcagtggctatggagtgagcaaggctcctcagggagctatttctataggaagcacaattctggacggtatggctggggaagcgtaaagagggttaacaaggataagaaacctccaccccttccccttcag

SEQ ID NO: 4059 - DNA, 567 bp, Homo sapiens
ccaggctggtcttgaactcctgacctcgtgatccacccacctcagcctcccaaagtgctgggattacagacgtgagccactgcgcccggcccagctagtctatatctttcaagtgggaaatgtaatcagttcccattcaaggttattactgataggtgaggacttattcttgccattttgttaattgttttctacttgttttgtgcatcctttgttcatttcttcctctcttattggttatcattgtggtttggtggttttctgtagtggtaacatttgattcctttctttttctcatttgtatctgctccaccagtgagtttcatgttttcatgatgcaaatatcagccttttgctttcagatgtagaacatgttaagcatttctcgtagggctggtatagtggtgatgaatgccctcagtttttgcttggctgggaaagactttattactctttaatttttgaaggacaactttgccgagtatagtgttcttgcgtgacagttttctttttcctttagcacttttaatgtattatcacattctctcctggcctgtaaggtttctg

SEQ ID NO: 4060 - DNA, 309 bp, Homo sapiens
ctgcacttactcactgatgggaaaagttctttgagttacacagtttcaaacaggaacagccaggagactggggacttaaatcataactattgtataaataatgggagctgttccctgagctaaacgccgccctttggcagaggtagagccttttggcagagggaggcaggagaagagtgtgggaagtgaagaagttcctgaggtgacaaagtgaattgcaccggagagaaggggggataaagctgcttcccagaaactaggacagcaacacctggctggtccccgaggacgaggacgggacaagaaagg

SEQ ID NO: 4061 - DNA, 469 bp, Homo sapiens
ccatcatgtcgcgcacagccagcatcagcctgttcaggccctggttgcggttcagacccccagccactccttcctcgggcctctccccctccatggtatagtttggcaacagtgaccggaagaagagagcaatggtgtttccatggctgataggacttagcctctctggcctgacgtaggagtagattgtgtccgaaggaggcagaggatcaaaccccatcacagactgcgtggtcacgtccgggggcagggcagcgacggcttccttgatctcagagaggatcacatggcggtggatattcctgggtgcacgctggtagagcaccttccgccggttctcacaggcttccacggccgggtccccggcgtccactgcttgcagaacctcgtggacgttctcctccagccagctcatggtggcgggctctttccagagaaagtgtgacctcccaaggtacaggttcaccag

SEQ ID NO: 4062 - DNA, 281 bp, Homo sapiens
  misc_feature (1)...(281): n = g, a, c or t
tccatanctataaaaatcgttacggccaggatatgccggaacagaacactccccactggggtcctcanccttggatgtcagctcggcccctcaaggggtccctacacctggaagctgattccactcatcagtctcgagctgggcgcatgtggagttgatgtggagttgtagctgactggctggtggggtcagcctggcctcccagtgtggagcatgggcaccagcctcactgcgtggtcgccctagggcatatgctgcgggctgttgtggcattcctgtgg

SEQ ID NO: 4063 - DNA, 111 bp, Homo sapiens
aggctgcagcagcccttgtgacagggctgtggtcacccttagctagcactgacaagatctccatcatctcactctccatcagggtgctggcaatctccctcgaggacctcg

SEQ ID NO: 4064 - DNA, 234 bp, Homo sapiens
ctgaaaatccatcagtgccagcataccaatgaacctctattcaagtgtacccaggaaggatgtgggaaacactttgcatcacccagcaagctgaaacgacatgccaaggcccacgagggctatgtatgtcaaaaaggatgttcctttgtggcaaaaacatggacggaacttctgaaacatgtgagagaaacccataaagaggaaatactatgtgaagtatgccggaaaacattt

SEQ ID NO: 4065 - DNA, 171 bp, Homo sapiens
ctggacgcacggaggccacactgagtatgtcatcaatctgccgactgttgaagttggacaggcccagcgcctgcaccagccccttagccaccagtgcctccagagccttccaagtctccttgtagtgggtggagtcgtagcatatagtcccatcagcattcttggggaagg

SEQ ID NO: 4066 - DNA, 568 bp, Homo sapiens
aaaatgcattttcccttgtcctgtctttaactagatatacatgcttatatttatagtgggtttcacagactataaaattgaatgtatgaaatttttatttatatcagtgcttttaataatgaagatatttttggagtaatggtgctgtcttgtagcgagttattaatcatagtaagatttttttctcttcatttgctttttttgtttcatattaacaattttttttttacacggacacaaccctctgacagtctttccaaatattaaaatcatttgaatatgtatgctgtgatctgaacactgctcaagccatcaagcagtcttcatacagtttgcattataaaatctcattaaattctccaagaaaaaataagttgaagaattttatttcctgaccatgcatcccctggatttctgagtttcagttcagattgtagatgacaatataagctgccttccgaaattgtcaacatctgaatgttaagtccattttccccatggaagaagcccgtagttccatgaagtatggattaccatttgtatttttcactaacagtaaatgtatttt

SEQ ID NO: 4067 - DNA, 389 bp, Homo sapiens
aaaagaaattcagaaactaagcggttggagaggagcattggaaatagagggggatgctatgagatgggggttgggagcagagaagaaactgcaggagggcaaagtgtaactagcaatataccttctgtgatgctccagaaacacatgtctgctaagattaacttgattggagtttcttatgaaacaggctgatcatcaagatttttaactcaggtttcagtgaaaaaattggaaacttttacaagaaagatttgagaagtagaaggcaggcagcaaattttccagatattatgcttgcatttcaaattcctgtttcaggcttttcaagtaggcatgcacattcccaaagccatgatatttggctaaatacacaaggaccccagtcgcac

SEQ ID NO: 4068 - DNA, 425 bp, Homo sapiens
ccttcctccgcttccgctgcacctcttccttgtctgggggcagaggaaaatgagattgagcccagttattgtgtcatgcctcaggggcccttcccagaagagccctcagggccggctcctaggaagcacctcctgggaccctcgcacttctgacttggctcatgcatccccacatctagctcttgggaccttcttctagcccagcctggccccccgccagcaccctgaggtcctcagcccagctccaccttccaccagagggtaataggtgaactgtttggaatcagacacgtcccctcctcgcttgcgtttcagttgcagaaacactgttacaggccgctcaatcttcatcttgtgataggggggtgtccggaacacaatggcatactgtttatgcacatctgtgggagagaagtccccaaagg

SEQ ID NO: 4069 - DNA, 361 bp, Homo sapiens
ctgaagcccaagaactgctgatacactgcagatgagaaaacatttgctactctcccagctctggcctttcttaagctaaatgatgatcacaacaatatagatcacttgttctataaaacaattttggcttacatgtatagcaagctgcactgccagcatttacatttgcaacaacatttcaatcccttttttgactctagaggttgcaactcttcagctttattggttcagcaatttagtcccaaattctcatgaaaaatttacactttttaatccagcatttattcccttgaaatgagttactacacctatgtaaatttttttaatgtttgaaccccaaagataaaataaatacattttt

SEQ ID NO: 4070 - DNA, 486 bp, Homo sapiens
aaaagagtaaaaaatggttttctggttccaagatggctgaataggaacagctccagtctacagctcccagcatgagtgacgcagaagacaggtgatttctgcatttccaactgaggtactgggttcatctcactggggcttgtcagacagtgggtgcagaccacagagtgtgagctgaagcagggtggggcatcacctcacctgggaagcacaaggggctgaggaattcccttttctagccaagggaagctgtgacagatggtacctggaaaatcgggacactcccaccctaatactgtgcttttccagtggtcttagcaaatggcacaccaggagattatatcctgtgcatggcttggagggtcctatgaccacagagcctcgctcactgctagcacagcagtctgagattgaactgcaaggcagcagcaaggctgggggagtggtgtctgtcattgctgaggcttgagtaggtaaacaaagtgg

SEQ ID NO: 4071 - DNA, 527 bp, Homo sapiens
  misc_feature (1)...(527): n = g, a, c or t
gacaaaatggcgaagatcgccaagactcacgaagatattgaagcacagattcgagaaattcaaggcaagaaggcagctcttgatgaagctcaaggagtgggcctcgattctacaggttattatgaccaggaaatttatggtggaagtgacagcggatttgctggatacgtgacatcaattgctgcaactgaacttgaagatgatgacgatgactattcatcatctacgagtttgcttggtcagaagaagccaggatatcatgcccctgtggcattgcttaatgatataccacagtcaacagaacagtatgatccatttgctgagcacagacctccaaagattgcagaccgggaagatgaatacaaaaagcataggcggaccatgataatttccccagagcgtcttgatccttttgcagatggtaattctttcccacttttctataagtattcagaaatttatttgtattaagttgnctttagccctttgattttttttggcatgcttctgaatttgcttttcttttt

SEQ ID NO: 4072 - DNA, 342 bp, Homo sapiens
ctgatactgtataagacaaagccaagatgcaaaattaggctttgattggcactttttgaaaaatatgcaacaaatatgggatgtaatccggatggccgcttctgtacttaatgtgaaatatttagatacctttttgaacacttaacagtttctttgagacaatgacttttgtaaggattggtactatctatcattccttatgacatgtacattgtctgtcactaatccttggattttgctgtattgtcacctaaattggtacaggtactgataaaaatctctagtggataatcataacactctcggtcacatgtttttccttcagcttgaaagctttttttt

SEQ ID NO: 4073 - DNA, 400 bp, Homo sapiens
ctgccgcaatttccatgccaggatatttttccgcaaatcagtcggttgaaattcagaggggtcagaatgactcgacctgtccttcaatgttgataataaatgtctcagccaaaaaccttccttgagctgccatgcttttccccttgacctgcacctcttcccctaaaacttctgcagggaagcccctggcggaggcgccattgaaagcatggtcttgccagtggctggcaaggcggttttgttctgctcagtttctggagagggttggatgcgtcccctgccatccagccctccccgcttgaggccagcactgagtctgggacactcagcgggaagggggctggcatcgccagcgacccacacattcctcacgtagcttctgctcccaggaaggtagttt

SEQ ID NO: 4074 - DNA, 131 bp, Homo sapiens
caggacttaagacaaatgggactgatgtcatcttgagctcttcatttattttgactgtgatttatttggagtggaggcattgtttttaagaaaaacatgtcatgtaggttgtctaaaaataaaatgcattt

SEQ ID NO: 4075 - DNA, 116 bp, Homo sapiens
aaaaagctgatacttgacaagattttggatgaagacttatatatcaatgccaatgaccaggcgatcgcttatgtgatgctcggaaataaagcccaaactgtactaaatggcaattt

SEQ ID NO: 4076 - DNA, 229 bp, Homo sapiens
ccacatccctgcatttatttgtccgggaatagtggcattcctaatttagtaaaataaaagaatagactgtaaaattatgctgacctataattatacctataggatcaattaataaacatgtcaggttaatatctactgtagcaatgtggtagtaaattttctttgggtattaaatataaatgtgtacatataaataattttggtatattagtcataatgtatatatttt

SEQ ID NO: 4077 - DNA, 324 bp, Homo sapiens
aaatttcataaccagcctgtttagattccagtcttcctagctatatcacatatgccttgttgatatgctctttctgctttctttagacttaatgtttgacgggggtgggggtgtctggaagaacaggaaaggtggggatcctaaggcagattaaaggactccctccaccccactacagcctcccataactctagtcatccctctcatagtacaggactgatttctctgtgtctgtttgtacacacaaatgtgcatacagacataaattcccccaccccataccaaggtggttacctagcaggaatgagcgtaggtggctgctgg

SEQ ID NO: 4078 - DNA, 337 bp, Homo sapiens
aaatgagaatacagctttacttaaatgaaaatcccaatgtttcttttgggtgtagacctcattctttccttcatagaaagaactgtaaactcagtaaattcttaatctcttgtataataatcggatgagagccaagcattttcttaaagatcctctaaaaagaatggctttggaatgactagaaaacatttgtggagtgtgggagctatgcttgcattatttgcttaattcatgtgcttggatgttgtgctttcagtctattcaacaatatttaatcaattattaaattttcttagagacatacacttaaatgaagcattttaattgagtatttttt

SEQ ID NO: 4079 - DNA, 267 bp, Homo sapiens
ctgggctggcgccttagctgtctgctgcactgcggccaccgtgaaggcctgtttcagggtcatcataatttcatcaaccagagcctcatttgtgcactgaaacacgtaacagacaaaatgaaagccgccacctccggaagactcccgacagataaacccaaagtggtccacgtgtctgatgccctgagagcaaaaggatatctccttaaaatttttctccaatgctattttttggtgtcaggactgatgaggtaaacttcagactgg

SEQ ID NO: 4080 - DNA, 268 bp, Homo sapiens
  misc_feature (1)...(268): n = g, a, c or t
aaagcttcttgttttaattaaaaacaagcacatattaacagccacatgtgaatgccaaatgattaaaacaaaaaaacaaaaacaagagccatctacactgcagctagggaaagcaaacttcttggcttaagagaagtgagggatgtgtgtacgtgtgtgtgtgtgtgtgtgtgtgtgtgtgtgtgtgtgtgtgtttcanaaaagccactccagtctgggaaaataaaagcacagaccatttctaatgactggttttgtttcnccagna

SEQ ID NO: 4081 - DNA, 568 bp, Homo sapiens
aaagcaattggaagagcatatgaacacgggccagctagcaggattttcacatcaaattagaagtctgattttgaataatatcatcaataagaaggagtttgggattttggcaaagaccaaatactttcaaatgttgaagatgcatgcgatgaataccaacaatatcactgagctagtgaactatttggcaaatgacttaagtttagatgaagcttcagtcttgataactgaatattcaaagcactgcgggaaacctgtgcctccagacactgctccctgtgaaattctgaaggtaaagctgatggaaagttcttaggttctaacttgacattgtttatattcctagggccttaaaattgacaagccttttctagtgttctggagataaatgtatttttatgtgtaactgtaatttttatattttactttttgtgttagagagttctaaactagaaatcaagagaccacagttctaatctcagccctgccactgggcagcaaagcctaatgtgggcttagtcttcagatctggaccccatggtctctcaggtgctttccagcattacca

SEQ ID NO: 4082 - DNA, 410 bp, Homo sapiens
cctgctccattccaccctctgggggaggcgcccaatccccttgcgaccggtcatgaggtcttcccagctcaggactccagggcacctcccctcgggcctggtcaggaagcagcacctgagggtggatgttctcagaggatacagacggaacaccttccaggttctcaaatttctcttctcctgttgtctcagtctcccaagctctctctgcatatcctccacaagggtcaccgcttcttcgccgctctccggatgcagctcctgcaccctgctctggatctcctggggcaggatggtcaggaactgctctaacaccagcagctccaagatctgctccttcgtgcgcatctcaggccgaagccacccatggcaaagctcttggagccggctgagggcttcccggggaccag

SEQ ID NO: 4083 - DNA, 262 bp, Homo sapiens
ctgttgactcagattcggcattttaattacattgtttccaagtatgatattctgagagtgtctatagcacttagtgtctgcttcatataaactaccagttattatatatttatgatgcaagtagttttccaaatgtggtgaaagtctgagtctttttatccccatgggtaaaatctgaatctggctctctgtgtctctcagtgcttgtttattactggtcagagagtaaattcttgataaaagctgttgacttggctctcac

SEQ ID NO: 4084 - DNA, 546 bp, Homo sapiens
ccatacctaggactagcccgatctgtgtgtcagccactgacccattttaccagtgaggaaattgaggctcagagaggttaagtgacttgcctgtggtcacacagggaacaagggcagagccagaatgtcaacggaggagtgtacaccctttcaactacgctctgtgcgcaatgtttaaccggagcctcgtgtattcatttgtaagtcacagaaaataattatatttacagggggaatctaaagatttcaggggacaacctgtagactgactctcatttagcaggggcccaataagcgattatgcccatccacttgagcttgtactgacgtaactactctcctcatgactaccactcaaagaatatacaaaggacctctcattttcccagaaataacctctctatatgaacaggcacagccaatgtggaatggccttatgtctactgagcacatcacatgcacagctcttcatttcatccccacactaatcatgtaatacaggcatgactgtccctatctgacagaggaggaaacagggtagagttt

SEQ ID NO: 4085 - DNA, 525 bp, Homo sapiens
ccactacgataagcaggtagctgggttttgtagtgagcttgctccttaagttacaggaactctccttataatagacacttcattttcctagtccatccctcatgaaaaatgactgaccactgctgggcagcaggagggatgatgaccaactaattcccaaaccccagtctcattggtaccagccttggggaaccacctacacttgagccacaattggttttgaagtgcatttacaaggtttgtctattttcagttctttactttttacatgctgacacatacatacactgcctaaatagatctctttcagaaacaatcctcagataacgcatagcaaaatggagatggagacatgatttctcatgcaacagcttctctaattataccttagaaatgttctcctttttatcatcaaatctgctcaagaagggctttttatagtagaataatatcagtggatgaaaacagcttaacattttaccatgcttaagttttaagaataaaataaaaattggaaataattgg

SEQ ID NO: 4086 - DNA, 318 bp, Homo sapiens
tgttcctaaaataaaccatttattgaaaaaagaacctttttcttaaatttcagtaatcagccttttgcattacaaacctgcagcttgccaacaacaacaaaaaaggtaaaggtttcacagtcagtgcactcaacaaacaggagattaaaaacaaggtatgggacgcctgataacactacaacttcttttgaacctagaaaggtcaaaacactacgctgatgtcacggttctcagtcgcgcgagacacggaggagacagaggcgatggtccgtgtacagtagtaatggcacttaacatgcagcttctttaacctcgtgg

SEQ ID NO: 4087 - DNA, 542 bp, Homo sapiens
aaactccaaattcctttatcgaagcagctatctgctaatattactgaatggcaagtctttggaaatgatagttaaccgaaaatgcagaaagaatcatagcaactaatgataatgacgggtaaaggatagaaaataaaatttttagccacaggttgtggttacagcatccaggccatcaccgacatctcggcagggctatgccgccacttcgtattaaacgtctactcctccgagaatgcccttattaaattaagtgcaaagtaaggcatcccaccccagacagagggatccacattctttaatcatgatgcgggccactgtaacagggagatggatgcaggacgcagacggggtggggcgcccaagcgacgcacttagacggtgatctgttggttttctctgaaaaatgatctctggtgtgaggcacaaatatctggaaacatccggaagacctggtctggcggcggctcctcgggggcctgcatcacagagccggctccacagctcttcccagcctcttctgccagttgccggacatacag

SEQ ID NO: 4088 - DNA, 549 bp, Homo sapiens
  misc_feature (1)...(549): n = g, a, c or t
ctggcagctcacattttacattagagagtggggtccccacattttacattacagagcggggtccctgagctgcaggaggagagcctgcagggctcttgggtagaattgcacttttgcaataagggaaacgggagcaatgtttcagcctcagtttctatttataatactgacacaaaaagaatattgctggatacatagcatggatctagatagagcagctccaggagttctcacggtgacagcccccctcactcacagacaccatgtgatactaatagggcttagacacaaagcactgaattcccaaagcattgaagagaaagacagctctcagtctgagtaaaaccgtattgagagaagaaaagaggttgaaagaatcttaaagacaaattcagattacatgtaacattggtcaaattgaccagaaaatattcttccaaagaagttcttctctaaacaccaaaagtgcacagctactctcagcatgagaaatacaagtattatgaganagagggcttattctgagcagaatttccatctctgctgctc

SEQ ID NO: 4089 - DNA, 275 bp, Homo sapiens
ccttcttggagcccctgggcaccctgggctactgtggggctgtgggcctgttacccccaggcgcagcagctccctccggctgggcccaggctccactcagtgacacggctcaagtctacatggagctgcagggcctggtggacccgcagatccagctacctctgttagccgcccgaaggtacaagttgcagaagcagcttgatagcctcacagccaggaccccatcagaaggggaggcagggactcagaggcaacaaaagctttcttccctccag

SEQ ID NO: 4090 - DNA, 248 bp, Homo sapiens
caccaactatgaggcgggcaaggatgactatgtgaaggcactgcccgggcaactgaagccttttgagaccctgctgtcccagaaccagggaggcaagaccttcattgtgggagaccagatctccttcgctgactacaacctgctggacttgctgctgatccatgaggtcctagcccctggctgcctggatgcgttccccctgctctcagcatatgtggggcgcctcagtgcccggcccaagctcaagg

SEQ ID NO: 4091 - DNA, 555 bp, Homo sapiens
ccagcagtggggcaagacaggtattttagatagggcagcaagggaagacctcgtgactttggagtgaaaatgtgaaagaagcaaaggaattagtcatgggggtgtctgcagagagagcatttgggggagagaaaaccacaaacgcaaatatgtcagaagtgagcctggcattttcaaggggcagcaggaggccacgtggctggagctgatgcccaacagggagagaactaggaggctggtcctggcgtcctcggtcctagttgatcacacagccttgtcagtcatgatggactcctcatgaaaaggagggcaacttctctgaagctcttataacaacttctcatcaaaggcatctctcacacaagcaatgcgctgccctactttgctattctggaccttgtcatcacatcataagcaggcgatccattatccgtacttactaggctctactggagttccacagccggcacagaaaaaattctgggctgccaccacaaggtccctcctgaatacgaaaaataatactagttacatttcagagaaggccaatggcac

SEQ ID NO: 4092 - DNA, 539 bp, Homo sapiens
aaatgtgagaatttcaagcagtaaaattactcaaaagtctactggatttaacttacaagttcttcagtggtaatctgttcaaaagaattattttagagttgttaggtatacttttgatgtggttgatatttctggtatccaagaagaaatctcccaagatcctacctaactttttgtaactaaagcagcatacatacacagggagtgggaaaatgtctagactggtgagtacacatgccaacatttttccagaattttctgcctccctatacggcttgagtaaggggtttagagattttagactatacttgggaatttgtctatttcttttgcagttctgtcaatttttgtatcatgtattttgaagcatttatgttattatgtacataaatatttaggactgttatgttttcttgattaattgaaccctttgtcactataaaatgacattgtatattgctggtaatatttttgctatgaaatgtactttggtattaatacaaccactcttcctcagccttcttttgtcaagtgttagt

SEQ ID NO: 4093 - DNA, 598 bp, Homo sapiens
  misc_feature (1)...(598): n = g, a, c or t
ggaggccacatgctcctcaaagctgttgatgcgaggctttttggtgggttcggggctggctagcggggtgacactattgcgtctcatgagcgggttaggtcccttctttgcatcctctgacctctcccggtatgtgcagacggactccacgttcaggtagatggattccacacggcagccataagcgacaggcgtcagtttcaggacggtgtgaagagggcatttcaggtagggcatctcctctgcactcttatccaggaagtaggcaagcaggcagcgcaggacggcctggtggcagatgaccagcacattctcctgccgctccagctccatgatcactggctccaagcgctggaccaggtcctggtaggactccccggtggggtagcggtaatagtacttgtcctgctcccgcagcgcatactcctcagggtaggtgtccctgatctcctcgtaggtcagctcctcacagacgcccgcgtcgatctcattgagcgccttccactgctcgtagggcagccgcagcgcctcggcccgtctggatggngctcttcagccatcaccatgtcacccacaccagcagcgggnaagtctgttc

SEQ ID NO: 4094 - DNA, 241 bp, Homo sapiens
ctggtggagcactacacctcagacgcagatggactctgtacgcgcctcattaaaccaaaggtcatggagggcacagtggcggcccaggatgagttctaccgcagcggctgggccctgaacatgaaggagctgaagctgctgcagaccatcgggaagggggagttcggagacgtgatgctgggcgattaccgagggaacaaagtcgccgtcaagtgcattaagaacgacgccactgcccagg

SEQ ID NO: 4095 - DNA, 458 bp, Homo sapiens
aaaaatcagcggccgggcgcagtggctcacgcctgtaatcccagcactttgggaggccgaggcaggcggatcacaaggtcaggagatcaagactatcctggctaacacggtaaaaccctgtctctactaaaaatacaaaaaaattagccaggcatggtggcaagcgcctgtagtcccagctactctggaggctgaggcaggagaatggcgtgaacccaggaggcagagcttgcagtgagccgagatcacgccactgcacttgagcctgggcgacacagcgagactccatctcaaaacaaaacaaaacaaaattagctgagcatggtggtgtgtgcctgtagtcccagctactatggaggttgaggtgggaggatcgcttgagcccatgaggcccaggttacagtgagccaagatcgtgccactgcacttcagcctgggtgacagaaagagaccttctc

SEQ ID NO: 4096 - DNA, 332 bp, Homo sapiens
aaatagaaaacagtatattgaaagtggtgggtttgatctttttatttagaaacccacaaaatcagaaacacagtacaaataaaacagaaatcaaactataagttgacttttagttcctaaaaagaaacatatttcaaaagcaatggaatctagaattcttataacatgaataacaaaatgtacagcaagcctatgtagttcaattaatatataaggaaaaggaaggtctttcttcatgatacaagcattataaagtttttactgtagtagtcaattaatggatatttccttgttaataaaattttgtgtcataatttacaaattagttcttt

SEQ ID NO: 4097 - DNA, 434 bp, Homo sapiens
aaatttttgaagggtacccatcaacaagccaaatattcgccggttcctttgctttccctttcatccatattttgatcctggataaggtctctacgtgtgcgctctttggaggtagctacaactgaagactgcaatgctggctttttaacatcatcatcctccgggtcgctttcctggcgtgattctcttctggtccgacgctccccgcccagcctactgactgccccttcaaggtctctctgtttggctgggggtcctcctccactatctgagaatccacgcctcagtaataaactaccacgtcctctacctccaccaggaccagaaagggccagcaatctggcttggatgggcctcacgtcattcggatcccgcccggtgagcttgcgaatgttctcatccacgttcttaagactctctttggccttttccag

SEQ ID NO: 4098 - DNA, 373 bp, Homo sapiens
ccaccctgaccatcaacagggtcgaagccggcgatgaggccgactattactgtcaagtgtgggatcgtaataatgaccatgtcgtcttcggcggagggaccaaactggccgtcctaggtcagcccaaggctgccccctcggtcactctgttcccgccctcctctgaggagcctcaagccaacaaggccacactggtgtgtctcataagtgacttctacccgggagccgtgacagtggcctggaaggcagatagcagccccgtcaaggcgggagtggagaccaccacaccctccaaacaaagcaacaacaagtacgcggccagcagctatctgagcctgacgcctgagcagtggaagtcccacagaagctacag

SEQ ID NO: 4099 - DNA, 573 bp, Homo sapiens
  misc_feature (1)...(573): n = g, a, c or t
ctgcacccctggtttcagctcttctaactgtgaaagccccatccaaggctaacattcgagaggcacagggctgccaagggtttcttctgcccacttagtccccagtggctcaggctccttccttggaagttccctggggtaggtgaggcagaggcagatctccgaggaacttgactgactgagcaacgaagaccctctctgagttttcctcccaaggtcttagggtggcttggcagtccccaccccctcacactgtctcagggtctctaccctcaacaagattagattccttttagccagaaagagtagtgagaggctgccaattgggtacacctggggctttcagggctggagtgcccagagcctcctgaggtcagagttcagaggttaaggtatgtcaggggatggaaaaggagcagatgaccccatttgacctttaccagcgaggtctgagggtcctgccttcaagtgcagagcccccaacacattcagatggggctggacagacacaaagctacagggttcccctgaggggcagangctggnaagggccgccctcccactcagccctca

SEQ ID NO: 4100 - DNA, 424 bp, Homo sapiens
aaagtaccttctggtgaaggcaaacccaacaagcttctacagaaatttagtataaaaagtttagtgtgatgaaaactatattaccaactggaatgaagtacaataaactactaacaaacatactaacttgctacatatactaactaaaataaattagaattgtcaagttaataccactacccaaaataccagagatccaatatgtgcctatccataatgaagagttctttaattgtttagctccataccttccactaggcacaaatatcaaaggtcattccgcaaagccgtccatgcatcagtatcacatttgtgcaaaggcagatttatcagataaattctttgcaacttctgagggcttcaattaagtaacttaaaactatgaacttaccaactatgtagtaatttaatcaaagaatgtttt

SEQ ID NO: 4101 - DNA, 255 bp, Homo sapiens
cctgctgtgtctttgactcttgatcagagccagtcacaggcttctttggaagcagtagaagtcccttcaatggcctcatcttggggtgggccacatttttctccagaacataaagaactgtctaactccccactcagggagaacagctttggatcacctttagaatttagaaactcaggcccacttggtacagaaatgaatactggattttcttctgaggttaaagaagatttgaatggaccgtttcttaatcag

SEQ ID NO: 4102 - DNA, 572 bp, Homo sapiens
cctcgagctcccttcagcgaggcaccttacgcatggaataggaggtttcacccacctgaaaccttctaaatacaatatcaatggtgaaaaaccaaaaacaagagagaaaataaaaacaagatcattagtaaaagttcaacaaagcaattgaaattctttggatgtctattacatatgggaatgaggacagtctcaagtctgtaatatgggaaacatgcagaagggagagggttaatcagggctattgcatacagcagggatttttgctggaagaaaggctcttcattttctacaaagacaacttaattttgcttccatctactaggaatatgctggcttgaattttcaaatgcactgattacaaaagaaatacattgcatttcactcaagagtattttcttgtttactaagttctcacaaaaaaacagaataacatttttcaaactaggtgtctccagagctctgaaataaagaagtcagcaacctaaggcaggcgcaatgtctcagcctaaaccgatctctaaagctgcagtgaagtgcaattcatgttagctgtccgcttggtggggtga

SEQ ID NO: 4103 - DNA, 548 bp, Homo sapiens
cctttctgaggcagcagcaagcagctccaaacctccgaaagcttatttatgggacagtgacagaagataatgaagaagaagatgatgatactctagaagagcttggagggttgtttcgtgtcaaccagcctgacagagagtgtaagcacaaggctgactctttggactgctccagatttcttgtggaggccccccatgactgggatttagaggaggttatgaacagtatcagagattgcttcgtgactggaaagtgggaagatgataaagatgcagccaaggtcttagcagaagatgaggagctctacggtgactttgaagacttggaaacaggggacgtgcacaagggaaaatcaggccccaatactcagaatgaagatatagagaaagaagttaaggaagaaattgaccccgacgaagaagaaagtgccaagaaaaagcatttggataagaagagaaaattgaaggagatgtttgatgcagaatatgatgaaggagaaagcacatattttgatgatcttaaaggagaaatgcagaaacaagcacag

SEQ ID NO: 4104 - DNA, 261 bp, Homo sapiens
ctgtggactccacctggggccccaatacaagagcacccgtcaccccggcctgggttttttcagggccccttgggacacagggctcaccatggagtgctgtaggtccaggctatggagctggcagcaggctttggctagcatgaccagagcgtcagcagtcacaccgtggcagccggagagcttgaggaaagtgagccgaggacagcactcacctaccagacctgcccgggcggcgctcgagccctatagtgagtcgtatta

SEQ ID NO: 4105 - DNA, 353 bp, Homo sapiens
ctgccatttgcaaaaacaaggaaaaaaatccgaaactttcttttgttgcactgacagggtctgtacttttttttttctttttgagtcaggactatggagccgagtagttgatcttttaatatagccgtgtttacttgtattaacttacagttaacataggaaaaatacaagtaaggatgtgagaatttgcattttaatgggaaattttcaacccttaatctgaaaacagaagacagtcttaatataaatgtactgtgaagaatgctattgatgtttatggtttctgattacttttcaaattttgatgtttttttgccagttggcttttcttaaatgaaaacactgttccattt

SEQ ID NO: 4106 - DNA, 368 bp, Homo sapiens
ctgccggcgggtaacggtgaaaatggaccggagaaggcttcgcccaaagacatgagtggtttcgtagcgggggaggctatcacagctctggggcacgtggcagtaacagagccatctggtgtaattgaccttgtaggtagccacgtcctcagcctgagacctctgccgaaactgggcaggtgtctcaagcttccagtagttaaggcagagcaagaacatctttgagagctcgaacatcgtctgccgctcccggggagccaggtgactaaacttgtactgcacaaagttcagcacaccctgctcaatattaggtttctcaaatggagggctgcccagggacccctccaccacaggccgggtcatctgca

SEQ ID NO: 4107 - DNA, 373 bp, Homo sapiens
ccaacatggtgaaaccctgtctccagtaaaaatacaaaaaatagctgggtgtggtggtgcatgcctataatcccagctactcaggaggctgaggcaggagaattgcttgaactcgggaagcagaggttgcagtgagccaagattgtgccactggactccagcctgggcgacagggcgagactctgtctcaaaaaaaaaaaaagggaaaagaaaatgtagatttccattgtccaaagtgacagcgggaggatgggtcttgagtttctcaggttggagaagcagctccacgaaggtcctgagcttgggtccactgtacatgggacagctccaaaagaggaaggtcccagcactgcatctagtagtgaggcatcag

SEQ ID NO: 4108 - DNA, 247 bp, Homo sapiens
ccagtgactttatgtctggacctcagtttattcatgtgaaaaatggacatgataacaatagtcattagatggtagggttttgatttgggggctggaagagatgctgtgtatagtgtatgggcctaaagtaggcactccatgcatgagaactagcatcactgttcattaatttttaatttattttaggatggtctagtctatgcagtcgagttctcccaccgctctggccgtgacctcattaacttgg

SEQ ID NO: 4109 - DNA, 305 bp, Homo sapiens
atgatctggatagagaagatgaagttagattactcaaatatctctttactctaatccgtgctggaatgacagaagaggcacaacgactctgtaaacgccgtggtcaagcatggagagctgcaacacttgaaggctggaaactgtaccatgaccctaatgttaatggaggaacagaattagaacctgttgaagggaatccatatagacgcatttggaaaataagttgctggagaatggcagaagatgagctttttaatagatacgagagagcaatttatgcagctttaagtgggaatcttaagcag

SEQ ID NO: 4110 - DNA, 332 bp, Homo sapiens
aaagaactaatttgtaaattatgacacaaaattttattaacaaggaaatatccattaattgactactacagtaaaaactttataatgcttgtatcatgaagaaagaccttccttttccttatatattaattgaactacataggcttgctgtacattttgttattcatgttataagaattctagattccattgcttttgaaatatgtttctttttaggaactaaaagtcaacttatagtttgatttctgttttatttgtactgtgtttctgattttgtgggtttctaaataaaaagatcaaacccaccactttcaatatactgttttctattt

SEQ ID NO: 4111 - DNA, 423 bp, Homo sapiens
  misc_feature (1)...(423): n = g, a, c or t
aaaaaagtanttgcngggtttgtnaagattctttccactttttgncnnattaaatattttataaagtcatatgacatatacatatgatgacttttctgcctttctgcacagttagaaagtcattcangaaagacaatgataccacaaaacaacactcagagaatgcacattccacagcactgacatgtntcatctatggtcctggtctacaacatccgccgnggnctaaacacacactatggctgttattaaacaaaacatcccatttctacttacttnaatcagaaggaggatgaagctgctgctaacatttcgataacatatctgattctatcaagtgaaactacactgaatttaatgggggtactggctgacagatcaaacttaagttntagacagtctngtctaaaataatagaggttt

SEQ ID NO: 4112 - DNA, 318 bp, Homo sapiens
aaaacaatccttaactagctagcaggacatttactttggattctgcataactgcaaactgacatatttgtaaagctaaaaatcagttttaatacatgattaacagaaactctcatcatgctcattactttaactattgccctttcaatcgctatagaaatatcacttaatccaataagcttgatttcaatagtccaggaagaaaaggtcaaaaaggcacaatgtgaccttagctgacaagaataaccatcctgtctcaagtcttttgtcagtccctggcatgaattacaacattattttcaaaataataaaacatttt

SEQ ID NO: 4113 - DNA, 533 bp, Homo sapiens
ccatcaatttgtcctccatccatgtgcttcagcgccttctcggcttcatctggattctcaaactctacgtacgcatagcctttggacagatggggatgcatcctttccacgggcatgtcaatcattttaattttcccataggtggaaaatatctccatgatgtgatcctttgtcacattccgggtgagtctcccaatgtgcactttggtgggcttaggagatgggctccgccttttcctctccttttcatctcttttaggtggtttggatttggagcgggagcgcctcctgttgtcgtgtctgcgccgagaaggacttggagagccagaagagctgctagagctggagctgcgggaggtgctggagcttcctgagcggctggatgctgaggaagagctggagccactgcttgagccagtgctggtgctggagcctgagctggaagtcgagctggaccgagacctggtactactgctaccactggaagcgctgcgcctctttcgggttttgtcccggccgcgatccttctcact

SEQ ID NO: 4114 - DNA, 133 bp, Homo sapiens
  misc_feature (1)...(323): n = g, a, c or t
gcctncaccttctcanaactgcntagggcgtgagctttgntggtgatgtgacctccanaacanactgtgagcngatttttttctttaatcctgagcctatgcttgctgctgnccttcttgactttcaactagg

SEQ ID NO: 4115 - DNA, 83 bp, Homo sapiens
  misc_feature (1)...(83): n = g, a, c or t
ttttttttttttttttttctggaaggttctcaggtctttatttgctctctcacattccangaattgactnntttnattaatcc

SEQ ID NO: 4116 - DNA, 452 bp, Homo sapiens
ctgagaattaactactgacagtatccagcacttctggaacacgcggtacagctctttggctaatagttctgcagaattgaagtctggctcataagtgacactgaaatgtaagagatgcaaatactggaaaactatattcatgaggagtatgttcagggtcttcctgaggttttcaactgttcttcccagcccccaaaactcagaagaggctgtcatatgagatgacgcatgaatcactcaccaggcatcttactcaacatggctcctgcatgttcaataaataaagcatcttttatttactgagggcgctaagacttagaggtgtggtgaaagagcactggctttagagtcagaagacctgcattcaagccctacttctacctcacagccttcgtgtcccgaagcacatcctatatatgagtctcaatttttatgtctataaaatgaggttt

SEQ ID NO: 4117 - DNA, 375 bp, Homo sapiens
cctaggtgatgtgactctcctgccttggccctgccttcaggaaaaattgtgatgtgactctgggtttattacctagatgatgtgactcttgtgttctgcatgggcaagcccaaaggggtcattgtggcatatctctgggcacatcaaagaagtggtgtaatttttctctcattccaggactctagtctcagtagggattgtgacatatcactgggcccataacctatgtaatgtgattctagtatcctgcttgggccctgcttacaggaaagattgtgacatttggctgggcccatcacctagttaatgcgactctccttttcttcctgtgccctgccctcagtggagattgtgacaaatttctgggccaatcag

SEQ ID NO: 4118 - DNA, 453 bp, Homo sapiens
ctggagtccttctacatccagacgtacccctgagcagaaggctctggtgattggtggagaggcttgtatgtggggagaatatgtggacaacacaaacctggtccccaggctctgagaggaagagagtgggattgctacccacattttaatgaaggtggagctgagccgtagaactctctgggagccatccaacctggctgtggctcataacaaggcccagagcaggggctgttgccggaaggctgtggagcaacaagttgacatctgacctgacatttgcctatgaacgtttgtcacacttccgctgtgagttgctgaggcgaggtgtccaggcccaacccctcaatgtaggcttctgtgagcaggagtttgaacagacctgagccccaggcaccgaggagggtgctggctgtaggtgaatggtagtggagccaggcttccactgcatcctgg

SEQ ID NO: 4119 - DNA, 285 bp, Homo sapiens
aaacatggctcacatcccttttagaaagttatggcagggaagcaagtagagagcaggtggtaaactgaggattggtgcctacattggtacctacagtgggtcctacagtcatttttgtgcggatcaggagatgaggtgaagagaaggaaagcttctcatttgcataatgccttgaaatgaccctaggtttctagcgggcaccgagaaaccagagatgccccttgttgtctgtctgggagatccaaggagacatctggcagtgttgagaagagatgaaggtgacag

SEQ ID NO: 4120 - DNA, 455 bp, Homo sapiens
  misc_feature (1)...(455): n = g, a, c or t
ttacttangatgnttgngatctgccgaccttgctatanatgccatgttaccaatgatttcctgtggtggnggcttgccattgtttactctcttatttaccaacttctggcctaagcatgacagtgggcaccttcccccagccctggctggncccagngcctgtgttctgtgttngaaaggntttatatatatataanatnacatatatatgtagaaatatatgtaattttgggggccctgttccttgcacattttacagttacctcatttttcccatgtatgtatttgagaaaatgctaatatatagagaaaaaaatggttcttaaagcttaaatgtgtggttttttccattccatgggattcacattggtttgtagcatttaacataactagtatgttgnattatatatatgtgnntactgattgaaatttttaacagatttgtacttttttta

SEQ ID NO: 4121 - DNA, 251 bp, Homo sapiens
gttcccgagaggctcctgaaggtggtgaagcgggtcttggtggcagtcaatgtgaagtctgtggctgaggcactgcaggacctgctctttgagcgggatgaagagtacctaatggactgtgactggcggtgggaccctgtgcacaccaaagggtccatagtccgtggcctctattatgaggaggtcagactaaaccgcctgctctgtttggaccctgtggactactttgctgaacctgagtgtgagtttgg

SEQ ID NO: 4122 - DNA, 432 bp, Homo sapiens
aaatattaattttctcttaatttcgtgtttccttgcacataatagcactgcccctaacttcagagatgctgattgcagttaaaaaatcaaaaagaaatgatgtgaatcagaaaataccatgttgtattgaaagcaaatcaaatagtgtaaacaccatcaccagaactctgtgcgaacaagctcccaagaggagggcagcttgtaacttacaaagactgttagagaactcagagcatcagagcataaagcatgtgggatccaaagagacacatttggaattccagtttggggatggtagttgcaagcacctaaacagtttgccaaggaatgtttctcctgagtttgttccttgtgaaggtgaaggaggctttggtttgcacaagaagaaagacctactcagtgataatggttctgaatcacttccgcattcag

SEQ ID NO: 4123 - DNA, 218 bp, Homo sapiens
cctggagtcccgacagccggtctgccaggcacccgcctccgcttcctactgctgcttgcattccgccggctggctgggttccttctgtcaatgaaaaagacaaggcttgtagagagcaaagccagctccattcaccaattagctccaatcaacaatgaaagccaagactgaatgagttcattctcattgaaaaaaatggttactgcaaatatactttt

SEQ ID NO: 4124 - DNA, 295 bp, Homo sapiens
gtcgggattaggtgaaagtacgtagttgtctttcgtaagttaaaatgataattgggccgaaacttactgccttacctaaaaggcagcgcagtcaggatattggtaggtcgggggcggctttggaaacccttaagtttacaagcatgcgcggacttgagtgctcattaggtcgccgggcgtccacgtgcagccctggaccctgaaccccggcgtgcgtgggccgtgggccctcggggaaaggttccgtgcactcggggactccggtgaagcctgttcagccgtctgtgtcatgtgg

SEQ ID NO: 4125 - DNA, 309 bp, Homo sapiens
  misc_feature (1)...(309): n = g, a, c or t
ctgttactcctcagggatttgggatgccccttgggggattcttgggaatgacccatcacaattcctcaatctgcacttttgtgcggagattcccttggtcacttttgaaatgaactcagatgtgtttggagatagctgtgccgtttttgccttctttccctcttgtagggaaaccttcgcttattcccccaagttgctggcaggtgtgctgaaaatttggcaatggactcaaggctganctanaagaggaatttctcatttttgtggttgacaattagggggtggaaaggcaaggcaaaccatctgcag

SEQ ID NO: 4126 - DNA, 321 bp, Homo sapiens
ctggaggtagcatttaacttgctgtcgaatcttctggaagcaatccacgataggaacagttggaatagtatgaatccgacttaatatatccagagctacattgaccagtccttgtttccgggcgatttttccatactggatgatcgctgaagctgatgcatgaaccccaagcatagcgttatttgaactgggatcatgctgagagctattctcataggcagttacaatcgcctggtaatgatgctgcctccacatgaagatgctgctccagtgggacaagtcgtcagacacgatgggcagtcggttcctccaggtcttcac

SEQ ID NO: 4127 - DNA, 577 bp, Homo sapiens
ggagcacggagatctcgccggctttacgttcacctcggtgtctgcagcaccctccgctccctctcctaggcgacgagacccagtggctagaagttcaccatgtctattctcaagatccatgccagggagatctttgactctcgcgggaatcccactgttgaggttgatctcttcacctcaaaaggtctcttcagagctgctgtgcccagtggtgcttcaactggtatctatgaggccctagagctccgggacaatgataagactcgctatatggggaagggtgtctcaaaggctgttgagcacatcaataaaactattgcgcctgccctggttagcaagaaactgaacgtcacagaacaagagaagattgacaaactgatgatcgagatggatggaacagaaaataaatctaagtttggtgcgaacgccattctgggggtgtcccttgccgtctgcaaagctggtgccgttgagaagggggtccccctgtaccgccacatcgctgacttggctggcaactctgaagtcatcctgccagtcccggcgttcaatgtcatcaatggcggttctcatgctg

SEQ ID NO: 4128 - DNA, 586 bp, Homo sapiens
ctgctcaactcgctctgcacagcagtcaaagccatctcttcggcggtgcgcaaggcgggcatcgcgcacctctatggcattgctggttctaccaacgtgacaggtgatcaagttaagaagctggacgtcctctccaacgacctggttatgaacatgttaaagtcatcctttgccacgtgtgttctcgtgtcagaagaagataaacacgccatcatagtggaaccggagaaaaggggtaaatatgtggtctgttttgatccccttgatggatcttccaacatcgattgccttgtgtccgttggaaccatttttggcatctatagaaagaaatcaactgatgagccttctgagaaggatgctctgcaaccaggccggaacctggtggcagccggctacgcactgtatggcagtgccaccatgctggtccttgccatggactgtggggtcaactgcttcatgctggacccggccatcggggagttcattttggtggacaaggatgtgaagataaaaaagaaaggtaaaatctacagccttaacgagggctacgccaaggactttgaccctgccgtcactgagtacatcc

SEQ ID NO: 4129 - DNA, 452 bp, Homo sapiens
ctgcaacagcagagcaaggccagcaagatcctcattgtagactgggacgtgcaccatggcaacggcacccagcaaaccttctaccaagaccccagtgtgctctacatctccctgcatcgccatgacgacggcaacttcttcccggggagtggggctgtggatgaggtaggggctggcagcggtgagggcttcaatgtcaatgtggcctgggctggaggtctggacccccccatgggggatcctgagtacctggctgctttcaggatagtcgtgatgcccatcgcccgagagttctctccagacctagtcctggtgtctgctggatttgatgctgctgagggtcacccggccccactgggtggctaccatgtttctgccaaatgttttggatacatgacgcagcaactgatgaacctggcaggaggcgcagtggtgctggccttggagggtgg

SEQ ID NO: 4130 - DNA, 545 bp, Homo sapiens
ccagggcgactggcggataaggtcttgtgcgtggcctcgaggcttaaaagtagcagtggggctttgtgaaggacaaaatggcgatggcgggccgtgtaggtcccccttcctatgatgaggaccttttcacagacctgtactgagctccgtgaggataaataactctgaggagatgggccctgcaagcctcttgcttagccgtctgttcagaaaatagcgttttcgaaatgccctgagttgacctaatgtcttattgggctcctgtctgcaggatttacgcgcacgttggaaccgaagagagctctgttgttgcagtaagttcttacggccatttcttaatctctgctctttcgttgagtgtgtggaagttgctacggggatgattttacgaactgaactctctctttctgatggattagtggagaaaacagaaaattctgagtagcactgtactgtacgcaacaaatgtcagggccctattgatttgtctgaggtgttagtgaagggtgttattttttcagatgttcagcccacaagagcttact

SEQ ID NO: 4131 - DNA, 580 bp, Homo sapiens
ctgaaaagcatgcttgatatagtagagcatgatctcctcaaacctcacttgccctctgtcacttatttgagattagatggcagcatacctcctggtcagaggcattccattgtttcccggtttaataatgatccatctatagacgttctgttacttaccactcacgttggtggcctgggacttaatttgacaggcgctgacacagtagtatttgtggagcatgactggaatcctatgcgagatctacaagccatggaccgggcccatcgcattgggcagaaacgtgtggttaacgtataccgattgataaccagaggaacattggaagaaaaaataatggggttgcagaaattcaagatgaacatagcgaatactgttattagccaagagaattctagtttgcagagcatggggactgatcagcttcttgatctgtttactcttgataaggatggcaaagcagaaaaagctgacacctctacttctgggaaagcaagtatgaaatcaattcttgaaaacctgagtgatctttgggatcaagagcagtatgattcagagtacagcctggaaaattttatgc

SEQ ID NO: 4132 - DNA, 483 bp, Homo sapiens
aaaaaatctggcttgttacaggcaaattcacttgccacaagctgtccagtctaatcgacaggattccgattcctgaacagtgtcattcgaatcagaatgtcagagctgagtctgctgttctgacttaaggaacaacttgactcagtctcttgatggctggagaatgcacatcctagctgtcactggggctacaggcaggtcagtgagcacgctaaaattttccttctcaattacacttcaaatagcaggcatattactcgtataagatgctatctgatgatactaacctttctgctggtaccctcccactgctcctaaagccacaccttaatatacattctggtgctgtgtactaatgtagttccactgtcaagtcttaacattcttcaaaccagtgtctggggttgatagactatttgtttgacatggcacaatgttttgaattgggtgggaatcttttcccccagttagaaaaacagattt

SEQ ID NO: 4133 - DNA, 409 bp, Homo sapiens
atggtatttcattaaactgttgcatacccagttagcacagtaggtggggagtctgcttcatttctatcattccatttttctgattaaactgtcaaatctgtcattgcatatgccatcgttttctagcaaaatcccatgattggctataaacgttttgtaagaagtcactctccttgaaaatactgaacatagctgtataggtttgtgattattagagaatatgttaataaaacttcttgtaacggctaactgccacctaaaatatgctgggttttctgttgtttgagtgtgttagagaaatttgaatgtttttgtcagttacgagtcagccgtaattagattagtttaaggacaggtcaggattagagaagagttgtttttgtgttttgttaatgtctgagtgattttt

SEQ ID NO: 4134 - DNA, 231 bp, Homo sapiens
cctcccaggaacagaactcggatccgaaaagcccagagaagctagagctgcccctccaacactctcggatccacatggtctgtgttctctagacccccctgcatgttagcggtgttctctctctgtggactgactgtccttctcagtgaacatgtccacccgacagctcctgagtttatatcatctcaaccctcacaacccacagaggctgtgtctcctagtcacagcttt

SEQ ID NO: 4135 - DNA, 541 bp, Homo sapiens
  misc_feature (1)...(541): n = g, a, c or t
ccagtacacccatgaatttgatggagatgaggagttctacgtggacctggagaggaaggagactgcctggcggtggcctgagttcagcaaatttggaggttttgacccgcagggtgcactgagaaacatggctgtggcaaaacacaacttgaacatcatgattaaacgctacaactctaccgctgctaccaatgaggttcctgaggtcacagtgttttccaagtctcccgtgacactgggtcagcccaacaccctcatttgtcttgtggacaacatctttcctcctgtggtcaacatcacatggctgagcaatgggcagtcagtcacagaaggtgtttctgagaccagcttcctctccaagagtgatcattccttcttcaagatcagttacctcaccttcctcccttctgctgatgagatttatgactgcaaggtggagcactggggcctggaccagcctcttctgaaacactgggagcctgagattccagcccctatgtcagagctcacagagactgnggtctgcgccctggggttgtct

SEQ ID NO: 4136 - DNA, 395 bp, Homo sapiens
ccatcagtccccaatttccccgaggtaagataggacgacaaaatgggacaagatatttgaagtgaggtcagtccaatttggatatcatagaagaaaagaaataggatgtgctaggttaagcctgagatggtatctgggaagtcacattcatgatgtgaactgaaagaacacaggtgctacagtgcagaccaaaacccagcctgactcgacccaacagggtcaggtgtggatctgtgagtagtgctcactgagcccccacgagcagtgtctggcagggcaccgctgctccatagtgtgcttttagaacctgccagaggagctccagcaataggaccacgtgccccattcatcggaatcagggtcctatattcactgagttttccatctcaggacag

SEQ ID NO: 4137 - DNA, 292 bp, Homo sapiens; identical to SEQ ID NO: 29

SEQ ID NO: 4138 - DNA, 332 bp, Homo sapiens; identical to SEQ ID NO: 4096

SEQ ID NO: 4139 - DNA, 387 bp, Homo sapiens
ggcgagggcgctggccgagaggtgctcggcttgtagcaggtcccgcactccagcctctcgctgccagggtttgctctctgcttgtcctgggctgaggtgtccatgacggagtcatccaaggaggaaaaaatctgttccgggtgagcccaggccgccccggatatgcgatggctgaggagcagacaccagggaccacactgaggttgggtttcagaccaagatactggattctcctagttaagataaagagctttgggtgcctgacagtgaaaatggtgtaatctgcgttaacagttcacagcttgaaggcatgacaattaaagaacacacatggacttgtggcacatggaaatgtgcgcacagaaaaaggaaatctataattctttt

SEQ ID NO: 4140 - DNA, 417 bp, Homo sapiens
ccagcacatagcgatataactgacgtaaatgctgccagtcttaccaaagactgttcccttttagccaccggagatgattttggtttcgttaagcttttttcatatcctgtcaagggacagcacgcaagattcaagaagtatgtggggcacagtgcacatgtcactaacgtgaggtggctgcacaatgactctgtgctgctcacggtgggcggcgctgacacagccctgatgatctggaccagggagtttgtggggacccaggagagcaagctggtggacagcgaggagtcagacaccgacgtggaagaggatggaggctatgacagcgatgttgctagagaaaaggccattgactacaccaccaagatttatgctgtgagcatcagggaaatggaaggcaccaagccacaccagcag

SEQ ID NO: 4141 - DNA, 481 bp, Homo sapiens
gtgtgcccatctccttgaggaagcccactctatttttggtagcatgacgggccactgagaggtggaaagggcacaagaaccatgagatctcctggaaatgcttccctgggaaggcaatttcatgaatgaggtcttccaagcaaatgacgccaaacttccccaggtgctcctcaatcactgtattgtctgtcagagggatggtcttattcttgaccttggcttgtccacgtttcaaaatgagttctcggacagacttcagatttggaaatccccaggtcacataaggttccactatacgcagcatttttagattctggggggtgacttttacaaagacaccactaaaaattttctttaggcgaagtcttgcaatggttctctgcaccagtaaactcacgccgtcaatcctcaggacttcagcacgtatgcctgaaaaatctcccaacactggtgaacgcctttcacatctttcaggtctcag

SEQ ID NO: 4142 - DNA, 503 bp, Homo sapiens
aaatggtctctacaacaaattgtcacttgttgggttcaattaagtgctcattgtataagtgcacatggtacaaatcaacaccagcttataggattgtggaaagaattaagagatgaatttagtgatcttatataccctgtcagttggtcatattgtggaagagctctacaaaacttactgtactgttaactccaagattttcttccaataacagggatgctagccagatatttaataatcaaagaccaaaaatggcagtttaatttttctacccaatatcctatggcatatgaatgatccaaatttgaagctccaaggataggaaaaagcttacttgtgcctgtcctagacaagtactagagtttatattgaaatcaaaacttctaaaaataaaaatcagtaagattaattttactcatttttctaacacgagtcagtatgcttgaagttttcattgtatttgatgtcatgtaaatttactgtaaaaaataagaaaaaatttt

SEQ ID NO: 4143 - DNA, 304 bp, Homo sapiens
  misc_feature (1)...(304): n = g, a, c or t
cctacagacttatttcttcttggacacacccacggtgcggccacggcggccagtggtcttggtgtgctggcctcggacacgaaggccccagaagtgacgcagccctctatgggcccgaatcttcttcagtcgctccaggtcttcacggagcttgttgtccagaccattggctaggacctggctgtatnttccatccttnacatccttctgtctgttcaagaaccagtctgggatcttgtactggcgtggattctgcataatggtgatcacacgttccacctcatcctcagtgagttctcccgcc

SEQ ID NO: 4144 - DNA, 554 bp, Homo sapiens
  misc_feature (1)...(554): n = g, a, c or t
ccacagcccatgcgaaggcccgcatgagcaagactgtggacctgcaggatgcagaggaagctgtggagttggtccagtatgcttactttaagaaggttctggagaaggagaagaaacgtaagaagcgaagtgaggatgaatcagagacagaagatgaagaggagaaaagccaagaggaccaggagcagaagaggaagagaaggaagactcgccagccagatgccaaagatggggattcatacgacccctatgacttcagtgacacagaggaggaaatgcctcaagtacacactccaaagacggcagactcacaggagaccaaggaatcccagaaagtggagttgagtgaatccaggttgaaggcattcaaggtggccctcttggatgtgttccgggaagctcatgcgcagtcaatcggcatgaatcgcctcacagaatccatcaaccgggacagcgaagagcccttctcttcagttgagatccaggctgctctgagcaagatgcaggatgacaatcaggtcatggngtctgagggcatcatcttcctcatctga

SEQ ID NO: 4145 - DNA, 559 bp, Homo sapiens
  misc_feature (1)...(559): n = g, a, c or t
cctttatatgtaaataacaaaatagtgattttaattcatatagatgtatttgtttatctaagtatgcttttatactctctgctatatttttgtatcaattaagtgtgcctggcagcatgaagaaagtcagtacaacaatggtttctctctgttgtgtaaaactgaagttggaagtgggtaacccgacaatggcacagcagcttcacaagatcctgagggatcagcctcctcctttcgtgctgcctcactaccctcagtccttggcttctgcctcagagtctaagatggctactttagatccaggcaccaagccctcatcattacatcatctcattccaagaaaaaaaaagaagcaatgacaagtattccctctccctgtaaagacaccccctagaagtccaaagtaacatttctctttccattctttgttacgaatgagactggaaaatacagtgtgtatttgggaggctgtatgcctagctaaaaatcaggaggcttattactaactaagaaggaagaatgtgatactgaaggtcaactggcaggntttgccacagtg

SEQ ID NO: 4146 - DNA, 556 bp, Homo sapiens
  misc_feature (1)...(556): n = g, a, c or t
ccacgtttcttgggtttggtggcaatgctgctcgacagagatacgaagacagaatatttgccaacaccattcaaaagaacaggctcctgggtaaacagactggtctgactcctgatatgccgtacttggacccctgcctacccctagacattaaagatgaaatccagcaaaatggacaaaccatatacctacgagggactggagactttgacctgtgtcgagagactatccagcctttcatgaataaaacaaacgagacccagacttccctcaatggggtctaccagcccccaattcacttccagaacagtgaattctatggcttctccgaattctactactgcaccgaggatgtgttacgaatggggggagactacaatgctgctaaatttactaaagctgcaaaggattattgtgcaacaaagtggtccattttgcgggaacgctttgaccgaggactgtacgcctctcatgctgacctccacaggcttaagtatcagtgcttcaaatcggcctggatgtttgaggngtttcataggggcttttcgtttcctgt

SEQ ID NO: 4147 - DNA, 161 bp, Homo sapiens
  misc_feature (1)...(161): n = g, a, c or t
tgatggttactgagtcggcacctatgacagctaanagagctttcttaaagactgcctcagngtcttcttggcttttggcaccttcactccactctgcccangaaatncacaatggcagacnaacctggggntncangtgcacaaangcttcntcanaaagc

SEQ ID NO: 4148 - DNA, 440 bp, Homo sapiens
  misc_feature (1)...(440): n = g, a, c or t
cagtttccatgtatatnnngtctatattatgtttgttattgagaaataggcatttttgggaagaaagaatttggcattttggaaataatcagaaaattaaaaaatgcacacaccactttcccattcttctccccaccccaacccctacccctatcctcaaatgcttagctagtgaaatattaaaatgttgtaatagaaattggagtcaaggtctccttgctgaagagaccatctattttcagagactggaaggagagagaacaaaccaatcaagagtcattggtttgttgcctctattgttttatttctgacctgcgcaaatagcttttgaagtggagatatgctagttcttggcaactaatacttttctgggcatgcattttatgaaataataggtatgtatctgcctcattcttttaggctatgtgtttctctagttt

SEQ ID NO: 4149 - DNA, 174 bp, Homo sapiens
aaataaaatgtttctaactagatttttgatttgtgttcaatattaacacttcttaatttgatatatttgagagtcagacattataattgttaaccttattcatacatacctacattcagaattgaaaggtgttggttaagtcttgaacatcactattctatgcataaaacttgg

SEQ ID NO: 4150 - DNA, 319 bp, Homo sapiens
cttccggcctcgagtctcgctcaggctcggttttaccccggagtctattcgaagggggctgctacgtcagcgcgtctcagcgtaagacggcgctattccgctgtaacagcttccggcgggtcctggatgttgatgtcctgcatctaacgcggtgtaacccccgaagccgagcgagctccggaggaatttcagtatctgctacggtaacttcatcagcccgccaagatggcgatgcaagcggccaagagggcgaacattcgacttccacctgaagtaaatcggatattgtatataagaaatttgccatacaaaatcacag

SEQ ID NO: 4151 - DNA, 544 bp, Homo sapiens
ccaaacagaaagcagctcctgaagccaagaaacagaaagtggaaggcacagaaccgactacggctttcaatctctttgttggaaacctaaactttaacaaatctgctcctgaattaaaaactggtatcagcgatgtttttgctaaaaatgatcttgctgttgtggatgtcagaattggtacgactaggaaatttggttatgtggattttgaatctgctgaagacctggagaaagcgttggaactcactggtttgaaagtctttggcaatgaaattaaactagagaaaccaaaaggaaaagacagtaagaaagagcgagatgcgagaacacttttggctaaaaatctcccttacaaagtcactcaggatgaattgaaagaagtgtttgaagatgctgcggagatcagattagtcagcaaggatgggaaaagtaaagggattgcttatattgaatttaagacagaagctgatgcagagaaaacctttgaagaaaagcagggaacagagatcgatgggcgatctatttccctgtactatactggaga

SEQ ID NO: 4152 - DNA, 557 bp, Homo sapiens
ccacatttgtgaccatcataaaagctaagtggtatttctgtgtagtttccgtctggaactgctttcccattcccgggaacccatagccgggccagccagggtcccgaacacaggcccaaagtttattaaaccccgatcataacctccagcaggcatttcatttaatactgagcttagttcctgctgggtaaggcattccgaggtaaccagggccctctgggcaccccctcaaaagccagctcttcgagggtgagtactccttgtttctactgtgagtcgcgtcttgattttccctttctttgatgtctcagtgtgtgtcccaaacacctgcatctcatggactgtttgtgcccatgcccagttcctggcatgccaggccctgggctcaggtgcacaactgactctctttttcactccctaggggaaccccctcggaaggggaagggttgggtgctgacgggcaggagcacaaagaagacacattcgatgtgttccgacagaggatgatgcagatgtacagacacaagcgggccaacaaataggtatgttcacaggcc

SEQ ID NO: 4153 - DNA, 430 bp, Homo sapiens
aaattatgaaaactaaggcttttgtgactgtttagcttcctgctttcttaagctacctgatgggttctgtatcctttcagactaggccatttaactgatttgtggcttgaaggaatttcacttccttgggtgctggtaccttattcacagcagatggtcatgcttagaaaaccctgcttcagggtcagtgactgaaaaaccaggggtgccatgccagtgcctttgtcagggctgttttctgcttaaccactttctcagaataatgcagaagaaacccagtccgctaccttttgagtgtgtgggaagataagtaagtgttcaggtgggaatggtagttgcctctcgcatcagggtttgcatggagaaggaagaggtgcacactcctgccacagagattcatgtctttgatgtggcaatgtctctgcgtggt

SEQ ID NO: 4154 - DNA, 437 bp, Homo sapiens
aaatgtgttctatcaaacacctaccttggcttcttccaagcgacccagggctttgagcaggttccccaggtcactgcgaacacagtacaaatcaggattgtactgaagagcagagacgtaagcttgtactgccccttccatgtcacccgctgctaccaaggcggctgccaggttaatatgaccatcgatgaaatcaggtttgagacgcaatgcatgtcgataatgctcaattgcctcctgcaactgccctctttccttgtacacattccccaaattcgaataagcttctgccagaagggggttctgtttaattgccagagtgctaaagtgagcagatctgtccagccttcgacactggaagtgtatagatgaaagtaataaaagcacaccagtattgtctggctcttgtctccagagctgcatgcagtgtctctcag

SEQ ID NO: 4155 - DNA, 147 bp, Homo sapiens
ctgacatattattatatctatgggatgaattaataagcatgtcagattaatatctactgtaacaattagatagtaaattttctttggatattagatataaatatctaagtagaagtaatttcaatatactagtaatgacaaattttt

SEQ ID NO: 4156 - DNA, 475 bp, Homo sapiens
  misc_feature (1)...(475): n = g, a, c or t
ctggtggttaacangtggatcgtcatgttcagtagtttatacattatgtgagaagtaacgttctgattctttttcttacacagaattggcagagggggtcgatttgggaggaaaggtgtggctataaactttgttactgaagaagacaagaggattcttcgtgacattgcgactttctacaatactacagtggaggagatgcccatgaatgtggctgaccttatttaattcctgggatgagagttttggatgcagtgctcgctgttgctgaataggcgatcacaacgtgcattgtgcttctttctttgggaatatttgaatcttgtctcaatgctcataacggatcagaaatacagattttgatagcaaagcgacgttagtcgtgagctcttgtgaggaaagtcattggctttatcctctttagagttagactgttggggtgggtataaaagatggggtctgtaaaatctttctt

SEQ ID NO: 4157 - DNA, 417 bp, Homo sapiens
  misc_feature (1)...(417): n = g, a, c or t
ccatcttcattgagaagncnaaagatggacagattctgcctgtaccaaacgtggttgtacgagacgtggcctgtggcgctaaccacacgctggtcctggactcccagaagcgagtcttctcctggggctttggtggctatggccggctgggccacgcagagcagaaggatgagatggtcccccgcctggtgaagctgtttgacttccctgggcgtggggcttcccagatctatgctggttacacctgctcctttgctgtcagtgaagtgggtggtctgtttttctggggggccaccaacacctcccgtgaatctaccatgtacccaaaagcagtgcaggacctctgcggctggagaatccggagcctggcttgtgggaagagcagcatcattgtggccgccgatgagagcaccatca

SEQ ID NO: 4158 - DNA, 353 bp, Homo sapiens; identical to SEQ ID NO: 327

SEQ ID NO: 4159 - DNA, 143 bp, Homo sapiens
  misc_feature (1)...(143): n = g, a, c or t
aaaattcgtttttgcaataatgacaaatgccctgcacctacccacatgcactcgtgtgagacaaggcccataggtatggccccccccttccccctcccantactagttaattntgantaattgnattgncagaaaagtgatta

SEQ ID NO: 4160 - DNA, 318 bp, Homo sapiens
cctgcagagctgctgaggagtttgtcaatgtctactacaccaccatggataagcggcggcgtttgctgtcccgcctgtacatgggcacagccaccctggtctggaatggcaatgctgtttcaggacaagaatccttgagtgagttttttgaaatgttgccttccagcgagttccaaatcagcgtggtagactgccagcctgttcatgatgaagccacaccaagccagaccacggtccttgttgtcatctgtggatcagtgaagtttgaggggaacaaacaacgggacttcaaccagaacttcatcctgaccgcccagg

SEQ ID NO: 4161 - DNA, 397 bp, Homo sapiens
  misc_feature (1)...(397): n = g, a, c or t
ccatctttggttcaagaggctacaactgaggccttgaagctttgcttttgtccactggctgttcttttacaagctttgttacaattcaaacgcaaaatgggggcaagagagacacggcgtcttttggaaagagtggtatatcagcctgggtatnccaaatctattgcatcaactgcacgttggtacctactgagacacttatatgccaaanatgactatgagcttattgacgtgctggtaaacannntgccaaaactcatggagatacaagagcattggaactgaatcagagattgtcctcacaataacattggattattttatagtaaggaagcaaagaaaaagctgtaagaatgaagcaatgaatcaagacttctacccaaagcaacattttttt

SEQ ID NO: 4162 - DNA, 566 bp, Homo sapiens
ctgaatgagcacccagaggcatgaagataacctggagcctatttcctggcaatgcaaattgtggctgctgcataactacaaattgtgtatcaagaaactacatagtttcaaggcttaaaaattacccagatttgggggagtatgggtggtgagaaaaggctgaaaggaatggacagagcatgtagacaaaggaagggaaaggaaaaggagacagtttcctgatttcatagcaactcaaagataacatgacccaatgacaggaaaatggagaacgtataaaaagcatccaaatcccctaaacaagatgacttctcctagctagcaggaataatgctactctgaacatacatagttcacaggtaagggaactgacccttcctgaaagggcaaaggcagggtaaggaagaatgggaagagaagaatacaaatgttttttaagatggaattgaaagttgaatataataaaaagcccagtacatctcacctgcagaagagtctacaggcatgttcctaaaggcaaataggactttctatcatatgtatgagaactaaatcaaagcttaaaa

SEQ ID NO: 4163 - DNA, 212 bp, Homo sapiens
  misc_feature (1)...(212): n = g, a, c or t
ctgaaaagatctgtnttnaattctgcaaatctttattgagtgccaactatttgctgggcacaggctaggcactgattctgctggttctgagaaacataaatggtaccatagggaggtgtttcctcctaagtggcaggaggatgtttgctgggagttaagtgaaccaattcctcctctgcttacaccacgtgggggtaggtccagaactcagg

SEQ ID NO: 4164 - DNA, 370 bp, Homo sapiens
cagcccacggtctgtactgacgcgccctcgcttcttcctctttctcgactccatcttcgcggtagctgggaccgccgttcagtcgccaatatgcagctctttgtccgcgcccaggagctacacaccttcgaggtgaccggccaggaaacggtcgcccagatcaaggctcatgtagcctcactggagggcattgccccggaagatcaagtcgtgctcctggcaggcgcgcccctggaggatgaagccactctgggccagtgcggggtggaggccctgactaccctggaagtagcaggccgcatgcttggaggtaaagtccatggttccctggcccgtgctggaaaagtgagaggtcagactcctaaggtgg

SEQ ID NO: 4165 - DNA, 438 bp, Homo sapiens
ccacctaagcacacagctaagattacagaaccaggactcgataaattcgagcccaacaaactgaccaacccaggacagagcctagtcatcctgactccctcctccccaggccacacttctaaaggccagtttgctcaccgactctctgagtggtagtagggaggccacgagaggccggagcattaccagttggagccagatggcgaagagttgggcgaggcccagactggcgtatagcacttggcattccttggaagcctggtgaagagaaaaattgcacatcattgagaagtgatgtggaccagaacctaggctgtgcctcagagtggggaagaaggaaaggcaggggagaccaggacaggtatatcctgggctgtcaattactgttccccaccacctaccttgaggtctcccaccttgctgccagcgtggattagg

SEQ ID NO: 4166 - DNA, 461 bp, Homo sapiens
ccaaggtcaagaaacagctccgggacctggaggccaaagtcaaggatcaggaagaagagctggatgagcaggcagggaccatccagatgctggaacaggccaagctgcgtctggagatggagatggagcggatgagacagacccattctaaggagatggagagtcgggatgaggaggtggaggaggcccggcagtcgtgtcagaagaagttaaaacagatggaggtgcagctagaggaagagtatgaggacaagcagaaggttctgcgagagaagcgggagctggagggcaagctcgccaccctcagcgaccaggtgaaccggcgggactttgagtcagagaagcggctgcggaaggacctgaagcgcaccaaggccctgctggcagatgcccagctcatgctggaccacctgaagaacagtgctcccagcaagcgagagattgcccagctcaagaaccag

SEQ ID NO: 4167 - DNA, 521 bp, Homo sapiens
ccactgtccttgcaggtactatgcctggctttcgataatcttttgctcagaaactcatgctcaaaagagttcaggatctctgaggtaaggccaactttatgtgtgctggtgcagaaggctataagctcgcctaccattccctcctcattctgtccatactgaacacaaagctctaccaatttctcaattagagcctcctcgcagtctaggccgaagatctgcagctcctccgccagccaaataccttcaactgagaaatgtcattgagcgactccaggaagctaagcactcggagttatatatgcaggtggatttgggctgtaacttcttcgttgacacagtggtcccagatacttcacgcatctatgtggccctgggatatggttttttcctggagttgacactggcagaagctctcaagttcattgatcgtaagagctctctcctcacagagctcagcaacagcctcaccaaggactccatgaatatcaaagcccatatccacatgttgctagaggggc

SEQ ID NO: 4168 - DNA, 372 bp, Homo sapiens
aaacgtgggagtggggtggggcaggagaaatttccttaaaccagcgtttctgccaatagccacttcctggggaaccatctctacctggatggttgaggtttcaaaactagattccagcaaaatgaagacaaggcaaactatgaactggaaaaagtcagtagaccactcaccgccaagggttgagagtcttaatagaaaagtgtgcttagaagatgacaagcaggaaagcaggctaagcgtatgagtgggcgacctccagtgaagagatgcgaatggtcatccgcacagggaaaaaatatcagcctcacaattgctacatagagcatgtgggagcccatggattcggacagagctcccacacaaggcccaagg

SEQ ID NO: 4169 - DNA, 373 bp, Homo sapiens
  misc_feature (1)...(373): n = g, a, c or t
ccaccctgaccatcaacagggtcgaagccggcgatgaggccgactattactgtcaagtgtgggatcttaataatgaccatgtcgtcttcggcggaggaaccaaactggccgtcctaggtcagcccaaggctgccccctcggtcactctgttcccgccctcctctgaggagcttcaagccaacaaggccacactggtgtgtctcataagtgacttctacccgggagccgtgacagtggcctggaaggcagatagcagccccgtcaaggcgggagtggagaccaccnnacnctccaaacaaagcaacaacaagtacgcggccagcagctatctgagcctgacgcctgagcagtggaagtcccacagaagctacag

SEQ ID NO: 4170 - DNA, 247 bp, Homo sapiens
  misc_feature (1)...(247): n = g, a, c or t
ccagtaaacaaattctaaacctaactgcctattaaaagaggaactagattttcttaagagacagataaacccaattcctccaaggagtttgaggcatggtggtattgttgaggggtgaggagtgggaggaagttgcttttcacaacacctatggaatagttcacttataaatcantctcctgacgtatatggcggcatctcctaaggtgcctagtccctttggacccctgcattaaccactacttaa

SEQ ID NO: 4171 - DNA, 283 bp, Homo sapiens
aaacttgctaaacaattttcctctatcttaaatgctaaagtcaagttgcttttgacttaattcacacaagtttctggatgtataacatttgtccacctagtaattagtcttatacataaaatttcccttagctttaatttggctcctatcagtggggagttttggaattgaatcataactttacattatcgcccttccttcaaaataatgtcattaaccatatgaatgctgaagaactgcatatttgcagagcaattacttctgtgaaagagaaataattttt

SEQ ID NO: 4172 - DNA, 406 bp, Homo sapiens
gcatgcaccacacgtggctaatttttttatttttttgtagagtcagggtctcactgtgttgcccaggctggtctctaactccagggctcaagcaatcctcctgccccagcctcccaaagtgctgagattacaggcatgagccaccgtgcccagcttgtttattcttttattatctcttttctgttggactactagactataagcttcatgaacacaaggatattctactttgtcttaatgtaccttaatacactccatccctaccacagttcctgggatatattaggtgctcagtaaatatttcctgaatgaacatataaattctgtgcatctactgattattaaattgttttgtgatgaaaaggtctgatgaacgatatcataaggtaaatgctgaatttgattt

SEQ ID NO: 4173 - DNA, 547 bp, Homo sapiens
ctgcgtctgtctgaatggtgcgtgaaggctctcagaccttacacaccattttgtaagttatgttttacatgccccgtttttgagactgatctcgatgcaggtggatctccttgagatcctgatagcctgttacaggaatgaagtaaaggtcagttttttttgtgttgattttcacagctttgaggaacatgcataagaaatgtagctgaagtagagggggcgtgagagaagggccaggccggcaggccaaccctcctccaatggaaattcccgtgttgcttcaaactgagacagatgggacttaacaggcaatggggtccacttccccctcttcagcatcccccgtaccccactttctgctgaaagaactgccagcaggtaggaccccagaggcccccaaatgaaagcttgaatttcccctactggctctgcgttttgctgagatctgtaggaaaggatgcttcacaaactgaggtagataatgctatgctgtcgttggtatacatcatgaatttttatgtaaattgctctgcaaagcaaattgata

SEQ ID NO: 4174 - DNA, 355 bp, Homo sapiens
gtggccttgcagggggggatgtcgtggatgagcagggccagcaggaagaccttgaggaaaagctgaaggagtatgtggactgtctcacagacaagaggtacccctggctgccagccaactcctacacccagctccaagtgtgatcaagggagggctggcccatatgaccccccttctcgacctcccccagtgccaagacccggcagggtgctcttgagagcctgcgcctggccctagcgtcccgcctactccccgacttcttgctggagcgccgcctcacgctagccgatgccctggaaaagtgcctcaagaaagggaagggcgagtaacaagccctggctgctgctgtgctagg

SEQ ID NO: 4175 - DNA, 319 bp, Homo sapiens
ctgaaggaagtttccgtggaagaaagaccacccgttagccgagcagctccccagcctgagaaactgcagaagaacaatatcaccaaaaaaaagaaactggttgaggagctggctctagaccacgtgtttggctacagaggtttcgactgtcgaaataacctgcattaccttaatgatggcgctgacatcatcttccacacagcagcggctggcatcgttcagaacctctccacagggagccagagcttctatctggagcacacagatgacatcctctgtctcacagtgaaccagcaccccaagtacagaaacgtggtgg

SEQ ID NO: 4176 - DNA, 443 bp, Homo sapiens
  misc_feature (1)...(443): n = g, a, c or t
ccaaatcttttgggagccccaatagagcttatacacatcaggttgtaaccaggtggtatcgggcccccgagttactatttggagctaggatgtatggtgtaggtgtggacatgtgggctgttggctgtatattancagagttacttctaagggttccttttttgccaggagattcagaccttgatcagctaacaagaatatttgaaactttgggcacaccaactgaggaacagtggccggacatgtgtagtcttccagattatgtgacatttaagagtttccctggaatacctttgcatcacatcttcagtgcancaggagacnacttactagatctcatacaaggcttattcttatttaatccatgtgctcgaattacggccacacaggcactgaaaatgaagtatttcagtaatcggccagggccaacacctggatgtcag

SEQ ID NO: 4177 - DNA, 173 bp, Homo sapiens
ccaggctagtctcgaacccttgacctcaagtgatccacctgccttggcctccctaagtgctgggattacaggcatgagccaccacacctgtccgacagtgtagcaactttctaaaactgaaaaatctcaaaggagatcattggaactgacttgttcatttattttttgttttt

SEQ ID NO: 4178 - DNA, 567 bp, Homo sapiens
ccacaagaaagacctacaaagaccacatgggaggaaaaagaaacatctgtaaagactgaatgcgtggcaggagtaacatctaataaaactgaagttttggaagaaggaacatctaagatgatcacatgtcctacaaaaaaacagctacaaaagcaagtacacatggtaagatgcttgagtgaactttgtagagtttattggcactttgggttccctagtggaaatagtgtggtatgggagtagtcgggaatggcttgaatgtctagataaggcaagcttgggcaacacattttaatagtgtagaaatgagtagatcttattctataggccctggaaaaattcccagaatacttctggctgtaaatattagatgaactaactaacaattgctaaaaccatagaaaccaaagtttttttggtggtacagggatattataggatctcactctgccccccacccccattattagttgtgctatcggcagtgttttgtccatgtctcctttcttggttggctaattagcaacagctccaatcatcatgctaactcaagacaatatctgaagg

SEQ ID NO: 4179 - DNA, 510 bp, Homo sapiens
aaatgtcccttcagttgtaagagacaattgtgtgaagagccagtgtcagaatcgtgtgtgtgctcacatgcgtgcaagttactctagcaggagggaatccaagaagccactgagacatcctcattctgtcccttctgtctaggtgaggtcccagcttgaagagaaagaaaacaagaagttccctgtgtttaaggccgtgtcattcaagagccaggtggtcgcggggacaaactacttcatcaaggtgcacgtcggcgacgaggacttcgtacacctgcgagtgttccaatctctccctcatgaaaacaagcccttgaccttatctaactaccagaccaacaaagccaagcatgatgagctgacctatttctgatcctgactttggacaaggcccttcagccagaagactgacaaagtcatcctccgtctaccagagcgtgcacttgtgatcctaaaataagcttcatctccgggctgtgccccttggggtggaaggggcaggattctgca

SEQ ID NO: 4180 - DNA, 509 bp, Homo sapiens
ctgactgttggatgtgtccattgtcgccagtttggctgttgcccggacaggacaggacctccattgggcgcagcagcaggtggcaggggtgtggcttgaggtgggtggcagcgtctggtcctcctctctggtgctttctgagagggtctctaaagcagagtgtggttggcctgggggaaggcagagcacgtatttctcccctctagtacctctgcatttgcgagtgttccctctggctttctgaaggacagcagactcttgagtatactgcagaggacatgctttatcagtaggtcctgagggctccaggggctcaactgaccaagtaacacagaagttggggtatgtggcctatttgggtcggaaactgcatgtttcagaaagtttgtctctttttcctactcattatttgaagaagagagagcctgtggggatagccttatcttggtccacaggactgaagtgaagtcacttgggaaggggagacagaggatgagcggcgtctgtgt

SEQ ID NO: 4181 - DNA, 503 bp, Homo sapiens
ctgttcagactctagtaggcctcggtttgctgatctatgagcgatactggtttgtgtgtagccaaaaatccctacagaccagtggttgtcaggcgaggaaagttttataccccaggacatatttggcaacacctgagaacctttttgtttggcaccactcaggaagacgcgttactggcattgaggcaagggacagtgctgaacatcccacaatgtacaggacagcctcacagcaaagggtgacctggccccacatgtcagtagtgcagaggttaatccctgctctagagacaacacagggatcatgggacacaagtcactagccctggaccagccactgctcaagaggccacgtgcaatccacggcattcatctgtccctcttcctccactgttcagcacttgtcgtcaatctggaagctgctaagagcctgtctgtcactggcagagaaagagcagaccctgtgccggctgcaaaggccttgagttgcaggaaagtccagg

SEQ ID NO: 4182 - DNA, 526 bp, Homo sapiens
  misc_feature (1)...(526): n = g, a, c or t
gcggtgcgacgaaggagtaggtggtgggatctcaccgtgggtccgattagccttttctctgccttgcttgcttgagcttcggcggaattcgaaatggctggcggtaaggctggaaaggactccggaaaggccaagacaaaggcggtttcccgctcgcagagagccggcttgcagttcccagtgggccgtattcatcgacacctaaaatctaggacgaccagtcatggacgtgtgggcgcgactgccgctgtgtacagcgcagccatcctggagtacctcaccgcagaggtacttgaactggcaggaaatgcatcaaaagacttaaaggtaaagcgtattacccctcgtcacttgcaacttgctattcgtggagatgaagaattggattctctcatcaaggctacaattgctggtggtggtgtcattccacacatccacaaatctctgattgngaagaaaggacaacagangactgtctaaaggatgcctggattccttggtatctcaggactctaaatactctaac

SEQ ID NO: 4183 - DNA, 384 bp, Homo sapiens
aaaattacacatcaagagatgataaaaggaataaagaaatgtacttccggagggtattatagatatgatgatatgttagtggtacccattattgagaatacacctgaggagaaagacctcaaagatagaatggctcatgcaatgaatgaatacccagactcctgtgcagtactggtcagacgtcatggagtatatgtgtggggggaaacatgggagaaggccaaaaccatgtgtgagtgttatgactatttatttgatattgccgtatcaatgaagaaagtaggacttgatccttcacagctcccagttggagaaaatggaattgtctaagccaaaagaaagtctaattatatacagagataaagctaaacgtaattattattt

SEQ ID NO: 4184 - DNA, 338 bp, Homo sapiens
ctgaaagcatgctttgttcatacaggtgtttataaccttggaactcctagggtatttgccaagttatcggaccaagttacagtgtttgaaacaagtcagcagaattccatgcctgccctgatcatcatcagtaatgtgtgacaacttggaaatttgtactgaaatccacaataatcagtttttgctggatgggttttacagcagtatttgatatacctaacttgttatggaggttgattgatatctgatccctgcaaaatactttgacttgtcattttgttgatgatgcaaagcacgttggactgagaatacttaacattctttttctgtatttcttt

SEQ ID NO: 4185 - DNA, 539 bp, Homo sapiens
  misc_feature (1)...(539): n = g, a, c or t
ctgatggagaatagctgaaaggtggaaagactttaccaaggaaggtctatataataggttaccacctaagaaatgaaacaactttctgaaagcccgggaaggagatgctctcctgagctcctcatgctccacaaggaggtcaaaatcaccaccctctttcagccactattttaagtttgaaataaacagcaagcttcctgccaccttgagtcttcctttgatgtgcactccctgcaagcaggtaagcagaggtcatctagattaaataggcacagaactcagatttactttctggacctcagcctctttattttaagtagaaataataatacaatatctaccttagagagttctagtgtgtattgtgctagcatagtgcctgacataaagtagggttcaaaattagaagatattttctgctttctttttctgaccatcatcttccttaatatcaaagccgtgccaccaaaatagtgccaccacagacaaggtaatctctagggtataaagtggggtgatctanagagagtaagcgagcc

SEQ ID NO: 4186 - DNA, 261 bp, Homo sapiens
aaaccatctggtttttaagaaatttggtaccaaaaattgatgagtagaggcaaaaatgccccttcatctttctctatatattttccagttgaaaacaaactaagaagtcctttaagaatttataatccgttccccattaacttaatttagcttttccatcactgttaatgatcagagtaacaaagtgtgaaaaataagaaaccatcattgatgttaattaacacatttagatgggccagttaaaacagcttcataagtttt

SEQ ID NO: 4187 - DNA, 514 bp, Homo sapiens
aaagcagtaagtcttaggtatacttacagtatgtctgtaagtcttatatactcagagaactccagccctgcctccttctagctgtgtgaccttgggcaagtgtctcaaattctctgtgcctcgaattatctgtgtctcaaattatctactctgtgagataaggagaataccacctaactcccaggcatgttgggaggattaaagctttcttacatgctctactgcatgaacagggcccagaagggcatctgtgttaggccccatccaagtgtttctgatctggttgacccccagacccccactgagaagcaccacagtgtgctatcaggtacctgtctaaaccagggcagaggaacgagcacacccctaaccacagccatcaaagggagcggcgactgaaggcaagaagtcatcttctagagactgtatattgtgcactaagtaatacttgtgcactaatgagtaatacacggtcctgggctgtcctgggtacacgcaggcacccagtacacgg

SEQ ID NO: 4188 - DNA, 232 bp, Homo sapiens
aaaaacaaaccttgaaatcagtttctcaagttaaaattctgatggatgtcacaaatagtaaggtcttccttactgagctctgtcatctgttttggcttttatgcatactgtgatttgggaggctgctgctcaacattctagcccatttccagagtgttccattattctaggacatggctgtcatgggagtctgcacaaggcaactaatgctctagatttaactgcctttttt

SEQ ID NO: 4189 - DNA, 457 bp, Homo sapiens
aaaaaactaaagtgactggcactaagtgaacttgagattatcctcagcttcaagttcctaagataagggctttcttaagctttcaggtgtatgtatcctctagatgtagacaataatgtcccatttctaagtcttttccttttgcttctccttaaattgattgtacttccaaatttgctgttatgtttttttcctaatactgtgatctatctgatctgcagacaagaaccttgtctctgttgaagagcatcaaggggagattatgtacacattgaaactgaagtgtggtgttactgacggaatgtgcagtaactcctcagatatctgttaaggcatttcccagatgtgatgccagccttcttacctgtactgaaagatgcttagcttagaaaaaaacaaaacagatgcaaaatcagataattttattttgtttcatgggttttcttatttacttttt

SEQ ID NO: 4190 - DNA, 285 bp, Homo sapiens
cctgggatgcagggagaaaggctgaccacaagttgagacaagatacagaaacaaacaaaaacagcagaaagtccgatcgatggtgtaagtgttgtgttcactgcttagggtgcaggtgagcttgatcgaggctcccagtaaggcagatgtagacgggggctgagtcagcacaggcagagcacagagacctgtggagaaaatgaagggcagtaggtagaaggagacccaggccatggttggagggacttccaagagctctattcgagactgcccagtggaacctgg

SEQ ID NO: 4191 - DNA, 294 bp, Homo sapiens
  misc_feature (1)...(294): n = g, a, c or t
ctgaccaacgagaaggtaggcgatgtggtgctacccccgtgggccagctctcctgaggacttcatccagcagcaccgccaggctctggagtcggagtatgtgtctgcacacctacacgagtggatcgacctcatctttggctacaagcagcgggggccanccgccgaggaggccctcaatgncttctattactgcacctatgagggggctgtagacctggaccatgtgacanatgagcgggaacggaaggctctggagggcattatcagcaactttgggcagactccctgtcag

SEQ ID NO: 4192 - DNA, 478 bp, Homo sapiens
  misc_feature (1)...(478): n = g, a, c or t
tgacaggaaaagcagcaatgacaagattacttaagtcttgtgaaataacacttctcttccttgacctgctgcttcccttttttaccacacacacacgcacacataccacagccctttgagactgaaagcagctctattgagaatagtagtgtcaactgtattatgtanaaattctaaagtttttgggattatttcatagccctgaccttgctacttctctccactttatgtggcaggtttaatctcaggtctccctcatacacttctcagcctcagcacctaaccctcacacaacactccagtattgatgcagtcaatcttgtataacattttttgaatgtccaatgtgcaaagcacgatgttggaaattatacagaggtgaataagacaaaaactcttgctctcaaagatgtcagtctttttctntgcaangataacacatntagagtaaaatncataaaggggacttaattttacc

SEQ ID NO: 4193 - DNA, 147 bp, Homo sapiens
  misc_feature (1)...(147): n = g, a, c or t
gcacgttggaaccgaacagagctctgttgttgcaatgttcancccacaagagcttactggtgaaggaatgggacaagacccatctttatgcaaagccagcgttncagtaatgttccagcatctnataatctatcctggggaattcag

SEQ ID NO: 4194 - DNA, 505 bp, Homo sapiens
aaaaggggtagctcactaaaaatacagcttagcgtaaaaagaaaaaaagacttcagggcaagaggatcctattatctttatgaaaacactgtgcagaaaagtccacagccacttaccctagagtaaagccagctcattaagcagccagcttcctacgctgagaggctctgcctcatcagtcagcccaggcgggaagacttcatgaatgctctgggatggacaccaagctactggaaggggaaatggttttccaagtgtccctgtatgttgctagcagaatggggagaggtctaattcctaatcacatttaccacttaggcccaatggcctggtctgatgagtgagacatctagtgaaatcgatcacagtctgacgcacacactgacaatcatatggaatcatttgaaatgggatctatcacaccatggtccttaatcgttccagtctattgccgcaggaagacacccgccagctcctgctctgggtggggtcaggctggtgagca

SEQ ID NO: 4195 - DNA, 375 bp, Homo sapiens
  misc_feature (1)...(375): n = g, a, c or t
ccattcccccagccttctccatgacgtaggccatggggttgcattcgtacagcagtctcagctttccattggggctcttcttgttagcggggtacagaaatatccctccgtagaccagagtgcgatgaacatcagccaccatggagcccacataccgggtcccataaggagctgaattatctggggggaacttcttcctctggatgtactcagtgacggcagggtcaaagtccttggtgtagccctcgttaaggctgtagattttacctttcttttttatcttcacatccttgtccaccaaaatgaactccccgatggcctttttagacaaggaaggaaaggtggagagatgacnagcgcactgggtcccccagg

SEQ ID NO: 4196 - DNA, 225 bp, Homo sapiens
ccagcagctcgctgatgtcctgcaggcggctcatgttggggaacttctcctggagcagcttcttcatcccgcgactcgcgcccacaggaacaactttgatgctatagtggcggaagtccagctcctgggagtcggggttgtagtcgatgaggaggcagcgcttgatggtgttcaggttcaccttgtgtacgttgatggaggggaacaggttctggaacatggtgg

SEQ ID NO: 4197 - DNA, 248 bp, Homo sapiens
ccatcttctctttcagggacaggctggcctgacatggaaggtgaaacaaggcagcagcccctgcctccaggagaactctgcagactgcagtgccggggagctgaggggtcctgggaaggagctatggagtcccatccagcaggttacagccacatcctctaaatgggcgcgatttgtcctgccacctagaaaaagttcacatgtggacagtgagcagccaaggtctcttcagagggaccccaggccag

SEQ ID NO: 4198 - DNA, 516 bp, Homo sapiens
  misc_feature (1)...(516): n = g, a, c or t
aaaggcaaatctttactccttaaagaaaaaatacaaactgtggtatttttaagagatcgttatattttacataatataaacaaaatcactaatgcatctatatgcttggtttccttaaactacaatgaaccacagaatgggtgaaaatgcatttactttttggtggcaaataaacatactggaaaaaacacgtaacacatagcatgcctttttttccttactgtctacacacaggaactgacataaccaagttttaatagccgccacctcctcttccctgtccaaagtagccagttccataggcccccctaccacctcctcgctggaatcccccagatcctctgtagcctccactaggccctctgtagtctcctccagagttgcctctaaagccacctcgggaaactcctctatagcctccaccaacacctgcaccatatcctgcccgaaaggagttggcgctgccaccatagcctccgntaccatagcctccactgntatagccaccgccatagc

SEQ ID NO: 4199 - DNA, 362 bp, Homo sapiens
  misc_feature (1)...(362): n = g, a, c or t
aaatgtgctgcattttatnacataaaagtagttagtaaaaagatatactactaattttaatttaattttaactaaaataaaagatattttcactagaatgcagaatattcctctgaacacttccctcatacatcattcaatattataaattaaacacaaagagcctctccacttagatttttatcatgcatcctacattgtaatgtctttactcttccatagaaaaggtaaaaaatattgcccacctaacaaaaaagaatgtctcatatctttgatgaagcagcaattgatcacatgctttcacatgtgaatagaatgaaaagcatgaagtaatttgagttgaattacatcattcacttttt

SEQ ID NO: 4200 - DNA, 345 bp, Homo sapiens
aaatataatttaagaacccctccaagcaccggcgtccgtttctgggttccaccaccaactaccgcccttttcactacctcaccccacaccccttcataggacacagcttgggggtcccaggcggggtccggggatgtgggatgaccaaggcactgttctggaaacagacatgatgatgggcccctgtttcaacttgggcaaaggaggccatagtgaaacaggttccctccaacacaaagttatgacaaggacggtagaaaaacaaaacgaagaaacaaaaagggaacggggagaaaaattaagaccaaaaacaaaactcaaaaaccttcaatatgaaggcagcag

SEQ ID NO: 4201 - DNA, 495 bp, Homo sapiens
ctgcactgggagagctgagagcctccatgacagaccccagccagcgtgatgttatatcggcacaggtggcagtgatttctgaaagactgagggctgtcctgggccacaatgaggatgacagcagcgttgagatatcaaagattcagctcagcatcaacacgccgagactggagccacgggaacacatggctgtggacctcctgctgacgtctttctgtcagaacctgatggctgcctccagtgtcgctcccccggagaggtgaaggcgcgggcagctccctgagtggtggggctcctctgggtgccacctcttgctgggccaagtctgcagaccagggactcatgagctcgtctccgcaggagcatgcggcgatgctgagtttcatcaaataggacgcagcagaagttgggaagcactgcagaagatgggttgtcttccagaaagaccactgttttggggaacagctcggctctttcttcggccgctggtggttg

SEQ ID NO: 4202 - DNA, 455 bp, Homo sapiens
ccaacagtgccacctgttgatgacgaagagatgctacacttgagtcctcagccaccacagccccagaggtaatgattgtgacctgaaagacaaaaggaggtcttccattccacctgcagtatactctccctccccacaatccaaataaacatccctccaattaaggtgctgggaacaacccagaagagaatggataaaaccgtatgggtcagattaattagcctgaggctcagagctaagtaaggctgggtttcctcccaacttagagcccaatttaatttagggattttgaatcacagaaggacagagctgtaaaaaattccaaagatattttaatcccctcacttgaaaatggacagaagtccatggaaaagtgatttgcctaaggttgcacaacaaatcagggttgaattgagatttagaaagtgtctcttgacctccattcaactgctttt

SEQ ID NO: 4203 - DNA, 465 bp, Homo sapiens
aaaaaacaaaaaattaaaaattacccaaattccttattagaaaaagagacaattacctggttctacttaggatctgtgtatgttctaagtctttctctcctttagaaaaaaagagataatctgattctattttggatctgtgtacattctaagtctttctctcatttagagaaaaacattctcaagtctatagaagaggaaaaaaaattaagattaggaccaacatttcaagctgccttttggaaagaaaattaaaaacagaggtagatggttaattattagtggccaagttactcaggtgactaattttttcttggtacacattcaccaaaattttatacttgaagccaaatagtaaataactttaggagtagagagtaatacctagcagaagttattttctttatgtcaaagaaaagtaatagaagcaaaccaggcttacgacccctgttaaggagatgattg

SEQ ID NO: 4204 - DNA, 396 bp, Homo sapiens
  misc_feature (1)...(396): n = g, a, c or t
ggcgctccgggcctggaatccctacgcgtccctttgggtttagcacgatgagctcaatcggcactgggtatgacctgtcagcctctacattctctcctgacggaagagtttttcaagttgaatatgctatgaaggctgtggaaaatagtagtacagctattggaatcagatgcaaagatggtgttgtctttggggtagaaaaattagtcctttctaaactttatgaagaaggttccaacaaaagactttttaatgttgatcggcatgttggaatggcagtagcaggtttgttggcagatgctcgttctttagcagacatagcaagagaagaagcttccaacttcagatctaactttggctacaacattccactaaaacatcttgcanacagagtgg

SEQ ID NO: 4205 - DNA, 79 bp, Homo sapiens
ggatcacttgaggtcgggagttcaagaccagcctggtcaatatggtgaagcctcatctctactgaaaaaacaaaaattt

SEQ ID NO: 4206 - DNA, 162 bp, Homo sapiens
  misc_feature (1)...(162): n = g, a, c or t
cttttttttttttttttttnnnttttttgatgtataaanaggtttaattgactcacaattttgcaggctttataggaaacatggcgctnacgtntgttcaccctntcgggaaacctgaggaaggttaaaatgatggtgggaggtgaagggcatgtcacatgg

SEQ ID NO: 4207 - DNA, 523 bp, Homo sapiens
  misc_feature (1)...(523): n = g, a, c or t
aaaaatgtagagtttattcatggagcatgccattgaggtttggatggtggcaggtaaaacagaaaggcaagatgtcatctgacattaggctacttataaataaatgtttatctagcttttatttcatgccctaatgaataaaacatgcttggaaaaagaaagtaacaagaagtagtggtatcatactttgtgggtttttttgggtttttttttttttttttttttttttganacggagtctcgctctgtcacctaggctggagtgcagtggcatgatattggctccctgcaacctccacctcccaggttcaagcaattntcctgctgagcagctgggactacaggngcgcgccactacacccagctagtttttgtatctttagtagagacagagtttcaccatattggctaggttggtctcgaactcctgacctcaggtgacccacccaccttggcctcccaaaatgctgggattacaggcatgagccaccgtgcctggcccatacttntataaattattatc

SEQ ID NO: 4208 - DNA, 420 bp, Homo sapiens
ctgtagcctctgcaagtgaaaatccaggccgacttgcagtcattggactgatgtccaagtgcaatcaccatacagcagctacaggcagggctggctgatagggagtatgggagaaggacacgctcagatgaaaacatgcatgcaacgattttcaccactgaacacactgttttctgtgatagaaactgtcggccctgctgggggacaagatattcacggcctcactagccagtgtgatgccaccagggcagcctgcccctgatgctcctttgttacctgctaaagaaggaccataaggtaaaaggcaccttaccttatggagtgagcccagaccccagggaaaagcttgggtagaacaatccaaggggcagcctgggtgtgagaatccagcccaagctagctgctctagaagcctggagg

SEQ ID NO: 4209 - DNA, 266 bp, Homo sapiens
ccttttgatttgctgtctaattctttagcatctcctcctgctggacttccatttttctgttgtgctacaagtgcattcaaaataatttttgttgccccagaccttggcagagtaacatttgtaagaaatggcaagttatttttcttggcaaatgcctgacttgtttctcgcctcttcctgaggaagcccccttctggaaacaaaacaatccattttcgatctctgctcctgtaattattttctaagtgcttcttgagaagcagcag

SEQ ID NO: 4210 - DNA, 552 bp, Homo sapiens
  misc_feature (1)...(552): n = g, a, c or t
ctggaccagagtgagaagtctgggtggggagggaggctgggaactgtcattgccctcaaacctccagtttgcagaggtctgtggggagctagacatttcttaaggaggtgagtgaagttaggattgcatttggtggaactgagggagattccaattccaactgaagctagaaggaagggcagacagtattcctgaacatgtgggaaatatcaagcttgaacctgttagttgaaggtaatactttagttgctactggtgcaaggtctgccagaggctggaggtggagatggaggcatgagagcagagttgagggtaacactatgggagccagccctgactcttaggctgccctggcctccagcatacactggacctgaggaggaagcatccctggagttcctactgacagactacgaggcagtgtgtggccgcagggcccggctggagcgcgaagtccaaggagccttcctccgcttcatggcctgtctgctcaagggctaccgggtcttnctgcgcccactcacccaggccccctccgagggagctcgtgat

SEQ ID NO: 4211 - DNA, 278 bp, Homo sapiens
aaaaacatctattgcacatctaccatgtaggaggaatgtgctcacactggagaacagaaaaaagttttcaatcttcattacctgcccatgaggggcttagtctagctgggaaggaaagaaagaaccaatcaaaaggagtttagtgccacaggagcacagcaaggagagaccaaactgcccaggattcaaggaggatcatccagagatctgtcagggggtttcctctaggtccccttcgtttgtctagaaggccacacaaataaagaaattagattttt

SEQ ID NO: 4212 - DNA, 497 bp, Homo sapiens
ccaggcgagcagggccagcaccaacagcgaaaagtcttggtgacagtgtgtgccctcgatactatgtgacaggaatggctctttacctcctgaacacccatatatacctcagtctaataatgaggaaaaaaaatcttaattcaggggtagaacaaaagacctgaccagcagccaaaactgtcaaggtcaacaaaacaaagtctaagaaaccatcccagcaggcagagcctagagcagcaactaaacgtaatgtggtgctctggacagatcctgggacagacaagggacgtcaggtaaaaattagagaaatccgaataaaatgtgggctttagttaatgaaatatatcaatactggtttattaattgtgacaaatgtcccataccagtgtgagatgctaataataggggaaacagtgtggagtgtatgggaactccagatactgtcttcacaatgttttttgtaaatctaaaactattctaaaataaaagatttgttt

SEQ ID NO: 4213 - DNA, 365 bp, Homo sapiens
aaatctgacttccaagtggcacccctgccgacggtcaaaacgccccctctcctggtgtgtgccctccatccccgcttcctgggggcagccggtttcttgctgtctggacaacagagctctgccaatgccacttatctcgcccgtccaggactttatcaccaactgtcctacttccgactccagcaaaggagcgacagcgagcacgtctgtgcttggctgtgactaacagggcctctgaataaagtgaaaataatcccactttaagctgcaagaggaaagacccacagaaggaaagtccttcacggacggagacccaggatcctgaaatgcagtgcgtcccttcaacgttctgagaataaaaattt

SEQ ID NO: 4214 - DNA, 524 bp, Homo sapiens
aaactaaatatataaatctataatgttaaacatatgttcattaaaagcatagcactttgaaattaactatataaatagctcatatttacacttacagcttttcatttgatcaggtctgaaatctttagcacttaaggaaaatgactatgcataattatacctgaccatgaaaaaaataagtacctcaaatgcatgcatttgcactggtgattctaactgcacaaatctttgtgccatcttgtatataggtattttttacatgggttgacatgcacacaacaccattttcattcagtatgaaccttgaggctgctgccatttttccacttaaccaaaccagcctgaaggtgaacctcgaaacttgtttcataaatctttcaaaagttgttttacatcaatgttaaaatttcaaaatgctgcagggtaatttaatgtataaaatattagtaagaaaaagtatgtattgcatacttagtagaatagatcacaacatacaaattcaattcagtgcatgctttaggtgt

SEQ ID NO: 4215 - DNA, 318 bp, Homo sapiens
  misc_feature (1)...(318): n = g, a, c or t
ttttttttttttttttttttttttngntggaaaccaacattttattgagcactcctgctcctngnaatctattccagtanattcttcnccgngggcatcacatatcacacaggggtgtgaccagcactccccctgctacctgccgtgngggcaggggcaggagtnaatggctnttcctgggcacaggccacagttaaccggngacaattgcaganccataggaattcatnttttaaaaaaaacnaaaactggaataaaaaaaaaacaaaaancctgagtataaaacctcagcagngtnccancactatctnggggttt

SEQ ID NO: 4216 - DNA, 599 bp, Homo sapiens
cctactatcagaaccaaccaatcaaaatgtccacttaactaagcagtgagcttaaaactgaaacttaaaactgtccatttaagtaagcagtgagcgtaaaactgatttacatcctagtgtaacctcattatcttgtgcagacaaacagtttacaaagtgtcaggccaggaccgcattttgagtagcaccggtacagaggaagagctcaatgatgagattctagatgagtacttcccaagctatctgtggtgaaaggccaatttttatttctaaaagaggtctacactgtgtaaataggataaaaatgaattataagaaaaataaaactaaaatataaaacaagtcctaaatttttatttttagcttcagacaaaattactccaattacaataaaagtttctgcttactcccaaataagcagacattctttagttataggaccagaatgagtctatgaactgactttcagtagcaatgttctgggcagtatcctgacgaagtatatgcttaaaattaaggtcaaacagcaaggttacagaagcttagtcctatgagaaattaacaatggaggcatataatatactagttaaccaactgag

SEQ ID NO: 4217 - DNA, 79 bp, Homo sapiens; identical to SEQ ID NO: 4205

SEQ ID NO: 4218 - DNA, 541 bp, Homo sapiens
  misc_feature (1)...(541): n = g, a, c or t
ccaggatggcctccatctcttgacctcgtgatccacccaccttccctcccaaagtactggaattacaggcattagccactgtgcccagccgaggctgtcatttttaaccggctctggatgactctgatgcagccatcctggaccttggctgtggtctggtaactggaacccagtgacgtaatcaggtgccatcgggggtcatgggaaagggggatccccaaggtctgaggtggactaggaagactttctgaagaacctgggtctgttagggcatcagccaatcaaggtacaagtaaatagaggcaaaatgagggtttgaactgtgagcagttggtcctggaaaagaaagaaaccaagagattatggggactcaatgggcttcttaagagagaataagttgaaatcaatgaccagaagaccctgatggaagtggaggagaatcatctcaggcaaactttttgtgtgccagtaacagaaaccctctttgtgtgatcacatgcaaagtataggatatttgcaatatanccatggggaggagtgc

SEQ ID NO: 4219 - DNA, 527 bp, Homo sapiens
  misc_feature (1)...(527): n = g, a, c or t
aaagatacaaaaaatcttgnatttttttttgtgtgtgtttacaagtagtaaatttattttcagaaagccagatttcttatatttgcataggcaatgaccagaaattcactcaataaatagtaagacaatgtaaactttatagaaaaaaaaaaaactcactcctctgaggcagagcccaaccttaggggtagagaggagtactgtaaataaatgttttaggagggaaataattccactcaactttcaacatttcaagtcttaaatccattggcagcatgtatagcaagtgggctaaaaagccagcctccaccaacagtccagcccacactacacatttcctttcgccaataaataccccagcctatgcttttagtaagaatcagcataggtaagcgcatgcttcaatgaaaaatagtcacaagcaaagagaataaaaccttttgtgacaatttcttgaaagctatgcttattaatactatgcagaatatttatatacagcaagaaaaagtttgttgcatttcaacttt

SEQ ID NO: 4220 - DNA, 511 bp, Homo sapiens
aaagcaatgttgtggatgtgtgaagagtttcccctctctctggtggagcaggtcattcccatcattgacctaatggctcgaacgagtgctcattttgcaagactgagagatttcatcaaattggaattcccacctggatttcctgtcaaaatagaaattcccttgtttcatgtcttaaatgcacggattacatttggaaatgttaatggctgtagcactgccgaagaatctgtatctcaaaatgtggaagggacccaggctgattcaggaactttcaggaccagcttcgaatggagggatcagccagacaaacacctatgacgcccagtatgagagggccatccaggagagcctcctcaccagcacagaaggcctgtgccccagcgccctgagcgagacaagccgttttgataatgacttgcagctagccatggagctctctgccaaagagctggaggaatgggagctccggctccaggaggaagaggctgagctccagcaagtcttacag

SEQ ID NO: 4221 - DNA, 458 bp, Homo sapiens
ctgctggataaggatgcctgaactttaatcatctttagcagaactttagctaataggtatcaagtgatcatcacttcttttcctcctccgacagcagatgcaggacaggaaggctgaggactctttctgatactcttctttgctactgcattccttcaggaattcctgcaaatccgtttcaggaaacccattctgttggaatttctttagaaagtacacaatgttgttaccttatttataaggcatgagaaattgctcttttgtcaacaaaccaagcccacctttgctaaaataaaactctcccacattgctagctcagatccaagaactgatatttacaatgatgaatcaatctgtcagtcccagaacaccaaggcagggccactgtgggaacagagaacaatccaaagaaaaacttcagaaagaaagcagagaagagccagggagaggtttttttt

SEQ ID NO: 4222 - DNA, 561 bp, Homo sapiens
  misc_feature (1)...(561): n = g, a, c or t
ccttccctgaccattctctctaatggactgcatccatcattctcagtctaacacatacctcattttcttcatagaactcttcaatatctgaggtgttccaagtatttacttttgtgttatctcccctatcaaaatgaaatcactatacgagcagatacttttttcattgttactatgcacaacacctagaacagtgtctggagcatgtgttacacatatttgctaattgttagaattaacaaacgaattcagtgtgttctaaccagaaactgtaaactccccattttaatatgtagtctcatccatccttctttaccttttaccagggcttggtgtgtactttctaggctggtgaatgagggcctcaacaaggagtacagaaggagaattggaagtgaagttgcacaagccagnggntctatctattctatgatttttccccttgntctcagtataacagaaagttgcctttctgcccactctagctttttttggtcgaagggcangggtatgggtggcaggggtttggagaaagaggggagtcctcatcattttggcaat

SEQ ID NO: 4223 - DNA, 302 bp, Homo sapiens
aaaatgaaaagtgatcaaaagcaggtacattacaccctataccatattatgtatgggaatacatttcatatttctcaattatgatttgccaattttaccttctacattgagcccttctatggtccatgctcatcggctcaccaatggcatacactcaaaggattcctctttatgggtaactatctcaggacctgattttatgagctatgatttggtgcttgcagcatcttcagcactgtgtgtgaaaatgaaggcagtatttttgaatatttttctttgttgcagagataagcaggagtttt

SEQ ID NO: 4224 - DNA, 452 bp, Homo sapiens
  misc_feature (1)...(452): n = g, a, c or t
ctgtgctccattgaanngacttgtgaatcagccagtgtgatggctgcgacactggctaatggtggtttctgcccaattactggtgaaagagtactgagccctgaagcagttcgaaatacattgagtttgatgcattcctgtggcatgtatgacttctcagggcagtttgctttccatgttggtcttcctgcaaaatctggagttgctgggggcattcttttagttgtccccaatgttatgggtatgatgtgctggtctcctcctctggataagatgggcaacagtgttaagggaattcacttttgtcacgatcttgtttctctntgnantttccataactatgataattnnanacactttgcnaaaaaacttgatcctcgaagagaaggtggtgatcaaaggcattcctttggaccattggactatgaaagtctccaacaagaacttgcttt

SEQ ID NO: 4225 - DNA, 387 bp, Homo sapiens
aaagcattagctatgcttcatctgcatgctactatattttagaatctcatttttaggaattactatataaattgattacatattcttttgaagaacctcagtaataggaaatctatggcctctgagagtggatttactttttgataacagtcaaatcctatgactattgtgtaaaggtgaaggacccagctaggcaattctgcttggggttaaaataataataaatgtacctgaaaataaggaggttgacttcttatacagcagctacacaccagctcctcaaacacgcctacctcaggacctttgagcttaatgctctcactttgtggaatctttttatagcatgttctttttcactgatatgagttacaggtcacttaaaaaagg

SEQ ID NO: 4226 - DNA, 233 bp, Homo sapiens
aaattgtttcatatcaaaaaggtcaacatcttcacctggtcctttactcatctgaaaaacatcccaaactttctggtgctgatgaaattgcatataaatgatgtctaacagggcagcatcactgatacttgcacgcttttcctcacacagatggatcaagtgctgaactacagattcctttctctgtcggaaatttacagtctgcagttgattttcagacaaaaaatcccagg

SEQ ID NO: 4227 - DNA, 510 bp, Homo sapiens
cctagggaggccaggcaagaagcagaggacagtacgtctcggctctctgcggagtctggtgaaaccgaccaagatgctggggacgtgggtcctgatcccattcctgactcatactatgggcttcttgggaccttgccctgccaggaagcactgagccacatttgcagcctgcctagtgaggtcctgaggcacgtgtttgccttcctcccggtgggagacctctattggaacctgagcttggtgtgccacttgtggagggagatcatcagtgacccgctgttcattccttggaagaagctgtaccatcgatacctgatgaatgaagagcaagctgtcagcaaagtggacggcatcctgtctaactgtggcatagaaaaggagtcagacctgtgtgtgctgaacctcatacgatacacagccaccactaagtgctctccgagtgtggatcccgagagggtgctgtggagtctgagggaccaccccctcctccccgaggctgaggcgtgtgtg

SEQ ID NO: 4228 - DNA, 438 bp, Homo sapiens
  misc_feature (1)...(438): n = g, a, c or t
ctacaatccnncactaacnntccatgtccagggtaaggatcgagatcgagaagcccacactgccagtgaaaaagctacgtctttactgcataaattagaggaagcaatttcggaacaacggaaccttcaaactataaatactgaattatcgaacacttgccaggcacttcagcagaagacaaggaaactgaagacaacaattgagtcacttcaaaaggagttcattgaaggggaacaccatggcttgctgtttcanagctttttagatgaggaatttcctcactatgattccctgtcctgcgcagatgcaattcaacaacctcttcaagaaaaattgaagcantgttgccacaaactatatggtggtcaagaagcannaatacatcnanacacccctgaccttgaaacatacgtgctggnacacacctntgctggatg

SEQ ID NO: 4229 - DNA, 427 bp, Homo sapiens
cctgcattgaggccaagcacgtgagggtgccccccacccacatgtgggtctgtgtgtgtgcgcgtggcgtgagagcatccccgccttgtgttgggtctgtgccccatggaggagggaggtggggtgtctcccccaagcacagcactcaactcttcacaggacaagtacatggcggacatggacgagcttttttctcaggtggatgagaagaggaaggtgagtgtgtgtcgcttgctgccgatggctggcaggtgctcgtgcagtgccccttttcagcctctgaccgtgtgcccctgtgccacagaagcgagacatccccgactacctgtgtggcaagatcagctttgagctgatgcgggagccgtgcatcacgcccagtggcatcacctacgaccgcaaggacatcgaggagcacctgcaggtgagg

SEQ ID NO: 4230 - DNA, 476 bp, Homo sapiens
ctgggggcgcagccgctgcccttccccggcatggacaagtcgggcgctgctgtctgtgaattctttttgaaagctgcctgcggcaaagggggcatgtgtccgtttcgccacatcagtggtgagaagacagttgtgtgcaaacactggctgcgtggcctatgcaagaaaggggaccagtgtgagttcctgcatgagtatgacatgaccaagatgcccgagtgctacttctactccaagttcggggagtgcagcaacaaggaatgtcccttcctgcacatcgaccccgagtccaagatcaaggactgtccttggtatgaccgtggcttctgcaagcacggtcccctctgcaggcaccggcacacacggagagtcatctgtgtgaattacctcgtgggattctgcccggaggggccctcgtgtaaattcatgcaccctcgatttgaactgcccatgggaaccaccgagcagcccccact

SEQ ID NO: 4231 - DNA, 258 bp, Homo sapiens
cctgggatgcagggagaaaggctgaccacaagttgagacaagatacagaaacaaacaaaaacagcagaaagtccgatcgatggtgtaagtgttgtgttcactgcttagggtgcaggtgagcttgatcgaggctcccagtaaggcagatgtagacgggggctgagtcagcacaggcagagcacagagacctgtggagaaaatgaagggcagtaggtagaaggagacccaggccatggttggagggacttccaagagctc

SEQ ID NO: 4232 - DNA, 254 bp, Homo sapiens
  misc_feature (1)...(254): n = g, a, c or t
aaagtattggtgtttggagggaggcttataggaggaaagttggcttttagaagatcacatcaaggtaagcaactagttctatattctttttttgctgttgcttangaaaattttaattttccttttcttctgtagaaagtaaaatatgaattctggatattttgttacaagattatcctagtttttagagagctcaataatactaacacctcatgtatttcangctgcttcaggtctaattcaaccataaattt

SEQ ID NO: 4233 - DNA, 497 bp, Homo sapiens
ctggcttgtgaaatgagacaccttgaccaatatgctttgggtggacggtctcctacatgttcagtggaggccaccaggagcatccatgagcggggaaggggtccacacccttacatggcaagttgatacgatggggtgcttggtggatgggccatggaggtccgtgagctggaactgggcacacgccatcccagagggctcaggatgccccaggaaggaaagaagggcaacagactacacgattggacgtgtgtggttgactgggatgaagttggagggaggggcagggccttgcaggggattggtactgatcccagggaggaagtgttggggcttcatgaactaggatgaaaggaggcccctgagccatgacaaggggcacatccaggatttccgccaccctgaatttagtagagctagtaggccctggtcgtcactctgggcagggatgccgtcagccttgagggtcgccacccacctgtgtgttgccctctgtc

SEQ ID NO: 4234 - DNA, 366 bp, Homo sapiens
aaaggccgagaactggaaacagcctttcctccattttctgtgtattggtgatgggagtgataaccttttgggggagctttctaaatctcacagaagaggaaagtggcctgctctggcaggtatgtgcaagatacagtgtgtttcatctgttccggtgccaagaatgagcactgtactgtggcagttccctttggatttgtatgtgctctgggctcatgaagatattgcatcgtgagctgcagcagttgcactctttttcagtgacctaaaaatggcttatttccgaggaatgaaaggctgccatcattggctgtgggtgtgaaaaacctttcctagcttagagcatttgtatctacaatacatttt

SEQ ID NO: 4235 - DNA, 456 bp, Homo sapiens
cctcacactttcccatgaaaagggtgaatgtatataacctgagccctctccattcagagttgttctcccatctctgagcaatgggatgttctgttccgcttttatgatatccatcacatcttatcttgatctttgctcccagtggattgtacagtgatgacttttaagccccacggccctgaaataaaatccttccaagggcattggaagctcactccacctgaaccatggcttttcatgcttccaagtgtcagggccttgcccagatagacagggctgactctgctgccccaacctttcaaggaggaaaccagacacctgagacaggagcctgtatgcagcccagtgcagccttgcagaggacaaggctggaggcatttgtcatcactacagatatgcaactaaaatagacgtggagcaagagaaatgcattcccaccgaggccgcttttttagg

SEQ ID NO: 4236 - DNA, 408 bp, Homo sapiens
  misc_feature (1)...(408): n = g, a, c or t
ccagaggggccgtaanactggtacaagtttacaccataagaggcgacgtggtcagccacaatgtcttcacctccacaggggctcatcacggtggtcagggcaagggtccccagcatcagagctttgtttaggatcatcctcttcccaaggcagtcttagcagttgctgttctgagttgtagagcaattgtgaggacctcgagacaaggcaatctgaagacacccaaaccaaaccctgccaagtcaggttttggctaattagaaaaatcccctatgatgacacctcagttactagttgaagagtttgtattaagagccctggaaggagacagggcaatccccttgttgtgatgcagcctccactcagagtggacttgaggaaaatgttctagggatctctgctggtggt

SEQ ID NO: 4237 - DNA, 558 bp, Homo sapiens
aaaacataattcttgaaaggtatatgtacaggtatatatgaactcaaagcatgagaaatacaaagtatcaaataaaataaaaagagacagagagagtgatatttaccctccctaagtagaaaagtataaagctgtacctacctgataggaaataaccaacaaagagaggttttgccctccaaatggtatcatgttggggctctgtagcttttctttgcctttttttttgtcaaaaataatggaatggagaggctggaaaattgagaagagcagaaagagaaaattctcgtaggtctattgaaaagaaagttgaataaggagtgatttcaagagctaaggctcacacagcaagcagctaagagggactgcaaaggcttttgacaccaaggtggcctcaggtgaagagcaagtcccatatggatcccactgtcactggagtctctgcatacagtttcggttggaataaactgggaaagaaaaatgttagggatgcatagggaaagtgctaagaggaagaaaggagtgaggaaagctcaggctggctgtccaggcagacct

SEQ ID NO: 4238 - DNA, 370 bp, Homo sapiens
  misc_feature (1)...(370): n = g, a, c or t
aaactatgaaggttgagaacacctgaagttttagtgttgaaatgaancatanacatactgcnaagttaattcaacatatcatttatttgaaacattattgtggtgttcatggtgattanaccatattgttaaacaatctanatgcnttttnatagttaaattgagcatttctgcnnaaatagaaagtcaaatgcctnatgtcttcacttataagtgggagctaaataatgtgtncacattganananattgtggagnaatanactntggagactcngaaaggtngnagggtgggattgagagatgagaaattgcctaatggctacnatgtacactatttgggtgangcttacgctaaaagcccaaacttc

SEQ ID NO: 4239 - DNA, 301 bp, Homo sapiens
  misc_feature (1)...(301): n = g, a, c or t
ctggggatggtccccaaggttctggggaagcagctagaactggtgactctggagatgaggctgaaggtggccccaatgtttccgggaaatgagactgcttctggggtttgggattactaanagtancctttactgactcaggagatacaggggcaggtttctgtggttctgganaaggaacaggggcaagtttctgagactcacaaacagggactgattttgggggttcaggagaagaaacagaggcaggttttgaaggctcanganaaggaagaggtgtctgtagctcangagaaacaac

SEQ ID NO: 4240 - DNA, 367 bp, Homo sapiens
aaatggagctaagtccaagaaagtacttgaagctctcttccagcgagcttaattgcgtaatccctgttgtcctccagggtaagctgacacgtctacataactggttttccacaggcatcttcagttattgcttgtcgggtggactgttttggatttaaccatgtaatccatgggaccaattgagagtcagctacttttataggcatcaaagtattctcagacacctttaatatctttatgaaaacttaatttttggccttttatcaatatgtcataacagcattctgaagtcagacattgttaaattgagctattaaactaatgagttttatgtaagttatatggtcttaatttggtacttgtaaat

SEQ ID NO: 4241 - DNA, 373 bp, Homo sapiens
tttctagaatttggtgcaggaatatgtgttcatatccaggcaaacgggtgtgtttttatcttcagacaatgaaaccttctcctctggggctttgttgccaggaagattagaactaaatttatttttttcatttctgtcatgaaatcattccagatacctcttttcttctttccaaatggttttcacatgtgtttgaaatatttgtactttgaattgtcggattttccatgtcctcctttctcctttgtgcccagcctgagtcagcaccatcccgcattcagaacctcccagtgaaagggcagccttcattttgagaaggtggaaggtgttagggtttgggagacagctcatccaatctcccaagtctcatggt

SEQ ID NO: 4242 - DNA, 206 bp, Homo sapiens
aaatccagcagccaagtggtttcaacagactttctacttgaggtgaaaataataacactacaaacatatggcagagcttcgtacaagcatttcactcacagaggagtttatggtttcgaggatgtaggaaaagattttccaagtgtgaaaactaaatatatacaaaagcaatacattttgttattagttaaataaaatgtgtcttt

SEQ ID NO: 4243 - DNA, 368 bp, Homo sapiens
  misc_feature (1)...(368): n = g, a, c or t
ccatgtggtgagttcagggcccaaatcaagtagtaccagcaatcagggaactcctatctgttttgaatggattcacaccagccacaagcctggaaagatggtgtcacaatctacagtcaggcaggattctcctgtggagccctgggaagggatcancgatcactctggcattattgatggttcgcccagactcctgaacactgaccatcctccttgccaattagacatcaggctcatgaggcacaaagctgtctggattaacccccaggatgtgcagcaacagccgcaggacttgcaatctcaggtgccagcagcagggaacagtgggacccattttgtgacagatgctgcctctccctcaggccctt

SEQ ID NO: 4244 - DNA, 190 bp, Homo sapiens
  misc_feature (1)...(190): n = g, a, c or t
cctctattcaaaggcaananactctgggaaatgtaatcttcctctactggaaaaggaaaatgacactgtatgttctatancattnacttattataaggnnagncattganaacaatgaggttgnttngatanatcaaaaagaatnagaaatnccgctgggcgtggtggctcacgcctgtaatcgcaaaac

SEQ ID NO: 4245 - DNA, 373 bp, Homo sapiens
gcaagctggaactctttctgcaaatgactaagatagaaaactgccaaggacaaatgaggagtagttagattttgaaaatattaatcatagaatagttgttgtatgctaagtcactgacccatattatgtacagcatttctgatctttactttgcaagattagtgatactatcccaatacactgctggagaaatcagaatttggagaaataagttgtccaaggcaagaagatagtaaattataagtacaagtgtaatatggacagtatctaacttgaaaagatttcaggcgaaaagaatctggggtttgccagtcagttgctcaaaaggtcaatgaaaaccaaatagtgaagctatcagagaagctaataaatt

SEQ ID NO: 4246 - DNA, 375 bp, Homo sapiens
aaaaagctggatattgtggaagatagtatttatatagcttatggacccaatgggaaagcaactggcgaaggctttgtagagttcagaaatgaggctgactataaggctgctctgtgtcgtcataaacagtacatgggcaatcgctttattcaagttcatccaattactaagaaaggtatgctagaaaagatagatatgattcgaaaaagactgcagaacttcagctatgaccagagggaaatgatactaaatccagagggggatgtcaactctgccaaagtctgtgcccacataacaaatattccattcagcattacaaagatggatgttcttcagttcctagaaggaatcccagtggatgaaaatgctgtacat

SEQ ID NO: 4247 - DNA, 340 bp, Homo sapiens
  misc_feature (1)...(340): n = g, a, c or t
ctgccccaaccactttgagggccttttccgntacaagagtatccctgtggaggacaaccagatggtggagatcagngcctggttccaggaggccataggcttcattggtaagggggcacctctgcccagaaatcccgaggggctncagaggagaggactgggggcacctgtctcctgggctgtgcacattccgtctgacaccactcccccatctcccttgcagactgggtgaagaacagcggaggccgggtgctggtgcactgccaggcgggtatctcgcgctctgccaccatctgtctggcatacctcatgcanagncgccgngtgcggctggacgagg

SEQ ID NO: 4248 - DNA, 178 bp, Homo sapiens
  misc_feature (1)...(178): n = g, a, c or t
aaaattaagtanaacaaaaaacccancgcacctgttagagtcgtcactctctattgtcatggggatcaattttcattaaacttgaagcagtcgtggctttggcagngttttggttcanacacctgttcacagaaaaagcatgatgggaaaatatttcctgacttgagtgttccttttt

SEQ ID NO: 4249 - DNA, 262 bp, Homo sapiens
ctggcttgcctgctggcctgcttcctggagataggatgctcagacccaccgctgctcttcaggggtcgtggaaggaattaatgcacttccttctgtcccccaatctccgtccctttacgtgtctctggagctgagcaggtattctttttctttcttcatctcagtagagcttttacttttatccagcatttcttagctcggttggcaaactggatatttatgcacctgcatttcacaatccatctccaccgattattcctgg

SEQ ID NO: 4250 - DNA, 176 bp, Homo sapiens
  misc_feature (1)...(176): n = g, a, c or t
aaatgggactgnaaatatgttttggtttntaagctatattancaaaatttatttttcaaaaatgcccactgngatgngaatgncanaatatattnttaagtgctttataactanttgtaaactttttttcanaagncttattttatacttgtgaaactgaacacaatnttgggaca

SEQ ID NO: 4251 - DNA, 373 bp, Homo sapiens
cctcaagtttcgggctgaagccaacagagtcccaaccagtgggcgtatcccaagatgaagaattttggaatacatacgagggtctgcaagaacagctcagcaggaatactcataaagagactgagcctgtgtatgagagggctgtgcctactcaacagattctagcttttcctgagcaaacaaacaccaaagactggacagtgacacctgagcacgtcttgcctgagtcccagcattgtttgtgctccccaaacctaaagtgatctcctgtctagagcaaggggaagagccatgggttcaagtatccccggagtttagggatagtgccggaaaatctcctacagggttaaagctcaaaaacgacactgaaaat

SEQ ID NO: 4252 - DNA, 302 bp, Homo sapiens
aaaaacaattcaacacacgtactgaaagttgctggtatacagtggtgagcaaataatagcagaccttcaggagcttatattccaaggacagggatggacattgataggagaatcacacaaacaaaacgcaaagtcacatcaggaagttctgggcagcaccttgcagaggtggtggttggatggaccatctgtagggagtgaagcaggagttacctgagtgattcggggaggaggggcccttcacatgtgcaaaggcccagcgcaggaagtgacgggagaggaaggccggggccaaactgcct

SEQ ID NO: 4253 - DNA, 376 bp, Homo sapiens
ccaaaccagactcttctctggtttgttcttcagaccacgaggtggaaccatctcttcaaaggagccctgccaccatcaccaaagctcacaccagaaaaaaccgccatttacacaacaaactgaacctgaaaaaggaacggaacatggtgcttccgccgtgaacaaaatcagcaagtgaatccgttttcctttcccgggctgttcgaaaaagattcggctagagaaaagggggcactgtgggcagcccgtaggggatggcctggagctgtggggcccgggctgagccctccctgccttttaactgcaggatgtaaactctatggaaatgtatagaacttcagtttctcccaaccctccacaacctcaactcttgaga

SEQ ID NO: 4254 - DNA, 365 bp, Homo sapiens
  misc_feature (1)...(365): n = g, a, c or t
aaagaggttntttatacttttgtatttgaatagntatgtttcactgatgctgagccagtttgtgtgtgtgtgcatatatgtgaactgtaactgacaagatgaattactcagtttctctttctctaaagcttgtntgatgaanctggttggtcctttcagtgaacaaaaatatgaccccaaatctgtttgctctggcttttatttcttcangaagcanacttncacttaaatgccattttgtgattgtgtcaatcatacacattttatttacttcagagtttgaatagagagtacacatttnttctgcagatttatttcatgatgagtttgagttgcttagcagggcgtgtgggtcccgttgaagt

SEQ ID NO: 4255 - DNA, 376 bp, Homo sapiens
aaagccagtgctctaagacctcagcttttatctcagaaccccatgggttccagaccaagagtacaggaaatcaaattgttgtcctgtctgtctatagcttggaacagggagctttgattactgactccggttccacacactgtaagatcaaaaaaccatctccacatttgaaagagatgcaaggtgtattcatagggatggtggctcaacaaatcaagcaaactggaatcaaggggagggggaagggaatgaaatggaaagggaggctgattcccttcccctgacttaccactaatttactaggctacctactttcatgagtaacctctcacagctacccagcacatgccacaatcctatgctcttgccttctttt

SEQ ID NO: 4256 - DNA, 373 bp, Homo sapiens
aaaaattcttttaatagatcatgttattggcagtatttatataaaaaccatggatttagaaaggtatatttagctttattataatagatacgttactattttggaaatatatatattttcacacctgtagtactcttccccatttcctctgacactcatgcagaatgagatcaggcatatttgtggttgacatactctagatagcttttccaacaaatctttgaaaagcaatcttggaaaggaattcattaactaaatggggtaaaaggtttctttttctttgagagttaagtccttcctcaaaaaattttcttatgctccataaaattgaggtagaatattttcattattcttgcagctaagcaagacagcc

SEQ ID NO: 4257 - DNA, 378 bp, Homo sapiens
  misc_feature (1)...(378): n = g, a, c or t
atatggtggaggaaactatggtccaggaggcagtggaggaagtgggggttatggtgggaggagccgatactgagcttcttcctatttgccatgggcttcactgtataaataggagaggatgagagcccagaggtaacagaacagcttcaggttatcnaaatancaatgttaaggaaactcttatctcagtcatgcataaatatgcagtgatatggcagaagacaccagagcagatgcagagagccattttgtgaatggattggattatttaataacattaccttactgnggaggaaggattgtaaaaaaaaatgcctttgagacagtttcttagctttttaattgttgtttctttctagtggtctttgtaagagtgta

SEQ ID NO: 4258 - DNA, 372 bp, Homo sapiens
gatggagctcctattgtctatcatcactggctgcccagaatatttgtacaagtaaactgcactgccctgctgcccctgagcacacggacccgtccgaaccgcggggcagtgtgtcctgctgctccctgctgcggggactgtcctcagggtggtcctcacctctgcttccggcccctgtgtgcaaccctaacaaggccatcttcacggtggatgccaagaccacagagattctgatgtggtggaggccctcagcgaggagcacatggaggccgacggccacgctgcggtggtgtttggcacggtggtggacatcatcagccgtagtggggagaagattccagtgtctgtgtggatgaagaggatgcggcagga

SEQ ID NO: 4259 - DNA, 372 bp, Homo sapiens
  misc_feature (1)...(372): n = g, a, c or t
cttttaggctaagttacaaaattggggaagaggagctcataggtatattttcctaaaaaacagtanagagttgatagcaatttggcagccnaatctttggctattntttagatttcttcctgaagtccaggctccaagaacaagatgtntggagaagatccacttctttctatacccacatgtgcaacccctgggtctccctgttgggggctgtngggtcccttctcatcatgtttgtgatacagngggtgtataccctggttaacatgggtgttgntgccatngtgtatttctacattggccgggccagtccagggcttcaccttggatcancctccaacttcagctttttccggtggatgangnctctct

SEQ ID NO: 4260 - DNA, 376 bp, Homo sapiens
aaaaatgattacccaccaataacaaaattggcaaagtatatcttgaaatatagcttatgctcagacaaaaaaagtactactagcagacttacattaataagtcacagttttgaacagaaacatgtaaatactccaaggttcaaagtaccacatttagaaaatgttttgaattaaaaaagacaaaataagagtaccatggtttttaatactgatgaagcaaagtgtatccctcaacttcaaggtggcaacttgcttcgactgcttatttacagttagggtttttaggacaaaagtaaatttctagggtaaaaaagtcttcaaagagttgcttgcccaaattccatttggctagcaggcaataaggaaacagcaatga

SEQ ID NO: 4261 - DNA, 374 bp, Homo sapiens
aaaattagtcccctttatgcattttactctacatgtgttatccttgcaaagaaaaagactgacatctttgagagcaagagtttttgtcttattcacctctgtataatttccaacatcgtgctttgcacattggacattcaaaaaatgttatacaagattgactgcatcaatactggagtgttgtgtgagggttaggtgctgaggctgagaagtgtatgagggagacctgagattaaacctgccacataaagtggagagaagtagcaaggtcagggctatgaaataatcccaaaaactttagaatttctacataatacagttgacactactattctcaatagagctgctttcagtctcaaagggctgtggtatgt

SEQ ID NO: 4262 - DNA, 371 bp, Homo sapiens
ctgaaggtctgtgcgttctttctctattaggattatttcatccttcaacttggaaacaatcttcttgtcaggttttggtgcattttgaatagaatttagagcttgccttttatattcaagtttctcatttagttctcgcagtttgtttacagcaaaactggcttgttcattgatctgattggtaccatcatccacggcttcctcaccagcctcatctcttgggcccatctcatccttgttggaaatcatctgtgaggcatgtttttcttcctcttttatcaacaatttctcatacaggtcactgacaataaatgaagggtgatacctatcctttagggtctcataaacatcttcctggattttgtagaata

SEQ ID NO: 4263 - DNA, 370 bp, Homo sapiens
  misc_feature (1)...(370): n = g, a, c or t
ccaacatggcgaaacacctgtctctactaaaaatacaaaaattaggccgggcgcannggctcacacctgtaatcccaacactttgggaggccgacccagatgggtggatcacctgaggtcaggagtttgagaccagccttgacaacatggngaaaccccatntctggtagaaatataaaaaattaaccgggcatggtggtggacgcctgtagtcccagctacttgggaggctgaggcanaataatcgcttgaacccaggaggcagaggttgcagtaagccaagatcgtgcctctgcactccaacctgggtgatggagcaagactccatctccaaaaaaataaaaaatacaaaaattagccaggcatggta

SEQ ID NO: 4264 - DNA, 129 bp, Homo sapiens
  misc_feature (1)...(129): n = g, a, c or t
ctgtggatgaacaccgngaacctnanttattgctngatattaaagaagaaatngaagatnaanaaaagacaattgaagattatattgataaaaanatgaatgatgctgattccactncanttgaagcta

SEQ ID NO: 4265 - DNA, 375 bp, Homo sapiens
  misc_feature (1)...(375): n = g, a, c or t
ctggctcgatagtcgtaaatgaagagtgtgtccgaaaagactttgaatccagtatgaatgtagtacaggaaattaaatttaagtctaggatcagagggactgaagactgggctcctcctanatttcaaatcatatttaatattcatccaccactcaagagggaccttgtggtggcagcccagaattttttctgtgccggctgtggaactccagtagagcctaagtttgtgaagcggctccggtactgcgaatacctagggaagtatttctgtgactgctgccactcatatgcanagtcgtgcatncctgcccgaatcctgatgatgngggacttcaagaantactacntcagcaatttctccaaacaaacctgcc

SEQ ID NO: 4266 - DNA, 374 bp, Homo sapiens
tttgcttcttatgtctacaggaaaaagagacctgggcttagagtctgctgctgggaacggatgggatgtacatctctggctctcagagctggctcaccggcctcttccttttttcctccacatccagggcaagctggcctcattttttctgtctagggtggatgccttgagccctcagctccaacaggtaaagggcagggagggagagggagagcccggggatctgagcctggattgtctcttgctgctcctcctctagcttttctgtcctgccttcatatgcccatctgtgtccttcggcctcattgtcccatctcaggtttccctcagagctctctctgatctccatctcttttgggtgtcagtggggctgg

SEQ ID NO: 4267 - DNA, 374 bp, Homo sapiens
ctgggtctctgtccacccctctagggaggcaggactgagggaggctgggcgccccgtccctcctgcacttgctttccttcagtagggccctggcctcagcacaggtaacttcccccctcatttcagctcccagaggtctcttggttagtgcacttgaacccagccacccccaacccagaagctccaaaaagtgccaatgcctgggacccaccctgcagatactgttgtagttggtctgaggcacagcctggacttggggtttttttaaggttctgcatggggttctacctgctgctgtcacctggtctctgcagctctgttccaaagctgcagcctccaggaagccaccctgacttccccccacctaccttccc

SEQ ID NO: 4268 - DNA, 375 bp, Homo sapiens
  misc_feature (1)...(375): n = g, a, c or t
aaatttagattacatttgagtgtgtaatgtagttgagcaaagtcattacgtttataaaatgtggcacattactatgggatagatgtttaatgtataaagaaataatatactcctntaagagtanttaaaaggcattacccaagttacctgnactccanactgagtattacctcatcaatgagcattttagtttattttttcatactttgtaaagctgttttgctaatctagagaaaaggccatacatattttgatttctctattaactgatgtgattacttcaattaaagtaatgtttataaaccacagtcattctttatatctaagttcccttgacccttttatacttataatttctaaggcggataaaagaga

SEQ ID NO: 4269 - DNA, 373 bp, Homo sapiens
aaatattgttaaagaattctcaaaggagtaaggttaatgagcaagattaaaatggcagcagcagatccaattgcgttttctttttcataagcctaaaagcatcgcggtgtgtttcagagctgcttcctctacaaattctgcatccacattgtcatgtccttcaaaaggatacagggcttgattggaggactctatatctgtcagaatttcaatgaagtagttcagaggcagaaattctacactgaacgatgacttgttaatcatagaattccgaggctgtttcttatagttctgaagcagtcgcgtcacgtggttccgcgaaatgatgttagaactcataggatgatcccaaagtctacaaatcttctgccca

SEQ ID NO: 4270 - DNA, 376 bp, Homo sapiens
ccaggctggttttgaactcatgaccttaagcggtctgcctgccttagcctcccaaaatgctgggattacaggcatgagctactatgcctggcctggtttgattttagagatagacaggctctgtgttgccctggctacagtgcagtggctgttcacagctgtgatcatggcacaccgcagccccaaactcaaggtgggctcaagctgtcttcctatctcagccttcctggtagctaggaccacaggcacactccaccacacccagctagttctaggtgttttgagtaagttagacacttggtgagctttgtgtataaaagactcagtgacctgcttagattaaaactagggcagtggaatgaaaaattctcatggg

SEQ ID NO: 4271 - DNA, 324 bp, Homo sapiens
ccaaactttacaggaagaatctcaatggcatattggcagatgaagctgggctgggtaaaacagtgcagatcattgctttttttgcccacctagcttgtaacgaaggtaattggggcccccatcttgttgttgtgagaagttgtaacatactcaagtgggagcttgaattgaaacgttggtgtcccggactcaaaatcctctcatatattggcagccacagagaactcaaagcaaagagacaggagtgggccgaacccaacagcttccacgtctgcatcacgtcctacactcagttcttccggggcctcaccgccttcacacgag

SEQ ID NO: 4272 - DNA, 372 bp, Homo sapiens
  misc_feature (1)...(372): n = g, a, c or t
tagggctgagatgttgggagccatcaatcaggaaagccgggttagtaaagcagttgaagtgatgattcagcacgtagaaaacttgaagaggatgtatgccaaagagcacgctgaattagaagaactgaaacaggttcttctgcagaatgaaaggtctttcaatcctcttgaagatgatgatgactgccaaattaaaaaacgttcagcttctctaaactccaagccatcttctctacnaagagtgactattgcctctttacccanaaatattggaaatgcaggaatggtggctgggatggaaaataatgatcgattcagtanaaggtcaagcagttggcgtattttggggtcaaagcagagtgaacaccgtcc

SEQ ID NO: 4273 - DNA, 359 bp, Homo sapiens
  misc_feature (1)...(359): n = g, a, c or t
ctgtccccggcctgcagctctgggatgaggacagggcgacagggacttccgacctcctctcatagaaaaacgtgggtgctgcaccacccaaagtgaaaggctgaatttggaagtcccttttatcatacacattcagattgcctgtggaaattcagcaaaaatatgacatgcatttccattctatctgccttttaccttctcaaccttaaatcgactttcagttctgtgtcatgttttctcttctttttagaagacttctaatgacttgggaaaatacttttgaaggatgtgaaatggtgtttttgngtctgctgnttgttgagtatcggtattttcagccttggttccctgtggaggag

SEQ ID NO: 4274 - DNA, 364 bp, Homo sapiens
  misc_feature (1)...(364): n = g, a, c or t
ccacccaagaatcatagtagctcttcagttagctatcttgcaatctctgatataattctactatgtgaatagagtgaattccaattcttcatcaaaaagtgctggtggaggttgtcaggtgtgttccagtatagattcccaatccaacggccggcagatgggagagcagcagagatggaaattctgctcagaataagccctctttctcataatacttgtatttctcatgctgagagtagctgtgcacttttggtgtttagagaagaacttctttggaagaatattttctggtcaatttgaccaatgttacatgtaatctgaatttgnctttaagattctttcaacctcttttcttctctcaata

SEQ ID NO: 4275 - DNA, 253 bp, Homo sapiens
cctgggatgcagggagaaaggctgaccacaagttgagacaagatacagaaacaaacaaaaacagcagaaagtccgatcgatggtgtaagtgttgtgttcactgcttagggtgcaggtgagcttgatcgaggctcccagtaaggcagatgtagacgggggctgagtcagcacaggcagagcacagagacctgtggagaaaatgaagggcagtaggtagaaggagacccaggccatggttggagggacttccaag

SEQ ID NO: 4276 - DNA, 375 bp, Homo sapiens
aaaatacatttatttaactcacctgagttaataagctctgaatttcatgaaaattcacaaatgtgaatggcgatcacttaccttcaaacagtcttgtctttcatacctggtcctatgtgtttccactcatccattgtttcagtggtgaacgttcagtggtgaacgctctactatccaggaactgaaccacaacttctcattcaaggagagtggaagaaactagatgcatacttgccctggacatcaggctgtccacctaagatccacatccacaaaatcaggaagtttcccacttctgtgttgccttctccaggagttggtcccatagggtgacactgcatccacagaagcatcaaaagcacctgtgtccctgcc

SEQ ID NO: 4277 - DNA, 308 bp, Homo sapiens
  misc_feature (1)...(308): n = g, a, c or t
gagatgcanaataatgttgacaatantaagttgctgaatcntcangctgcagactggtgatggntaaantgaattgtgtcccanatccactgccagtnaatcttantgagaccccttcttctaaactggaagtcgcataaattaggacattaggggctttgcctggnttntgttgatgccaggccaaccaccgatctatattctgagaggcccnacancttattgnaattgtatctncgacagatgcagacagggtggaaggagatngggtcatctggatgtcacatttggcacctgggagccagagc

SEQ ID NO: 4278 - DNA, 105 bp, Homo sapiens
aaacaaagaggtgacctaaatattttacattttgtaaatcctttggtacaggagataagtgggcacaagtgaggaatgatgtttgtacagcagtgatagtaatgg

SEQ ID NO: 4279 - DNA, 299 bp, Homo sapiens
  misc_feature (1)...(299): n = g, a, c or t
ctgtgagatggagaactgcagcctctgccgctgtggcagtgagaccgtgcgagcctcatccactctgcttttcacactctcctaccctgatggtagcaaaagtggtatacccttcagctcagttgggaaggctccccaaaatgtcctgtaatatcagggagagggtgctggggactaactgtgggtagaggggagaaccaggagtatagcatctaattttccctcanataaaactgggaagaactatgactttgctcaggtgctgaagcgaagcatctgcctggaccagaatacacagg

SEQ ID NO: 4280 - DNA, 337 bp, Homo sapiens
  misc_feature (1)...(337): n = g, a, c or t
ctcttcttcagcacatgccaaagctgttcctcacggcctgtgagacaagagcatcttggatgtaggacaatggaagagttanatgccttattggaggaactggaacgctccacccttcaggacagngatgaatattccaacccagctcctcctcccctggatcagcattccanaaaggagactaaccttgatgagacttcggagatcctttctattcaggataacacaagtcccttgccggcgcanctcgtgtatactatcaatatccaggagctcaatgtctacagtgaagcccaagagccaaaggaatcaccaccaccttctaaaacgtcagcag

SEQ ID NO: 4281 - DNA, 356 bp, Homo sapiens
aaacagcaaaagaccaagaaataaaatttgagtcaattatttttcaaaatattctcaatgcacattatccttaattcccttattatagtgaaacatacaaatacagaaaaataccccatttaacaaatactagtgttaaatggttatttggcttaaaatctgagttaagaaaatcctttttagcaacctacatacagataagtagcaaactttattatattaaacaaattcattctgctaaaacatgtaaagaatttcatccatcatgtattctgatcccagtacaagtgtttattctcttaccgtcacgattcttatatgaaggaccaactcaaagagttgtcctagatataacc

SEQ ID NO: 4282 - DNA, 349 bp, Homo sapiens
  misc_feature (1)...(349): n = g, a, c or t
ccagggggaggaagcagtgcagaagtctcataagccacccgctgccccgacgagtcggaactataccgagatccgggagaagctccgctcgaggctgaccaggcggaaagaggagctgcccatgaaggggggcaccctgggcgggatccctggggagcccgccgtggaccaccgagatgtggatgagctgctggaattcatcaacagcacggagcccaaagtccccaacagcgccagggccgccaagcgggcccggcacaagctgaaaaagaaggaaaaggagaaggcccagttggcagcanaagctctaaagcaggcaaatcgngtttctggaagccgggagccaagg

SEQ ID NO: 4283 - DNA, 328 bp, Homo sapiens
  misc_feature (1)...(328): n = g, a, c or t
ccaggactgcgatttctagcgcgtgtcttcacattctatctctggggaagcaagacaaacaggctctacccatttccctncttttgtctccacaagccancacctaanatcctntgaatttgttcccatccaatcctgcaaacttncaanaagggcagtagataacttttcaaaagaaaaagaaattgcataaggtccctacataatactgaggctgaaacnagaaggggctgtccantgtaaaagcaaggcacttggggcagganccaggcaggtggcctgancagggtccctctcagtgagtcaacagtttgaggcgcgtaaacca

SEQ ID NO: 4284 - DNA, 371 bp, Homo sapiens
aaataacatgttaaatttgatgaattgatgacaaattgttttttggtaaactggtctttcagttgcttgtgcttgggtaagctgccctgcttctcctggtgagtggggtttatagtgaagacgccaggctacccagtggcactgaaagaggtggcaaaaccaattgtttctctcttctcactgcctgggccctgttgctggtgaattcaagttgcctggagactgtctcactggggatctggtgttttcctacaataaaacttctcactccagggtcctctcccatccgaggcatgcgtctagcatatctctaacagtctgtgcatttgtgatttatgcgatttcaaccaaaccttaaggctcttgggcag

SEQ ID NO: 4285 - DNA, 368 bp, Homo sapiens
  misc_feature (1)...(368): n = g, a, c or t
ctgagggcgacagaggatctaggctaacaggagagactccaggagtgggggcagatcccaaggcagcctcctgctccccagtggtgggtgccccagctctacctggtgtggcagggctgaggctccatgtgcatctgtgagcatgcgtgtgacaggtgcanagacgggggactggagggagacttttatacgttttgtacctttgtaaccagagagatgcttatgttatttttcagcttttctgtntcttggggggtttgaggctgggctgggagggggagggagatngaggganagatgcanttngaccccntttgggtcctgagcaaancctatgctnatatctctctccttcctggggtggactc

SEQ ID NO: 4286 - DNA, 363 bp, Homo sapiens
  misc_feature (1)...(363): n = g, a, c or t
gagcanagatcgtgccnctgcactccancctgggcnacngagcgagactccgtctcaaaanaaananaaaaaaagagnncaagaccagcctgaacaacatggtgaaaccctgtctctactaaaaatacaaaaattanccaggcgcggnggcncgcgcttataatcccagctactcaggaggctgaggcagganaattgcttgaacccaggaggcaaaggttgcagtgagttgagatcgcaccactgncctccagcttgggcgacagancgagactncatctaaaaaaaaaaaaaaaatacngaaattanctgcctgtagtcccaactactcaggaggctgaggcagganaatcacttgaaccc

SEQ ID NO: 4287 - DNA, 372 bp, Homo sapiens
  misc_feature (1)...(372): n = g, a, c or t
aaagatatnagcctgtntgactacaaaggaaaatatgttgtgttcttcttttaccctcttgacttcacctttgtgtgccccacggagatcanctgctttcagngatagggcanaanaatttaagaaactcaactgccaagtgattggtgcttctgtggattctcacttctgtcatctancatgggtcaatacacctaanaaacaaggaggactgggacccatgaacattcctttggtatcanacccgaagcgcaccattgctcaggattatggggtcttaaaggctgatgaaggcatctcgttcangggcctttttatcattgatgataagggtnttcttcggcagatcactgtaaatgacctccctgttgg

SEQ ID NO: 4288 - DNA, 140 bp, Homo sapiens
  misc_feature (1)...(140): n = g, a, c or t
ctacatctgananaagcatnttatagttctgcttntggaccagaccatcctgggtttttctctgttctgctgaagggttccctccacgtgtccatcacctcggngaactcttgggagacctgggaagatgctggcctcac

SEQ ID NO: 4289 - DNA, 370 bp, Homo sapiens
cctcttccctgatggccgcgtcttcatggaagtaggagagaagactgtaaaaagcgaaaggcagcagcctggtgtgctgatccggggccacacggaggaggagccgccccagcctgaggtcactctctgtcaactgaaagagtgccagccaggatatcttcctcttctctaaacactcgaggattgctgcacaaacgtggaaagcctttggcaggtctgtggtgctatttgaggtcagatgtgacgacagcaggcccatcaaggagaagaagaaaaggaaaaccaatagctcctctctctcgcagtccagcttctttagctgcttcctgatgttttcttccctgacttgttgaatcgcaaagtgcagtgc

SEQ ID NO: 4290 - DNA, 375 bp, Homo sapiens
aaactggatttgttttgttttgagtttcaagtcccttttcactacaacaccgtccaaaactatctacctatctcttcttttttatccatctgcccgctgtattttaatgtcaatcctaattcagacaaatccgcaacttcatgatactggtaatttataataattcgtgatcattgctgttttgaaggaaaagagatgataaattctcttacggtttcaatcaggtaatggattttgttttacatctagttaggagaagaaaagtaagtgaaggaatcctctgatcatattgatcactatagaagcaaaagccaaatcagttcccttcattatcagtatttctcatgctgtacacaataaatttgttagactgag

SEQ ID NO: 4291 - DNA, 364 bp, Homo sapiens
aaaagtaagaagccacggcaccgctcaaattcattcagtgatgaaagagagttctctggaccttccaccccgacggggacgctggagtttgaaggtggggaagtgtctctggaaggtgggaaagttaaagggaaacacgggaagctgaaattcggtacctttggtggattggggtcaaagagcaaaggtcattatgaggtgactgggagcgatgatgagacaggcaagttacaggggagtggggtgtccctggcctctaagaagtcccgactgtcctcctcttctagcaatgacagtgggaataaggttggcatccagcttcccgaggtggagctgtcagtttccacaaagaaagagtagcagg

SEQ ID NO: 4292 - DNA, 375 bp, Homo sapiens
  misc_feature (1)...(375): n = g, a, c or t
aaaaatctatttatttatcaaaacagtattggcacagnaattctcatattatcatnaaatnataaaattgctactttctgtactcaattctttagaatcctagaaattgcaaangcattcaatttaacaatattgnaaataacaatacaaaagaaagaactctgcatatttatggaaacattgttgatggtacanttctactgaaactcatacacatttcactatttaatttacatatggtcttgttgaaaaaaaccagnatgttttacttttttcaatttccttatgctaaaatacatgtaattctaaaggatatctcttaggtgttataaaaaccaaggaaggtccaccaccaagtcaaagttngagtcaaag

SEQ ID NO: 4293 - DNA, 373 bp, Homo sapiens
  misc_feature (1)...(373): n = g, a, c or t
tgaagatgtgggaggaaaagattgctcaaatgcgatgggaactgatgatgaagacaaaagaacacaccagaaagctttatcagatgaatgatctgtgtattgaaaagaagaaacttgattctnggttgaatacactacagaatcagcagggcaatgccttccagggccctcgggaagcagatgttgtggcaagagaggaggtcactgaattgatccaactccaggcggaaaggatttcggccttaaaggaggagattgctcttttgcgtaggaaaggcggtcttatcctcccacccattcagtctccacgagagaaagagatacagcccgcagacctttgagtttgctattttctcaaacccatacaagattt

SEQ ID NO: 4294 - DNA, 372 bp, Homo sapiens
  misc_feature (1)...(372): n = g, a, c or t
ccaacgtggtgaaaccctgtctctactgaaaatacaaaaattagccaggtgtggtggccgacgcctgtaatcccagctactcangancctgaggcaggaggatcgcttgaacgtgggaggcagaggttgcantgaactgagatcacaccactgcactccagcctgagtgacaagagtgagactccgtctcaacaaaaaaagaaaaagttataatgttttggggacttaaagattactgaagaggggataaaagtnaacactgcttacaaatacctgaacatggagagcacagtcaacacattcatgtggacagnacatgaacggatgtattaatacattacacagcttcttctatctgacctattcctcttg

SEQ ID NO: 4295 - DNA, 369 bp, Homo sapiens
ccacgtagatgaacttgtactgcgcctccgtctgcaccatgcccgagcgctgcgcccgcaccatctggatggtcttctggatgtcaatgtcacagtccaggcccttggtggagatgttctccatgagcatgtcgatgacaatgatggtgcctgtgcggccgatgccggcgctgcagtgcacgatgatgggccctgcgtgaggcagactttcctgccgctggttgatctggtccaggaagctgaggacacccccaggctcactggggaccccatggtcgggccagctcaggtactggtaatgccagatctcccgaatcaggtctccattgtccagcggggagacctgtaaggtacggagtttgtattcgg

SEQ ID NO: 4296 - DNA, 373 bp, Homo sapiens
  misc_feature (1)...(373): n = g, a, c or t
tttttttttttttttttttaagataaggaatgtgtgtttagctttaatgtctattaaataggttggaaaaacaggccaagtgtagggacctgactcctgcaaagggcctaccgcagccctctgcactcaagcagcagccccatccanaccaggagtgtgttctgttctcctggcaggcagggctgataggtgtaggatggcgtctgtttcctttgcagtgtgggctggtcanaggagaaacagcaacttcctgctccttctcactgngtcgttggctcaccatagaccacgtcctgcattccctctgattctctcatggggagagccctggaccttctggtggtgtcccanctgggtgggttcaaggctgcta

SEQ ID NO: 4297 - DNA, 372 bp, Homo sapiens
  misc_feature (1)...(372): n = g, a, c or t
ccagtcacgaacatgttgcaagggtttatgatatggtttgagttgaaggctgaggttttctgaacaaatccatatagtgaaatattgctgagtttcttgagagagacgcattccttccattatctgctgcactgtggtattatttccatgcttcaattcaacagaacgatatgacccatccattctgtatattcgaactttttcatatggtttgttaattgcttccttcaacaattttgcagcttcttcccagttgttttgtttgntttcttcacaaatatttaatggagatcttccttgttggtctgttatatgtctatccgnttctgggtggtttaggagaatctgtactatttcagcatgtcctnctcc

SEQ ID NO: 4298 - DNA, 351 bp, Homo sapiens
ccagcgccagggtgcaggacctgatcgggctcatctgctggcagtatacaagcgaaggacgggagccgaagctcaatgacaatgtcagtgcctactgcctgcatattgctgaggatgatggggaggtggacaccgatttccccccgctggattccaatgagcccattcataagtttggcttcagtactttggccctggttgaaaagtactcatctcctggtctgacatccaaagagtcactctttgttcgaataaatgctgctcatggattctcccttattcaggtggacaacacaaaggttaccatgaaggaaatcttactgaaggcagtgaagcgaagaaaaggatccc

SEQ ID NO: 4299 - DNA, 370 bp, Homo sapiens
gctctgcgttctgtagtggcgctgcttgggcccgtggcggattgtaagctgctggttttgcggctgggaagagcggcgagagggttcggcatttttcgtcgggatccccgcaaggatgagtgctgccagagagtctcacccgcatggggtgaagcgttcagcctccccagacgacgatctgggatctagcaattgggaggcagcagacttgggtaatgaagagagaaaacaaaagttcttgagacttatgggtgcaggaaaaaaagaacatactggtcgtcttgttataggagatcacaaatcaacatctcacttccgaaccggggaagaagacaagaaaattaatgaagaactggagtctcaatatcag

SEQ ID NO: 4300 - DNA, 348 bp, Homo sapiens
  misc_feature (1)...(348): n = g, a, c or t
ccttcagaagttaaacgtgatcacttgtgctgggacagccaatagaggagtctgagatgatcatttccaaggagttcttcacagaggaggtagctttggagctgggctttgaggttgggcagtatttgaaacagtanagacggagcaaagaacccctgggcagaggaaacagtaagtgcaaggcataaagtgaaggtggagggtgttaccgcggggtgcactggttgcattacctcctggtggggtcagtcattcgctttcttttcctcctcaggaccagggctctttgaagatgaagaatgcccacaagggaacacaggcagaagatcagataagccaaagtcacag

SEQ ID NO: 4301 - DNA, 271 bp, Homo sapiens
cctcccagagaaggctggtgaccaggtcccaggcgggcaagactcagccttggtggggcctgaggacagaggaggcccaggagcatcggggagagaggtggagggacaccgggagagccaggagcgtggacacagccagaactcatcacagaggctggcgtccagccccgggtcacgtgcagcaggaacaagcagccactctgggggcaccaggtggagaggcaagacgccaaagagggtgcccgtgttcttgcgaaagcggggctgctgg

SEQ ID NO: 4302 - DNA, 371 bp, Homo sapiens
cctggtcccggctctctaggtccagggacattaaaaagtcagagtcctctgtggggagaaaagtgggtgaggacttgataagccctagtagatacttgtaggcccagttcttatctgcagatgggtgaccctcaacagtcacagagttgttttcactgcccacaaattcacagttttccaggacacacaggggcacgttgtgcaggaagatatgggtgtttttgaaggtacagaacttcacttggcaagtacccgggccatggacctggatgtgcccgttctcaaagttgcagttgtcaaactggacgtgacctgatgttgtcttatacatgatgggtgagaaccaggctggcgtgaagacgaggttgcac

SEQ ID NO: 4303 - DNA, 366 bp, Homo sapiens
cttttgagtcagataaccatcttgaattataggtgattaattttaacctggaacaatagtgtgttcttccaaatgtcatttcttactgaatgaagctgcttgatttatttgcttttgcaggcaaaccctgaagaactgtaaccagttgcatttacaaaatcataataacttggtttacttataactgaaattattcactgggctgtgcttacttttttctttttagattttgtggtggatgcaacccgcaagggtaacaaaattcgttttgcaaatcattcggtaaatccaaactgctatgcaaaaggtaggtacctttgacgtgagaattggaactcccttttcagtcctgtgatgatggacttg

SEQ ID NO: 4304 - DNA, 372 bp, Homo sapiens
ctgaggcataccgtgggaaagtttcccacaggctgattttctgtccatctcaagaacctgtatgttctcttctttccctttccccaggtgccccctgctgaatttagaaaagtaacaatatatcaatcaatttaaaaagggtagaatattttggaatgacgggttgtagtgttttctagagtgctttagttttgacattttatcagtattttccagaggtaaataaattttggaaggattattacttctctgttggggccctagagcaatttagtcttttatggaaaagctgactatctgggatcatatgctcagtttgtatatttgagatctgagagatcacgttctgaagtcttctcatatttagtacac

SEQ ID NO: 4305 - DNA, 222 bp, Homo sapiens
atgaaacagaattctatttgggcaagagatgcgcttatgtatataaagcaaagaacaacacagtcactcctggcggcaaaccaaacaaaaccagagtcatctggggaaaagtaactcgggcccatggaaacagtggcatggttcgtgccaaattccgaagcaatcttcctgctaaggccattggacacagaatccgagtgatgctgtacccctcaaggattt

SEQ ID NO: 4306 - DNA, 194 bp, Homo sapiens
  misc_feature (1)...(194): n = g, a, c or t
aaatattaaaagttaggtactgtaagtgntcttaaaacctgtaaacttnattctgtgggctagtgnnagngggacaaaatattcctaatgaaaggaantaccaattagttgatttgtnggtggcattcccnttttgggaaagcaatgtaaggttatgtctgtgtatgtnattcacacttaggcaagcatacaca

SEQ ID NO: 4307 - DNA, 585 bp, Homo sapiens
cctcggatgatgaagacagtgcccaccacaatgcccacgaggcccacagacaaccccagggcgcagaccacagtctctgtgagctctgacataggggctggaatctcaggctcccagtgtttcagaagaggcttgtccagtccccagtgctccaccttgcagtcataactctcctcagcagaagggaggagggtgaggtaactgatcttgaagaaggaatgatcactcttggagaggaagctggtctcagaaacaccttctgtgactgagtgcccattgctcagccatgtgatgttgaccacaggaggaaagatgttgtccacaagacagatgaggatgctgggctgacccagtgtcacgggagacttggaaaacactgtgacctcaggaacctcattggtagcagcggtagagttggagcgtttaatcagactgttcaagttatgttttaggacagcgatgtttgtcagtgcaaattgcgggtcaaatctaaattgtctgagaacaggcaaacaccagacagtctccttcctccccaggtccacgcagaactgctcatctccatcaaattcatgggtgtactgg

SEQ ID NO: 4308 - DNA, 308 bp, Homo sapiens
ctgctccagcatcttgtcacactcgtccagcacaaagtgcttcacattctttaggctgaagctcctattccgcacgagcgccaggatgcggcccggggtccccaccacgacatggggacagttcttcttcaacacttcttcatccttcttgatggagagaccaccgaagaacacagacaccttgacgctgggcatgtacttggaaaagcgctcatattccttgctgatctggaaggccagctccctcgtgtggcacatgaccaggaccgtcacctgtccgttgacaggctcaatctgctgtagggtgg

SEQ ID NO: 4309 - DNA, 522 bp, Homo sapiens
ctgactgtgaggccatcccacatgcttcatgtctccaaaatatacagacaaggggaagggccacattactgagggcagagaagaagcttaaccctggaatgagaattggaagggacaaatatccaaaccatatcaatgacggcaatgaacgaaggatacttgctcacattgtgtatactgctctttgaaaggatttcaaaaaccaaggtaaattttctaaaatgacctctgttgaacatctgacagcagtacttcctccttcctgaattctttaattccttggctcatgtgacagcatattctcctaattcttctgcttctctgcttctccatttttgttaaatactcctctttggatgttttgttaatcacgtatctttgcattaattttgccttttcaagatatttcattaaaatatgatttattactgagttcttttggtatcccccaaattttgcacctaagccaagtgcatcccctacatcaccctagtcccagccctcttttccattcttcctctt

SEQ ID NO: 4310 - DNA, 318 bp, Homo sapiens
aaagaagttttatgtccctgactctggctaaaattatctaatttccagatgcttttgtagatgactgaagtatttgtgagccacatattgggagttctagatttgagtgaatggcaggaaagggccatctccattgagatgattaagtgaaccaaactagttctcggaattctacagagaaggagggaatcagactgaggaagctgtgacataggacttgaagaccaaagactttgaaatttgcgagctgctcatgtgtgagttattatcactgctgtctttctattgagttacaaatctatatttttattgaagttt

SEQ ID NO: 4311 - DNA, 444 bp, Homo sapiens
  misc_feature (1)...(444): n = g, a, c or t
tttttttttttttttttttttttccaaagtntananaaagaacagngggcccaggggaccagcnctcancntacagaggacccgcgctggccctggtctntgagttccctcagtntttatngatcactatctctaccatctcgganaggaggatgtggccgganaatagggtaatagngggganagggtcancaggaaaacatgtgaacaaanatctctgngtcataaataagtttaaggaaaggtgctgngctttgatgtgcacgtacacaaacatntcagttcattaaanagcagtnttgccgccagcatgtntnacctccagccctaagggggttttctcctatctcagtaaacagaacatacaatcaggttttacaccaanacattccattaccagggacgagcagganacanatgccttcctnttatctgaactgcaaa

SEQ ID NO: 4312 - DNA, 372 bp, Homo sapiens
ctgatgcctcactactagatgcagtgctgggaccttcctcttttggagctgtcccatgtacagtggacccaagctcaggaccttcgtggagctgcttctccaacctgagaaactcaagacccatcctcccgctgtcactttggacaatggaaatctacattttcttttcccttttttttttttgagacagagtctcgctctgtcacccaggctggagtccagtggcacaatcttggctcactgcaacctctgcttcccgagttcaagcaattctcctgcctcagcctcctgagtagctgggattataggcatgcaccaccacacccagctattttttgtatttttactggagacagggtttcaccatgttgg

SEQ ID NO: 4313 - DNA, 332 bp, Homo sapiens
aaaagagctttccattgaagaagaaaacaggaaccaaaaaaaaaaaaaagcaaagagagagagaagacagcagataaatataggcaaatagaggtggaaaatataatcacgtagaatttagtatagtaaaggattatctctgaaaaacaaaaacagaaaactatcagagccaaataaagaaaaatggaaatgactggggaaaaccactcactaatgagttgaatgttcaagagaaactgagaaagagtactgcttatataaaaattatgtgaaattaaacaaaaatgtagtttagtaatgaatggtgtttaagcacttatggaatataaaat

SEQ ID NO: 4314 - DNA, 450 bp, Homo sapiens
ctggttctctcggagcttatatcgggccagcagctctgtcacctcctccttggtcatgacgacgtgctcagggactagctcgtgctccgtgatgttgatgagcagctcctgctgcagaaactgctccaggatgtacttgggggccatgtcgaccagggactgcttggcggagggtgtcatgccctgctgcaccacgatgagagcccgtgtgatgttctcctcctgcatgcgctggcagtacaccttgatggtcttgatgcccaccttgggctcctctggaaagaacacaaacatctggtcggtggggtcatcgttgtgggccaccagcacggtgaggtccgtgcgccgcggccgcccctcactcggcttgtccccaaattgggctttgaactcctccagggtctggtcaagctcgtcctgggtcaccagatagccacggtcgtggcacag

SEQ ID NO: 4315 - DNA, 420 bp, Homo sapiens
ctgtggcctggccgctcccaatgctgggggcttggcttggtgccccatccccttcctgactgagctctatgaaggactcttaaaaaaaataaaataaaatgcaagcaaagtgctttgaaagaagggaggacaccctattcctgctaaggggtagaggaagaaggtgaaggcagctaggtgcccataagagaaggctggcacaatcttcattcccgccagtgtgatttcagtctcaaaagatgagtatttggctgagaaatggaaggatactccaggccccctacggagttgtgctggggccatgctgagctgcccttgcaggcagccctgggtgctgggggcagacatgcaggacactgggaagagtcagaaccacaggtgggagggaatctcagagcccaggctccccactgagcttgg

SEQ ID NO: 4316 - DNA, 502 bp, Homo sapiens
ccttgcctcagatccaaggtcactcggaagaggccatgtctaccctcaatgacactcatggaggaaatgctgagagaagcattcagatgcatgacacaaggtaagactgccaaaaatcttgttcttgctctcctcattttgttatttgttttatttttaggagttttgagagcaaaatgacaacacccagaaattcggtaaatgggactttcccggcagagccaatgaaaggccctattgctatgcaatctggtccaaaaccactcttcaggaggatgtcttcactggtgggccccacgcaaagcttcttcatgagggaatctaagactttgggggctgtccagattatgaatgggctcttccacattgccctggggggtcttctgatgatcccagcagggatctatgcacccatctgtgtgactgtgtggtaccctctctggggaggcattatgtatattatttccggatcactcctggcagcaacggaaaaaaactccag

SEQ ID NO: 4317 - DNA, 365 bp, Homo sapiens
cctgcatccaaatagcaggtgaaggcacctggctgaccatcaatgccttccacattgtattcatcaccagtcacctccacttggccttcatagatcttgtccatgccaaacctattgagaagcctgcgggccagcagcaggccagtacaatatgctgcagcataatttgtcaggccaaccttcacaccatattttggcagttcgtgtgcatacgctgcgcagactatcatatccccctctatacgggcataagcaatctgacaaatgatatctctgtttgtcacacgaactatcatcctgtatttgggtgtgttgtatttatttttatcttgtatcaccaagcgtttccgagcataagaataagg

SEQ ID NO: 4318 - DNA, 409 bp, Homo sapiens
  misc_feature (1)...(409): n = g, a, c or t
cctgaacaaggacctctgccctccctattcagacccttcgttgcctcacctggtcaatacaaccacttcacctntgaccgcaggggcaggggactagatagaatgacctactgagcctcgnctgnctgnctgnctggctggctctctctctctgnttggctctttgngngnctgacaggcgcanactgggtctctaanccttgttctgttctggncccctcantctgggntcttgtcggaacangnttgcccttgggttacgtgggttccatctnctggggaattgggaacaaggggtctgagggaggcacctnctgggagactttanaaggacccagtgccctcggggctgatgctcgggaatcacaganctgggacccaaagccaggatccagacccaaattgaggt

SEQ ID NO: 4319 - DNA, 193 bp, Homo sapiens
aaaaatcttttttccttaaaacaaaaacgattaaaaacttgggttttctaaagaaacttatattaatatgaagttacgaagatacacaaagctgaagtatctggaaccatttggctgcctgtagtcttcagcaagatcacaaagtactcaaaaactctttgaccttttcaaccagactttcatatttgtcttt

SEQ ID NO: 4320 - DNA, 509 bp, Homo sapiens
ccaattatttccaatttttattttattcttaaaacttaagcatggtaaaatgttaagctgttttcatccactgatattattctactataaaaagcccttcttgagcagatttgatgataaaaaggagaacatttctaaggtataattagagaagctgttgcatgagaaatcatgtctccatctccattttgctatgcgttatctgaggattgtttctgaaagagatctatttaggcagtgtatgtatgtgtcagcatgtaaaaagtaaagaactgaaaatagacaaaccttgtaaatgcacttcaaaaccaattgtggctcaagtgtaggtggttccccaaggctggtaccaatgagactggggtttgggaattagttggtcatcatccctcctgctgcccagcagtggtcagtcatttttcatgagggatggactaggaaaatgaagtgtctattataaggagagttcctgtaacttaaggagcaagctcactacaaaacccagctac

SEQ ID NO: 4321 - DNA, 156 bp, Homo sapiens
aaagcttatataactttattcagttgaaaatttattaaaccactagtatatgaaaggaattgaggtaagggctgggaaaaaaaataaggcataattcctgctctcaaagaatttaggatcttgagaaagacagagttcctacagggtggggaatgg

SEQ ID NO: 4322 - DNA, 320 bp, Homo sapiens
ctgtcctcccctcacaccagactggggagttcaggatgtgtggtcttctcttcgactacccagtggtcttggctgttcaaccgtactttctccagaaggatcagctcaatttgctgctcagatatttgggttaagcaaccatttggtatggagcaaactgcgagcaagcattttgaacacatggatttccttgaagcaggctgacaagaaaatcagagaatgtaatttataagaaagaatgccattgaattttttaggggaaaaactacaaatttctaatttagctgaaggaaaatcaagcaagatgaaaaggtaatttt

SEQ ID NO: 4323 - DNA, 308 bp, Homo sapiens; identical to SEQ ID NO: 3350

SEQ ID NO: 4324 - DNA, 335 bp, Homo sapiens
  misc_feature (1)...(335): n = g, a, c or t
aaatcctagcatcagaggtttgttcatatgtagcaggaggtcatctgaagtagcaggtcctccttttttagttttttcttaggggggtgggtgatagatatatggtgtgtcatagtcgtttgggagtctggcatcggaaacctcctttaatgcttggatttgtggttttgcaggtatgggcggagctgccattgccccacccacttctctggtagagaaagacaaagagttaccccgagattttccttatgaagaggactcaagacctcgatcacagtcttccaaagcagccattcctcccccagtgtncgaggaacaagacagaccgagatctc

SEQ ID NO: 4325 - DNA, 451 bp, Homo sapiens
aaaatttatgtatctatgtaagactggtgatagtaaatcttaaaacagtccagtggcaatctgctgctcagttaataattactaaaattcttggatccctgaatagaaattaaaaaaaaaaaaatacaagaggcagtagagtcaatacaagcttaatacaagcttagagtaaatacaagcttagagtcacttgatgactgttttactgttctccatattgtttttatttttaattaggccctaccatagtatttcacactaaaaacaaaggaattatattggctaatatagtctttgactcatttcggtatctcagtaaaagtaaactgtcttttcattgtttcaccagttggtggtgaaaatagcagtatgcatgcattatcactggtgtcacaaactgtaagctttgtaagttagcactttactcctatagctgatgtaatcaaacttt

SEQ ID NO: 4326 - DNA, 215 bp, Homo sapiens
aaaagagcgtgtttcttcggggcttgccgttcgttcgtttccagcctcaggaatttatggtcgcctttttgaatgaggtcacataatgagtatgactcctgaacagcttcaggcttggcggtgggaaagagaaattgatgagagaaatcgcccactttctgatgaggaattagatgctatgttcccagaaggatataaggtacttcctcctccag

SEQ ID NO: 4327 - DNA, 479 bp, Homo sapiens
ctgtaagagctggctgagctccatgacgatggacagtgaagatggctaccagacgtgtgtgtctgaggactccagcaggggtgccttcagtcggcagacgagtacagatgatgagtgctttatccccaaggagggggatgattttctgaggaggtcatcttcaaggaggaaccggagcatcagtaacaccagcagcggatccatgtctcccttgtgggagggcaacttatcaagcatgtttgggaccctgccccggaagagcagaaagggaagtgtccgaaagcaactcttgaaatttatccctggccttcatcgtgctgtggaagaggaagaaagtcgcttttgacggattgtggtgtcctttcaaattagcttatttcacaaatatctctagactcacccagatcccagcttggtgggaaagtgcagaagaattgcaaaactgacatcccatttcacagcaatagtgacctttattt

SEQ ID NO: 4328 - DNA, 411 bp, Homo sapiens
aaagtctcaagtaaaaaattttgaagaagattttatgagacagcagcgaacaattaatatgcaacagtctcaagtagaaaaatacaaaactcttttcgaagaagcaaacaaaaagtatgatggattacagcaacagttgtctccagtagaaagggaattagaaaataaaagaagactgcaaaaacaggctgcaagtagtcaaagtgccacagaggttcgcttgaatagagctctagaagaagcagaaaagtataaactggagataagtaaattaaggcaaaataacaaggacatagcaaatgaagaacacaaaaaaattgaagtgttaaaatcagaaaacaagaagctagaaaaacaaaaaggagaattaatgatagggttcaagaaacagttaaaattaattgatgtttt

SEQ ID NO: 4329 - DNA, 373 bp, Homo sapiens
  misc_feature (1)...(373): n = g, a, c or t
ctgacagaatagcatgttcattttagttttcagcactgaacataagtgggtcaacataaatgtttatacaaaatactgacttcaacaaaatacaaagcactttctttatctttcanaaactgaatatacacagcaagtttttttccaaaatattttcataggcaaaggattaaaaacgattttaattatacacatatggtcacaattttgccttaaaaagattgttgggaaatgtacataaggccgcttgtaaatgtacatcgtgttactgttatgtcttatgtccagaggaaaaaatgttatcatacagatttgctcttacttgggagtaggctattcaaaaatacagtactcttctgtacaaagaaaaaag

SEQ ID NO: 4330 - DNA, 418 bp, Homo sapiens
ccgccaagaggtggtgattgggagcccacaggcactggtcagaggccacctgctgctcctgctcctttgcaagcctctcaggacttgcgaggctcagaatgaatggatctggaacagggcttgcgagcctcagaatgaatggatctggaacagggcctgcgaggctcagaatgaatggatctggaacagggcttggtaaactgccaaggcacctggggactcgggagctctggcagggtcagcagaggaaggcagaaggcagggctgtctcacggcgtccccatcactgatgtcctctgctctcccctggcctttccagggtgcctgcggcagttgctggactttctccaccactggggccctggagtctgcgatcgccatcgcaaccggaaagatgctgtccttggcggaacagcag

SEQ ID NO: 4331 - DNA, 482 bp, Homo sapiens
ccacctctagatctgtgtttgccggtctagacgttatcggtgcacttccttgaagtgccaggttgcagcgatcccagagcgttgataacgtgatctgatccctaagttgagacctgtcttcctgtaacgcttccgaataagaggtccggtcgaaaagagttgaaagatacgaaattaggtggtcgttggaatcctgatcgcagtaaagtggtccttggtaactgctcgagtagaacatgtctgcatccgccaatagtccgctaatagggagggctgtgcgattaaaggcttccatcgattgggtagtgtccttcaagtgggtggcgaagagccagtcgggcatatgtcatgaaggtttctccgaccgattaatggtttgctgcttgactagcctagggaaataataataaaggtaaagtaaacttttttaatgacatatggggcacaaaataactggtgtcttgtaaatgttctgttttttt

SEQ ID NO: 4332 - DNA, 512 bp, Homo sapiens
ccacttgaccagggacttgcaaagttgttcctgtcacctgttgagagctcagacttccagccagggcctgagcactgaggggctggatggagcctgtcacagcttgtgcctgccccccaacattgacttggacagggaagaatgttatccctccattttcattggcaatacctagtgacagagaaaaaaagcatgaagaaaatgttgataataagaggttctccgggcagaggtttacaatttctgctctcccaaaccctctctccccatcactcctctgtcccctatgtcactctagccaaacctcgggtaacttttcaatacatgccacagagaaggaactcaatatccaactctgccttccttaccttgcacaggaatggttaccgtttgcccattgttggctgtgacagtgacggttgccatggtgaccaaagtctgtccaggaactggtgtgacagaaacagtctccccagatacattctgcacagggacagcattgactaggggct

SEQ ID NO: 4333 - DNA, 484 bp, Homo sapiens
  misc_feature (1)...(484): n = g, a, c or t
ctggagcagcagatagaagggacagggttgcacttataacaccactatcctcccagccctggttttatcatcatcatcgagaaaaatacaattaatcagcagtgatcaaaggtaagtctaaacattccatttaactaacttaaatgtgacctggtgtgccgtgtcattctataaatgacataacagaataagactcactttctaattcacagcctctggttcaatttcaagtaagcaaatacattttgctttggttttgcttacaatattctgggaaatgcaggctataaataatcactcaactgttttgtgggtcaacagaatcactactactttcagtttcgttgatgccatttatatcatgagctcaagcacacgggcgcttcanaaggcactataaagtttanttttgatgtggtgngatgttctgatctatcttgaaaggtaaagaaacccacaggattcagcgtcaagccaatccatg

SEQ ID NO: 4334 - DNA, 525 bp, Homo sapiens
ctgctcgacagcatatggcaccagcccattttcaatttgctgagcatcggccaaagcctgtatgcgaaagccaaggagctggacagagtgaaggaaattcaggagcagctcttccatatcaagaagctgttgaagacctgtaggtttgctaacagtgcattaaaggagttcgagcaggtgccgggacacttgactgatgagctccacctgttctcccttgaggacctggtcaggatcaagaaagggctgctggcacccttactcaaggacattctgaaagcttcccttgcacatgtggctggctgtgagctgtgtcaaggaaagggctttatttgtgaattttgccagaatacgactgtcatcttcccatttcagacagcaacatgtagaagatgttcagcgtgcagggcttgctttcacaaacagtgcttccagtcctccgagtgcccccggtgtgcgaggatcacagcgaggagaaaacttctggaaagtgtggcctctgcagcaacatgatgcccctgagta

SEQ ID NO: 4335 - DNA, 469 bp, Homo sapiens
ctggtgaacctgtaccttgggaggtcacactttctctggaaagagcccgccaccatgagctggctggaggagaacgtccacgaggttctgcaagcagtggacgccggggacccagccgtggaagcctgtgagaaccggcggaaggtgctctaccagcgtgcacccaggaatatccaccgccatgtgatcctctctgagatcaaggaagccgtcgctgccctgcccccggacgtgaccacgcagtctgtgatggggtttgatcctctgcctccttcggacacaatctactcctacgtcaggccagagaggctaagtcctatcagccatggaaacaccattgctctcttcttccggtcactgttgccaaactataccatggagggggagaggcccgaggaaggagtggctgggggtctgaaccgcaaccagggcctgaacaggctgatgctggctgtgcgcgacatgatgg

SEQ ID NO: 4336 - DNA, 467 bp, Homo sapiens
gcgagaggcgccggtgtttcgagccgtggcaccggcatcggctgacactgctgcctccagctagttatttcgtcctcttccgttcttcacccctacaccttggaggtgaacttctcacctgagggctgtaaagactcgtttgaaaatggagagccaagaaccaacggaatcttctcagaatggcaaacagtatatcatttcagaggagttaatttcagaaggaaaatgggtcaagcttgaaaaaacaacgtacatggatcctactggtaaaactagaacttgggaatcagtgaaacgtacaaccaggaaagagcagactgcggatggtgtcgcggtcatccccgtgctgcagagaacacttcactatgagtgtatcgttctggtgaaacagttccgaccaccaatggggggctactgcatagagttccctgcaggtctcatagatgatggtgaaaccccagaagcag

SEQ ID NO: 4337 - DNA, 256 bp, Homo sapiens
cggtgccagactcggaggcccccccagggtgggatcgtgccgactcgggtcccacgcagccacctctgtctctctcacccgctcccgaaacaaagagacccggacaggcagccaagaaagaaacgaaggaacctaagaagggtgaatcctggttctttcgttggctacctggaaagaaaaagacagaagcttatttgccagatgacaagaacaaatcgattgtttgggatgaaaagaaaaaccagtgggtgaattt

SEQ ID NO: 4338 - DNA, 308 bp, Homo sapiens; identical to SEQ ID NO: 3350

SEQ ID NO: 4339 - DNA, 347 bp, Homo sapiens
cctgccgggacggccttcgggcagtgatggagtgtcgcaatgtcacccatctcctgcaacaagagctgaccgaggcccagaagggctttcaggatgtggaggcccaggccgccacctgcaaccacactgtgatggccctaatggcttccctggatgcagagaaggcccaaggacaaaagaaagtggaggagcttgagggagagatcactacattaaaccataagcttcaggacgcgtctgcagaggtggagcgactgagaagagaaaaccaggtcttaagcgtgagaatcgcggacaagaagtactaccccagctcccaggactccagctccgctgcggcgccccag

SEQ ID NO: 4340 - DNA, 221 bp, Homo sapiens
  misc_feature (1)...(221): n = g, a, c or t
attaggacangggcctggcctggcttctggtaataccagtgtacattgttactcccaatattgtttcccccacaggtaatcttggccgtctttcctggggccactgacactgagggtgtctgagtcaacacataggaggtcacagagtctgtgcagtgagagaggaggccgaggaggagaacggtccaggccatggctgaggcaccaccagtgctgcttcc

SEQ ID NO: 4341 - DNA, 331 bp, Homo sapiens
ctgtttactgccagccagaagttcaggaagaacacagctccatctctctccagccggaaggacatggacctagcgaagtcaggtatcaagatcctcgtgcctaaaagccccgttaagagcaggaccgcagtggacggctttcagagcgagagccctgagaaactggaccccgtcgagcagggtcaggaggacacagtggcacccgaagtggcagcggaaaagccggtcggagctttattgggccccggtgccgagagggccaggatggggagcaggcccaggatacacccactagtgcctcaggtgcccggccctgtgactgcagccatgg

SEQ ID NO: 4342 - DNA, 300 bp, Homo sapiens
gagacgctctacgagaccatcataggctactttgacaaaggaaagatgtgggaagaggccataagtctgtgcaaggagctggcggaacagtacgagatggagatctttgactatgagctgctcagccagaacctgatccagcaggcaaaattctatgaaagcatcatgaaaatcctcaggcccaaaccagactactttgctgttggatactacggccagggattcccctccttcctgcggaacaaagtgttcatctaccgcgggaaggaatatgagcgaagagaagatttccagatgcag

SEQ ID NO: 4343 - DNA, 172 bp, Homo sapiens
aaatttagaaattcccacatgtttaagatatatgcccatcccctttttagagtaatcaaaatttctatcacagttcacatactggaatacatagtaaaattgagatgtgtccaagagattttcaatgttaattagctcattctaaatagccaatataaggtaacttctgttt

SEQ ID NO: 4344 - DNA, 177 bp, Homo sapiens
ctgcagctataacctcttcttcagctccagcctcagccccagctccaacccccatccttgcctcagtttcaaccccagcttctgtcaccattcttgcctcagcctcaattcccattcttgcttcagccctagcatcaacttcagctccaacgccagccccagcagcctcttccccag

SEQ ID NO: 4345 - DNA, 359 bp, Homo sapiens
gcaaatctgttgttaaattacttaaagaaaatttaacaatggcataggcaccttgtcaactaaatgattttcataaacaccaaaaagtagttaaaacttttgtatacataaccaaaaaaaaaaaaaaagaaaactgtacatttacagtatttgctgctgttcattccccaaaatacaattaggacataattggctattaaaaatttataaaatttaataaaaaactttgctatgaatgtagtgttacccacttttgcattaaattcaccttcataaatcaaaacatcatgactctcattcttaaattaaatgacccaaaattagaagttccaaaaaagttctgagaacaattatggttt

SEQ ID NO: 4346 - DNA, 263 bp, Homo sapiens
  misc_feature (1)...(263): n = g, a, c or t
ttgacggggctnctatctgccttccaggccactgtcacggctcccgggtagaagtcacttatgagacacaccagtgtggccttgttggcttgaagctcctcaaaggagggcgggaacagantgaccgagggggcagccttgggctgacctaggacggccagtttggtccctccgccgaagacgacatggtcattattacgatcccacacttgacagtaatagttggcctcatcgccggcttcgaccctgttgatggtcagggt

SEQ ID NO: 4347 - DNA, 448 bp, Homo sapiens
ccacagctttagactcggcctcatgcacgcgggtgggtctcctatgccctcctcagtcttttttctggttgtcttgcttattttttaataaaactaaaccttaaaaatattcttaaaaacctaaaaaagccctttagatatttttaactgggcttgccattcatatatcggagactgtgtctgaacagtgttgcgctttcctaaccccggcaccgtcctgtccgtcccttggagcacttttcttcctgtgcgtcccgtgcttcctttgctcagttcacttctggctatttgcagcaaagaaggccgtccttttcaaggcgtcgcctcgcttccttgcatggatgaagaggagtgattgctacatgttcctttctgttcccgccgcccaatagagttatcttgttttggttatttcctttgtggcatcagcgtccccaagtgcggccag

SEQ ID NO: 4348 - DNA, 237 bp, Homo sapiens
ccttcccatcagcacagttcgtgaggtggctttactgaggcgactggaggcttttgagcatcccaatgttgtccggctgatggacgtctgtgccacatcccgaactgaccgggagatcaaggtaaccctggtgtttgagcatgtagaccaggacctaaggacatatctggacaaggcacccccaccaggcttgccagccgaaacgatcaaggatctgatgcgccagtttctaagagg

SEQ ID NO: 4349 - DNA, 478 bp, Homo sapiens
ccaagaacaaggcgtgtgccacagtcacgtagtgacacaggtcacatttgctttctgccagcagaagagactggactccagtgcaggggagtgtgcaaggacaggttctggggggtggaggcatctgtggacatcccagggcaggggtgagggccagaacatccctaggtcctgagactacagtttctccacatttagatcagacattctcttccaaggaaggaaaccaagagaggctggtgaaccgtctggtaatgacaagccctcacttttgcagccctcttggctggtccctcagcaggtcttccctatgagcctgcaaaggagacaggcaggaatgagttccatgttcgagatagggaaactgagggccagggagaggcagtgactcgcccgagggcacacggcagaatgcaggcagaggcagagtggccctgggcatcctgagtccagttctgggcactctgcacctcacagg

SEQ ID NO: 4350 - DNA, 413 bp, Homo sapiens
aaaagggagattttctgaagcattgtaatttcattgaaagtgtacttgtttcttgaaaaaaatttttgaacagtgaataatgatgtaatacaactttcaaatttctttacgctgttattttattcctattgtggtcacatgtgaaagcatgtgatcaattgttgctgcatcagggatattacagattcttttttattgggtattatgaccttttctataaaagaataaggacattaaaatgtaagatgcatgataaaaatgtaagtggagaggctctttgtagttaacttatattaagtaatgtataaggtgggggttctcatttgtataatcctagcctatgacttaatgttgatgttttgctttgtcttttggatggcctaacctacattaacatgttggcagaccatttt

SEQ ID NO: 4351 - DNA, 337 bp, Homo sapiens
ccaccctctacaccgatgaggcaggccaatttctgagtgtcgttcagagctgggggcaggtaggtcaggtgattactttccagggctagagtagctcaatcaagttcctaacgcttcccatcaacttgcctacctttagccgaggtcacaagctccagctcagaataggaggcacacatgcggcgtatgaggtcaatctgctccagggtgaggcgcagggcatcccggtcctgggtctggcatggcacataggctgaccagaactggggggaaggccagggtttggcttggatgggggctgctttggaggaccctggactgctcacagcctccacag

SEQ ID NO: 4352 - DNA, 411 bp, Homo sapiens
aaaggtacttcaaaagcttattggtgcttctgtttgttttatcccatccttatagtttttttctattgttaatagatgtttgtgaaaatagaaggagcactagttctagttcatgctttcttttgcttttccatagcttctaaaactaacagtgaaaatgatatattgaaacagtaaattatagatctataccagatttgtaattgtgtatttcattgctatttgaagtataaagtaatggttctgtataatttattgggaaggttgaatttccatagcttcaaaatattcaaatttttttgcatggatttagctacccttttcaaaatttccttttgatgaagtcattgactaaagcgtcattaaaacagaacaagaaaagaattccaaaaaccctccaaaattcctttt

SEQ ID NO: 4353 - DNA, 397 bp, Homo sapiens
aaattaaagtggaagaaaaggagctttacagttgatagtttcaactccctaaaataatgccaacaaggtaagcttgcatagaaaaaaaacttcaaattattactggctacatgcttaaaaaattagaaatgcaggtattataatcatagtgcaaaaccatggcagtttgtgatgtctattactgcctaaggttgagaaatagaccgtagtacctccagttatcacagtttctggtcttttaatcaattatttctgccaactagaagcaatatgtatgtaaagatgggcagcacacatctgctgtgctattaattaacgaagtttgaggtcatcaccaccacctaaattggaaccaggactagggtcttgttgtcttcttgccagttactgccagcag

SEQ ID NO: 4354 - DNA, 440 bp, Homo sapiens
ccagcctcgggtttcagaaaaagcgctggagccagcggaataccaaagccttgtttccccctggaaccggtttggtattatgcctggttgtggttcttcccctctacatttggtgttgacacatttctttaataagctttttccctatcctttttcctttcagtcctattgttaaaggtgtcttgggtccggtcttaaatcaatttggttgtgactctgggtcccagaaaaaagctgctatctcattagcggcttggtgtgttcgaaattcatatttgaaccacatagaaaacatacactaccagtaccattacttccctgcatatatatgtaaaaaaaaggaaaaataaaacaaatcacacagaacacagaggggctgctgaacaacgcagcatgagtgtaaatacattctctttcgggtcagacatttggcctgacag

SEQ ID NO: 4355 - DNA, 507 bp, Homo sapiens
aaatcctccaagggatgagaaccaacctctgaaaagggaatctggagactatcctttccaagtctgaactgggatgtgagctaacttttggattttagcagttatttctttgatgacctttccttcgtcatcaagttccaggcagcagttagtaaggctgaactttccgcatactccctcttcctgggctaggaggtagtctaaggccagtctattttgataaatgacatttctcatttttgtggcttgctgggcaagcagattcaaggcccctgcagtttcattggtaatgatttctagtactgcctgcaatcttataatgcggttaagcatgtaaactggggtgcggtatccccacattccatcttctgcccaggtggctgggccataatattgaattattctttcaggaggccattcactgtccttccaatctcctatagttatgcctcttttgcttttccttttagtttcatcatagatggggtatcctaaggcttctccctg

SEQ ID NO: 4356 - DNA, 147 bp, Homo sapiens
  misc_feature (1)...(147): n = g, a, c or t
ggtggtggagggaggattgggatgcctgaggagggtggagtaggtgctggggccaacacggaggacaaactgttggtcgngtccagctncgcaaggtcgatgaacgtgccttggntactgcactgactgtntccttncgagtcaggc

SEQ ID NO: 4357 - DNA, 226 bp, Homo sapiens
aaaaagaagacacttccatggcgaattgaattagcccaaactttccccccaaatgggacaaggtattacattttggagtttttcttcgagtcacaaactaaactccagatctctctgtccaaaatttcatcgcttaaagaaaaaaagttctaattacaggagcggatactgagctgaagaacttcccaatttgagttggttattcctactaaacgcagccacacag

SEQ ID NO: 4358 - DNA, 573 bp, Homo sapiens
  misc_feature (1)...(573): n = g, a, c or t
ctgctcggaaagctctggacagatgcagtgaaggctccttcctgctaaccacatttcctcgtcctgtgactgtggagcccatggaccagttagatgatgaagagggacttccagagaagctggttataaaaaaccagcaatttcacaaggaacgagagcagccacccagatttgcacagcctggctcctttgagtatgaatatgccatgcgctggaaggcactcattgagatggagaagcagcagcaggaccaagtggaccgcaacatcaaggaggctcgtgagaagctggagatggagatggaagctgcacgccatgagcaccaggtcatgctaatgagacaggatttgatgaggcgccaagaagaacttcggaggatggaagagctgcacaaccaagaggtgcaaaaacgaaagcaactggagctcaggcaggaggaagagcgcaggcgccgtgaagaagagatgcggcggcagcaagaagaaatgatgcggcgacagcaggaaggattcaagggaaccttccctgatgcgagagagcaggagattcggatgggtcanatngctatgggag

SEQ ID NO: 4359 - DNA, 395 bp, Homo sapiens
ctgtttacccctgatcgtgcagcagtgcttgctgttccttagaattttgccttgtaagttctagctcaagttggggggtggtgatagacatttaagaagccatatatcttttcagaagtaggtgtgatgtactaaaagtttgagacactttctagaagtctcactatttaagttatgactagtattggatttttggcatgtctttgggtttcatgtttcttaacccaactgcctgcagggccttatggctgtcaggagcagttcttgggaattaaagtaattactgaagaagtattctagtgagaaaatgaatttatgactcagaagcccctaaagacatgggtactaagcaacaaaataagcagatgttaattaactgtaattttctcttacag

SEQ ID NO: 4360 - DNA, 576 bp, Homo sapiens
  misc_feature (1)...(576): n = g, a, c or t
cagcattcgggccgagatgtctcgctccgtggccttagctgtgctcgcgctactctctctttctggcctggaggctatccagcgtactccaaagattcaggtttactcacgtcatccagcagagaatggaaagtcaaatttcctgaattgctatgtgtctgggtttcatccatccgacattgaagttgacttactgaagaatggagagagaattgaaaaagtggagcattcagacttgtctttcagcaaggactggtctttctatctcttgtactacactggattcacccccactgaaaaagatgagtatgcctgccgtgtgaaccatgtgactttgtcacagcccaagatagttaagtgggatcgagacatgtaagcagcatcatggaggtttgaagatgccgcatttggattggatgaattccaaattctgcttgcttgctttttaatattgatatgcttatacacttacactttatgcacaaaatgtagggntataataatgttaacatggacatgatcttctttataatttctactttgagtgctgnctccatgtttgatgtatctgagcag

SEQ ID NO: 4361 - DNA, 444 bp, Homo sapiens
ctggagggaagctgccacatctcctagctaagcagtctgacttacctgttgggaaacaaagggatattgctctaagattgattaggatgattgtagctagagtcttgaattctatctgtatacggcagagaaactttatagagtgtagagaggtgagcgaaaggatgcaaaagcactttgagggctttataataatatgctgcttgaaaaaaaaatgtgtagttgatactcagtgcatctccagacatagtaaggggttgctctgaccaatcaggtgatcattttttctatcacttcccaggttttatgcaaaaattttgttaaattctataatggtgatatgcatcttttaggaaagatatacatttttattatatagtgcttaataaaccaccccaaaatgatatcagttcttcccaacttgatctcattttggggtggttt

SEQ ID NO: 4362 - DNA, 353 bp, Homo sapiens; identical to SEQ ID NO: 327

SEQ ID NO: 4363 - DNA, 531 bp, Homo sapiens
ccagtgcttgtcctggcagtaaggctttcccctgtaacaagccagagccctccaaggtaccagactcttcttactacacaggtactaacaggctggcaggttagagttggtggagtctgaggagagatattttctctttgttgccaacatcctgtttaccaaaagtgtcaccccaccatcttccataagctgtgaaacaaaatcaatgaggtcactaacttagaagggaaagaaagttttctgggtctttgttttcttgatttggggtaatttatacaagggcatacaagttgattttaagatgtggaactgggaggtagactagtttggataagaactttgaaatgttccttgtggatccccatttctggtcatcaagatgtggatgtacatttcttaaaattattacatgctgcatctttcagcctggagactgtgcagaaacatgagaggtgatgacacactaattatgggaagcagaattactggctgatggcccctgaggctgtgtgtaacaaaatgacaggacag

SEQ ID NO: 4364 - DNA, 245 bp, Homo sapiens
aaagtcctatacttgcctgagatctagtgaattattttggtactccttttatgagaagtgaagttgcagagtttggcttctgcatgcgggtttaatgtgcttgtccccccgccccgactttcttaggtgcagtggagtagtgcataggtggtgcatcctgagggctcccgaggggcatcacctgcccagtggggaagtgagcctgctttcagttagaggcagggcctgtgattgttgggtcacag

SEQ ID NO: 4365 - DNA, 251 bp, Homo sapiens
aaaaggtccaagatgactgcagttttacaaaaatgggcagggtggaaagttgcaaacttcatgtgcttctggatatcaagatttgtttttatacaatagtcacagttaaaaacaccctgctggtaatacataattacactttattaaggtcataaaccagcaataaacaataaagcctatacaacttgtagttctacttaatcactgactggtacagctaacatgagataagtgaaaagttcctatggttt

SEQ ID NO: 4366 - DNA, 224 bp, Homo sapiens
aaaaatataagccccaaaaacaatgacacaaaattcatttggttaattcatgtaaaggaaaaaacagcaacaccaccacacaaacaggaaagtgggagtatgattaggaggggtgagatgaaaactattttacagtaacatttccaccaaaagactgtcctaagaacacgctgtcaatacagttcacagggaaaaagcaaatgtggtatttttttgtatttttt

SEQ ID NO: 4367 - DNA, 244 bp, Homo sapiens
  misc_feature (1)...(244): n = g, a, c or t
ctactaacgttgcttaacaaggatttanaaaaggaaatacattctctttgctggtataatggtataaatcanatcttcaaatctatgggaacgagtcatcttctctgtcctctatctcaagaaattagctcttttacagnngtttttatgaaatcttttctttcanttaaatcataagnaggataattttcatagacctttttgcanatctgtttcattgngacttnttccaagttagcactgg

SEQ ID NO: 4368 - DNA, 526 bp, Homo sapiens
ctgtagctaccttagtgacaaagtttaatcagcttcctgttgagctaaaaaaggaagtagagatgaaaggtgtgtggagcatgccatcaaaatactctgaagaaggagtttataacgttcagtacagtttcattaaagaagctgaacatcactgcttgttacatagcccaattcctgtgaactgccccataagattgctccatggcatgaaggatgacattgtaccttggcatacatcaatgcaggttgccgatcgagtactcagcacagatgtggatgtcatcctccgaaaacacagtgatcaccgaatgagggaaaaagcagacattcaacttcttgtttacactattgatgacttaattgataagctctcaactatagttaactagtatcacatgtttagttggtatgtaaactaatgtatccagaagattggaagagggataagaaatgaaagatcctgatactttaggtttttccctttcctctattttgtaaatataagatgagtattatttaatgatgt

SEQ ID NO: 4369 - DNA, 500 bp, Homo sapiens
ctggagcagcagatagaagggacagggttgcacttataacaccactatcctcccagccctggttttatcatcatcatcgagaaaaatacaattaatcagcagtgatcaaaggtaagtctaaacattccatttaactaacttaaatgtgacctggtgtgccgtgtcattctataaatgacataacagaataagactcactttctaattcacagcctctggttcaatttcaagtaagcaaatacattttgctttggttttgcttacaatattctgggaaatgcaggctataaataatcactcaactgttttgtgggtcaacagaatcactactactttcagtttcgttgatgccatttatatcatgagctcaagcacacgggcgcttcagaaggcactataaagtttagttttgatgtggtgtgatgttctgatctatcttgaaaggtaaagaaacccacaggattcagcgtcaagccaatccatgcccaggcacatcgcag

SEQ ID NO: 4370 - DNA, 542 bp, Homo sapiens
cctgtgttcaccctggtttattccagagtcacgtcagtcaatcacctctcatactgggcgtcataggtgtttgtctggctgatccctccattcgaagctggtcctgaaagttcctggctcctgctggactccagcagactttgctggatggcaaactgcattatctcgtaatcttcatcttgcaaatgcacatttctgccattgtcttgaacatagtaagattcgggaatttcaaacacagattgatcaacctcaaagtttgtgatgtgggaagctgaatcagcctgggtcccttccacattttgagatacagattcttcggcagtgctacagccattaacatttccaaatgtaatccgtgcatttaagacatgaaacaagggaatttctattttgacaggaaatccaggtgggaattccaatttgatgaaatctctcagtcttgcaaaatgagcactcgttcgagccattaggtcaatgatgggaatgacctgctccaccagagagaggggaaactcttcacacatccacaacattgcttt

SEQ ID NO: 4371 - DNA, 396 bp, Homo sapiens
ctgtcgccatgaagtaagcacgacccgtggttcccaatccgcttacatcctcgggcagaactcctctctgtcgtccctggcatggctgtagacaccctccctgatggactttcactttttgttgcagggtcgagctgtgcagttttagcgggtacaagatctaccccggacacgggaggcgctacgccaggaccgacgggaaggttttccagtttcttaatgcgaaatgcgagtcggctttcctttccaagaggaatcctcggcagataaactggactgtcctctacagaaggaagcacaaaaagggacagtcggaagaaattcaaaagaaaagaacccgccgagcagtcaaattccagagggccattactggtgcatctcttgctgatataatgg

SEQ ID NO: 4372 - DNA, 563 bp, Homo sapiens
  misc_feature (1)...(563): n = g, a, c or t
cggccgaggtaaaattctgagtgatccagggtatgacctagggaatgaactagctatgaaatactcagggttaggaatcctagcacttgtctcaggactctgaaaaggaacggcttcctcattccttgtcttgataaagtggaattggcaaactagaatttagtttgtactcagtggacagtgctgttgaagatttgaggacttgttaaagagcactgggtcatatggaaaaaatgtatgtgtctcccaggtgcatttcttggtttatgtcttgttcttgagattttgtatatttaggaaaacctcaagcagtaattaatatctcctggaacactatagagaaccaagtgaccgactcatttacaactgaaacctaggaagcccctgagtcctgagcgaaaacaggagagttagtcgccctacaggaaacccagctagactattgggtatgaactaaaaagagactgtgccatggtgagaaaaatgtaaaatcctacagtggaatgagcagcccttacagtgttgttaccaccaagggcaggtaggntattagtgtttgaaaa

SEQ ID NO: 4373 - DNA, 267 bp, Homo sapiens
aaatgcttccttcaaagaacaaagttgtttttggtgaaatacaatttttccatttttttctttaagtttctgaattacaattaattggaattttaatctactggttactgtgttggacagcatgggtcagaagaggagatgaaaaataacaaaaaattaataaatggtgataacagttgataaaaaagcaagcatgacattgatttagacaaatgtgattgttgagagtgattgtggaccactctccattagggtgttcaggaaagg

SEQ ID NO: 4374 - DNA, 214 bp, Homo sapiens
ctgccctcctccacctaaaccccttcgactcttctgctttgacaaagaaaatgacattggggaggggaggtgctccgcctcccagcttttctcaaaatagtcctatagatactggtaatctggaaatgaagaagtaattctgtctctgcacctacttttgcagaatgttcaaggaagtattctgtgttagtattaatgccaaaaagttgttttt

SEQ ID NO: 4375 - DNA, 145 bp, Homo sapiens
ctggaggtgctggaccgcgtgtttgagaggcagcactactcagacatcttcaccaccacagagcccatcaagcccgagcagaccacagagtattcagccatggcctcgctggctggtgggctggacgacatgaaggccaatctgg

SEQ ID NO: 4376 - DNA, 225 bp, Homo sapiens
ctgcaatactccctcttcagagatagccagaccctcggattgggctggagcaggtcccccagactccagatccctgccatgtggactgaagactcagggtcttactggtgtgaggtggagacagtgactcacagcatcaaaaaaaggagcctgagatctcagatacgtgtacagagagtccctgtgtctaatgtgaatctagagatccggcccaccggagggcag

SEQ ID NO: 4377 - DNA, 519 bp, Homo sapiens
cctttgaggcccagaacccagaccccaaagcgcctgtggtgctgctgagtgagccggcctgtgcccatgccctggaggctttggctactctcctgcgcccacggtacctggacctgctagtctccagcccagcttttccccaaccagtgggttccctgagtccagagcctatgcccctagagcgttttgggcgccgcttcccccttgccccagggaggcgtctagaagagtatggtgccttctatgtagggggctctaaggccagccctgacccagaccttgacccagacctgagtcggctgctcttggggtgggcaccaggtcaacccttctcctcctgctgtccagatacagggaagactcaggatgagggtgcccgggctggacggctaagggcacgaagacgatatctggtagagagggccagagatgcccgcgtggttgggctgctggcaggcacactgggtgtagcccaacaccgtgaggcactggcccacttgcggaacctgactcaggctg

SEQ ID NO: 4378 - DNA, 475 bp, Homo sapiens
ccagagccaggcggctcatcgagctctacaaggaagctgggatcagcaaggaccgaattcttataaagctgtcatcaacctgggaaggaattcaggctggaaaggagctcgaggagcagcacggcatccactgcaacatgacgttactcttctccttcgcccaggctgtggcctgtgccgaggcgggtgtgaccctcatctccccatttgttgggcgcatccttgattggcatgtggcaaacaccgacaagaaatcctatgagcccctggaagaccctggggtaaagagtgtcactaaaatctacaactactacaagaagtttagctacaaaaccattgtcatgggcgcctccttccgcaacacgggcgagatcaaagcactggccggctgtgacttcctcaccatctcacccaagctcctgggagagctgctgcaggacaacgccaagctggtgcctgtgctctcagccaaggc

SEQ ID NO: 4379 - DNA, 366 bp, Homo sapiens
ctgtagcttctgtgggacttccactgctcaggcgtcaggctcagatagctgctggccgcgtacttgttgttgctttgtttggagggtgtggtggtctccactcccgccttgacggggctgctatctgccttccaggccactgtcacggctcccgggtagaagtcacttatgagacacaccagtgtggccttgttggcttgaagctcctcagaggagggcgggaacagagtgaccgagggggcagccttgggctgacctaggacggccagtttggtccctccgccgaagacgacatggtcattattacgatcccacacttgacagtaatagtcggcctcatcgccggcttcgaccctgttgatggtc

SEQ ID NO: 4380 - DNA, 450 bp, Homo sapiens
ataaagcctaaagcaaagttagatttgggggttattcagccaaaattaccgttttagaccagaatgaatagactgcactgataaaatgtactggataatgccacatcctatatggtgttatagaaatagtgcaaggaaagtacatttgtttgcctgtcttttcattttgtacattcttcccattctgtattcttgtacaaaagatctcattgaaaatttaaagtcatcataatttgttgccataaatatgtaagtgtcaataccaaaatgtctgagtaacttcttaaatccctgttctagcaaactaatattggttcatgtgcttgtgtatatgtaaatcttaaattatgtgaactattaaatagaccctactgtactgtgctttggacatttgaattaatgtaaatatatgtaatctgtgacttgatattttgttttatttggctattt

SEQ ID NO: 4381 - DNA, 486 bp, Homo sapiens
ctgctccatgtccttcacctctgccagggcctcatcccggagaaggcccatctgctcgtggttgtagaaggggcaggctgcctgcttctcctgcctcctcctctttggcttctcctcctcagctcctttcttcttctctgagggtggcacaggcacaaagagagaaaacagagaggacagcaactgtccacgggcccgagagggggttgtgtaatgttgagacccacttccacagggtggggtctataagaccctcccaagtactgcctactgtgtctcatcggaacactgtaacgttttacttttgttctccagaaagagcccgtaaaatcatctccaagccaacgattcggaccagacgctcacccagagaataggaacactttttcccaaggagaggggactcagggaggaactggggtctcctctgccattctttctatgaaagacactgaatggtcttcagtcactgccacccctgcctca

SEQ ID NO: 4382 - DNA, 438 bp, Homo sapiens
ctgcagccccctggtgcccgcagcaaagcagacacttcccactgtccccaacaccagagggaggaaagtaaagaagcggacattgaagctagacctgggtgctacaagtgagatctacagcgactgttccacacaattgggggccctctcagcattctggggtggctagagtctctgtgtctctgggctttctcctgagtgttgtaccccatgctactgcgaaggtgaggacacggacactgagaaacaggagacttactgagacgtcactgatggtgatggctgagatgccttcccgatgggcgggcaggcgggtcacgtgggtgaggtggtccagatcccacaggatacaggtgcagtcctgggagccgctcaccaggaggctgaaggtgactgacgctgccaggcacgtgacagcctgtgtgtgtccatacaagg

SEQ ID NO: 4383 - DNA, 510 bp, Homo sapiens
  misc_feature (1)...(510): n = g, a, c or t
ccatacctaggactagcccgatctgtgtgtcanccactgacccattttaccagtgaggaaattgangctcananaggttaagtgacttgcctgtggtcacacagggaacaagggcagagccagaatgtcaacggaggagtgtacaccctttcaactacgctctgtgcgcaatgtttaaccggagcctngtgtattcatttgtaagtcacagaaaataattatatttacagggggaatctaaagatttcaggggacaacctgtanactgactctcatttaacaggggcccaataagcgattatgcccatccacttgagcttgtactgacgtaactactctnctcatgactaccactcaaagaatatacaaaggacctctcattttcccagaaataacctctctatatgaacaggcacagccaatgtggaatggccttatgtctactgagcacatcacatgcacagctcttcatttcatccccacactaatcatgtaatacaggcatgactg

SEQ ID NO: 4384 - DNA, 368 bp, Homo sapiens
cacagcatggacatgagggtccccgctcagctcctggggctcctgctgctctggctcccaggtgccaaatgtgacatccagatgacccaatctccttccaccctgtctgcatctgtcggagatacagttacaataagttgtcgggcctctcagaatatagatcggtggttggcctggcatcaacagaaaccaggcaaagcccctaatgtcctaatttatgcgacttccagtttagaagaaggggtctcactaagatttactggcagtggatctgggacacaattcaatttaaccatcaccagtctgcagcctgacgattcagcaacttattattgtcaacattattctgcatctcttcgcagttttgg

SEQ ID NO: 4385 - DNA, 193 bp, Homo sapiens
cctcaccgtgagaccttacaaagccggattccggcagagttcctctatctcgtcttgttgctgattaaaggtgcccctgtctccagtttttctccgtctcctgggacgtagcaggaaatcagcatcatggttgggttcaaggccacagatgtgccccctactgccactgtgaagtttcttggggctggcacag

SEQ ID NO: 4386 - DNA, 609 bp, Homo sapiens
aaaaaaaggcccccagggcaagttatttacagtttaattgccactgtcaactgatctggaccttgatcgggaccgggacctctggcgatccacagatgctggagacttagatctacttgaagaaccacgtttctggctcttctcaggcacgggagacctactaacagaacgggacttgctccggctccggctcctgctcctgcttcttgaccggctgtaagatttgcgactacgggaacgggatcggctacgagacctagaggaacttctggtccgggatcgagacctgcttcttgacctactgtgccttttgctgccttcaattaattttatttttctcccatttatttcctttccagaaagtttttcaatagcattctttaagtcaccataagaggcaaactcaaccaccccttcatttaatttaggtcggtgtgcatccgcaaacgttacttccccagcttgtctcatgaaatctttgagatccttaacacaagataattgtgttaagcaaagaagaggaaaggggacacacaaacaatcacatgatataaaaaaaacaagactactgaaagagaagatgttagataaagtacaaacatggcattt

SEQ ID NO: 4387 - DNA, 575 bp, Homo sapiens
  misc_feature (1)...(575): n = g, a, c or t
ccttattcctgcaatcaacagttgaacctcattttatccagcagaaggacctccatttcagacctcattggcaagaaaacaagcccatctcttctgaaagttaactgtttctttcaggaatgaggaaaccagctacattccttatggaaaggcttagatctcatttggagaaggtctttcaacctggtatctcctatttagcatcaaatgaagttggaggatcactcaaagtaagcgaccacttacaaccttcagcagagaccagcccttaggattcagagagatcattcacataactggtttctgacattttcattaacaacaacaggaaagaggcagttcccattacaaagcacttaaaattctagagataggggaatattccatcatggacattttttaagtggttattcactttaacttgaagtacaggttatctaccctgtattaaaagctgntgcctaaagacatctagtagtaccaagatgatgggatggaattttaacatcaggttttgtagccctactgaaaatttagcacgatcagcacaagtctagaaaccagactaccctgct

SEQ ID NO: 4388 - DNA, 397 bp, Homo sapiens
aaatatgttaaccagattaaagcatgcaaaagatccaatgataaagacattaaattaataatatgctaatagtatctaatttacccactatagggtctttatactctgtcacaaaaatattagtaaacatcaatttgaagttcggtgaacggacctgattcctgatttgtatatatgatatacccttgcatttatatggctaactttacaggctgtgttacagtacagttagaggaattggtataaatttactccccatactgcagtaaataatggttggaaatgattctcctaatttgctctgtgaactcagaatgcattaatgaattaacaacacaggtcactgagggaccaaaattcctcagtattcacattaacttttcccatgaaaagcttt

SEQ ID NO: 4389 - DNA, 471 bp, Homo sapiens
aaaggcattttggcattttggaataaagttacacaggtgcataccttatggaccaataatcccttgcctaaagaaacttttgcatatgtctatcaggaaacatgaataagaatatccagtgcagcattgtttacaatagtgaaaagctgaaaacaacttcaaaatatttatcttaggaaaactgattaaaaacctggaggaatctcagacacccaatattgagtaaaaaaggcaagtatgaaaaccatatataagataccaattttgtaaaagtaaaaacacttataattaaagaaattgttaaagagatatacatatatgtatataaacctattaaaaaaagacaatgggaaacaacaaaatcagattgatgctaccccggggatcaaggtaagtgattgaatagagaaaaactattcttggggctttgataatattagagatcttcttcataacctgggtggttccttt

SEQ ID NO: 4390 - DNA, 405 bp, Homo sapiens
aaaagtgtcacaagccacagtggagccatatacatgcagttcagcctgattttacccttattttcttctaatacagactccattacaattttggaccatctgcagagagtacagatacacaaaaccaaaacaagtatctatgataataaaatcttcagaaacttttcagacgtacctttcatggagccccctccctcccccgagtagaaccctaacagggacctcgtttgttcctgtgagtcctgccaggacttgtttaatgggtgcttggggttttggttttcctccttattcttcctcctcctcctcctcttcatcatcatcttcgtcatggcagtgtgtaatttcctggggggccagtgggaagaggttgggaggtttaatctcactaattgaccgtgtcag

SEQ ID NO: 4391 - DNA, 212 bp, Homo sapiens
ccatgagagtggagagctcaaccagtatagtgccaagtctggagaggtgttggtgaatgttaaggagcactcccggcagatcaacgacatccagttatccagggacatgaccatgtttgtgaccgcgtccaaggacaacacagccaagctttttgactccacaactcttgaacatcagaagactttccggacagaacgtcctgtcaactcag

SEQ ID NO: 4392 - DNA, 306 bp, Homo sapiens
ccaaaactgcgaagagatgcagaataatgttgacaataataagttgctgaatcgtcaggctgcagactggtgatggttaaattgaattgtgtcccagatccactgccagtaaatcttaatgagaccccttcttctaaactggaagtcgcataaattaggacattaggggctttgcctggtttctgttgatgccaggccaaccaccgatctatattctgagaggcccgacaacttattgtaactgtatctccgacagatgcagacagggtggaaggagattgggtcatctggatgtcacatttacct

SEQ ID NO: 4393 - DNA, 445 bp, Homo sapiens
  misc_feature (1)...(445): n = g, a, c or t
aaatgcattcattttacacttgtgagtttatcattgactttaagaggtagaaatgaaaaatgaaaattaaagctaaagcctttttatctattaatgcagatatattagaataagaatattttgggtttgtgtttattttttaatgaatttatgtttacttgatatggaaaattacgctttataggtggaaaagtagcaaataaagattaagtaaaagtaagtgaaaatgatggggaatatagtattggaattttatanctagttaaaacaataagtatcatctaatttgggtgtttattttgcngatgagaaaacanacctagaaccgnggcatgttttgcctgaaacatacagtgagttananacngggcctaanatngctnctagcatcanancaancccaagaatccatcagcaacctcagaccaacccaagaagataattt

SEQ ID NO: 4394 - DNA, 290 bp, Homo sapiens
  misc_feature (1)...(290): n = g, a, c or t
gtcaggacacagcatggacatgagggtccccgctcagctcctggggctcctgctgctctggctcccaggtgccaaatgtgacatccagatgacccaatctccttccaccctgtctgcatctgtcggagatacagttacaataagttgncgggcctctcagaatatagatcggtggttggcctggcatcaacagaaaccaggcaaagcccctaatgtcctaatttatgcgacttccagtttagaagaaggggtctcattaagatttactggcagtggatctgggacacaat

SEQ ID NO: 4395 - DNA, 447 bp, Homo sapiens
  misc_feature (1)...(447): n = g, a, c or t
aaatatatgggaggatgtgcgtaggttgtatgaaaataccaagtcattttatatcagggacttgcgcacccacagattctggtatctgtggaagtcctcggccactcccccgtggagacaggacaactgtgtgttgacagaagtcacatgggagaatgctcatagcagcccccacgcagtgacacaacctggaacaccgcccagtctgaccagcacagaaaagcagcacctgctgaattcatgccacgggggactccacagcagccaaaagagcgagctgtggctactgtatgatcagtggccccaccagtgatgcctcggacataacgctgagtccaagaagcctgagacccaaggggatagactgngggattccatttctgtagtattcagaaccaggccccactggtggacagtgttagaagttggaactgggttctcctctgt

SEQ ID NO: 4396 - DNA, 627 bp, Homo sapiens
  misc_feature (1)...(627): n = g, a, c or t
ccacctggtgagcagacctgagatgggatgggggacatacagaagagaccattacacgaggccccaggaagtaccctcagggcgttcaaacagctcaccctctcatccagctcactgagggctctggcctcttcaacatctgctccctaggacccctcccgaggctcgggcagcccctcatcctatatcccccacagcatgctaggttaccatttgccctctacccccattccacaggccaagggctcaggatcaccttgacccagcaagatcagcctcacccacttaccccacacagcccatggttggcagaacccctcctacaccctgaactctgacacagagaggcagccctggcccaatgtcaccagcacccattcctctcgctgccaatgacagtgacaagccaagcagcacgtgactagcacctgactcttgacatctgcaaggagcagtagcagagctgaccagccccctgggaatcaacatcaggcttctctacttttgtgccctctccctgccccacatggcccctagctcctgaaacagtcccagcaactgggctataaaggcccagaatcaaatctgagtatctagatgaggcttanaaatctaggtgctactcag

SEQ ID NO: 4397 - DNA, 262 bp, Homo sapiens
  misc_feature (1)...(262): n = g, a, c or t
ctgcccagacacatgggcttgtgacattcgtgaaaaccaaccctgtgggcttatgtctctgccttagggtttgcagagtggaaactcagccgtagggtggcactgggagggggtgggggatctgggcaaggtgggtgattcctcccangangtgcttgangccccgatggactcctgaccatnatcctagccccgagacaccatnctgagccagggaacanccccangnttggngggngccggcatcnnccntagctcacca

SEQ ID NO: 4398 - DNA, 323 bp, Homo sapiens
  misc_feature (1)...(323): n = g, a, c or t
ccttcttcacattgtggcagaaactaacatcctttcaggaagatgggcactagggcaaaggtgcagccctcccaaaccccgggccctggtctcccaatctccaatatctccgcttctcaagccatatgtctctctcccacaaacagagacagccccttccctccagcattctctaccaagcccttcaaaccttgtcagcctgtctcatatgctggacttcccagctcctacccatcacanantacaaactgatccagccgntgaaggaggcnncagagaacactgaagggncccgagggcaccactgcacatcaaagcaccag

SEQ ID NO: 4399 - DNA, 316 bp, Homo sapiens
  misc_feature (1)...(316): n = g, a, c or t
cctgtcatgaataatcaccgttctcctttcgtctcgctcccctcgtacttctcgcctgtctgattctctaagttcatttcttggtggtggaggctcatttcttctggagtcactgaaatttttgggatatctttcgaagcttggatcttcccttcgtgcantaggtcgtgcttttttcccctcactttgaccaacaaagcgatcccgcctttcaaaagatgaagactgtactgctgaactctcaggaaacctgcctctctctcggtgatcaaagtcattaaatctgttctgttggcgagagtagtcggatccatgg

SEQ ID NO: 4400 - DNA, 243 bp, Homo sapiens
ctgttcttctttcagtcattccaactaaaacagacattttgcatagagagaataccagcccacttggtttcttgttttttattattggcgtcagctaggactatacgtggccttaaacgtcatgcactgatggacagaagagaaaaaaggatgaaaaaaaagacaaaggaggggaaagaggagcagcagtgaaaatttgtaataaaaactcttcttaatttataggtaagttttggcattttt

SEQ ID NO: 4401 - DNA, 493 bp, Homo sapiens
ctgcccagggcagcacagggcaggcaatgagtgtgagaccccacaatgcaacagacccttacaaaccccgcaaggccacacaccctgggtccatctgccctgctgtttcttcaggaaaaaacccagaatggaaatgctggagccccaggggctggagaccggggagaggtggcctgtaaggctgtcccatcaccatccccgcacgtcagaagcaccgtcacgttggaaaagaatgacgcttattccaccagttctgaagccagatgtcctcacaaccgaagcagccctgtttgtgcttgggctatgacttgagggtaattaaactgtcaaaacaccctccctactatttccattttcttgcagttggtgtcatttagtcactgcaggctgacagacttattacaggattgagacatgagaatgaacagtcagaaacctataaatgaactcaccacaaatggctgctggaaaggaagaaaactatctgtcgatg

SEQ ID NO: 4402 - DNA, 445 bp, Homo sapiens
aaaataggtgatcttgggcatgtaacaaggatctccagtccacaagttgaagagggcgatagtcgttttcttgcaaatgaagttttacaggagaattatacccatctaccaaaagcagatatttttgcgcttgccctcacagtggtatgtgctgctggtgctgaacctcttccgagaaatggagatcaatggcatgaaatcagacagggtagattacctcggataccacaagtgctttcccaagaatttacagagttgctaaaagttatgattcatccagatccagagagaagaccttcagcaatggcactggtaaagcattcagtattgctgtccgcttctagaaagagtgcagaacaattacgaatagaattgaatgccgaaaagttcaaaaattcacttttacaaaaagaactcaagaaagcacagatggcaaaagctgcag

SEQ ID NO: 4403 - DNA, 68 bp, Homo sapiens
  misc_feature (1)...(68): n = g, a, c or t
aaaaagananagagaaatggagaggttaantggnttccntanagttaaccaggtancaagctgggacg

SEQ ID NO: 4404 - DNA, 496 bp, Homo sapiens
  misc_feature (1)...(496): n = g, a, c or t
ctgctttcacttctgcttcaacttcttctggcagcaactcagaaagcttggcagaggcatagttcttcctatcgccaactttctgtaaacatttgcagtatgttaaattatctgaaataatttttcctaattcagggaaatgccagccataccattctctacatcgcataatgtagttgtttagttctttatccaagtcatctaacaaggaaattgcctgaacaatcattgtgtctactttatcagcgctaaacttcaatctatatcgagacaggctgtgagccaatccaagacacatngctgccatttcacgtggttctaccccagggattaatccatccatttgngaacgaattnctctcataagttcattaacaacaggactatggatacaactgagattcancttttcctttatgacccctcctagtttagcatcagctactgccagcggttcatgggcttcttttactattttcttcagaacttttttcag

SEQ ID NO: 4405 - DNA, 418 bp, Homo sapiens
  misc_feature (1)...(418): n = g, a, c or t
aaaaaaatgctggtctttattcaatataattgaanggtcacctagaaaatngaattgtgaattcagttccaaggtatttgtgtcttaaactatgaacaactttacttttntttcangncantttaatntatngttttaacagaaaactnacatatttngtttttgnaaaggaanccttaaaaatgtcatgctggtattgggctacaaccggaaaaatactgaaggtacacaaaagcagaaaggtaacatttagaaggatactgttttccaaacagggcaatgatgtgaatgatggtancatantatgtgtttcataaatttgtagaaaatattacatatggtataatcaggaattntaattggtngnttgnagtgtaaanaacttagacataaattttcaaaattacaagtgatntga

SEQ ID NO: 4406 - DNA, 565 bp, Homo sapiens
ggtaaagttatgtaaatatgtagctatgtaaatagctataaaataatatttacaattgtgaatagtatgtaaatagttgtgaacataactattgtgaataatatatgttatagttgtgaatgtaaatagtattcacaattgtgaatacaatgtaaatagctttcacaattgtgaatacaatgtaagtagctatgtaaatagtgaatacaatgtaaatagctatgtaaatagttgttatgctgattagggaataatgagaaggaaaaaaagtatacatattcagtacagatgcagtcatctttttttcccctcgaacatttttgatccacaattggttgaatccacagatggggaacacacagtcttggtaaatttaaccaacaaggagggtaaacgcatcccaacagggaaggtaaactgcacatccatcagtacctctagagggcatcactggtttatagctcaatacagtgactatatcagaataatggcctttagttttcctgaaagattaaattaggcttgctgttgttgaatgagataatcaaacatatgatgtaatttt

SEQ ID NO: 4407 - DNA, 597 bp, Homo sapiens
  misc_feature (1)...(597): n = g, a, c or t
gcggcgtctcctccgggacgctgaggggcccgaggagaccgtgaggctctggcctgcagctcgcgccgccatggacgctgccgaggtcgaattcctcgccgagaaggagctggttaccattatccccaacttcagtctggacaagatctacctcatcgggggggacctggggccttttaaccctggtttacccgtggaagtgcccctgtggctggcgattaacctgaaacaaagacagaaatgtcgcctgctccctccagagtggatggatgtagaaaagttggagaagatgagggatcatgaacgaaaggaagaaacttttaccccaatgcccagcccttactacatggaacttacgaagctcctgttaaatcatgcttcagacaacatcccgaaggcagacgaaatccggaccctggtcaaggatatgtgggacactcgtatagccaaactccgagtgtctgctgacagctttgtgagacagcaggaggcacatgccaagctggataacttgaccttgatggagatcaacaccagcgggactttcctcacacaagcgctcaaccacatgtacaaactccgnacgaacctncagcc

SEQ ID NO: 4408 - DNA, 561 bp, Homo sapiens
  misc_feature (1)...(561): n = g, a, c or t
aaaccactccaacaactgctgtgaaggtcactgtgcagagaccctgggtaggggaggctggagccaggtgagtgtgacaggtcacagatggctctcaggccacctgccttcagctccttttgtttcgggttctagccagaagccctggggcctgtctcttgcctcttcttgtagcatgagacacccttgggggccctggggaagggaaggccagtggtgtggcttccctttcagcctagcaacgcccaaacccttttcctctacctggctccacttgtccccagatgctatctccaaattccaagtagcaaaattcctgggtttccccttcccagctcagagtcacttatggctggaatgtgggacaaactcttctaccagaaggtccagggcggttgcagcagctcaaaggtggggatgctggtgacattgactgggatggaaatgatggcccatggcagcccatgctgttccaganagcggcggatcatgtagccgtctcggccgancaggaggagggcggggatgtcagctgtgcgctgggtactgncctggatcatc

SEQ ID NO: 4409 - DNA, 121 bp, Homo sapiens
  misc_feature (1)...(121): n = g, a, c or t
aaatgttattaacatcaatacctactatttctagttaaaattcanatggagaagaaaaataatagctcccacgcattacatttgtaacttcaaatggtaagcctctcaggagctttccagg

SEQ ID NO: 4410 - DNA, 620 bp, Homo sapiens
  misc_feature (1)...(620): n = g, a, c or t
aaaggcaaatctttactccttaaagaaaaaatacaaactgtggtatttttaagagatcgttatattttacataatataaacaaaatcactaatgcatctatatgcttggtttccttaaactacaatgaaccacagaatgggtgaaaatgcatttactttttggtggcaaataaacatactggaaaaaacacgtaacacatagcatgccttttttccttactgtctacacacaggaactgacataaccaagttttaatagccgccacctcctcttccctgtccaaagtagccagttccataggcccccctaccacctcctcgctggaatcccccagatcctctgtagcctccactaggccctctgtagtctcctccagagttgcctctaaagccacctcgggaaactcctctatagcctccaccaacacctgcaccatatcctgcccgaaaggagttggcgctgccaccatagcctccgctaccatagcctccactgctatagccaccgccatagcctccaccactgtaactagaacctccccttctatatccgcttccattgncgtatcgggccatcttgggangacgtggaccatctccataccgngtactgccaatca

SEQ ID NO: 4411 - DNA, 265 bp, Homo sapiens
ccccttttaggtgttgcttgttcagtatctcaagcccagaaagatgaattaatccttgaaggaaatgacattgagcttgtttcaaattcagcggctttgattcagcaagccacaacagttaaaaacaaggatatcaggaaatttttggatggtatctatgtctctgaaaaaggaactgttcagcaggctgatgaataagatctaagagttacctggctacagaaagaagatgccagatgacacttaagacctacttgtgatattt

SEQ ID NO: 4412 - DNA, 233 bp, Homo sapiens; identical to SEQ ID NO: 4019

SEQ ID NO: 4413 - DNA, 460 bp, Homo sapiens
cctgaatctggaacatgccctggatccccccacctcagtcctcaagctttctggacccctgaagccaaggcagattctttctcccagcgtcatttctggggcaggaggaatctcttttctggtttacctgggccagacctaagaatagcaggatctctgaaaccacagggttttgatgtgtttttatcaagccaaatgtacaattgccaactgacactctggataattgagcacagggggtgccctcgtacattgtaccgtcactcccttctgaacagttggcagaccaaactgtttggaagctcagatactctggctcagggtaacacttttgttccccttacactcctcaactttccacctcagctagggaaagagaatgacagttaaggcttgacccaggattataatcgttagagcaagtgggagtttcagagacttaaggggcactgcagggagg

SEQ ID NO: 4414 - DNA, 350 bp, Homo sapiens
  misc_feature (1)...(350): n = g, a, c or t
aaaaatgtnattcctctgtacagtaaattacaaatctttanggatttttttgtaataagagaatttatatttgtaatggtctaagaatttttttgtaatgnggtatatagaattttaattnggagcacttataagctggtaagagagactatancatntnaattatcttggtttatgnttcagcatttcctctagaatttttgctctcaaatatgtgatttaatgaactaaaaacancactcatcagtcttgggaaatttgaactttgatcaacttaactaaagaaggaagggtagtaagaatttttcaaatacaaatatttgccaattcacagatgataacatttaagg

SEQ ID NO: 4415 - DNA, 211 bp, Homo sapiens
  misc_feature (1)...(211): n = g, a, c or t
ccaagcacaggtgtgtcagcttcttgctgacaaccaagacagcagcaagntccttgcaactggcttctgtaanacgacagttttncaacgacaacatctgcaggaagtgttttgggcgtgtcatggtcttgtacagcaacatggcaccctcatccaggagcacattggctgagagacgcaggtgcttcagggactggttggctttgaggac

SEQ ID NO: 4416 - DNA, 431 bp, Homo sapiens
  misc_feature (1)...(431): n = g, a, c or t
ccttccagggctgaccagtttgagtatgtaatgtatggaaaagtgtacaggattgagggagatgaaacttctactgaagcagcaacacgcctctctgcgtacgtgtcctatgggggcctgctcatgaggctgcagggggatgccaacaacttgcatggattcnaggtggactccagagtttatctcctgatgaagaagctagccttctgaacctcgcctgaagccagcctctctgccaagtcactcaggtcatgggcattgttcaagcctgagtggcagccgctcttgctcacctgttgaggaagggctggctnactgnccaccgtggcggcatctttaactggcctccactcaatgggaaactgactcgcctgtgaaagacacagtgggagagctgaaaatgaatcagaagctttatgtatatgattttt

SEQ ID NO: 4417 - DNA, 577 bp, Homo sapiens
ccaccacacccaattccttgctggtatcatggcagccgccacgtgccaggattaccggctacatcatcaagtatgagaagcctgggtctcctcccagagaagtggtccctcggccccgccctggtgtcacagaggctactattactggcctggaaccgggagccgaatatacaatttatgtcattgccctgaagaataatcagaagagcgagcccctgattggaaggaaaaagacagttcaaaggacccctttcgtcacccaccctgggtatgacactggaaatggtattcagcttcctggcacttctggtcagcaacccagtgttgggcaacaaatgatctttgaggaacatggttttaggcggaccacaccgcccacaacggccacccccataaggcataggccaagaccatacccgccgaatgtaggacaagaagctctctctcagacaaccatctcatgggccccattccaggacacttctgagtacatcatttcatgtcatcctgttggcactgatgaagaacccttacagttcagggttcctggaacttctaccagtgccactctgacagg

SEQ ID NO: 4418 - DNA, 472 bp, Homo sapiens
  misc_feature (1)...(472): n = g, a, c or t
ccagggagcagcacgatccgtgtgaactgagttgggccctgggcagccagagccacacattccctctccatgggcctctgctgagacctatagggcttcacatgcatgcagtgcagtcccagggccagcagcatcancatcccctgggaacatgttanaatggcagtctcaggctctacacagacccactgaatcagtatctgtattttcacaggatcctcaggtgatccacaagcacatgaaagtgtgagaagcccttcctcttgctgaacagtttcctcatncaanctccttctcttccgntgtntcttagggaagccagaatacctcccggatttcctagggagtgcactggattttatgccagtttgattacccacagttttcttcctcattcattcattcattcagtcagtcagtcaaatagtaattgagcacctcctgtgttccagtatgtgttctgtctgcaccc

SEQ ID NO: 4419 - DNA, 432 bp, Homo sapiens
  misc_feature (1)...(432): n = g, a, c or t
aaaactgataataatgctgaattatcttaagtgagatgttaagcccactttgttcttttaatgtaatggagcttatgggtagaagaccatgtctactaattacaaaaaaaaaaaaaaaccatgcattgctgcttttcctaccacttccagtaagaaaatgggtgttttgaanaaatcatttgccttgtcctcacggaatctgattaagccctggcctcttgattgtatagagtcattgngtatattccagttacctagatattcccttgagattttgatacaatttgagggaggcagaagtctgcagttgaagaaaaaaaataagtctgtttgtcatatttaagtagcctgtggctatttttatactgattttgatatcatgttcttttcatagtcgtattttgccaccgtaaacataaaaaaaaaaaaaaa

SEQ ID NO: 4420 - DNA, 284 bp, Homo sapiens
ctttctattagctcttagtaagattacacatgcaagcatccccgttccagtgagttcaccctctaaatcaccacgatcaaaaggggcaagcatcaagcacgcagcaatgcagctcaaaacgcttagcctagccacacccccacgggaaacagcagtgattaacctttagcaataaacgaaagtttaactaagctatactaaccccagggttggtcaatttcgtgccagccaccgcggtcacacgattaacccaagtcaatagaagccggcgtaaagagtgtttt

SEQ ID NO: 4421 - DNA, 321 bp, Homo sapiens
ctggcttccgagaggcaattctgtccttggaagccaggtttgaccatctgtaatcagccttgtgagaagtctcgtttgagggggccagggatggaacgggagggcgcatatcgtatgaggtatgggcattgtgttaagctgggggaagttgcagcttgtcctgaattacatggagaggaataaagtgggtgagtaggaggagccatttcatctgaaagcctgaggcccctctggtcccctcgataaaccccactggtgtcccaggccacaggtaacaggagaatagacatttaatgtcacagaatgtcagagcaggcaagg

SEQ ID NO: 4422 - DNA, 322 bp, Homo sapiens
ctgactaagagccctctggcacaaatggaagaagaaagaagggagcatgtagctaaaatgaagaagatggagatggagatggagcaggtgtttgagatgaaggtcaaagaaaaagttcaaaaactgaaggactctgaagctgagctccagcggcgccatgagcaaatgaaaaagagtttggaagcacagcacaaagaattggaggaaaaacgtcgtcagttcgaggatgagaaagcaaactgggaagctcaacaacgtattttagaacaacagaactcttcaagaaccttggaaaagaacaagaagaaagggaagatctttt

SEQ ID NO: 4423 - DNA, 456 bp, Homo sapiens
  misc_feature (1)...(456): n = g, a, c or t
cctctgcgattttgaaggacaactgctgctaaggagtctatctgtgattggagggttgaaacagtattaggtaagtcttccaaactgtttgtaagatcttgtgagagggagcaatagtacatgagggaagtagaaagcccgaccactccggttccaactgcagtagtcattcctagtcgtactaggatgggtattaactgaacggccctgcattggcacacttgagtttttacagggataggtaggttttgtttcctgggacaatgtcgatttttgggcttagaaaaaccagagtacaggtaccagtccagttgatagggtancagaggtaggtggaggtaccgcacaggaagaatatgccttggctaggtaagtaaaattggttgtgtatgttaaaaagatgtgtaagcttgnggtctttgtatatccatgctcctagggtgcttgctaaggcag

SEQ ID NO: 4424 - DNA, 312 bp, Homo sapiens
ccagtcctggtgtctgagtgattcccagggcccagcaaagggaccaagtttccaggtcagcgacattggatgccttccctctgcctctgggagctatgggttggcatgcattggggtagagatccaatctggcctgaggctcactcaggacttcggggtgagaggaggggaggagctgagctgccttggctaatggggttgaaatttctgatcttaaactctccactgaatattctctcagagccctgaagacaaggggtaacaccccaaaatatggactcattttccactccaccttcattggccgagcag

SEQ ID NO: 4425 - DNA, 161 bp, Homo sapiens
  misc_feature (1)...(161): n = g, a, c or t
cctatggaggtgcctatgatgtcatgagctctaagcacctttgnggtgataccaactatgcctggcccaccgnaganattgcagtcatgggagcaaagggcgctgtggagatcatcttcaaagggcatgagaatgtggaagctgctcaggcanagtacatc

SEQ ID NO: 4426 - DNA, 183 bp, Homo sapiens
  misc_feature (1)...(183): n = g, a, c or t
taactcaaaagctaataattaaaaatggaaccangtgagcagngcctnanatacntgcaaaacctntctgcacaaatgtgctccctgccntanaagacaaaanggatnggaatggagaagcctacaaccacccacgggtcctgacaaggctgacgggtggtaatcncaccttggaggcnangc

SEQ ID NO: 4427 - DNA, 145 bp, Homo sapiens
  misc_feature (1)...(145): n = g, a, c or t
ccagcatcacatccctctcctcattgngctcatccttgacnatgaagatcatgtcgaagcgcgacaagatggtgggcactggagtcaatgtngtcctcccccttcgnctcaccccngcggccgaacactganttggcagcngcca

SEQ ID NO: 4428 - DNA, 192 bp, Homo sapiens
ccaaaattgaaaggaaaaatttttttaaaatttctctaaatgtaggcctggctgggctttgaccttttccgtttttaaatcactcacagagggtgggacaggaggaagagtgaaggaaaaggtcaaacctgttttaagggcaacctgcctttgttctgaattggtcttaagaacattaccagctccaggttt

SEQ ID NO: 4429 - DNA, 612 bp, Homo sapiens
  misc_feature (1)...(612): n = g, a, c or t
aaacaaacactaggaatgtgctagttagggggagagataacgaggtggccacagaaatatccatcaagtagaataatctacatgcaaagactcatggtgagactgcattgttactgcaccaaagttaaagccatagctctcagagtgttctgccactgcttacctctttcttggcctgtttgatgtctccctcatccttgatgcctagtcctgaggtggaggccttctcagcctccattcggcttcccccagcccggccctccccaccttcattagtcttgaaggatgaatggctatcagagtcagcaaaaccaccttcactgacactattgcagctcaaccatgaggccaccttgttcttgggtgtctcttcggaggaaggtggattgcagccacctacagggattgagggaggaacaggaatatgtgggggtccaagatctggggggtgggagtccttggaagttgtctcagagagtccgttctctttctggccccgggtctgcctccgggtagcatagctccgccacactgaactggtgctgaagtcctcatccttacagaagttatcatctgagctatcatcattggactcttcagggtcctctgtnc

SEQ ID NO: 4430 - DNA, 411 bp, Homo sapiens
ccttgctacggcacattgtgaaggagttcaagagagagacaggggttgatttgactaaagacaacatggcacttcagagggtacgggaagctgctgaaaaggctaaatgtgaactctcctcatctgtgcagactgacatcaatttgccctatcttacaatggattcttctggacccaagcatttgaatatgaagttgacccgtgctcaatttgaagggattgtcactgatctaatcagaaggactatcgctccatgccaaaaagctatgcaagatgcagaagtcagcaagagtgacataggagaagtgattcttgtgggtggcatgactaggatgcccaaggttcagcagactgtacaggatctttttggcagagccccaagtaaagctgtcaatcctgatgaggctgtgg

SEQ ID NO: 4431 - DNA, 518 bp, Homo sapiens
  misc_feature (1)...(518): n = g, a, c or t
aaaccaagaagaagagaagagaagaaatgccaatatattaaatgaaaaaattagggaagaattaggaaaaatcgaagagcaacaaaagaaaaagttagaagtgaagcaacttgaactcactctccgaatatacaaaatatggaattgaagactgtaagaagtaatttgaatcagctcaatcaatcgctggtaaaaattttatatttctaactttatttcatcaatattacttttaatatcccttcnatttantatgtattattcagaattatgataatgccgctataatatttaggtacaaacttttgtatatttcattcataagttttcatttctttcgggtatgtacctaggaatggaattgctgggtcataaggtacctatgcataaccttttcagcaatcacctcacagttttccaatgtgtgcactattttacttccccaccagcgatgtatgaaagatctaatttctctacggcctcaccagggtggagtgcggtggcgcactctcagctca

SEQ ID NO: 4432 - DNA, 427 bp, Homo sapiens
aaattaagaaaagtgaactatatgtatttgttttatacatttaaggcttagactcataaataatgctattgtttatgatttgaaaactttcaggcaaaatccaatttacatttttcccttccctagcaattacttttttccagcttcaactcttcttagttactaatactttgttgactctaaaaatgaaatcattcacaaacttttggtatatgatggagaatgaaaaactagagtcagacagctttaattgacattgtcaacacctccagttatcaggaatacatttttttactgccttaacctgtagtgcgtagaatatgcatcaatttcttgaaggagattcatgtttttataagaattttcatgtaattattgcaattgtggtcaaataaggaacgtttcctgcttgaaattatattgattt

SEQ ID NO: 4433 - DNA, 351 bp, Homo sapiens
aaaaaataacttaagaagcaagaggtccggccctttacttgtataaatacagcagcagaactagagtttcttaagacaacgtggagaagagtctgtgtttagcacctcaatcatcgatcttaacgttggaaacgtttctgatactgatggaagagtcttataagaaggtgaaatacttttcaagttcatccagcttttggcgactttgctaaaggaaagctcaaagtcaaaagttaatccatcttcaaagctggtaaaaatttatcaaactctttctctaggttaggcaaaaatgcatgcatagaacccataaattcagacttttcacagttttcggtacacctgtgcttt

SEQ ID NO: 4434 - DNA, 614 bp, Homo sapiens
cctttatatgtaaataacaaaatagtgattttaattcatatagatgtatttgtttatctaagtatgcttttatactccctgctatatttttgtatcaattaagtgtgcctggcagcatgaagaaagtcagtacaacaatggtttctctctgttgtgtaaaactgaagttggaagtgggtaacccgacaatggcacagcagcttcacaagatcctgagggatcagcctcctcctttcgtgctgcctcactaccctcagtccttggcttctgcctcagagtctaagatggctactttagatccaggcaccaagccctcatcattacatcatctcattccaagaaaaaaaaagaagcaatgacaagtattccctctccctgtaaagacaccccctagaagtccaaagtaacatttctctttccattctttgttacgaatgagactggaaaatacagtgtgtatttgggaggctgtatgcctagctaaaaatcaggaggcttattactaactaagaaggaagaatgtgatactgaaggtcaactggcaggttttgccacagtgtaaaaatcaggatttcatagatatacagaatttttgaataagtgactttacctcg

SEQ ID NO: 4435 - DNA, 560 bp, Homo sapiens
  misc_feature (1)...(560): n = g, a, c or t
ccaacctgaaaccaaagtcctgggtccgcctcaagcggggcatctacaaggatgacattgctcaggtggactacgtggagcccagccagaacaccatctccctgaagatgatcccacgcatcgactacgatcgcatcaaggcccgcatgagcttgaaagactggttngccnaaaggaagaagtttaagcggcctccacagaggctgtttgatgctgagaagatcaggtccctggggggtgatgttgcctctgatggtgacttcctcatctttgaggggaaccgttacagccggaagggctttctgttcangagcttngccatgtctgctgtgancacggagggtgtgaagccaacactctctgagctggaaaagtttgaggaccagccanagggcattgacctggaggtggtgactgagagcacagggaaggagcgggagcacaacttncaacctggggacaacgtggaggtctgtgagggtgagctcatcaacctgcagggcaagatcctcancgtggatggcaacaagatcaccatcatgcccaagcatgaggacctc

SEQ ID NO: 4436 - DNA, 144 bp, Homo sapiens
  misc_feature (1)...(144): n = g, a, c or t
aaatcataggggaaaagcagtcctgttctaaatcctcttattcttttggtttgtcacaaagaaggaactaagaagcaggacagaggcaacgtggagaggctgaaaacagtgcagagacgtttgncaatgagtcantagcacaaa

SEQ ID NO: 4437 - DNA, 526 bp, Homo sapiens
aaagagatatcaaaagtccctattttcatgagttccacatcacatattttgtgctttctttgaatagccaaaaaattttcttggggaaaatacgagagtaaaaccagagctaaggagctataagaatttggaatggcttcttgaaatcatgccgctccaagtatgtcataacctcgatcactcaaaaatacataactcccaaaccaagaatttctgagggcaaaagcacaccagcgtgtataggaaaggcaggggaagggatggaagggagagaaagagggaacaatgtagatttcctgttttataccaggaaaactaggccaaactcaatttaaatgaatagctccaaagcagtgcagtcagaaaaagttctcagtgtgacatagacttcagggaaacaacacgtcctgaaagaaacatgattcccctcaagccacaaaggattttctcatcaagtgttttcacctctgcattagatttggacacaagaagaggagagcatttactcaggtaaaaatagttctct

SEQ ID NO: 4438 - DNA, 560 bp, Homo sapiens
  misc_feature (1)...(560): n = g, a, c or t
ccaccagagaaatgcgaatcaaaaccacagtgagataccatctcacaccagttagaatggcaatcattaaaaagtcaggaaacaacaggtgctggagaggatgtggagaaatgggaacactttgacactgttggtgggactgtaaactagttcaaccattgtggaagtcagtgtggcgattcctcagggatctagaactagaaataccatttgacccagccatcccattactgtgtatatacctaaaggattataaatcatgctgctataaagacacatgcacacgtatgtttattgcggnactattcacaatagcaaagtcttggaaccaacccaaatgtccaacaatgatagactggattaagaaaatgtggcacatatacaccatggaatactatgcagccataaaaaatgatgagttcatgtcctttgtagggacatggatgaaactggaaaccatcattctcagcaaactatcacaaggacaaaaaaccaaacaccacatgttctgactcataggtgggaattgaacaatgagaacatatggacacaggaagggg

SEQ ID NO: 4439 - DNA, 212 bp, Homo sapiens; identical to SEQ ID NO: 2921

SEQ ID NO: 4440 - DNA, 522 bp, Homo sapiens
  misc_feature (1)...(522): n = g, a, c or t
aaaaataattatttttttaattgacagataacaattgtacatactcatggagtacatagtgatattttgatacctataatatatagtgatcagatcagggtaattggcatagccatcatctnaaacacttatnatttcttcgagttgggaacattcttgacttngggttattgaactttgnaaatnccatgtgattgacctaagttatgtnctatgtcaggtcctgatgattcaaggtcagaagtagtttgatgtcagggagtttaatgctgcccagcatgggtagaataaccttgttgcattacatgaccctatttccctgaccagagcagattgatcagggctggagttgggtcccaagctaagcttgtcatattttctctttcttgggaattgtgatngagnctaaaacagtttaattggtttgagataattacatgacctgaggcannanattgcaaactggtggcccatgggctgaagctggttcataaataagttgattctattttttttgccttt

SEQ ID NO: 4441 - DNA, 352 bp, Homo sapiens
  misc_feature (1)...(352): n = g, a, c or t
aaaatattagcgaagctatcaaggggaaaaaaacacattttggcttaagtaaactacaaaaagccacaaatgctttgcaaactctgtcttaccttttatatgaaaataagcaaaatgtaatgtacatatttttatatttttatttaataagagatgcagacccanatttatttatttatttaattaaatatgttagccctccaactccacatttttttttaataggtatggtcctcttttaatggtctctgatcctttttaatgagtgccatacgccaatgatntgcctgcaggtttgtgagcattcttgggatgtcaggtgacctggtgtgttcctaacatttaccaatgg

SEQ ID NO: 4442 - DNA, 348 bp, Homo sapiens
ccttcagaagttaaacgtgatcacttgtgctgggacagccaatagaggagtctgagatgatcatttccaaggagttcttcacagaggaggtagctttggagctgggctttgaggttgggcagtatttgaaacagtagagacggagcaaagaacccctgggcagaggaaacagtaagtgcaaggcataaagtgaaggtggagggtgttaccgcggggtgcactggttgcattacctcctggtggggtcagtcattcgctttcttttcctcctcaggaccagggctctttgaagatgaagaatgcccacaagggaacacaggcagaagatcagataagccaaagtcacag

SEQ ID NO: 4443 - DNA, 505 bp, Homo sapiens
ccacgttcctggccgaggacccgaaggttaccctgaccatcttcgttgcccgcctctactacttctgggacccagattaccaggaggcgcttcgcagcctgtgtcagaaaagagacggtccgcgtgccaccatgaagatcatgaattatgacgaatttcagcactgttggagcaagttcgtgtacagccaaagagagctatttgagccttggaataatctgcctaaatattatatattactgcacatcatgctgggggagattctcagacactcgatggatccacccacattcactttcaactttaacaatgaaccttgggtcagaggacggcatgagacttacctgtgttatgaggtggagcgcatgcacaatgacacctgggtcctgctgaaccagcgcaggggctttctatgcaaccaggttccacataaacacggtttccttgaaggccgccatgcagagctgtgcttcctggacgtgattcccttttggaagctggacct

SEQ ID NO: 4444 - DNA, 449 bp, Homo sapiens
aaaacaaaagcaagttctttgttaggaattggtcaaaattcatctctttctttaagcccatcaactcccaggacggtttgagttactcagttacctaagcttgctattcatccaaatcattttctagagtcactgtataagggtctatgagtagctgtgtatgaataaatattacctgtctacctcaaaatacacatactgctgaagcattctgtacaaccgtgtgttatcacagtgcagttttaagtgtaacgttagaacttaggcattttcctgtgtggcggaataagaaaggattaaacagttacaagcctccaaattcaaataaaattaaatcacagttcagatgaaactgaatatcattgtaataatctcataatatacatttgtaactttgtagctatctttgaaatcacttgactttgcaatggtgctaagctgatagattt

SEQ ID NO: 4445 - DNA, 478 bp, Homo sapiens
  misc_feature (1)...(478): n = g, a, c or t
cctgtgaggtgcagagtgcccagaactggactcaggatgcccagggccactctgcctctgccggcattctgccgtgtgccctcgggcgagtcactgcctctccctggccctcagtttccctatctcgaacatggaactcattcctgcctgtctcctttgcaggctcatagggaagacctgctgagggaccagccaagagggctgcaaaagtgagggcttgtcattaccagacggttcaccagcctctcttggtttccttccttggaagagaatgtctgatctaaatgtggagaaactgtagtctcaggacctagggatgttctggccctcacccctgccctgggatgtccacagatgcctccaccccccagaacctgtccttgcacactnncctgcactggagtccagtctcttctgctggcagaaagcaaatgtgacctgtgtcactacgnnactgtggcacacgccttgttcttgg

SEQ ID NO: 4446 - DNA, 375 bp, Homo sapiens
gtcaggacacagcatggacatgagggtccccgctcagctcctggggctcctgctgctctggctcccaggtgccaaatgtgacatccagatgacccaatctccttccaccctgtctgcatctgtcggagatacagttacaataagttgtcgggcctctcagaatatagatcggtggttggcctggcatcaacagaaaccaggcaaagcccctaatgtcctaatttatgcgacttccagtttagaagaaggggtctcattaagatttactggcagtggatctgggacacaattcaatttaaccatcaccagtctgcagcctgacgattcagcaacttattattgtcaacattattctgcatctcttcgcagttttgg

SEQ ID NO: 4447 - DNA, 407 bp, Homo sapiens
ctgcttcctgtctgtgacacctgggaagacacagtttgggcctacttccgggtgatggtggacagtctggtagaacaagagatccagacatcagtagtaactctggatgaaactgaagaactccctagagaatatctgggagcaaactggacgttagaaaaggtttttgaggaacttcaagctactgacaaaaagagagttctggaagagaatcaagaacattatcatatagttcaaaagtttcttatcctgggagacattgatggtttgatggatgagtttagcaaatggctttccaaaagcagaaacaatctacctggacacctgcttcgctttatgactcaccttattttgtttttctatactctgggactacagaccaaggaggaagtttctattgaagtttt

SEQ ID NO: 4448 - DNA, 481 bp, Homo sapiens
aaaataattactctcacacataattttttttatcatgtaaattctaaacaaacttctgaaggtataattacacaaattcttagcgatcacaaaagtagatgattgggctactgtgtcatttttctaactgtgttttgtcgataatatgcaaaatttaggaataatgtagaaaaatgatgtatttcaatacagcttacaaatgaaacttttttggcttcacaaagacatacttattatcataactgatacaattttcatactacagtgctcttttgctttataaatactcaagttattttgtgcgctgcttcaaattttacttttgtgcgtcgccttccatccccttagtacatcttatagtagctgtaagttgatcctgtgtttcttgaagctaaaacaaagaattaaaaaaaattacatttagaaatgacctaaatgtccatcagtagatgaatgaatcaacaaaatatatataaaatat

SEQ ID NO: 4449 - DNA, 501 bp, Homo sapiens
  misc_feature (1)...(501): n = g, a, c or t
tgcctcaaatcgtcgtagtgggaacgcanagcagcggaaagagctcagtgctagaaagcctggtggggagggacctgcttcccagaggtactggaattgtcacccggagacctctcattctgcaactggtccatgtttcacaagaagataaacggaaaacaacaggagaagaaaatggggtggaagcagaagaatggggtaaatttcttcacaccaaaaataagctttacacggattttgatgaaattcgacaagaaattgaaaatgaaacagaaagaatttcaggaaataataagggagtaagccctgaaccaattcatcttaanattttttcacccaacgttgtnaatttgacacttgtggatttgccaggaatgaccaaggtgcctgtaggtgatcaacctaaggatattgagcttcaaatcananagctcattcttcggttcatcagtaatcctaatttccattatcctcnnctgtcactgctgctaatacagatat

SEQ ID NO: 4450 - DNA, 302 bp, Homo sapiens
aaattctttatgcctcatcctctgagtgctgaaggcttgctgtaggctgtatgctgttaatgctaatcgtgataggggtttttgcctccaactgactcctacatattagcattaacagtgtatgatgcctgttactagcattcacatggaacaaattgctgccgtgggaggatgacaaagaagcatgagtcaccctgctggataaacttagacttcaggctttatcatttttcaatctgttaatcataatctggtcactgggatgttcaaccttaaactaagttttgaaagtaaggttattt

SEQ ID NO: 4451 - DNA, 581 bp, Homo sapiens
aaataccaggtactcattttcttgatttgaaagtttaacatgacttctaaggacatctcttcaaaaagaaagtaaacagggaatgaaggtggtgggaaaatcacttcacttcacccactatttcatgttgtaataagggccaccataaggatgccctcctcatagtgttcggttctgatcttcctcgagaacagtcacttggcgcactttaataatctggactgctccagatttgactttagatactccatggtatctagtctttatgatcagttgaatgatcagtgtttaagtctaaaaataatgctttcctgaaaatgtttatatttcattgctgtttccttattgcctgctagccaaatggaatttgggcaagcaactctttgaagacttttttaccctagaaatttacttttgtcctaaaaaccctaactgtaaataagcagtcgaagcaagttgccaccttgaagttgagggatacactttgcttcatcagtattaaaaaccatggtactcttattttgtcttttttaattcaaaacattttctaaatgtggtactttgaaccttggagtatttac

SEQ ID NO: 4452 - DNA, 467 bp, Homo sapiens
aaaaacatggagaggaatgattatcggacactgcgccaggggattatcgacatggtcttagccacagaaatgacaaagcactttgagcatgtcaacaaatttgtcaacagcatcaacaaacccttggcaacactagaagaaaatggggaaactgataaaaaccaggaagtgataaacactatgcttaggactccagagaaccggaccctaatcaaacgaatgctgattaaatgtgctgatgtgtccaatccctgccgacccctgcagtactgcatcgagtgggctgcacgcatttcggaagaatatttttctcagactgatgaagagaagcagcagggcttacctgtggtgatgccagtgtttgacagaaatacctgcagcatccccaaatcccaaatctctttcattgattacttcatcacagacatgtttgatgcttgggatgcctttgtagacctgcctgattc

SEQ ID NO: 4453 - DNA, 519 bp, Homo sapiens
ctgtgggcccccactctccacctgctctcctgctcaggttggggcagccaaagaccttctcttcctggggagagaggttagggagggaccattttttgattatttgagggtgtggttcagttgtaaacagtgtaaattttagaatttgtgttattgtgatggcaatgaccaactgcaaaatatttcccatttgccttgtaataacaagagcatgtactttacgcaattgaagtttttggaccctacttatttactttactttattaagaatagtaacatttgagcagagaagagttctaattttgcatcagagccaaaagtgaaaatgaaaggaactgacccatgaaggaacaggtgtgagctatttacttcattcctgcccatcctggttgatgttgagctcttgccctgcatcccactttcaaatgtggtggatgcctcacctaggaaaggccctcaccacgctggcttgctctgctcactaactgtacttacttctcttaatcccctatgaacact

SEQ ID NO: 4454 - DNA, 332 bp, Homo sapiens
aaatagaaaacagtatattgaaagtggtgggtttgatctttttatttagaaacccacaaaatcagaaacacagtacaaataaaacagaaatcaaactataagctgacttttagttcctaaaaagaaacatatttcaaaagcaatggaatctagaattcttataacatgaataacaaaatgtacagcaagcctatgtagttcaattaatatataaggaaaaggaaggtctttcttcatgatacaagcattataaagtttttactgtagtagtcaattaatggatatttccttgttaataaaattttgtgtcataatttacaaattagttcttt

SEQ ID NO: 4455 - DNA, 237 bp, Homo sapiens
ccaccgggggccgggatcggagtctcctctgctgggacgtgaggacacccaaaacccctgttttgatccactccttccctgcctgtcaccgtgactgggtcactggctgtgcctggaccaaagataacctactgatatcctgctccagtgatggctctgtggggctctgggacccagagtcaggacagcggcttggtcagttcctgggtcatcagagtgctgtgagcgctgtggcag

SEQ ID NO: 4456 - DNA, 451 bp, Homo sapiens
ccacacaggcaggcgccttccagtcttacaggtacatgtgaatatagggctctttcctcagctccatatgcaatagtcagcttaaactctagctctgactaatcctctaggagtaggtagtaacattttccactagtctcctgaggatggtttgatgtctctggagttgagtctatctcgagctagcaggttggcccctatgtaacatcttcactgtggaaagtgaagtccacaattccctgggaaaggatggaactgatttatgcagtccatgccccaccttttcttctacctccgccgcaactgaaatcccctttctgtggaattcactgcaaagctatgaagaaaacagaagcaaggacatctgattcctagggaggtctaatttttttaggctaaactactgcaattttctgtgtactgccatcagttatgaaaaagtttttttttt

SEQ ID NO: 4457 - DNA, 329 bp, Homo sapiens
  misc_feature (1)...(329): n = g, a, c or t
cctgaggtctgcggaaggtgggaggaggcagacaccctgcgtggcccatggtcggggcgtccacgccgaggccggcaacaaacgacagtatctcggattcctttttttttttttttaattttttatactttggtgtttcacttcatgctctgaatactgaataaccatgaatgactgaatagtttagtccanatttttacagaggatacatctatttttatcattatttggggtttgaaaaatttttttttacaccttctaatttctttatttctcaaagcagataattcttctgtgtgaaaatgttttctttttttaatttaaggttt

SEQ ID NO: 4458 - DNA, 517 bp, Homo sapiens
ccaagtgtctggatgaacgacagcatgcacaaaggaatgtgggggagagaagtcctgaccagtcggaacacacagatgggcacacctctgtccagagtgttattgagaagttgcaggaagaaaatcgactgttaaaacagaaggtgactcacgttgaagacctcaatgccaagtggcagcgctacaacgccagcagggacgaatacgtgagggggctccatgcgcagctcagggggctgcagatcccccacgagcccgagctgatgaggaaggagatctcccggctcaacagacagttggaagagaaaataaatgactgtgccgaagtgaagcaggagctggcggcctccaggacggcccgggatgctgcgttggagcgggtgcagatgctggaacagcagattctcgcttacaaggatgacttcatgtcagaaagggccgatcgggaacgggctcaaagtaggattcaagaactggaggaaaaggtcgcctctttgctgcaccaggtgtcctggag

SEQ ID NO: 4459 - DNA, 474 bp, Homo sapiens
aaaaatatttagattaaagccccctttaatgagtacaagaaaaactcttggcttgttagaagaaagtatattctttctagaatttggtgcaggaatatgtgttcatatccaggcaaacgggtgtgtttttatcttcagacaatgaaaccttctcctctggggctttgttgccaggaagattagaactaaatttattttttcatttctgtcatgaaatcattccagatacctcttttcttctttccaaacggttttcacatgtgtttgaaatatttgtacttcgaattgtcggattttccatgtcctcctttctcctttgtgcccagcctgagtcagcaccatcccgcattcagaacctcccagtgaaagggcagccttcattttgagaaggtggaaggtgttagggtttgggagacagctcatccaatctcccaagtctcatggtagatttgtgactgtgagagtttccggttt

SEQ ID NO: 4460 - DNA, 625 bp, Homo sapiens
aaatagcaacaattcacttgttcttttctattttatggacttatacatttcaaatatgaccatgttaacaaccaagtatgtacaatatttttaaggacaaaaataacaattatatacagtttgcaaagatcaaattctaaccatggacacctttcatctagtccaatgactgaagcctgtccaacgccagtaactcccagggactaaggccaaatgaagcctcaatgctgtatttacctttttcctttcacatgctttttcttaaagaaacatttacaatttacctgctttgaaactgtcaatagctatattaataatgttttgtgccacaaatcaaagtcctttcctactcaaaagctactgttaattgaaggcaatgttaccattgagatcaaattcagatgtctagatcccagatacctgggtatgaaatatgcaaatctgccaagagaaattagatatttttcttcttttcttttaatataacccactatataatagtgaactaaatatgtttgtttcatagaaacaacttacatttgccaatataaggcaaatggtctatgtacagatacatcaggactgcctaactgacagtgagtgttgctagccaggctccaagcta

SEQ ID NO: 4461 - DNA, 526 bp, Homo sapiens
  misc_feature (1)...(526): n = g, a, c or t
ctgaggactcagagcaggagtaagggcacccctatcctccccatggctttgaaaagaagaaagaggggaaatttggagggatggtcaagttgatgattgaagagacaaagtagtgtaggaaaatctcaatgtttcttgcacagtcatttgttgaaaatgtgtcagcaagtacaagcccatcttaaactggcaatgagacatctgaaatagattatttaggccagggaggcagtattgcaaagaagaacatggctatcaacacttgtttgtctgactcagaggaataaaacatagtaaattttgccttagcgggccacccacattcattgggggaagaaacaattgaggtggggggaaaacagaacagatgaaccttcatggagtttcacaagagtccacatggttgtgtcccttattttcagaaaatgtgaaattggaaaatacgcacttgtgaaagctgaagatgtcacagaaatcttcagaggatttatttagatggncgtatcctccgctgncaactggatga

SEQ ID NO: 4462 - DNA, 392 bp, Homo sapiens
  misc_feature (1)...(392): n = g, a, c or t
aaattatctagaagttgccaaggtagctcagtcttgtgctgctcactttacagctttactctatgcagaaatctatgcagataagaaaagtatggatgatcaagagaaaagaagtcttgcatttgaagaaggaagccagagtacaactatttctagcttgagtgaaaaaagtaaagaagaaactggaataagtttacaggatcttctcttanaaatctacanaagtataggggagccagatagtttgtatggctgtggnggagggaagatgttacaacccattactagactacgaacatatgaacacgaagcaatgtggggcaaagccctagtaacatatgacctcgaaacagcaatcccctcatcaacacgccaggcaggaatcattcagg

SEQ ID NO: 4463 - DNA, 563 bp, Homo sapiens
aaacacatcctatatatcatgtcaatctggcaagaaatatgacttgctttttgctgagcttaattcagatatcagtaaaattaagtcataaaataatcatgtgtcatgtgactttggcaccctatagacatacttagttttaacttttcaaagtttggcctcctattagaaataatcatgtctcagatgagtaatgtctgtttccagggttcagaaaaggcaaactcatgaaatgccactgaaaagaactttcaacacagcatacttcatgtaaaagaaattgtttgtttgctttctttgtgtagatttctatttgtgttttatgtcatggaaatattccagaattaacagataatagtggtaaagtaatatgcagatagtctaaattcattttgagtttctaggtgtaagcagactaaatgttgcccagaatcagtgttgggttatcagtttatattaaatatactgagttgcccgttttgaaaatgcactttgaataatctcaaaaagatgtacaagttatacctgtaaaccacaaaagtgaagcctgaggcttctgttca

SEQ ID NO: 4464 - DNA, 174 bp, Homo sapiens
ctgcccctcctcccagcagctccagtgtccctgaggccgggggtccccccataaagaaacagaaggctgatgtgacactcagtgctctgaacgactccgatgccaacagtgacgtggtggatattgaagggctaggagaaactcctccagctaagaaactcaacttcgaccagg

SEQ ID NO: 4465 - DNA, 239 bp, Homo sapiens
cctcgccagcctcagtcaaatgtaacgttcctaggccaagccacgaattgcccaactgggtggtccggctgccctgctatctcacttgtttgtgtgcttattgtcaactctacctatgaggagtgagctcctaaaagcagagattcggccagcgcaggtagctcacacctgtaatcccagcactttgggaggatgaggcgggcggatcacctgagctcaggagttcaagaccagcctgg

SEQ ID NO: 4466 - DNA, 447 bp, Homo sapiens
ctggacaacccgtacatcgtgcggatgatcgggatatgcgaggccgagtcctggatgctggttatggagatggcagaacttggtcccctcaataagtatttgcagcagaacaggtattgtcaggtgcccccacacatctggaagctatcccctaagggacagggcccacccctggatgggccgagcagcctgatttccttgggaagccttcccaccctcctgtgccttcctttattggtccatactcagggaccttgacagagggacagggagacatagtctttggattcagctctgttagctctagttgttcagagaagaactcatttgacagttttgtcttttttttcttcctgtagtcattcagtcttggcctagtgatagactcagcctcagaatatcttgacatggaatctcctttctcactgggaagaacactttcttttt

SEQ ID NO: 4467 - DNA, 195 bp, Homo sapiens
  misc_feature (1)...(195): n = g, a, c or t
aaaagccgaggcacaggtatagctgggcacctggaagaagctctgccaaatggaatcctccttggcaggagtggtantgctaaggcgagcagagtgggctacangcaggtcctgcaggccctgggtagagctcatcctctgtctgtccattcctcccanaccccancgtggnggagnagacacaggcatagnaaa

SEQ ID NO: 4468 - DNA, 401 bp, Homo sapiens
aaagagttaaaagaaaagaagttaagaaaagaaaaaaacgtattttcttctgttcatttttatgagtacaggcaaagaataaaatatcccatgtacctctacaggatttagagttctggaatgctaaaaggcaacattttcctaacagccacaaactgaccattactgaccaatagagttataaggggaggtgtggctcagctcccaatataaagcaaaatcaacctttattaagtccgtatcagatgacctcctggtattcacataatataggcaacaggattttgaaatgacctacccctcattactattcactgatgctatgtataaaataagtcgactaactcttttctagatacacgttggttggaaacaaaaggttgtctgtatacaattttttt

SEQ ID NO: 4469 - DNA, 456 bp, Homo sapiens
ccaataaataggtcaaaataattcaaaagaattataaatgaaaaaaatataaattaaaaattaaccagaaacatacattttcaaattttggtgaatgtcataataaaggtcaacaaaggggaaagtgaggtaagttgtgtcacaactattatatataaaagaataatatgtaactactagaaaactattagcattataataaaatagtaactgtgttaaaactttaattcaaaaagttagtttcacagtcatttctactatgtaaaaatatacacaataaaaaacaaaaaactagcaagaaatttagacctaaagaagcttcagagatgcctcagaggtctcctcaattcccctagaaattaatctaatgcttttacaaacaaacagcacacacttttatttcagagattacatgaagggtgtgtgccagggacagtctggaaccggcctcctcac

SEQ ID NO: 4470 - DNA, 461 bp, Homo sapiens
ctgccccaggactgagtcaggccccgccttcactttctctttcttctcagtgctgcccttggagccctcgcagcccttcctcttcgagtcactcttcttgccctttgctctcctcccagaccgctctcgacacagatcctgttcaataagtttcatctgcaggtggaatatctgctcctggagtttgcagatggcgtgtttcgttctctcgcgccttgtcaccatgtagcacagatttctaaccctctctaggtcctgccgcagatgggtgaagagcttcaggcggcggtagaggacgtcctgctcctgctgggccaggttgtccacctcgtcggtcttgggggtcagcagcggctggttggcattggctttcctcttcagcttccagtactggtagatgaagtcgaccagtgcctcagccaggtccagccgctcagccacctcagccggctccaccagct

SEQ ID NO: 4471 - DNA, 316 bp, Homo sapiens
ccatggatccgactactctcgccaacagaacagatttaatgactttgatcaccgagagaggggcaggtttcctgagagttcagcagtacagtcttcatcttttgaaaggcgggatcgctttgttggtcaaagtgaggggaaaaaagcacgacctactgcacgaagggaagatccaagcttcgaaagatatcccaaaaatttcagtgactccagaagaaatgagcctccaccaccaagaaatgaacttagagaatcagacaggcgagaagtacgaggggagcgagacgaaaggagaacggtgattattcatgacagg

SEQ ID NO: 4472 - DNA, 402 bp, Homo sapiens
  misc_feature (1)...(402): n = g, a, c or t
aaaaattgactttaatactttatgcaaatantgcctgtcccaaattctagcatgcacatggatctaccaacaaaaaaactaagttttcagtgngtgaacataaacttcaaattaaacctctgatgctttagcccatgtatcaattaccaacagattttcttcatcaatgtctgcagaccacattcatgatttctatnagacagaaatngagcagataaactatactgtatatgctgagnacanaatttgtgggaacataatgctgcaaatgaaagctacaaacactctgtaaatagnttanaaaaactagtnatngaaatcaccaaagtnccagctnataacggngttataagagtncactgttaactgaaaatgaaaaaaatnaatgtnttttttgagaca

SEQ ID NO: 4473 - DNA, 450 bp, Homo sapiens
  misc_feature (1)...(450): n = g, a, c or t
aaatttttcatattttttgaaaattaacatatatttattacagtgccaaatctcatgagtccctgtctcataatctaagaccaggctactctgaaagaggacagagttcactgcctaatccaacactggctgtagtgtaaatgcaacacaggtgatttttgccccagttccaaggctacctaactagctatgtgggccttagtcacccttaaaggaagatggttgcaactatgccagttagaacatttttctgctctgcttccacagtggcactcacaagaggaggacttgattttatagcttgtgtacaggagaatataaagttggcttcaaaggaggtaggataggtttggcatttttctcctcataatgtttcctaaagcatgaaaggatccttgatcagaagagtgctcagttctaatttctaaaatttgctggctnaatattttt

SEQ ID NO: 4474 - DNA, 502 bp, Homo sapiens
  misc_feature (1)...(502): n = g, a, c or t
ctgtaaactgagaatgcagagctgaatagaacatgacatagctctgaaagccctgttgtgcctgaaaggatgaggcaggatcatgcatttgtttattgccaggcccctttcccctcanccatttcaattgccagaggaaggaatcagaggagctattctccctccatctttctccttcatcagtttctggttgatacctgagacaggtctaacatgagctaactttcanagtcagaaggtagcaaagaccatctctcattanacaaaagccaacctgccctagcantcccggtggtcacacctggaagccaagaataccanatgtctagttctcccactctaacaccttacatctgaaaaagaggggagagctgagcttcnanttgccccanatgacatatctggacagttgtgccttgagcatcanangaccttcctctccactctggctctctcttctntttctttctcanatccttggctggngggangccataaacac

SEQ ID NO: 4475 - DNA, 227 bp, Homo sapiens
  misc_feature (1)...(227): n = g, a, c or t
ttgcaaagnttctaacagcnacatagagtccatgtgatcagtagtggattcttgtcntgatgccagggtctnaccgcctaaagctggatcaaggcccttgctctncaaaattgccaancagttgncccgaaacttctccagcanctctaccttctgggtcaggtccttcagctctccctgagttncantcaacttctggtgcanctgcttgttgacggnntctaaca

SEQ ID NO: 4476 - DNA, 581 bp, Homo sapiens
ctgtctgctcctggcaccagcgtagcagctcctcctgggtgcctgccgacccggtggctggcatccctgtatctgtcttgtcgttgttcctctgcacaggctccttggctagcacatcatacaggtctcgtacctgattgggggtcactgcccggaggttcaggttggggtagcgggtggctgggtccagcccatactgggccacattgcgatgcatgttttctggggatgtctgtgacagaagctggtacaggctctcacgctcagccaacacctctagggactcagcgccctctgcccaccgcttcaccatccaggctgcatcaaaggctgccaggaagccccgtgccactccagtgcccaggggccagaagggctccaccaggcagtcccccaccagtcccagcagcaggcgggcgccatgcttctcttgcacacgagcagaactctctgcccgcatcatgctcgtgaagtcaaaggcagagacatcaggctgcccatgggcatcctgggcaaactctagtttcccgagcttgccatgggtggcaaagtcagcagtcttgatctcttgacctcatgac

SEQ ID NO: 4477 - DNA, 308 bp, Homo sapiens
aaatgattctttatttcaataaactttaacaaacaatatataatatttcttccttaaaaagctcattcaaagatcataggcagacttcttccccattgtattttagttggggagataaaggcaaaaagaggaaatgtaagctatcttacagtcattctgagaacctctggtttcatgctatactttcccagctaaaagttactaatttacgaagttcagatactgaaacttaaaaatcaagatccatatattagaatgtcctgctgtcacactggtggtggcccattgtgtcggagtctggtaaatgg

SEQ ID NO: 4478 - DNA, 481 bp, Homo sapiens
  misc_feature (1)...(481): n = g, a, c or t
aaatcacagcttttacctatttgttaggctatagtgttttgtaaacttctgtttctattcacatcttctccacttgagagagacaccaaaatccagtcagtatctaatctggcttttgttaacttccctcaggagcagacattcatataggtgatactgtatttcagtcctttcttttgaccccagaagccctagactgagaagataaaatggtcaggttgttggggaaaaaaaaagtgccaggctctctanagaaaaatgtgaagagatgctccaggccaatgagaagaattagacaagaaatacacagatgtgccagacttctgagaagcacctgccggcaacagcttccttctttgagcttaggtgagcaggattctggggtttgggatttctagtgatggttatggaaagggtgactgngcctgggacaaagcgaggncccaaggggacagcctgaactccctgntcatagtagtgg

SEQ ID NO: 4479 - DNA, 338 bp, Homo sapiens
  misc_feature (1)...(338): n = g, a, c or t
ctgatgcctcactactagatgcagtgntgggaccttcctcttttggagctgtcccatgtacagtggacccaagctcaggaccttcgtggagctgcttctccaacctgagaaactcaagacccatcctcccgctgtcactttggacaatggaaatctacattttcttttcccttttttttttttttgagacagagtctcgctctgtcacccaggctggagtccagtggcacaatcttggctcactgcaacctntgcttcccgagttcaagcaantntcctgcctnagcctcctgagtagctgggattataggcatgcaccaccacacccagctattttt

SEQ ID NO: 4480 - DNA, 540 bp, Homo sapiens
aaaagttaggtgctctttgtatgcgaggattgggattgttaggggcctgtgttcgtgatgatcaccatcatggagtcatttcttgttgggaattgttagagggtaagatcagagataggtacttagttcaagaagactctctgaagctcccaaactgtagatatgtcctgtgtgcgaactggctggctttacagaagtcctgatggaagtgggtttattgttttttgactcgttaccaaccctctgcttactccttcccctcaaaaaagggaagctgacttctcaggttagccagcagctcactcatacttttttctctctctattccattggctgatctgctgacttggggctctgaatctggatactctccatcaccggttggctgctgtcaccatttccttcctcgttgatggcactactagtggtcaagcagaggatgcagatgtacaactcaccataccaccgggtgacagactgtgtacgggcagtgtggcaaaatgaaggggccggggccttttaccgcagctacaccaccca

SEQ ID NO: 4481 - DNA, 507 bp, Homo sapiens
  misc_feature (1)...(507): n = g, a, c or t
tcanccatttataaagaaacaacntacaangaangctganctgaggaatgcanatgtntacngtaagaaggaacananaatgtaattcancantcctaaggcaaacaattaatnagaaaaatacatttactgtnantgaaaaatacaaatggnaatccatacttnatggaactacnggcttcttccatggggaaaatggacttaacattnanatgttgacaatttcggaangcagnttatattgncatctacaatctgaactgaaactcagaaatccangggatgcatggncaggaaataaaattcttcaacttattttttnttggagaatntaatgagattttataatgcaaactgtatgaagactgcttgatgacttgagcagtgttcagatcacagcatacatattcaaatgattttaatatttggaaagactgtcagagggttgngtccgtgtaaaaaaaaaaattggtaatatgaaacaaaaaaagcnaatgaagaganaaa

SEQ ID NO: 4482 - DNA, 242 bp, Homo sapiens
cctcaattcattgctaaacattttttaacaagtatctcacatttaacaaaaaaagatcagtcatatggcagcaaaatacaatgtcatatgaccaaaacatgaaagactgtgaaaatgaatctggaggtgacccaagcattgaattcaacaatccaggctgggtgcggtggctcacactgggaggctgaggtaggcagatcacctgaggtcaggagttcaagactagcctgggcaacattgtg

SEQ ID NO: 4483 - DNA, 253 bp, Homo sapiens
  misc_feature (1)...(253): n = g, a, c or t
ctgtacccattgcaggacattctcactggagatcagcttctttttgaatacaagccanaagtcattggtgaagccttgaatcagctagttcctcaaaaagcaaatcttgttttactgtctggtgctaatgagggaaaatgtgacctcaaggagaaatggtttggaactcaatatagtatagaagatattgaaaactcttgggctgaactgtggaatagtaatttcgaattaaatccagatcttcatcttccag

SEQ ID NO: 4484 - DNA, 445 bp, Homo sapiens
ctgccgccgtggaatccaaaatttcgggagctgtgaccctttcctcatgtaaaacgagtagtcttggacgatctgggcataggaaccaatcagaaacaatcgcttcagcaatcaagaccattgttcatcatgggggaacccatggatacctctgagcctctatctgcattaccattcactgggcagcagtcttttgagccaagtggcaaatttggacagtatccatcgatgcagatgaaccacatccaggcactggggaagtggaggacatagaacagctcaatcagtgtttgatccaacacttccatctcattaagacaagtttgatttttctttgctttttatttcatggaatacatgagaatctcttaactgttggagtttccaaggaggcatacctcgtgacttcagttaatggaaagaacaaaactaaaatgctgtatgg

SEQ ID NO: 4485 - DNA, 107 bp, Homo sapiens
  misc_feature (1)...(107): n = g, a, c or t
aaatcacagnttttacctatttgntaggctatanngttttgtaaacttctgttnctattcacatnttntccacttgngagagncaccaaaatccantcagtntctaa

SEQ ID NO: 4486 - DNA, 373 bp, Homo sapiens; identical to SEQ ID NO: 142

SEQ ID NO: 4487 - DNA, 214 bp, Homo sapiens
aaaaagtttatatgaatatccagtcaaaaccaacacggtattgcccttgaaatgttaactagacggatttccaaggagaccacaggactgtatactgtcttggaatgtcctcagaaggctctgtcattgatcaggtaacagtaaaaaccccagagtcctttctttcaaatggaaaagggaaagcagagggacagaagctattcaaacttcgtct

SEQ ID NO: 4488 - DNA, 548 bp, Homo sapiens
  misc_feature (1)...(548): n = g, a, c or t
ccatcaccatgtcacccacaccagcagngggaagtctgttcagccgtcccttgatccccttcacggagatgatatacangnttttggctnctgtgtngtcagcacanttgattacagntnctaccggaagacccaaggaaatccggaatttcgcaccanaggacccaccacgtnctcgcttngncatcttgaacgccngaaaaaanaaaaaaggaagtcgattcaaaggacactgggntatgaactttaacgccccgcccaccctcctnacgtggccggagcaaaaaccggcctcttccgcctctgggcgctgncttattacgtaataagtttacgacgtcgcttttagccctctctgcgaagtgggagttgaagtagaagcgcaagagataggaagtatcttntctacgagcttaagagtagttagggacatggaaacagtgatttgttaacttgctcacgacctcttttgaccacttaatagtgccaggcacttatctgnacactagagaataggaattaaaacacggtttgtgccgtgtgggggt

SEQ ID NO: 4489 - DNA, 567 bp, Homo sapiens
  misc_feature (1)...(567): n = g, a, c or t
gaggttttctcgctctagggagattcttcaagcaatcactatgtcaacagacacaggtgtttcccttccttcatatgaggaagatcagggatcaaaactcattcgaaaagctaaagaggcaccattcgtacccgttggaatagcgggttttgcagcaattgttgcatatggattatataaactgaagagcaggggaaatactaaaatgtccattcatctgatccacatgcgtgtggcagcccaaggctttgttgtaggagcaatgactgttggtatgggctattccatgtatcgggaattctgggcaaaacctaagccttagaagaagagatgctgtcttggtcttgttggaggagcttgctttagttagatgtcttattattaaagttacctattattgttggaaataaactaatttgtatgggtttagatggtaacatggcattttgaatattggcttcctttcttgcaggcttgatttgcttggtgaccgaattactagtgactagtttactaactaggtcattcaaggaagtcaagttaacttnacatgtcacctaaatgcac

SEQ ID NO: 4490 - DNA, 556 bp, Homo sapiens
aaacatctaaaatacactgaaaatgtgttcttttccaataacatggatgttcacaacagttggtgttacgttagagctaataattatactttagcacgttaacctcagaattctaaggctgagagtcaaacactgctaattcatagaaggcaatagcttgtaataatgaatcataaagctcttctactctttgtagttcagtagataaaaacatctgtctgtagtgaactattttatctgatgggaagaacacccgaggatccgccttcagtatagaatcgaagagaaactgcttcactagctcttttccactagtccgggagtcaccaatcatcagttcaaaatgcttccccactgcatttcgattcatgctcagcacctgatgctgcccatcctgggcaaaagttttatttaataaggcatacagcatggcttccatgatatgaaaatgtaacagtattggaaacagagatgagttctgaatggaaagtcctgttttttccagaacatagaaatctgctttaggcatctttgaaatgatcgaggaaatcttttt

SEQ ID NO: 4491 - DNA, 473 bp, Homo sapiens
  misc_feature (1)...(473): n = g, a, c or t
ccttgcctcanatccaaggtcactcggaagaggccatgtctaccctcaatgacactcatggaggaaatgctgagagaagcattcanatgcatgacacaaggtaagactgccaaaaatcttgttcttgctctcctcattttgntatttgntttatttttaggagttttgagagcaaaatgacaacacccanaaattcagtaaatgggactttcccggcagagccaatgaaaggccctattgctatgcaatctggtccaaaaccactcttcangaggatgtcttcactggtgggccccacncaaagcttcttcatgagggaatctaagactttgggggctgtccagattatgaatgggctcttncacattgccctggggggtcttctgatgatcccagcagggatctatgcacccatctgtgtgactgtgtggnaccctctctggggaggcattatgtatattatttccggatca

SEQ ID NO: 4492 - DNA, 415 bp, Homo sapiens
  misc_feature (1)...(415): n = g, a, c or t
aaatgaatttgacactctacaagacagagatttctttctccagttaaacctcagaaggtaagtcagctagtacaaaaagtattctatatactagtatatcatacctcagactgcagagctcttgttctcttttaacttttcgattctctatgattttatttcttttggttctgatagttcattttgtagtacacgaagcttatttttcatttgtttcatttttgctgtaagttgttcacagggatttttttttcttttttttttttttttgacggagtcttgctctgttgcctaggctggagtgcagtggtgcgatctccactcactgcaagctccgcctcccgggctcacgccattcccccgcctnancctcccgagcagccgggaccacagtcacctgccaccacgcccggcc

SEQ ID NO: 4493 - DNA, 197 bp, Homo sapiens
aaaaatgtctatgaaaattgacactggaaaaaactgtttatctctaggtcttgttttgaaaggattgttgatgagtctacttgcttttcctagttaagacactagcaatggtttctacagtatttctctatatgttgttttcaggttttagaaagggggatgatcttttcaggtatcaaagtggtaaaagcagtatt

SEQ ID NO: 4494 - DNA, 413 bp, Homo sapiens
ctggaaacagatccatctctagacatgaaagaacaatcgacaagatcctctggacacagcagttctgagttatccccagatgcagtggaaaaggcagggatgtcttcaaatcagagcatctcttcacctgtgcttgatgctgtacccagaacaccctcgagagaaagaagtagttctgcatcttctcctgaaatgaaagatggtttacccagaactccatcaaggagaagcaggtctgggtcttctccaggacttagagatgggtctgggactccctcgaggcacagcctgtctgggtcctctcctggaatgaaagatatacctagaacgccatctagagggagaagcgaatgtgattcttccccagaaccgaaagctttgcctcagactcctaggccgaggagtcgttctcc

SEQ ID NO: 4495 - DNA, 544 bp, Homo sapiens
ctgaattccccaggatagattatgagatgctggaacattactgtaacgctggctttgcataaagatgggtcttgtcccattccttcaccagtaagctcttgtgggctgaacattgcaacaacagagctctcttcggttccaacgtgcgcgtaaatcctgcagacaggagcccaataagacattaggtcaactcagggcatttcgaaaacgctattttctgaacagacggctaagcaagaggcttgcagggcccatctcctcagagttatttatcctcacggagctcagtacaggtctgtgaaaaggtcctcatcataggaagggggacctacacggcccgccatcgccattttgtccttcacaaagccccactgctacttttaagcctcgaggccacgcacaagaccttatccgccagtcgccctggccaggcagctacaacacagaaggcatagtgcgtgctatgctatgttcgcacaatcgctcaaaagaaaataaaagaaaaagcttgtacaaaagagtaacagctataaagacacctcgg

SEQ ID NO: 4496 - DNA, 386 bp, Homo sapiens
ccttttttaagtgacctgtaactcatatcagtgaaaaagaacatgctataaaaagattccacaaagtgagagcattaagctcaaaggtcctgaggtaggtgtgtttgaggagctggtgtgtagctgctgtataagaagtcaacctccttattttcaggtacatttattattattttaaccccaagcagaattgcctagctgggtcctcacctttacacaatagtcataggatttgactgttatcaaaaagtaaatccactctcagaggccatagatttcctattactgaggttcttcaaaagaatatgtaatcaatttatatagtaattcctaaaaatgagattctaaaatatagtagcatgcagatgaagcatagctaatgcttt

SEQ ID NO: 4497 - DNA, 573 bp, Homo sapiens
  misc_feature (1)...(573): n = g, a, c or t
ccttgcctcanatccaaggtcactcggaagaggccatgtctaccctcaatgacactcatggaggaaatgctgagagaagcattcagatgcatgacacaaggtaagactgccaaaaatcttgttcttgctctcctcattttgttatttgttttatttttaggagttttgagagcaaaatgacaacacccagaaattcagtaaatgggactttcccggcagagccaatgaaaggccctattgctatgcaatctggtccaaaaccactcttcaggaggatgtcttcactggtgggccccacgcaaagcttcttcatgagggaatctaagactttgggggctgtccagattatgaatgggctcttccacattgccctggggggtcttctgatgatcccagcagggatctatgcacccatctgtgtgactgtgtggtaccctccctggggaggcattatgtatattatttccggatcactcctggcagcaacggagaaaaactccaggaagtgtttggtcaaaggaaaaatgataatgaattcattgagcctctttgctgccatttctggaatgattc

SEQ ID NO: 4498 - DNA, 311 bp, Homo sapiens
aaacattcctgggcacccactcaagagtgctctttttatcaccttctggaaatccgcaaagttgcaggggcctctggagtgtctcttctctagagagaattggtgggacccccctcagtgcagtggccccaactagtggagggagagaggacttaagtcagatggactcaacagaaatgggtttccagaagaataatgaaaagttgtgggtaggaaaatgaatcatttggactcttcaatgaaatggagtgagcccaggagagctcagccaacagaggcactctgggaacctgttagtaaagccaggctga

SEQ ID NO: 4499 - DNA, 437 bp, Homo sapiens
agaaaaaactattgggtactaggcttggtacctgggtgatgaaataatctgtacaacaaacccccatgacacaagtttagctatataacgaacgtgcatatgtaccccctaacctaaaaggaaagtttaaaaaggaaaaaacacctaggagaaaagaaaaatgataaattaacaaaggacaatgctcttagcaccgccatcattcaggaatttccaagggttttaggagctttgtgttaggaactgggggcagagaccaaatatatatttcttcttatgttacactaccccagataggaaaacagaaattactctagatatttcaaacaaaaaagggttgtatataggcaattagtgcttatcactggaggtgctagaggtggtggaggttgtggggatggggttgcaccactggctttcaggctactttaccacag

SEQ ID NO: 4500 - DNA, 564 bp, Homo sapiens
ccaccagagaaatgcgaatcaaaaccacagtgagataccatctcacaccagttagaatggcaatcattaaaaagtcaggaaacaacaggtgctggagaggatgtggagaaatgggaacactttgacactgttggtgggactgtaaactagttcaaccattgtggaagtcagtgtggcgattcctcagggatctagaactagaaataccatttgacccagccatcccattactgtgtatatacctaaaggattataaatcatgctgctataaagacacatgcacacgtatgtttattgcggtactattcacaatagcaaagtcttggaaccaacccaaatgtccaacaatgatagactggattaagaaaatgtggcacatatacaccatggaatactatgcagccataaaaaatgatgagttcatgtcctttgtagggacatggatgaaactggaaaccatcattctcagcaaactatcacaaggacaaaaaaccaaacaccacatgttctgactcataggtgggaattgaacaatgagaacatatggacacagggaaggggaac

SEQ ID NO: 4501 - DNA, 212 bp, Homo sapiens; identical to SEQ ID NO: 2921

SEQ ID NO: 4502 - DNA, 569 bp, Homo sapiens
  misc_feature (1)...(569): n = g, a, c or t
ctgagaggcatctaccttcatggaaacccatttgtctgtgactgttccctgtactccttgctggtcttttggtatcgtaggcactttagctcantgatggattttaagaacnattacacctgtcgcctgtggtctgactccaggcactcgcgtnaggtncttctgntccaggatagctttatgaattgctctgacagcatcatcaatggttcctttcgtgcgcttggctttattcatgaggctcangtcggggaaagactgatggtccactgtgacagcaagacaggtnatgcaaatacggatttcatctgggtgggtccagataacagactgctagagccggataaagagatggaaaacttttacgtgtttcacaatggaagtctggttatagaaagccctcgttttgaggatgctggagtgtattcttgtatcgcaatgaataancaacgcctgttaaatgaaactgnggacgtnacaataaatgtgagcaatttcactgtaagcagatcccatgctcatgaggcatttaacacagcttttaccactcttgctgcttgcgtgacctc

SEQ ID NO: 4503 - DNA, 521 bp, Homo sapiens
aaaaataattatttttttaattgacagataacaattgtacatactcatggagtacatagtgatattttgatacctataatatatagtgatcagatcagggtaattggcatagccatcatctcaaacacttatcatttcttcgagttgggaacattcttgacttggggttattgaactttgaaaatcccatgtgattgacctaagttatgttctatgtcaggtcctgatgattcaaggtcagaagtagtttgatgtcagggagtttaatgctgcccagcatgggtagaataaccttgttgcattacatgaccctatttccctgaccagagcagattgatcagggctggagttgggtcccaagctaagcttgtcatattttctctttcttgggaattgtgatagagtctaaaacagtttaattggtttgagataattacatgacctgaggcagagattgcaaactggtggcccatgggctgaagctggttcataaataagttgattctattttttttgccttt

SEQ ID NO: 4504 - DNA, 553 bp, Homo sapiens
  misc_feature (1)...(553): n = g, a, c or t
ccacgttcctggccgaggacccgaaggttaccctgaccatcttcgttgcccgcctctactacttctgggacccagattaccaggaggcgcttcgcagcctgtgtcanaaaagagacggtccgcgtgccaccatgaagatcatgaattatgacnaatttcagcactgttggagcaagttcgtgtncagccaaanagagctatttgagccttggaataatctgcctaaatattatatattactgcacatcatgctgggggagattctcagacactcgatggatccacccacattcactttcaactttaacaatgaaccttgggtcanangacggcatgagacttacctgtgttatgaggtggagcgcatgcacaatgacacctgggtcctgctgaaccagcgcaggggctttctatgcaaccaggttccacataaacacggtttccttgaaggccgccatgcagagctgtgcttnctggacgtgattcccttttggaagctggacctggaccaggactacagggttacctgcttcacctcctggagcccctgctt

SEQ ID NO: 4505 - DNA, 449 bp, Homo sapiens; identical to SEQ ID NO: 4444

SEQ ID NO: 4506 - DNA, 375 bp, Homo sapiens; identical to SEQ ID NO: 4446

SEQ ID NO: 4507 - DNA, 470 bp, Homo sapiens
ccttttctcttcgtcacacaacagagaacaagcctcacagcccaaagactccagaaccaagaaggagccctctaggacagaaaaggggtatgctgtcttctagcacttcaggtgccatctctgacaaaggcgtcctgagatctcagaaagaggcagtgagttccagtcacggacccagtgaccctacggacagagcggaggtggagaaggactcggggcacggcagcacttccgtggattctgaggggttcagcatcccagacacgggcagtcactgcagcagcgagtatgcggccagctccccaggggacaggggctcgcaggaacatgtggactctcaggagaaagcgcctgaaactgacgactctttttcagatgtggactgccattcaaaccaggaagataccggatgtaaatttcgagttttgcctcagccaactaatctcgcaaccccaaacacaaagcgtttt

SEQ ID NO: 4508 - DNA, 213 bp, Homo sapiens
aaacatattcagaacagatgcttgaaatatgcacttagcactttggttccacatctgtctgggtaaaccatgaagaaaatgaagctgctgcctcaatcgacccagacagcagccataggcagataaagatttggtttcaccctggtggtggtaggcatcgtgtgtgactttttttcctctaatatcaattttacagtacggaaatagtatttt

SEQ ID NO: 4509 - DNA, 291 bp, Homo sapiens
  misc_feature (1)...(291): n = g, a, c or t
aaaaagtttctaatattaaagtcagaatattaatacaattaatattaatattaactacagaaaagacaaacagtanagaacagcaaaaaaataaaaaggatctccttttttcccagcccaaattctcctctctaaaagtgtccacaagaaggggtgtttattcttccaacacatttcacttttctgtaaatatacataaacttaaaaagaaaacctcatggagtcatcttgcacacactttcatgcagtgctctttgtagctaacagtgaagatttacctcgttctgctca

SEQ ID NO: 4510 - DNA, 564 bp, Homo sapiens
aaacttgatccaacctctttgcatcttacaaagttaaacagctaaaagaagtaaaataagaaggcaatgcttgtggaatgtacagtgcatattggcggcgcacgcctcattacgattcgcctgcttgcttctcctgttcaatcgtttctttggaaggcagtggatttttctcttgcgtctctgtcttcttcagtttcgacttatcgaatttctcgatctcagccatatcgggtttgtcagacatggttgcggaggaaaagctgcagggagcaagccaagagcgagcgtgaggaagagccacccgccccgctgtctctgggctgggaactgcacttctgccctccgacccgcagcctgaaaaaaacccttctcgccctcctactgctgccgttccgcgctcacgagcttcctctttctacagaaaaagaggcgacaccccccgcgcccctcctccccatatttcaaaacgctgtggaccaaagagggcggatgcctctcaaagccgaatcttgcagaataaaggaaattgaccactgcgaattgttaattacagcgtttacctgc

SEQ ID NO: 4511 - DNA, 214 bp, Homo sapiens
  misc_feature (1)...(214): n = g, a, c or t
gctgggcggggagcgtcngaccagaagagaatcacgccaggaaagcgacccggaggatgatgatgttaaaaagccagcattgcagtcttcagttgtagctacctccaaagagcgcacacgtngagaccttatccaggatcaaaatatggatgaaaagggaaagcaaaggaaccggcgaatatttggcttgttgatgggtacccttcaaaaattt

SEQ ID NO: 4512 - DNA, 548 bp, Homo sapiens
  misc_feature (1)...(548): n = g, a, c or t
aaaattttacatccagtttgagatcactttgagaataaaatacctgcctancagctcttttgnaaaatgttactataggaaaaagaaaccaagcatattattatactttctgattcctaacaaaaaacataaaaaacacatgtccagttctttaacattgagagacttgtttgtcacaggttaataggaggcactgctggtggaagaccctaaagaataatgcacaccacagccctcagccttgtaagtcgtaagagttactcaaatagcatgctttttgttgtgtgtgggtctgttgttaagagcaacagaacataagatttttctaatcatcaatattcanaatataatcaagaactcatatctaatgatgacaagactttccattgcacatcanatacatgatatttttagttttgtaccttcacacaaattctgaaggcaacatcatttataaaactcgtaggcaaatgtataacattttttaatagtaaaaactcatgataaatatctcccatgccaaagtattagcatatattacactctgg

SEQ ID NO: 4513 - DNA, 436 bp, Homo sapiens
  misc_feature (1)...(436): n = g, a, c or t
gcatgtcnngatctaagtaggagtgatgtttattcganagctgactttanatcttattcctttatatttttctaaagtcaaattattcanaatttgcagtgctttagttcatcacatgatattcttctgagatgtggtgacacttanattggcaattgctgcccccaaactgagggagcgaataataggaagncacttggagcnatcctggctcaanttcaagcgctggtcccatcactcatttttgacctctcattatttgaataaaggggtcttaattcatattcataagtgatgtgtactgccagatacacacctataatcagcactttggaaggctgangcaggaggatngtttgagcctaggaatttgagggtgcagtgagctatgattgtgccactaaattncagctttggtgacaganccgagacgctg

SEQ ID NO: 4514 - DNA, 354 bp, Homo sapiens
ccaaccaggggcagggcgtacttcagcacgaagtccttgatggccgagtcctgggtggagccctgcttcaaagagggaacaggtgagggggcccaccatctccccaccattgttcttgagtacaatgtttgagggactttgggggagtggcgactttgaagggatcagtcttaggaggcaaaacaccccagggctcgaccccactcaagcacagcccagtcattccctaccgtcttttggggctcctttccctccagtgaaccgtaggtgacttcttgggaaaaggcaaacaccttggccctttccttgggggtgtaggctcactaaccccacaaagagaccactcaaggtagg

SEQ ID NO: 4515 - DNA, 531 bp, Homo sapiens
  misc_feature (1)...(531): n = g, a, c or t
aacgtgaaccactggacaggatatagctgttccancttagggagcccactcgggcanagngactggtcatattnnnaaaccgtntntgntgctgcacatcccatanctgcacctcancactgctggtgcccacagccaagtngntgccctntttgatccnggccacagaggatatatattccccaggctgntncatttgcaaaagctgcangatgtcaccagagcttgcactccacaggnacacactgttgtccagtgccacggccagnacattcccanaactncaatccacaaggttcangtaatagtnatttcggatttcangcgcatccangatacngtctggcngggaaggaatgtaacggcnngtcttncggctggagccaggagtggncttttggctgtnnagtactttcagtctgttctgataaccctctggcgcattttgtggttttccactgagccgaaggatcttggcttnctctacatcaaaaccgttcaggttcaaagcccangctttctgatgtccct

SEQ ID NO: 4516 - DNA, 439 bp, Homo sapiens
ggagaatgacaccctgaaggcactactgaaagccaatgtggagaagcccgtgaagctggaggtgttcaatatgaagaccatgagggtgcgcgaggtggaggtggtgcccagcaacatgtggggcggccagggcctactgggtgccagtgtgcgcttctgcagcttccgcagggccagtgagcaggtgtggcatgtgctggatgtggaaccatcttcacctgctgcccttgccggcctgcgcccctacacagactatgtggttggttcggaccagattctccaggaggtgaggaacccgcaatttgcccctccccagaccctctggatgtggtgtgaagagaagggtgctgtccatgagaagtgtctggttttgttgaggctttagccctggaagcagggtctgagtgatgcaaaatgaacctcaacaggtttggaaggg

SEQ ID NO: 4517 - DNA, 337 bp, Homo sapiens
  misc_feature (1)...(337): n = g, a, c or t
cctcactgagatgntctttgagtgaattcctgaaagaagtnaggaagtgagcccatgccattatctanaggaagagcatcccangcagtgggaactgnaagaacaaagctgtgaggctggagcatgactgcctgtgctngggaccacaaagaggctgtgtggaagcngatggggggcanaggttgtggtgagtgagagatgaggtcanangaaacantgtagagaaaggntgtgcnnagcatacanagccttgaaggtctntctaaggactttggctgantaaaatgggaagccactaggtgattntgangagaggaatgccatgatcttatacttt

SEQ ID NO: 4518 - DNA, 516 bp, Homo sapiens
ctgaggacaaacatgagatgagcatagtcagggacagatgtttgggagaaacaaaaggagggtaagtaggaagcgcagggcaaaggcaggcagagcgagtattgcagcagcctttgctgcgtgctgggaagtttctaacaatgcagggctcttggaaagcactgagattgcagcacttgttttgatagcgaggcaaggagtcacaaagtcaggcaaggagggtcatggaaagcggggtgacagagggagaagtccggggcggtggctctcctctaaagcctgtacctagtcctcatctctctccagcctctttacaatgttcatccatggaaagtgaagcccagagaagttaagtaacttgcttaaggtcacacagcaagttgacaaaaacaaacatacacaaaaaaaataaatcacggccaggcacggtggctcacgcctgtaatcccaacattttggaaggctgaggcaggaagatcaactgaggtcaggaggtggacaccagcatggacctcg

SEQ ID NO: 4519 - DNA, 510 bp, Homo sapiens
  misc_feature (1)...(510): n = g, a, c or t
ctgaggacaaacatgagatgagcatagncagggacagatgtttgggagaaacaaaaggagggtaagtaggaagcgcagggcaaaggcaggcagagcgagtattgcagcagcctttgctgcgtgctgggaagtttctaacaatgcagggctcttggaaagcactgagattgcagcacttgttttgatagcgaggcaaggagtcacaaagtcaggcaaggagggtcatggaaagcggggtgacngagggagaagtccggggcggtggctctcctctaaagcctgtacctagtcctcatctctctccagcctctttacaatgttcatccatggaaagtgaagcccanagaagttaagtaacttgcttaaggtcacacagcaagttgacaaaaacaaacatacacaaaaaaaataaatcacggccaggcacggtggctcacgcctgtaatcccaacattttggaaggctgaggcangaagatcaactgaggtcaggaggtggacaccagcatgg

SEQ ID NO: 4520 - DNA, 301 bp, Homo sapiens
ttaaaactgtgtttgtggatcagagaaggctttatagcacagggggcattcagatgagtcttagaggaagagaagaaacatggcaagcagattacatctgagccgtttgaattgtgtttttctttcttcccatgtttattttctaagatctacctgaacttagagactcaagatatttttttaggaaacctcctacccatgtctgaggtagcaagtgcagcctcacgacagataccaggcaatccagagccacaaaacgtgattcctccaggctctgcctggcctgaccctgtcctgtcag

SEQ ID NO: 4521 - DNA, 317 bp, Homo sapiens
  misc_feature (1)...(317): n = g, a, c or t
cagngccctccaccactcaccaggcaaacaaatgtggcttccaagaaggacaaccacccccgtttgctaagcccttcctaggaccaagctgtgggccctgggcttccctgatagtccaagttcaggttgttacttctgagcanaggcaactgaggctcagagaggccaagtggcttgcctgagatgatgtgactactgagcaatgaagctgggcctcatactaccctgcctaggactgcaggcccccccaccacaacgcttcctccccagcccctcaataccccactttggctgccagaggctatgagcagccccag

SEQ ID NO: 4522 - DNA, 430 bp, Homo sapiens
ccagtgaggtagggtttgcaatgagctccacccttcagccatgtcctgcaaccttccccgggcccatagtgagggtgccaccttactcccagcctccaggggctctgcctgctcctgccctgtcccccgcatcctatgaggcatgggcgtgggtgggcacagcatactgtgcgtgtgtgtgtccgtcacaccttgctcgggacggaaagattcccacacaggaataaggacccgtggccctcatgggggaaggacagaggcactacaggtcacctcatcccctctcctgcctccatggcacacgtcaccctccccaggccacttccaagtcactcagagttgtgggacagagtgaagctctctgcatggcgtttccttggctatggtttgcagaggctgcaaactccaatgagctacagtttgggggcag

SEQ ID NO: 4523 - DNA, 418 bp, Homo sapiens
  misc_feature (1)...(418): n = g, a, c or t
aaaatactttantattataaacatccgtgacctacataatancaataatgctttaactgtataaatgagactgtggaaattccattattggctctatttttaagggttacaatgaaattatgtacagtatataaagcttgtcaaactgaacatggtcttaggccattactactatttcattccaatttggattttaatacaattaacttacagatctgaaataaaagcactgcttaatggtttcagatgcattttggtactgaataagtttcaaggaatctttacagataataaatnataatgaagagaacctacgactaaagctgcttacatggataacaggaggaatgacgattgcaaatgttatgttattgacaattctatgaattaaaactcataaccacttctagatttcttt

SEQ ID NO: 4524 - DNA, 140 bp, Homo sapiens
  misc_feature (1)...(140): n = g, a, c or t
ccagtgcttccagaatgtaccatggactagcatcgggggcagggcctgcggtgtctccaggggcatcagctccaacttaggtacctgcagggaatggccctggttggcccggatganaaggccagtgctgggatccccca

SEQ ID NO: 4525 - DNA, 397 bp, Homo sapiens
ctggtgggtgacttgggcagtgtgttcctgctttcagtggttagcctttagcaaatctgctttagagtgagagtagagggcaggctgttgtattacagtgctcttgtttttgtaaaatttaattcactctactgttattttgtctccttgggtaaagtgttatttaatttttcttcattttttagtaatatataacagtcagtgagagaatttggttttcagagatgtcatccaaagcagattttacagttgtttcctggttataaattgtctcaacaattctcttttagtcatttagattgtttaatatgggaaaaccggggtgtagaacatgttgtaaaattaaattttatttacttttttcttatttccaggtccaagcatctcattttgaagg

SEQ ID NO: 4526 - DNA, 535 bp, Homo sapiens
  misc_feature (1)...(535): n = g, a, c or t
ctggctaattcagtcatgcaaactctgctctcacagttaaaacagttctatgagccaaaacctgatctgctgcctcctctgaaattagaagcttgtattctgacccaaggagataagatctctctacaagaaccactggattatctgctgtgttgtattcagcattgtttggcctggtataagaatacagncatacccttacagcagggagaggaggaagaggaggaggaagaggcattctacgaagacctagatgatatattggagtccattactaatagaatgattaagagtgagctggaagactttgaactggataaatcagcagatttttctcagagcaccagtattggcataaaaaataatatctgtgcttttcttgtgatgggagtttgtgaggttttaatagaatacaatttctccataagtagtttcagtaagaataggtttgaggacattctgagcttatttatgtgttacaaaaaactctctgacattcttaatgaaaaagcgggtaaagccaaaactaaaatgg

SEQ ID NO: 4527 - DNA, 203 bp, Homo sapiens
  misc_feature (1)...(203): n = g, a, c or t
ctgctccacgtgaccacccaggccctcggccaggccgntgagcagatccagngctacgatcatgaagtccttgncgggagcctcatactgctcagggtgctgggtgtacatcatggcctgagccagngtcttctgcaccagggtgacacagcgctggtagacgggctcacagtaaggcangaanccactctgcagggcggtgg

SEQ ID NO: 4528 - DNA, 167 bp, Homo sapiens
aaatcagcagcaagcattaggacatgctattttggccccataagttaggtgtgtagcactacacattagacaccaagtcatcccaaccaatatttatccatatgaacagataaactgaacaaaaacatagttctgataaaacctgcattcacaacctaatgtagttt

SEQ ID NO: 4529 - DNA, 467 bp, Homo sapiens
ccaggctggtcttgaagtcctaacctcaggtggtccacccacctcggcctcccaaagtgctaggattacaggcatgagtcaccatacccggccggttatctgcagttttcaattctcagatttgctacatgaatatttttagcctacagaattcagattagctttgaggaaatgtggtgtgagagacacgtgtaaccagcagaaaatcagcttagactacccaccttagcgttttgttcttattcaaacaggcaaattcttagtaaataagaaagaagtaaagtttgatctcaagaaaatatgagggaaggctgaaaagggccctgggttcagaaagaagggttactaaaaaggagataagccgctggacaacagatctccattttgcagaatgctaagacattgcacttagtacctcctgtttcccatgggttctgatccagaaatgtgccctgggaactgagcag

SEQ ID NO: 4530 - DNA, 309 bp, Homo sapiens
aaaaagtatattaaagcctatgggatgcttttctgtcatattcccctaggtccagttgaacatgagaaaagtcagttttctgattagatttctgggtatggaagagagaaaatatagttttctgtaaagatgtaagtgaaagaatttagactggccttttaacataaactaggggtttccagtttcttggaatgggaggactccgtttgaatatctaattttgttatgcactctgctcttatttggttgtgattactaatagttgagaagtctgtttctgctgttccagtggttagaaaccactgtttt

SEQ ID NO: 4531 - DNA, 314 bp, Homo sapiens
  misc_feature (1)...(314): n = g, a, c or t
atgcanaacaaattatcntgtgactntnacantggatatttagaatgctgaacggnaaaattaaagtataaaanttaatgatcagaatgctgactgatttccataatncatttcnccnntggaaattaangaggaatcactgattncatttaatgaccatacaattcatgtaaatggctaacattatttagcanaatacacattcacctgacttgattagaaaaagttttccattaacttagcaacactgntgaagcagtctnacattatagcacanantggaggtgggaggacnggaagtacatatatcattt

SEQ ID NO: 4532 - DNA, 267 bp, Homo sapiens
  misc_feature (1)...(267): n = g, a, c or t
tcctgtctnanggtgaggacctgaagggtgtgggtcccggggagggtgaggangccattgtanngagatttactgagatggtatcgggatgccccnancaccacgtnnggggattacntntgggtttntgggaacnannagctganttaggggaganaacccnaaagatctcantggggaaaggactangggngcanggtgtttcacagaaacaannaaggggcctngatttcacagaaatcatnaagagggctccttgtgggtaga

SEQ ID NO: 4533 - DNA, 79 bp, Homo sapiens
  misc_feature (1)...(79): n = g, a, c or t
ctctgaatcanagagcagtgagacctaagggtccctgancnnagagggtccctcctgtctnanggtgaggacctgaagg

SEQ ID NO: 4534 - DNA, 397 bp, Homo sapiens
  misc_feature (1)...(397): n = g, a, c or t
aaaaattttctttttttggcccatcggggcttcggatacctgcttttttttttttatttttccttgcccatcggggcctcggatacctgctttaatttttgtttttctggcccatcggggccgcggatacctgctttgatttttttttttcatcgcccatcggtgctttttatggatgaaaaaatgttggttttgtgggttgttgcactctctggaatatctacacttttttttgctgctgatcatttggtggngtgtgagtgtacctaccgctttggcagagaatgactctgcagttaagctaagggcgtgttcanattgtggaggaaaagnggccgccattttagacttgccgnataactcggnttanggctagtcgtttgtgctaagttaaact

SEQ ID NO: 4535 - DNA, 469 bp, Homo sapiens
  misc_feature (1)...(469): n = g, a, c or t
ccaacaagggnntctacggnnggtaaagataagagggtgagagagataaggctagattgtataaggcttgacagaccatagcaagataagcangaactgtgtccagttaaccatttatccctaacatctaacatagagttcanntagtaaaagccataaaccctttgantcttctggcaagataagtaattagcacagattattgtcactcactgcaactcagccttggagggagtacacaaatcanaaggaggtcaagtgtctgggaaattaaatgacagcacctggaagaacagatcattgttggggtaagaaatggaancccagtgtanaaaaggatagaatgccatggggttagaggtancagaggctgggacagaacttgtctgttctgccccctttcacccctcctgttctttgccttatgtccaacccatcacttgctggggtantcagcctagttgaacag

SEQ ID NO: 4536 - DNA, 372 bp, Homo sapiens
tggggtctgtgtatgctcacttccccatcaacgttgttatccaggagaatgggtctcttgttgaaatccgaaatttcttgggtgaaaaatatatccgcagggttcggatgagaccaggtgttgcttgttcagtatctcaagcccagaaagatgaattaatccttgaaggaaatgacattgagcttgtttcaaattcagcggctttgattcagcaagccacaacagttaaaaacaaggatatcaggaaatttttggatggtatctatgtctctgaaaaaggaactgttcagcaggctgatgaataagatctaagagttacctggctacagaaagaagatgccagatgacacttaagacctacttgtgatattt

SEQ ID NO: 4537 - DNA, 415 bp, Homo sapiens
ccagtaaaggttttgatgccttctctgtgccccccaagaaagagtgattgttcagagtgtgggaggttaccctgttctctgcacagtgttagcacaaaggcaggggtggagttttctggctctctgcccaccaaagtttcatctacaatggcagttgctgggggtggcggggcatattgcattcccatttgctggtggggcaagcaaagccaaacctgcctttgcagacatgtgccagcaaagaaatatcaggagttgccatggtgtcacgggaagctgcagtatggggaagaaatgtgggctggtgcagtcataggggctgccttgctggagctcttcatgagtcaggcatgtccctccagtgcagatgctctggtatgagcttccagggtacctgagactgccctgtaagcag

SEQ ID NO: 4538 - DNA, 133 bp, Homo sapiens
  misc_feature (1)...(133): n = g, a, c or t
ctggtgctgcggcgtgcatgtgcggcccgagagcgtggcttcgggtctaccagatgccttcaaggaaaaggccagaacctgcactgcacggcacagtcactgtgtgtggtgggacccantgtcggctgagagg

SEQ ID NO: 4539 - DNA, 576 bp, Homo sapiens
aaagaagaatcccagtttttacttttactggatggtgaaattggttgctcttgtattttatgaaaaaaaatgatttttttaaccttcatacatagaagcaaaaatactttaactgctgtaaaccttcaaaagttaatagaagtgagatcatactggtttgtttcttattttgattggagaaaaattaaattgctgcatttcgcagtgacccatttacatggcattctcagcttagactgcgtaagaagaaatatatgtggtgaaatgttggaaccatttctctcttggtctctgtttaatgttgaaagggtgagctaataggaggcactttcaacttcactccctcacgctaccccgtccccctccagactggcagtttcaaggatgcaaattgcattgcaaaatcaaactgactcatgaagcatttgggccagtgcactgtttacttccatctgtttgcagacacatttgtgcccggcgtttgggagccctttgtatcaatgttctgacaagggtccctataaccttaacctactcgaaaccggtttgggatggatatgatggggcttctgtgct

SEQ ID NO: 4540 - DNA, 337 bp, Homo sapiens
ctgcgttacccggaaccgccgggccgaacagcatgacgtccgctttggagaactacatcaaccgtatcctcaagctggccgccgcgggcttatcaggaactgttgccgttattacatcagatgggagaatgattgtgggaacactgaaaggttttgaccagaccattaatttgattttggatgaaagccatgaacgagtattcagctcttcacagggggtagaacaagtggtactaggattatacattgtaagaggtgacaacgttgcagtcattggagaaatcgatgaagaaacagattctgcgcttgatttggggaatattcgagcagaaccttt

SEQ ID NO: 4541 - DNA, 111 bp, Homo sapiens
tgctgctgccctccagccgtctgttgcttccctcccccgctcccatttttcagcttttcttgaaatctggcaagcgccagaaagggaaataacttccatccaccttaattt

SEQ ID NO: 4542 - DNA, 474 bp, Homo sapiens
  misc_feature (1)...(474): n = g, a, c or t
cctgagccggcggcagatggaggtgtgtgtgcgtcaccctgatgtggctgcctcagccatacagggcatccagatcgccatccacgaatgccaacaccaattcagggaccagcgctggaactgctcaagcctggagactcgcaacaagatcccctatgagagtcccatcttcagcagaggaaatatctgtacctgtcgcttgcctctacttaccctctgcttagtaaaccacatttaggatggggaacccatgaggaagaacccagaatcagcatgaggaggggttgaggactttgcctaatcgtgcagatggaggcagcctggacaggtaaaaagtctgcccttctgcagaagctcttcccggcgggggacaccaccagcctgtgtgtcatccctgctgcctctggaaaaccctctctgaatcanaggtgctgggtgtgtgtgtgcctgtgtgcagtggctcctgccagcagg

SEQ ID NO: 4543 - DNA, 251 bp, Homo sapiens
ccactcagcacatttcatggaggtcatgtcttttcactgatacttttttgatagtttttatataacaaaatccttattctatttataacttaagatgataaggcactataaattaatgacctaaaataatatatttgtctgttatcttttgctatttctacttcactttaatttttagctgtaaaattggtaaatggattcttacaactatctctttccatttcttactatttggttttcaaatttcattt

SEQ ID NO: 4544 - DNA, 602 bp, Homo sapiens
aaaattagggtggtggtgcacacctatggtcccagctacttgggtgtcttaggcgggagaatcacctgagcccaggagtttggggttgcaatgaactatgaccacaccactgcactccagcctaggcaacagagcaagaccctatctcttaaaatcagttcatgatggatattgtggcttcagatgtgaaagaaaagatacggggctaaaattctgtattttcagtgtattctggtaaccagctaatccaagcagtaatttttgaaatgtgaagtttagaatatattctaaataaaatacgtgcaacctccagtgggaacctcttattattggggaggtagtagaaaggcgctgggtgttctaaaataggctctcctggcccacggctgactgtcttccttgtgtctctgcagtggacgtgactctggacccagacacggcctaccccagcctgatcctctctgataatctgcggcaagtgcggtacagttacctccaacaggacctgcctgacaaccccgagaggttcaatctgtttccctgtgtcttgggctctccatgcttcatcgccgggagacattattgggaggtagaggtgggag

SEQ ID NO: 4545 - DNA, 399 bp, Homo sapiens
cctgaaaataggctattccatttggcaagtaagaggccattgctgatcttagagcaatttccacagaatgagaggcagaagcaagataatagtgactgagaaaaaaactattcagtactctcaggaagcttgctaaattgctaaaattttaatttgcacttattggataaaaatataattttcctaggcatctaaaaattatttttagtatttagtgcaggggaaagcatactgagaatactattttggacaaattttttgataagcactttgaccagttcatcaaaagccttaaaatattcatccgtggccgggcgcggtagctcacacctgtaatcccagcactttgggaggctgaggccgacggatcacaaggtcagaagttcgagaccagtctgg

SEQ ID NO: 4546 - DNA, 205 bp, Homo sapiens
  misc_feature (1)...(205): n = g, a, c or t
aatattcccaaattgtgcttgctcatggcaaaatggatgcaaccanngttattccanaacatgcatntcaagcattcacctgttttcatgaatcctggatgctcancantgtttgaactatttaatagcttcacggcttttcgataattacctcttaagtactcaaaattgcttttaagaaagagagagggtgcggaatttccag

SEQ ID NO: 4547 - DNA, 295 bp, Homo sapiens; identical to SEQ ID NO: 342

SEQ ID NO: 4548 - DNA, 227 bp, Homo sapiens
attagatggagaggaggcagtttctaaatggcttgactttggtgaagtctcaactcaggaagctctgaaattaatccacccaacagagaacatcaccttccatgcagtctcttctgtggtgaacaactcgcgaaacaacactcctgagtgtctggctcctgtcgacttggtggtcaaaaaggagctcagggcaagtggcagtagccagaggatgttgcagtggttgg

SEQ ID NO: 4549 - DNA, 368 bp, Homo sapiens
ctgaatcatgaataacactatataatagagtataaggaacacaagcattagatgtgatccttgccccatacccttagattatgtcagactaaagctgacaattctgccaggctctgaacccctagtgcccccaacccaaatcttggaagcaaagaatatgccctgtcatacaactttgtacaagttgtagtaaaacaaagcttaagttttctcatctttctacagcaaatggtcagttatttaataaacactaaaatgctcctaagaatccattttgagtttgtttaccaaacacattgtgcaagaactgactacacaaaaagttcctttgaaatttggtccacaaattcacttaaggttggaaattt

SEQ ID NO: 4550 - DNA, 401 bp, Homo sapiens
aaactacagaacacccactggaactcatggagatgctggagactttgcaatgattgcatattttgtgttgaagccaagatgtttacagaaaggaagtttaaccatacagcaagtagacgaccttttagactcaattgccagcaataattctgctaaaagaaaagacctaataaaaaagagccttcttcaacttataactcagagttcagcacttgagcaaaagtggcttatacggatgatcataaaggatttaaatgttctttcacagaggactggagttaatattgacaggatgtttaacgtttttatcaatgtcttcataggacctgttcactgttcaaaaaatacacttaatggagatttggcatcagcaaccattcctgaagaaagcagacttatgg

SEQ ID NO: 4551 - DNA, 182 bp, Homo sapiens
ctggagatgttgggctgggaggccctgtggtcactcatactgcaggagagagaagaagggtacaggtgccagcttctccctgcccttaagcgaggtcagctccaccaggctcacgcactccaggacctcagcctgcaggcggcccagcagctcacaggcagcgttcatggttccaccagtgg

SEQ ID NO: 4552 - DNA, 606 bp, Homo sapiens
aaaaaccaaaagaaaattcagaacagttttgtaataggataaattaaaggtatgctaccacatataaaactttgctacagtcagttaagtattatacaacttttcaaactaaaggaaaacaaatcaaaatattaaaagaagatactgtctaatctaaaagtgtactggtttctacaagtgtcaaaaaaagatttgatgtagtgcaactgtctatacttgtggtgcctttgaaaaaagggtgggaaggaggggagagaagaaacttttcttgcttctggaagcaaaagacatattggaattagagaataaacagaccatgcagtgcgtcactccacgctgcagtcattggtgctcatctgccaaccaaacatttccttaagtctcactgtggcaatctccttaggattcaaacccagagttaaggctggtctgctaaaaacgggggcactattgtcattcaaccctttagatctctagatttcctaatgcccgaataaggccaaatacagaataattaattaagcatttctttttccaaaagcaaatcaagtcactctcctttcttgctaatttatactttttcttatggcaatgatttttttctag

SEQ ID NO: 4553 - DNA, 568 bp, Homo sapiens
cctggctaaaatctacccttgggccctgcactcctccccatggctatattgcaaatatcctatactttgcatgtgatcacacaaagagggtttctgttactggcacacaaaaagtttgcctgagatgattctcctccacttccatcagggtcttctggtcattgatttcaacttattctctcttaagaagcccattgagtccccataatctcttggtttctttcttttccaggaccaactgctcacagttcaaaccctcattttgcctctatttacttgtaccttgattggctgatgccctaacagacccaggttcttcagaaagccttcctagtccacctcagaccttggggatccccctttcccatgacccccgatggcacctgattacgtcactgggttccagttaccagaccacagccaaggtccaggatggctgcatcagagtcatccagagccggttaaaaatgacagcctcggctgggcacagtggctaatgcctgtaattccagtactttgggagggaaggtgggtggatcacgaggtcaagagatggaggccatcctgg

SEQ ID NO: 4554 - DNA, 517 bp, Homo sapiens
  misc_feature (1)...(517): n = g, a, c or t
ctgctacagaagctgatatattatggcgggccaaaagcagctttctaaagtgactcccaatgaagggagagtagattaagaggaaaataaccccagagggaagcaagcaagtttgacccccaaagcccccaaagttctaggagctccagactgtctctgttagatcccttctttcttaatcccagtcccccctccctcccagtcccgccagcccaagagggactgactgtagctgacaagcagggcaacagcagaatcagttcaaataagcaatcatgtacaaggcatcgacattcccacacccagcaatggcgcagatccaccccgaccccagcagttcgtaatcactgcctttaacttagcgcttaagtggcaggcactgggctaagcgctttacagacatcacagcttctgaaattcctcacaacaaccctatgaggtaggttctgatatttcagccccattttacagataagaagactgagttgntaacttttaactgagcagttaaaagaca

SEQ ID NO: 4555 - DNA, 399 bp, Homo sapiens
  misc_feature (1)...(399): n = g, a, c or t
ctgaaaataggctattccatttggcnagtangaggccattgctgatcttagagcantttccacanaangagaggcagaagcnngataatagtgactgagaaaaaaactattcantactctnaggaancttgctaaattgctaaaattttaatttgcncttattggataaaaatataattttcctaggcatctaaaaantatttttagnattnagngcaggggaaagcatactganaatactattttggacaaattttttgataagcactttnaccagttnatcaaaagccttaaaatattcntccgtggccgggcgcggtagctcacacctgtaatcncagcactttgggaggctgaggccgacggatcacaaggtcnnnaagttcgagaccagtctgg

SEQ ID NO: 4556 - DNA, 257 bp, Homo sapiens
ccaatagtactgcagtggtaaagataccaggcactcctggggcaggaggtcgtcttagccctgaaaacaatcaggtattgaccaagaagaaattacaggacttagtaagagaagtggatcctaatgagcagttggatgaagatgtggaggagatgctgctgcagattgctgatgattttatcgagagtgtggtgacagcagcctgtcagcttgcgcggcatcgcaagtctagcaccctggaggtgaaagatgtccag

SEQ ID NO: 4557 - DNA, 503 bp, Homo sapiens
ctgatgccccaggaggccggcctggcggaggagttcctgctcactgacaatagtgccatatggcaaacggtagaagaactggattacttagaagtggaggctgaggccaagatggagaacttgcgagctgcagtgccaggtcaacccctagctctgactgcccgtggtggccccaaggacacccagcccagctatcaccatggcaatggaccttacaacgacgtggacatccctggctgctggtttttcaagctgcctcacaaggatggtaatagctgtaatgtgggaagcccctttgccaaggacttcctgcccaagatggaggatggcaccctgcaggctggcccaggaagtgccagtgggccccgtgctctggaaatcaacaaaatgatttctttctggaggaacgcccataaacgtatcagctcccagatggtggtgtggctgcccaggtcagctctgccccgtgctgtgatcaggcaccccgactatgatgaggaagg

SEQ ID NO: 4558 - DNA, 347 bp, Homo sapiens
ccagtggaggggtgggggtatcgatcccgccgggggctggcttggttgctggtgccctgagcccttctctgcccgcctgggtgttgccttcactgatggaggtaggcgtccagccagatgtcaccagacttcttcagggacctgacgatgtccaccagcgcggtgaggaagggcttcacttcgtagctgaggccgtgcttggcacacagcgacttgaccagcggggccacccggctgtagttgtgtctcggcatcctggggaagaggtggtgctcgatctggaagttgaggtgcccgctgaaccagttggtgaaaagtgagggctccacgttgcaggtggctgccag

SEQ ID NO: 4559 - DNA, 392 bp, Homo sapiens
  misc_feature (1)...(392): n = g, a, c or t
cttttttttttttttttttttttttttagggaggaataagtttatttctcctccatccactcaaaatatatnttaacaccagtggcattatgganacagcatttggttagggagtgccaagcattctacagcatttgatggnggaaatagtcatgctttttatttctgctctctaggaatgtaaggngcacagcaggtcagggtactgctgtgtganacaaaaggnccaggtagaggcaattctccanatgcaggcagggcaggngctcactgggcanagngcttntcatacaccttcaggaactcgagcacgtcgtcgggggaccccaagatcaccggcgccctntggtgaatgtctgtgggaatgacgtntaacacggcctccttcccag

SEQ ID NO: 4560 - DNA, 455 bp, Homo sapiens; identical to SEQ ID NO: 4202

SEQ ID NO: 4561 - DNA, 344 bp, Homo sapiens
cctgggcaacatagcaagaccctcgtctctattaaaaatataaaaaatacaccagacgcggtggctcatgcctgtaatcccagcgctttggaaggctgaggcaggtggattgcttgagaccaggagtttgagaccagcctggtcaacacagagaaaccccatctatactaaaaatacaaaaatcagcctggtgcggtggcacacccattagtcctagctactcaagaggctgaagcataagaattgtgtgaacccaggaggcggagcttgcagtgagctgagattgtgccactgcactccagcctgggcaacagaccaagactctgtctcaaaaaaaaaaaaaa

SEQ ID NO: 4562 - DNA, 291 bp, Homo sapiens
ctggcgggggcgagcacctctgcctattcccgggtccccaagcccctcagccccatgcctgtctacacagcaggattgcttgagcattcaccggaagttatgggcctggggacccaggctgaaaccctgccctcctggtgcttccactctagacaagggggtcagtgacatggtgatgccagttggaggtgacctctgtcaggctgggagcagggcagacaggtgttggtgtaggtgggctccagggcaagaggcagcccccagtagagtgcacggggttttctagcccag

SEQ ID NO: 4563 - DNA, 518 bp, Homo sapiens
  misc_feature (1)...(518): n = g, a, c or t
aaaagctcagagagtaagtgctggggaaagcagagctatcagaggaaatctctcatagaaacgaaaccaaaccaacagaaaatgaagaaggccacatctttaaggccacctctgcctctatcagatgagctgctggtctagatcaggggctggcaaacttttctgtaaaaggccagacagtaaaaatttccgattttgcaggccacatagtgtctgttgcaactattcaactctgccatagatcatgtgtaaaggaatgggtgtggctgttcaataaactatacagttgacccttgaacaatatgggtttgaactgcatggctgcacttatatatggatttttttcaaccatacaggttgaaaatacagtattggcagggggcgaaacctgcgtncatggagggctgatttatcacatacgtgggttctgtagggcccactgngggacttgagtatgcatngggtttttgtntactcaggcgttctggaactatcctccatgtntnccaaaggatggt

SEQ ID NO: 4564 - DNA, 289 bp, Homo sapiens
cctaaagggaactgtcttctgtcgagaagtaaaggaaacttcatgaaggatgtagaagcttagctgcctcagagaagagagaacctgaagatctgaggcaagctggacaggagaggtggatatttgttgatggaagaattcaagtttataatcaattcccacttagcacctactgtgtgctaggaacttgaatgtgtatgtttgacaagtcctgcttggcctgatgggtgggagaaggaacctgagcctggctgagatggctaggcggagggctttgaagtccaagcag

SEQ ID NO: 4565 - DNA, 572 bp, Homo sapiens
  misc_feature (1)...(572): n = g, a, c or t
tttttttttttttttttttttttattgaacagttttattctgttttanaataaaaactttgctttaatattgtaaggggtactgcaggtatgccatgctgccagttattgctggggcacaaaacgccccagtcagtgattcggagggctgggaaaacncataaactcataatttcagagcaagtagaactagtatttacagttttctttcttgaaattggcccgggacatntccaacagtctacacatgtattgccatggtacttgctctgatgctctgaatgcctcggaactgngttcaatatcatgatttgngggtcctctaaaaggttttgttgttaacatgcaagcaaacagcactgaacaatattgtctaaactatggctgccaagtactggatcttcataatgaaaccaaattacaaaacactgccttgtagagctatacaaaagatataaaatgaaaataaaaaatgtcaaccagccttaaatattccaattctcctacagtgcagtttctatatctttatcactactgaatgttttaaggagaaagttaanaaaacaatcaaaa

SEQ ID NO: 4566 - DNA, 576 bp, Homo sapiens
aaatcaactaaagactcatgagatttatttggttacagtgaataacctggacaaaatgttgagaagagttgttaaaacaagtttacattaaatatactaacaattacgtttggttacatatttgtaagtgatggttatttagaaaaactgcatagaaatccaaaccttaaatattctgcaaatcaaatcattagcttttctcttctctaataaagtagggtgactagttcttggattaatctaactataacattaatgtagcacttgattatcttatggaataattctctatctcatctaagcctcacaacaaccttgtaaagtattatccccatatggaggaagaaacaggcttagaagtggaaaggtagattctctgcttgcacaaccgtattatgtggctaagctattgaacttgaacctagatttgggacttcatttcaaatatgaaattttttgattaaatctttttatcttgtatggaaaaaatatctcattagctgtcagatgttatttaccctgctaacttaaaaatatttcattaaaaaaattcagcttcatagcctttcagtttcc

SEQ ID NO: 4567 - DNA, 384 bp, Homo sapiens
ctgtctggtaaaccagtggcacttcactgccccagggtggctggctccctttctgaatttctgtctcaatgtgatataattgccaccattcaggatggctacccacatctggtatgaacaccatgacttctgtaagccaacggggcttcctcctcagaacagtgcccgtgcaatcttcctccctgtggccttgatcctgggaaaggagccccctcctccctcactcggaggagttcctgaggcagacgggccactggtgacgccaggtgtagcagtagaggaccttcgccgctgccgcaggaggaaatcgtgtgaagctccatccatggcgtagaatacattagccgaggctgggatagtcagctctcgctcccctggtagcag

SEQ ID NO: 4568 - DNA, 355 bp, Homo sapiens
aaactagtattaaaggtagtttaccaaagcattttttgttttcttaccttgaaaacacagaaccgttaattccttggtttaagcagttgctaagttttttaattttaggctcagaggcccataggaggttttaagatttatgtttagtccgataggtgaggtctttgatattttgaattttaactccttttatgatacatcacagtaacctcatttttgaagtctttctttgtactttaatgttctccctgttctaatagttgaagtatgagatgtaactattataaactgttgctgaaaacataaatgtctgtaacttacaaacatgataaataaattaaaaattccatccagg

SEQ ID NO: 4569 - DNA, 119 bp, Homo sapiens
ctgggagatatcgatgcggttgcacagcaggtccgagatgacgtcctgtgcgtgagccaccgcgccctcagggtctcggtcgatgagcaggcggcgcagtgaggcagtgaccaggttgg

SEQ ID NO: 4570 - DNA, 568 bp, Homo sapiens
cctagaagaggtcaaggttagaaaggttaagcatttgatcactacaggtacttgtagtacctagagaaggaacccatcctggggttggtggagttggtattgctactcgttttgatagttctcatttacagagaaagaaaaataagccaaagccagaaagcaatccaagccttacagttgtccaatacctcagggccagttggctagaattttcttttccctcagcccataatcacttagagttagccatacaacaaacagcctgacaatctgaccagcatttccattgatataaaatgtaagcattccttcattctgtagttaggaactccaacttcagccttatctccaacataatttcccaatttaacctatgtactgatatggacatttctttgtgaatatgccagattcaagaatgtatttttctaaggtcaatagagatacgacattttaagtcaggaaaaatcacctataaattagtaggaataactgtagaagcatcacaaaagataccccatgaatagatggcatggtgtgcatgctgacagccacggggtcatactct

SEQ ID NO: 4571 - DNA, 332 bp, Homo sapiens; identical to SEQ ID NO: 4096

SEQ ID NO: 4572 - DNA, 351 bp, Homo sapiens
aaattaataacttgaaattacccctgccccccaccccattacatctttttataaacagcaaacattttgctattttatacataggctagcaggcttgtttcaatatgaaagtgctaattcatttacagatttttataatcagttatgtagtgctacaataaatgtccaataatctacataggaacaatgatgaaaatgatgaagactgaataaggctatcagatgaccttatcttatttacatataaagaatagatacccaatggtgaggaagaaacagaaattggacaaatactcataggtgtaaaaattacatctacctttgagttttatactgtaaatgagacatttt

SEQ ID NO: 4573 - DNA, 511 bp, Homo sapiens
  misc_feature (1)...(511): n = g, a, c or t
cctgagtggcctgtttgccacccagaatggggatgttggttgctatggaaacatggatgagtttacccaanaggaactccgggctctggatagtgagggcagggccctcctnacacagnataanatccggtaatagctnatatntccctgctactgagcactgctggtgctactctttgagtgtgaagattctaangcttgccatgtaaacatacatgcaccgtggagaagttnccaaatttgnctttcctggnttagtnctggctgggctactcagtgtgtgaccctggcaaatttttcccccctntgaagcttgagtttncatctctacaatgtggggctggcctantgatccagctcttattaccatagacatctnanaagcancttantgctgaactcanngccccaggttgctgtctttctgggtgttctgngtgaatagcagcaccattacctggtggtaatccttagatatccctctccctgccttatcannagtcagtcccca

SEQ ID NO: 4574 - DNA, 530 bp, Homo sapiens
  misc_feature (1)...(530): n = g, a, c or t
aaattagaggttaataatgttgttttcttctctctcttttttttttttttttttttgagacagagtctagctttgtaccaggctgcagtgcagtagtgccatctcagctcactgcaacctctgcctcccgggttcaagcgattgtcctgcctcagcctcccgagtagctgggattacagccacatgccaccacacccagctaatgtttgtatttttagtagatacggggtttcatcatgttgcccaggatggtcttaatttcctgacctcgtgatccgcccatctcggcctcccaaaatgctgggattacaggcatgagccaccanaaccggacatgctttccttaaaagctaaatattttaggcttgtgtgccattaggctctgttacaactacttaattctgcttttgtaattctatagcacccattgataatacataaacaaatgagcatgaatgtgtctcagtaaaaatttgttcacataaacaggcagtccacccatgaagctatagcttgctgaccccttgttt

SEQ ID NO: 4575 - DNA, 607 bp, Homo sapiens
aaagttatgtttgagaaccctgacttccaagtagatgaagagagtgaagaatttaggcttctgaatccacttgtttcaaaaattagtgaaaaaaggaagaagaaactaagactcttagagcaacaagaacttcgtgaaaaagaagaggaggaagagccggaaggaaaaccaagtgatgcagaaagttcggagagttcagatgatgaaaaagcctgggttgaagaggtcaggaagcaacgcagactcctccagcaggaggaaaaagtgaagcggcaggaacgactcaaggaggaccagcagacagtcctaaagccccagttttatgagatcaaagcaggagaagaatttagaagcttcaaagattctgccacaaagcagaaactgatgaacaaaacccttgaagatcgtttgaaaattgaagcaaaaaatgggacattgagtgtatccgacaccaccgttggcagcaaacaattgacattcacgttaaagaggtctgaacagcagaagaagcaataggaggctgagaaactgcatcgacaagaaaggaaaagactccgtcgttcggccggacacctgaagtcaagacacaaaagaggacggtcgtttc

SEQ ID NO: 4576 - DNA, 234 bp, Homo sapiens
attttttaaaaagattattcaactaccaatcagtaatgtttttaaacagtacatttgctttgaacttggaaaatgtgttcagaaagaaaaatggaattgaatttcatttatacactaattccttggattttgcacagttacctaacggttttagtctggagttaaattcagatgcatggaatcctgaaggaaaatggtagctttttaatctttttgtgtgtgtgtgagtctttt

SEQ ID NO: 4577 - DNA, 582 bp, Homo sapiens; identical to SEQ ID NO: 643
  misc_feature (1)...(582): n = g, a, c or t

SEQ ID NO: 4578 - DNA, 291 bp, Homo sapiens
ccaatggtggcagagtctacatagaactatgcttcgtggtgttctggggaaaacctttcgacttgttggctatactattcaatatggctgtatagctcattgtgcttttgaatacgttggtggtgttgtcatggtgccaatgggtcatgtttggttagaaggtgacaatctacagaattctacagattccaggtgctatggacctattccatatggactaataagaggacgaatcttctttaagatttggcctctgagtgattttggatttttacgtgccagccctaatgg

SEQ ID NO: 4579 - DNA, 202 bp, Homo sapiens
aaacctcagcttaactgcagaattctaagccttctttttgatcaaactgagatctatggcaacccttctgctacccgggacttggaaggatagtgaatataaattaggctctggacccccaaggctggtgatgctactgtaacctctacagctctggattcaacctgagggcctgggatatgtgactttacataaaaatgat

SEQ ID NO: 4580 - DNA, 507 bp, Homo sapiens
  misc_feature (1)...(507): n = g, a, c or t
tgcgcctgtagttccagctattcaggaggctgaggcaggaggatctttgagcctaggatgctaaggttgcagtgagccaagatggcaccattgcactctagcctgggcagcagagcgagaccctgtctcaaaaaatacatttatttttttcattttcagttaacagtgtactcttatgacaccgttattagctggtactttggtgatttctattactagtttttctaagctatttacagagtgtttgtagctttcatttgcagcattatgttcccacaaattctgtactcagtatatacagtatagtttatctgctctatttctgncttatagaaatcatgaatgtggtctgcagacattgatgaagaaaatctgntggtaattgatacatgggctaaagcatcagaggnttaatttgaagtttatgttcacacactgaaaacttantttttttgntggnagatccatgtgcatgctanaatttgggacaggcactatttgcataaa

SEQ ID NO: 4581 - DNA, 511 bp, Homo sapiens
cctcttgattcctaggagtcaataagaaggctttggagtccaggcaggaagtcagggacttgaattcctccacacacttttcgggaggatgtggtgagcgattgtagaggagaaagcgctggtaaccctggcctgtctcattcagcatgattccacctgggcatgagctggaaaagagctcagtcttcatgtcagggcggccttcagttctgagatctgtgctcccttcagtcaggtggtagatccatttccggggcacacagagcccatctttcatgcggatggtagcacgaaggtggagctgcatcggggcagagccagcagccatattgaagacaatgttgtccacagggtcaaaagttgccaactcctccttggtgggagctgcccctgcgataaagtaccactggcccaagtggacctctgggaatgtttggggctgcggactttctcgtcgtgccccacaaaagtaaagcttggggacctggggggagccggaagtatcgcttcg

SEQ ID NO: 4582 - DNA, 131 bp, Homo sapiens
aaaaaccattttcctatgttaggagtgcaagaatagccagcatttccgattttgacatatgttcattttatgcatatttaagaaattatagctgcatatcccttctttcaaaaaatgttgctttttttttt

SEQ ID NO: 4583 - DNA, 365 bp, Homo sapiens
cctatttaagggttcccagcagaatgggccattgtccgcctctccagttgcatgactggagtttgatggccttttgttctttctgagctgtagctggagcttgcttgttggttcacaggaacaagcaaggttcatctaaactgtaggcaaaaacttaaaaacaactagtgagtttagaatttaatggcaaatgtatgataagttttgaaacacaatttctttctctctagtccccatttttggaaaaaacaaacaaaaaaacataaatcatgataggactgagttgtttgcaaaatagattgtagtcttacacttggtctgattatttgcataaagtgcaagaggaataattatttctacatagg

SEQ ID NO: 4584 - DNA, 595 bp, Homo sapiens
aaatttggtgatattattatattttatctgaatgaacagaatttgctgatttgacactgtgtttgagtgtgcattttttgttgaaaaatgacaattctggaatgccgtctccctttccagattattcagagctgggagagcttcccccacgatctcctttagaaccagtttgtgaagatgggccctttggccccccaccagaggaaaagaaaaggacatctcgtgagctccgagagctgtggcaaaaggctattcttcaacagatactgctgcttagaatggagaaggaaaatcagaagctccaagcctctgaaaatgatttgctgaacaagcgcctgaagctcgattatgaagaaattactccctgtcttaaagaagtaactacagtgtgggaaaagatgcttagcactccaggaagatcaaaaattaagtttgacatggaaaaaatgcactcggctgttgggcaaggtgtgccacgtcatcaccgaggtgaaatctggaaatttctagctgagcaattccaccttaaacaccagtttcccagcaaacagcagccaaaggatgtgccatacaaagaactcttaaagcagacctc

SEQ ID NO: 4585 - DNA, 342 bp, Homo sapiens
ggcacgatatcggctaactgcaacctctgcctcccgggttcaagtgattctcctgcctcagcctcccgagtagctggggttacagacaccacgcccaactagtttttgtatttttaggagaaacggggtttcaccatgttggctaggctggtcccgaactcctgacctcaggtgatccacccacctcagcctcccaagttgttgggattacaggcatgagccactgcgccctgcctatgatgacctttatattttcatatggattaaagataccgtccagagtgctttcatttcatcttgaatgctcgttttagcatttcttcttggacaggtctagaatac

SEQ ID NO: 4586 - DNA, 461 bp, Homo sapiens
  misc_feature (1)...(461): n = g, a, c or t
ctggagccntctgctcaccanaactcctacttnccggtggcaggagagcnngagagggacagacagatggcagggcatgtccaaaagaagagcatcagcacaaatgaatnctccccttncccacctccaggggngggggcctttggcacctcaatccccgataccctactccttcccacccacatctncttgcacccatctggaacctnggttgatgtgagccggcaacagagaagcaccgtggcgcggcgagggaatgcanacngcacccancggtggatggcggcagcggaggccgcggggaaacctgaccaggaagctgaggaccaaaccagcctctttttccgttcccggtttttttcctgaacccaacgcgtgccgtgccccgtttcccccaatatgtgttggggaggggtgtcctgaatggggtggtngattttttttnttaaaaaaattttttt

SEQ ID NO: 4587 - DNA, 498 bp, Homo sapiens
ggagcagcagatagaagggacagggttgcacttataacaccactatcctcccagccctggttttatcatcatcatcgagaaaaatacaattaatcagcagtgatcaaaggtaagtctaaacattccatttaactaacttaaatgtgacctggtgtgccgtgtcattctataaatgacataacagaataagactcactttctaattcacagcctctggttcaatttcaagtaagcaaatacattttgctttggttttgcttacaatattctgggaaatgcaggctataaataatcactcaactgttttgtgggtcaacagaatcactactactttcagtttcgttgatgccatttatatcatgagctcaagcacacgggcgcttcagaaggcactataaagtttagttttgatgtggtgtgatgttctgatctatcttgaaaggtaaagaaacccacaggattcagcgtcaagccaatccatgcccaggcacatcgcag

SEQ ID NO: 4588 - DNA, 456 bp, Homo sapiens
cctaaaaaagcggcctcggtgggaatgcatttctcttgctccacgtctattttagttgcatatctgtagtgatgacaaatgcctccagccttgtcctctgcaaggctgcactgggctgcatacaggctcctgtctcaggtgtctggtttcctccttgaaaggttggggcagcagagtcagccctgtctatctgggcaaggccctgacacttggaagcatgaaaagccatggttcaggtggagtgagcttccaatgcccttggaaggattttatttcagggccgtggggcttaaaagtcatcactgtacaatccactgggagcaaagatcaagataagatgtgatggatatcataaaagcggaacagaacatcccattgctcagagatgggagaacaactctgaatggagagggctcaggttatatacattcacccttttcatgggaaagtgtgagg

SEQ ID NO: 4589 - DNA, 534 bp, Homo sapiens; identical to SEQ ID NO: 343

SEQ ID NO: 4590 - DNA, 290 bp, Homo sapiens
  misc_feature (1)...(290): n = g, a, c or t
ctgcctgcctgggaggaggggctggcctggatctgtgacagccacccagcagcactgcagggccatggggctcanaaaatgcagaggcatcccccgccctgcccaggcataggattggctgaggcatcctgccttcagccgggtccacacgtgacacgtccacacgtgacaggcccacagacgacaggaccacacaacaggttcacacgtgacaggtccacacgtgactggtgcatgcatgacaggtccacacgtgacagtccacacgtgacaggtccacatgtgacagg

SEQ ID NO: 4591 - DNA, 243 bp, Homo sapiens
ccttcacttggttcatgtaggaacaccaagtccctttcaaagcaccacatcttcctctaatcaatatttcttggagtccctagggaatgtcttacatgcattcaaacaatcaccatttctggagatacactacagggtcaccataaactctgctacccttaggttccatcactatggaagctgagtttcaccagaaggcacttttgtcctccattacgaccagcaaagccagctaagccacag

SEQ ID NO: 4592 - DNA, 413 bp, Homo sapiens
ccacacggtactgctctcggcggactgaagcatttgtcctgcaacctgctgcttcagatggctcttagctacaataagaaatcctaagtccaaaggccaactttctcatacaactggtgcccttgcaggaagcagtgggaggtggggagggatgaggaccactgttgagtaaggacagcagaggtcccttgccatgcctcccttctgcccttgtccgggaacaacatggggagaagccagggatctcatgacatcctttagtctcaaactcgatcccaaggttgccacgacagccttgtccccaccatgcaagtcacctccccaacaagacacataaaaagccacgtctgctctccactaggctcccacaagaaaaacagaccaagatcccccatggggcgtgagtactgcag

SEQ ID NO: 4593 - DNA, 315 bp, Homo sapiens
ctggattagataggagggtctctttcagcttgcacctctgggaagccaacactgacgcccactgggagaggctgaacttggtccaggctaccacttcagcatcagcccatggtggaagcagacttccccaagcccaaagttcagccccctgccccacacccctctgcacacctgccacaatgacggaggtaaaaccaaagaacatccccagcgccatcttctgcagagcagagggaagcagcttgcaccgcagcagtaaagggtcgatcaagcggtccttcagagggaccagaatcagcaccaccacaacattgg

SEQ ID NO: 4594 - DNA, 466 bp, Homo sapiens
ccagtacagttcttcctggatggccgacacagatcctggggaaaggcaatcccggcactgctctgaaaccagagctcctcctccctccccgggcagggtggagctgagaagggctgctctagcgttgggactccacctccatacacctgatattttgatagggcaggtccctgctatgggccactgttctgggcagtatagtatgcttgacagcatccttggcatctatccaccagatcccagagcacccgctactagctgtgacaacatcctccaaacattgcaaaatttcccctgggaggcaagattgcctcagatgggagaatcacgctctagggaaatctgctggtatgagaaccccaactccccactccactgagcctccagatggcgagcaggctgcagctccagcacagacacgaagctccctccagccactgacggtccatggctggggttacccagg

SEQ ID NO: 4595 - DNA, 405 bp, Homo sapiens
aaagagacagacaatgacgcattttaatctacctttgtcttaatttacagcaggttttgtatgaatttttaaccttttaacaaactcccaaatctggttgatgcctttgacagtgatgaaaacgatttcaccacatctgaatccagagaaaccggcttttttttcttattgcgagcatgttaaaacgttgggaacatgtggggaattgtatattgcgctgaattaacttctcccgcctcttgtaatgctctggtgggttcttgtttgggaatgcgatattttgtggctggtttagctagagagtgaactctcaaaggtatcaaaactgtgcttccattattagtgcaagaaacagacaggctttaaggggtagatgacgtgaaattttgcaagtcttaattacag

SEQ ID NO: 4596 - DNA, 388 bp, Homo sapiens
ccaactccagctctatctggtcaatggtctcctgatactccttctcccgggttttgaacaggggctccgtatctttaatcactttctccaggctatcttcctgctgctggagtagaaagggaagcgggggaggccagccaaggagggatgggatgggacgcattccaaagggccaagtcagggagagagagagaggaagtctggttaaagaaactggagaaagaaaagcaaaaggataaaggaagaggggaggcgcaggtagaggatgacagccacatggggggacagagcaaggagaggagcgggggagtgggcgtcaggctggagaggcagagccagagggccctgaggccgggagcagaggttacctctccctgggcctctgcag

SEQ ID NO: 4597 - DNA, 106 bp, Homo sapiens
ccagagtcctgtccaaggcaatggcgtaggctgcgcctcagttcatccgagtccctccccagctcactggtccaggccaagggatgggagaggctttgagtctaga

SEQ ID NO: 4598 - DNA, 337 bp, Homo sapiens
ccaaaatattggaacacacagaaccaaaccaggtgtgttctacacctgcatgagtgaaggatttccacgtagacacctaggaagagcccgcatgccctagactcactccagaggaaggattgatttgcaaccagaaagggagctgaaaaccacggagctccatggctcttcattcaaaagggaaaataatgattccacgttgctttttagagttcaaatcaacatctttctggataaatctattttttaacaatctttttattatttgtaaaagatataaaaacaactcccatcagtagcaatacaaggttatacattttaaccagattttctcagg

SEQ ID NO: 4599 - DNA, 431 bp, Homo sapiens
aaaaagtgggataagaacacaaagaggttatatataagaatgtatttcgtagagttgtatgtgaaggcaaaaaaacccaaaaaacctgaaagtttcttcaatggaaaactggttaattacatctatttgggccttaaaatgatgtgctagatctgtatgtcagggaaagacattcatggtgtactattaaagttaaaaaaataggttataaagtagtatagagtgatctaagtctctctctctctctgcccccccccacacatatgtgcgtgcaaatgcgtagatgtctaaaaggtatgtgtgtgagtatgtctaacacatatatgtgagaagatatttgcaaggctgtacgctaaaattttaagcaagaatgatctttaggaggctgaatttcttgggattttatgcttctatttttggtttatattttt

SEQ ID NO: 4600 - DNA, 364 bp, Homo sapiens
ccagttggcagaggttcattcagtaagtcccgagcagggtgcgaaggacagtcatccttctgaagagcccgttaagtcattttccaaaacacagcgctgggcagaaccaggggaacccatctgtgttgtctgtggtcgttatggagagtatatctgtgataagacagatgaagatgtgtgtagtttggagtgtaaagcgaaacatcttctacaagttaaggaaaaggaagagaaatcaaaactcagcaatccacagaaggctgattctgagccagagtctccactgaatgcttcctatgtctacaaagagcacccctttattttgaaccttcaggaagaccagattgaaaatcttaaacagcag

SEQ ID NO: 4601 - DNA, 390 bp, Homo sapiens
  misc_feature (1)...(390): n = g, a, c or t
ccagaatataccagaatcatcttgcttcaggcatgtgcttcttgggtttctccgtgtgtcgctgtaccttgtaggtctctgcatgcatccactcagcttgtcctctgaccatacatttgaatcgcaccacacatcagagcatgctgaatcagtgcgtgttttgaatcatcactgcgagcacttgtgttcgagtcaacaggcaccacaatgtatgtgcaattctctanctctgggtgattgggggctactataggtatgtccctaaatgttgngtgtctacacgtattgggtttcgttccaagggtgtgtagtgtttangaaactgggactgcgcantgtttgtgtcngtgtgtggtgtgtggcatcagggcgtcactactttaatatata

SEQ ID NO: 4602 - DNA, 557 bp, Homo sapiens
ctggcagctcacattttacattagagagtggggtccccacattttacattacagagcggggtccctgagctgcaggaggagagcctgcagggctcttgggtagaattgcacttttgcaataagggaaacgggagcaatgtttcagcctcagtttctatttataatactgacacaaaaagaatattgctggatacatagcatggatctagatagagcaactccaggagttctcacggtgacagcccccctcactcacagacaccatgtgatactaatagggcttagacacaaagcactgaattcccaaagcattgaagagaaagacagctctcagtctgagtaaaaccgtattgagagaagaaaagaggttgaaagaatcttaaagacaaattcagattacatgtaacattggtcaaattgaccagaaaatattcttccaaagaagttcttctctaaacaccaaaagtgcacagctactctcagcatgagaaatacaagtattatgagaaagagggcttattctgagcagaatttccatctctgctgctctcccatct

SEQ ID NO: 4603 - DNA, 464 bp, Homo sapiens; identical to SEQ ID NO: 200
  misc_feature (1)...(464): n = g, a, c or t

SEQ ID NO: 4604 - DNA, 304 bp, Homo sapiens
ccaagtaagctgtgggcaggcaagcccttcggtcacctgttggctacacagacccctcccctcgtgtcagctcaggcagctcgaggcccccgaccaacacttgcaggggtccctgctagttagcgccccaccgccgtggagttcgtaccgcttccttagaacttctacagaagccaagctccctggagccctgttggcagctctagctttgcagtcgtgtaattggcccaagtcattgtttttctcgcctcactttccaccaagtgtctagagtcatgtgagcctcgtgtcatctccggggtgg

SEQ ID NO: 4605 - DNA, 525 bp, Homo sapiens
  misc_feature (1)...(525): n = g, a, c or t
ctgagttatgaagctggaattggttctagacgctgggtagatgcaaagcagcctaactcttcaagtaccgacatttctcacctctgattccggctctcctttgagaaggagaccttagcttccccgacttcaagtagaacagaagcccgtttccttccctcatcagtgaaaaaatctaatgtttcaaatgtaaattgttcatagaaaaggaacatagaatctgttttacagaagtaaatcgaccgtcaagagaagacttggcctctaatttatattgctttgcactttggtttgatattaagaaacagcattcttcttcagtgaaattttgggtgccaaacacctacccagaatgtccagggctttcattttcaaaagttagcattctccttttgaccgtccaagtcattatgaattctgacttgttgtattaggaacatgttggacagtggaaaattttctctggattgntttagtaatatttttgggattatacttcctttctgtaccaatttcttttaattt

SEQ ID NO: 4606 - DNA, 555 bp, Homo sapiens; identical to SEQ ID NO: 641

SEQ ID NO: 4607 - DNA, 350 bp, Homo sapiens
ctgcacagggaaggaagggaagacgggaagaggttagataggaaatacaagagtcaggagactggaagatgttgtgaaatttaagaacacatagagttggagtaaaagtgtaagaaaactagaagggtaagagaccggtcagaaagtaggctatttgaagttaacacttcagaggcagagtagttctgaatggtaacaagaaattgagtgtgcctttgagagtaggttaaaaaacaataggcaactttattgtagctacttctggaacagaagattgtcattaatagttttagaaaactaaaatatatagcatacttatttgtcaattaacaaagaaactatgtattttt

SEQ ID NO: 4608 - DNA, 505 bp, Homo sapiens
aaaacatgcaaatatagtaaccttacatgacattgttcacacagataaatccttgactttggtgtttgagtatctggataaagacctgaaacagtacatggatgactgtggaaacatcatgagtatgcacaacgtaaagctgtttctgtaccaaattctacgtggtttggcatattgccatagaagaaaggtattgcatcgagacttgaaaccacagaacctcctcattaatgagaaaggagaattaaagctagcagattttggactagcccgagccaagtcagttcccacaaagacctactcaaatgaagttgtcacactatggtaccggccacctgatgtgcttcttggttcctcggagtactcaacacagattgacatgtggggtgttggttgcattttctttgaaatggcttctggaagacctttatttccaggatcaaccgtggaagatgaactgcacttaattttccgactgctaggaactccatctcaggaaacttgg

SEQ ID NO: 4609 - DNA, 319 bp, Homo sapiens
aaaaaagcctctgggaattaggaactagaatgaaaatccaactttccagatcagcttcttaaatatcttgtatttcaataaacatacacttcatacacacagatagatttgatatacaagtacaaaaacctgacatgcacattgaagagaatttatcattcatgatgttaatatatacagaaattctaaggaaaattgcaatgttttaatataaactttctttttaatttcagagttgataattcaacactttcagccaaaatttggccaaagggggttaaaacctgatcttatgtctggaatcccaatgtgatcctcc

SEQ ID NO: 4610 - DNA, 373 bp, Homo sapiens; identical to SEQ ID NO: 202
  misc_feature (1)...(373): n = g, a, c or t

SEQ ID NO: 4611 - DNA, 551 bp, Homo sapiens
  misc_feature (1)...(551): n = g, a, c or t
cctgctcctactatgtccttttccttctctcatatatttcagtcgtctggagttctcagaataaggaatccattatcaatgacctatcccatgaacattttttttgagaacctgtgtaagactatatagacatgaatatttgatgacctgacacctcaccgttcaaacctagatttgggttgtataaatatcaactcaaggctgtaagagcctcccatggtctaatgtttcaagagtaaagaagaatagacaaacacccatgttggaatcatctgttgcagaaaagaacacaaagatagttttattaatttagaacaaattttgagaactttacatagacagaaatcttctacctcctttttttctaattttggggaatgtcttccactagtggtcgctaaaaatgtagaaatatcatagggagtgcaaattacattgtctctttacctgccacaatctggcagcactcatcatgtagcaaatgcccaaataatagactacagattatagtgacttcaccctaggttaacattatttctaggtaaggnact

SEQ ID NO: 4612 - DNA, 430 bp, Homo sapiens
ccaccataaagttgttcagatgtctgtctccaatcccgaggatccagtggctgatgcatatcagagcgtgagagctggcgaagtgggagcggagcgccaggaaagcctcagggcttgtactcatcctcacgaaggcccgctttaagagatcagcaggcactttactttctcgttttctaaaagacgtgactgtttcagtacgattagcgcccttatacattagcatgtaagctccaacatcatgttttcctgacatttttgtcagccaatctttatattcacacggcggtgccctgggatcactcaggtaagccgccttctcctcttgggacatggtgttcaaaagaaggtccttcaaggtaacagtattttcaagccactcaattaatcctaacctggaggtcatgggcacaacgctataggtcctcag

SEQ ID NO: 4613 - DNA, 528 bp, Homo sapiens
aaaagatcagtacaagagctatattttttcctaagaaaaaatttcaacaggaatggggagtagccccgttttggggctgatctgtccagaatttggagtgaggaacaaatccattctcatctactttccacattttccctcttgtttgaggtcctgttccaaccttcatttctgaaactgttctagagcactttgtctttctcatagttcataacttaccccttcagtctagaattagaattacattatctgttttactactttactagactgtaagctcctagaagataaggactagggagttcatctctgtattccaccagaaggtacagtgactcataactagagtctttagatgaaacttactgagttgaataacttaatatatttctgttttcattcccaagggaggccatgtctggagatagaccttgaatttaataaattttaggcactataccatttcagtggagaaaattgttgggaaatttggggggatggatatataagggggagggaagtcactgg

SEQ ID NO: 4614 - DNA, 432 bp, Homo sapiens
aaaaaatataaacattttctttccattaggaagaaataactttagcctaacacatgaaacataaaagctacctaaatttcctataaatcacctagtgaatagctgtaatctacataataaaaagtaaaaaaaaaacttctcatgaactatgtattagaaatgggaaaacaacgtaggagcaggggtttttaggcactttcagtattctcaggtgttcttcgttctggcccttccagggtaattaggaaggcagaacaagacagatgagctcctgcctgctctgagacaagaagggtggggtctcattagctttgcaacaggaaacatcctgttttatggtagtggggtcaggaatgtaggaactggtatccattctgccaattccaccacccattcagtttgcttatccctacagaacagtgactgaggttc

SEQ ID NO: 4615 - DNA, 381 bp, Homo sapiens
ccaagcctcatcaataactgtatccaaaaggagacgctgcttggggtgtacccagagaaaacaccaagctttcctggcttcccggccctccctctccccattagtctttggggtgcatacataagtgttgtgtgaagtctcttggggtttagaagatcttgcactcattgatggagaagagcctccttctgtttcgtctcctggcctggttgacggcagttcggacggcgcactcaaacacctgctgtactccccgattgctaagggctgagcactccaggtagcccttggctctgacatcctgggccagtttcttcccttccatggcattgacgcaggaggccctgtggggccccatctcccgctggtcagtctgggtgg

SEQ ID NO: 4616 - DNA, 379 bp, Homo sapiens
ctggctgggccacccaacccgagggagggggcagtgttcttcccagtcgcagtctccagtgatgagcatcccctgttggggccttcggtggctctcctcagcggctaatgcagttctggacatccacaaagcctaggcgttgcctgcgtttccgctgctccgtcatctgctccttgagctcgttgagctgggcagtgaggtgggacaccagcttcatggtggagttgagcttgtcctggagaatccgaatctcattctgctccccctcgccctcattgctgacaagggacatggcccgcatccgggggaaccagtccaggttcttgttctgaaaaacatcaccagtgggttaagcaggcgtgggcccggcctagaaagg

SEQ ID NO: 4617 - DNA, 373 bp, Homo sapiens; identical to SEQ ID NO: 6

SEQ ID NO: 4618 - DNA, 405 bp, Homo sapiens
ggaagatggcggtggctggggcggtgtccggggagccgctggtgcactggtgcacccagcagttgcggaagactttcggcctggatgtcagcgaggagatcattcagtacgttttgtcaattgagagtgctgaagagatacgagaatatgttactgatctcctccagggaaatgaaggcaaaaaaggtcaattcatagaagaacttataaccaaatggcaaaagaatgatcaggagttgatttcggatcctttgcagcagtgcttcaaaaaagatgaaattttagatgggcagaaatcaggcgaccatctaaagcggggtaggaagaaagggagaaacagacaggaagttcctgcatttactgaacctggcacgactgcagaggttaaaacaccttttgatttgg

SEQ ID NO: 4619 - DNA, 373 bp, Homo sapiens; identical to SEQ ID NO: 6

SEQ ID NO: 4620 - DNA, 408 bp, Homo sapiens
aaattaaaattgtagaaatatctgagtagattggagagaggaaattaattatatagactgtagactattagttgacattgtattaggtaccacacatgacttctcttagtaattcaataatcttttgatggaagagttacagacctcattttatagatgaggaaataggcttagaatcaagtgacttgcccaagaatatacagaaagcaaataatgggacctgataattgaaaccttaatgtgcgtatactttaagagtttgtatattatactttttcacacactgtgatgagctttttctgttattttgaaataaaggtaacagtatatttactttttccctctttctaccctatagacccaagtcttggattgaggaacaggcaatgggatcattcctcagtgtgg

SEQ ID NO: 4621 - DNA, 303 bp, Homo sapiens
ccaggcgcggtggctcacgcctttaatcccagcactttgggaggctgaggcgggcagatcacgaggtcaggagatcaagaccatcctggctaacatggtgaaaccccacctctacaaaaaatgcaaaaaaaagtagttaatttgttactcagcaaatctctacggtgcctaccagactccagatctgggctgctggacacaggaacatcgttaagcaaatcccggccgtcgtggaactgacagcctggaggggacgcaagagacttgggcattcaacagataacttcagagtcccaactgcag

SEQ ID NO: 4622 - DNA, 248 bp, Homo sapiens
agaacaagtctataaaagtagaaatcacatacaaaaatacagattactctgacatgttggcaaaatagcttatggctggacttgagtttggaagttctgtatgtttgagggcatccgatgtcagagtccaaccggatcctaaccccagctcttgtcactaatctgtaaacaataatttcaagtagtatttagcactttttaactattaagaaattgaagcatcatcatttcctgtgcaacccaacttt

SEQ ID NO: 4623 - DNA, 463 bp, Homo sapiens
  misc_feature (1)...(463): n = g, a, c or t
tgaaanacagtatggaagttcctcagaagaattagaaatgctatatgattcaggattcccacttctggatattaaaaaaaaaaaaaatgaaaccaggatctggaagagatatttgcactccccatttcattaatgcagtattcataatagccaananatggaaacaacctaaatgcccattgatggttgaatgaatttagaaaatttagtatatacgtacaatggaatgttattcagccatagaaaaggaaggaaatactgtcagatgctgcagcttgaaccttgacaacattttgctaagtgaaataagccagccacagaaggacaaatactgcatgatttcaccaatatgaagtatctaacgtagtcaaacttatagaaacagtagaatggtggctgctgtggggagggggaattggggaactgctgttcaaaaggtatagagtttctgtcacgcgagttt

SEQ ID NO: 4624 - DNA, 452 bp, Homo sapiens
ctgaaaagttccagcatattttgcgagtactcaacaccaacatcgatgggcggcggaaaatagcctttgccatcactgccattaagggtgtgggccgaagatatgctcatgtggtgttgaggaaagcagacattgacctcaccaagagggcgggagaactcactgaggatgaggtggaacgtgtgatcaccattatgcagaatccacgccagtacaagatcccagaccggttcttgaacagacagaaggatgtaaaggatggaaaatacagccaggtcctagccaatggtctggacaacaagctccgtgaagacctggagcgactgaagaagattcgggcccatagagggctgcgtcacttctggggccttcgtgtccgaggccagcacaccaagaccactggccgccgtggccgcaccgtgggtgtgtccaagaagaaataagtctgtagg

SEQ ID NO: 4625 - DNA, 493 bp, Homo sapiens
ccatcagaggaatgcaaatcaaaaccaccatgacataccatctcacgacagttagaatggtgatcattaaaaagtcaagaaacaacaggtgctggagaggatgtggagaaactgaacacttttacactgttggtgggactgtaaactacttcaaccattgtgaaagacagtgtggcgattcctcaaggatctaaaactagaaataccatttgacccagccatcccattactgggtatatactcaaaggattataaatcatgctgctataaagacacatgcacacgtatgtttattgcagcactattcacaatagcaaagacttggaaccaacccaaatgtccaacaatgatagattggattaagaaaatgtggcacatatacaccatggaataataagcagccataaaaaaggatgagttcatgtcctttgtagggatatggatgaagctggaaaccatcattctcagcaaactatcgcaaggtcagaaaacc

SEQ ID NO: 4626 - DNA, 544 bp, Homo sapiens
  misc_feature (1)...(544): n = g, a, c or t
ccttggatgaacttgcttcacttcaggtcacaatgcaacaagctcagaaacacacagagatgattactacactgaaaaaaatacggcgattcaaagttagtcaggtaatcatggaaaagtctacaatgttgtataacaagtttaagaacatgttcttggttggtgaaggagattccgtgatcacccaagtgctgaataaatctcttgctgaacaaagacagcatgaggaagcgaataaaaccaaagatcaagggaagaaagggccaaacaaaaagctagagaaggaacaaacagggtcaaagactctaaatggaggatctgatgctcaagatggtaatcagccacaacataacggggagagcaatgaagacagcaaagacaaccatgaagccagcacgaagaaaaagccatccagtgaagagagagagactgaaatatctctgaaggattctacactagataactaggttgacatacctggaatatagagaacacttgagaagtttgtaatggntttcatttgaaatagactgntgaaagtttt

SEQ ID NO: 4627 - DNA, 387 bp, Homo sapiens
ccttttttaagtgacctgtaactcatatcagtgaaaaagaacatgctataaaaagattccacaaagtgagagcattaagctcaaaggtcctgaggtaggtgtgtttgaggagctggtgtgtagctgctgtataagaagtcaacctccttattttcaggtacatttattattattttaaccccaagcagaattgcctagctgggtccctcacctttacacaatagtcataggatttgactgttatcaaaaagtaaatccactctcagagaccatagatttcctattactgaggttcttcaaaagaatatgtaatcaatttatatagtaattcctaaaaatgagattctaaaatatagtagcatgcagatgaagcatagctaatgcttt

SEQ ID NO: 4628 - DNA, 350 bp, Homo sapiens
aaaatgaacatctctgtgtgccacagttcctaggactggggcaaggacacagtgtcaagtcttgttttgaggatgagtctctgaagagacagaattcctgccagaatgcgcacagaacataagtcagccaagtgtgtcgtgccagggatactttgactttggtttgctgctgctgctgctagggatattgggagggttatcctttccaggttgtaggagagggttgtgggtaaaggtctgtcgtaaaggacccctggctgctagctccaactgattccgcatgcgttgttcacgctctcgcagaaattttctttttgtttcactggaaaggaaagatgatgctcagtttt

SEQ ID NO: 4629 - DNA, 446 bp, Homo sapiens
aaataaggtaagtgaaatatgggctcagaattaaataagattttcaagaaagttcttgtagctgtaaaataggagaatatgaatgtcaaaattttgactgtttctgtgccaaacagaaagtttcacaaatgctttccaaactgcaataaaaagaactttaataataccattaagtctacaaagttactgtcaagttgacagtattcaaatactacaatattttctaaatgtaaattttgtaacatcttgaatactttctaagcccacttttctgtcattacaaaaataaaattccaagaaatttctgctacattaatcttaagagatcaaaataacctatgtagttttctaggttaatgtaattcaagtaaagtggtactaaagaaaacacatcattttaataaaaaccaaacctgcttaagagacataacagagttaagcaaaag

SEQ ID NO: 4630 - DNA, 332 bp, Homo sapiens; identical to SEQ ID NO: 4096

SEQ ID NO: 4631 - DNA, 508 bp, Homo sapiens
ctgttgaaacagaagaagttgagcctgatgaagaagaatttcaggaagagtctttggtggatgactcattacttcaagatgatgatgaagaagaagaggacaatgaatctcgttcttggagaagatgatttgactgatcattgatctacatatgctagaactctatctgtgtttcattagtattatctaatgtacttttacatatttgtaaaaacaatttttggtaaaatgtgatgaagatggatttcacaaatagacaaaaaagaagaaaactaccttctgatcttgtattttgaaagattgatgtttgcattttacttcagtaaacaattgctaaagacatcacactagaaacatatgcaatgtttttattacatacttctactggacatcacagaattctttgggttctttgtaatttaatgaataggtctgaaaacttatgaccaatacttgttataacttagaggactttgttttattccaaataaggaatgaatttgcattt

SEQ ID NO: 4632 - DNA, 207 bp, Homo sapiens
ctcactacgcagtagtcagaattcaaaatgctcaagagaaagccatccaatgtttcagagaaggagaaacatcaaaaaccaaagcgaagcagcagttttgggaatttcgatcgttttcggaataattctttatcaaaaccagatgattcaactgaggcacatgaaggagatcccacaaatggaagtggagaacaaagtaaaacttca

SEQ ID NO: 4633 - DNA, 609 bp, Homo sapiens
  misc_feature (1)...(609): n = g, a, c or t
aaagcaaaaaaaggatttattgaaatcatgtgacaatatatccctaacaccatgaagaagatgacaattatgatttccatagagtattttgcacttgcctaagcacaaaagcaaaaccagagcaaggcaaacaatatacaaacaaaacttgatcctatctaataactttcatgaaacaaccataaatgaattttgttttattaagtcaggcttcaggactactgaattgcattcactaaaatgctatttgaaattttacttactcgccacccaccccactactcttaattcatcgccctctccacaaaaggacaaaaggcaaaaaaggtagtaagcaaaatataaataataagaattcaaaaacagagatcaaagtaaatttttttttcagtctctgcgtctatgctcaaatcaatgttttctgagcatacagggaagcaaggaaaccaattctctagctcttgctctgcctcttattctcctccaccccccaatacatttctgaatattttttaatccatttatcactgagtacttgcatataactagaagcaccgactatattgntatcaactttggagcaattttcatggggaattgnacaaatga

SEQ ID NO: 4634 - DNA, 460 bp, Homo sapiens
  misc_feature (1)...(460): n = g, a, c or t
aaaaacactttatttaataaaagttaaacatacaaaactgaaataatacacatcctaaaaattaccttcttccattaataggaagacccttttctatgcatgtatttggcttaaactcaactcaggataactgtgatgatgttcacttacaccaacaaatgcagacaacctgatctaattaacaaaaattacaaacagctaaatgaacataatatacagggaaattatcgtcagattaatgcacaagaaatacaagaaatttttaatgatgaaatattcagtatccttgttcattaatttagccttgtgtttttacaaaaatagtatctacactgtatacagggctatacatcagctttttgttctcccatataaacatcacacatccatttancggcagtggtaccatgttttggatgtgtgatgtttatatgggagaacaaaacatggtaccactgcc

SEQ ID NO: 4635 - DNA, 607 bp, Homo sapiens
aaaaaagaaataacattcaaaacaacttatatattctgtttctgtctacttagcacattttcacatttctttccccccagaatataaggcatataatcatttataaaaccacattaatactagagtaaaatatagaactatagaaaaatatcactatgttggataatggggagaagtctgtgtaaaacaaccaagtctgagttatgaaatattctccaacagatataaatagatgtaaatataaatatttcttaacttcaggtttatttggtaacgaaataatggcttctaaaaaattgtcaagaagagacagatccaacctttaattggtgtgcaggcacattgcttatagtggacttattaaattccaaatagcagttaattgtataacttaaaactgcatcatagaagtatttaccaatttcttttcaaaacaagtgtgctcactcagatttcctttcataattttgatagcatccaattaatgaggttttgctgtgataatattccagaataaaaaacattcaatgtgtcaaacaaatactttgaaagaacagcttgattaatgtgtagaaaacaggtttactcctagcagctctctgctatg

SEQ ID NO: 4636 - DNA, 427 bp, Homo sapiens
aaaagcgtgagcttaaaatacaagactgccatattaaattttttgttgacattagtctcagtgaagactatgaaaatgctggctatagatgtcttttcccatttatctaaatatggactgctcaggaaacgagactttccattacaagtatttttaattaattgggccagcttttcaaacaaagatgccacattcaaaatagggtatattttcctatattacggtttgcccctttataaatccaagtagataggaagaaagaagacaaactttgcatctcagtatgaattattcaatttatttgaatgatttttctttacaaaacaaactcattcattagtcatgtttatctgcttaggagtttagggaacaatttggcaattttgtggttttcgagattatcgttttcttaaagtgccagtatttt

SEQ ID NO: 4637 - DNA, 476 bp, Homo sapiens
  misc_feature (1)...(476): n = g, a, c or t
tttggaatccattagagaaaaatccttgtcaccagattcattacaattcaaatcgaagagttgtgaactgttatcccattgaaaagaccgagccttgtatgtatgttatggatacataaaatgcacgcaagccattatctctccatgggaagctaagttataaaaataggtgcttggtgtacaaaactttttatatcanaaggctttgcacantnntatatgagtgggtttacnggtanatnatgntatnttttacaactaatnttgnactctcanaatgtttgtcatatgcttcttgcaatgcatattttttaatctcaaacgtttcaataaaaccatttttcagatataaagagaattacttcaaattgagtaattcagaaaaactcaagatttaagttaaaaagtggtttggacttgggaacaggactttatacctcttttactgtaacaagtactcattaaaggaaattgaa

SEQ ID NO: 4638 - DNA, 274 bp, Homo sapiens
ccaggatatattggttttttatgttaactttggtgaccttttgtgtactttacatgaaacaccttatatattaagtactggggattcgttctatgttccttcaggtaactattataacatcaaaaatctccggaatgaggaaagtgttcttctttttactcagataaaaagatgaaagatcaaccaaccttaaatatatgtatgtatatatgtatatgtgaaaaacagtttgtatagttggaatatttgtctttgtaattacttgtgatgtttt

SEQ ID NO: 4639 - DNA, 332 bp, Homo sapiens; identical to SEQ ID NO: 4096

SEQ ID NO: 4640 - DNA, 567 bp, Homo sapiens
gcttcatacaaaagggtctacagaagagagacacctcctctatgggcgacctgcagtgctttatcggactagatatgatatcttatatcacactgactttgaaagtggttatagtgaaatattcctaatgccactctggacatcatatactgtttccaaacaggctgaggtttccagcgttcctgaccatctgaccagttgcgtccggcctgatgtccgtgtttctccgagtttcagtcagaactgtttggcctacaaaaatgataagcagatgtcctacggattcctctttcctccttatctgagctcttcaccagaggctaaatatgatgcattccttgtaaccaatatggttccaatgtatcctgctttcaaacgggtctggaattatttccaaagggtattggtgaagaaatatgcttcggaaagaaatggagttaacgtgataagtggaccaatcttcgactatgactatgatggcttacatgacacagaagacaaaataaaacagtacgtggaaggcagttccattcctgttccaactcactactacagcatcatcaccag

SEQ ID NO: 4641 - DNA, 475 bp, Homo sapiens
aaaatagtttaatgaaaaaataaatatagtgtatgaatgatctaagtatgagaaatagcaaggacaaaatagcaaatatttttgtaggggagaaggaatctgaatgtgtatggaatattaaggagaataagaaattaatttaacaggggctgtggcggggggtgggagaacatgaggaaaaatagctaatacatgctggacttaataccgaggtgatgtgttgataggtgcagcaaaccaccgaggcacacgtttccctatgtaacaaacctgcatatcctgcacatggatcctggaactgggtcagaggtatagggttaatttctcttgctgaggctcagatttctccttcatgcatgtttaatggtccacctaagttcaactggaggagcatctttcttctttgttaaccaaacatgcccaggtagagctgcttctcttttctatggtagctgctgagttctgactgtgtcag

SEQ ID NO: 4642 - DNA, 388 bp, Homo sapiens
aaaaaatgtggcgttaataacattcaagccaagagccaaatcaggaatgcaatcccattcacaattgccacaagaagactaaaatacctaaaaatacagctaaccaaggaaacaaaagatatatataatgagaattacaagatacccctgaaagaaataagagatgtcacaaacaaatggaaaaacattccatgctcatgaataggagcacagctttgtaaataaaggacatagggtgaggaagccgggttgttttaagaagcctgtgtcccctgtgaaaaggcccatggcatatcttgtagaattacaaggagttcattctgtagcaggatgagctgcagacaaaacttctcagacaccgagttggagaaggaagggcttttttcag

SEQ ID NO: 4643 - DNA, 451 bp, Homo sapiens; identical to SEQ ID NO: 3176

SEQ ID NO: 4644 - DNA, 367 bp, Homo sapiens
aaacctttgtgtgctggtttataaaataatgtgtgtaatccttgttgctttcctgataccagactgtttcccgtggttggttagaatatattttgttttgatgtttatattggcatgtttagatgtcaggtttagtcttctgaagatgaagttcagccattttgtatcaaacagcacaagcagtgtctgtcactttccatgcataaagtttagtgagatgttatatgtaagatctgatttgctagttcttccttgtagagttataaatggaaagattacactatctgattaatagtttcttcatactctgcatataatttgtggctgcagaatattgtaatttgttgcacactatgtaacaaaacaa

SEQ ID NO: 4645 - DNA, 367 bp, Homo sapiens
  misc_feature (1)...(367): n = g, a, c or t
aatctgaatgtgtatggaatattaaggagaataagaaattaatttaacaggggctgtggcggggggtgggagaacatgaggaaaaatagctaatacatgctggacttaataccgaggtgatgtgttgataggtgcagcaaaccaccgaggcacacgtttccctatgtaacaaacctgcatatcctgcacatggatcctggaactgggtcagaggtatagggttaatttctcttgctgaggctcanatttctccttcatgcatgtttaatggnccacctaagttcaactggaggagcatctttcttctttgntaaccaaacatgcccaggtagagctgnttctcttttctatggnagctgctgagttc

SEQ ID NO: 4646 - DNA, 475 bp, Homo sapiens
ccactagaggtctgtgtgccattgcccaggcagagtctctgcgttacaaactcctaggagggcttgctgtgcggagggcctgctatggtgtgctgcggttcatcatggagagtggggccaaaggctgcgaggttgtggtgtctgggaaactccgaggacagagggctaaatccatgaagtttgtggatggcctgatgatccacagcggagaccctgttaactactacgttgacactgctgtgcgccacgtgttgctcagacagggtgtgctgggcatcaaggtgaagatcatgctgccctgggacccaactggtaagattggccctaagaagcccctgcctgaccacgtgagcattgtggaacccaaagatgagatactgcccaccacccccatctcagaacagaagggtgggaagccagagccgcctgccatgccccagccagtccccacagcataacagggtctccttggcag

SEQ ID NO: 4647 - DNA, 474 bp, Homo sapiens; identical to SEQ ID NO: 205
  misc_feature (1)...(474): n = g, a, c or t

SEQ ID NO: 4648 - DNA, 231 bp, Homo sapiens
ctggagacactttagaactctttccccatcctccaccatagtgcaaacttcacgcttctctgagcacctccaaggtatgcccttgaagtaaaacagaaaagggaagaaagggggctttttcttttccatttctgaccaaacagaggtctgaaatagcagtgtattatgaaattctcattccctgcaacagtcagccaccacttggaaaatggctatttttgccataaacta

SEQ ID NO: 4649 - DNA, 357 bp, Homo sapiens
ctggaaattgctgctagaggaggaggcttggctgaatgactgaattaatagtacatgtacagggcttacgaaagcactcaaatgtcaaaattttggcttgggagactctacccccatcctctccttttctaaggatctggatccatcaaccatttgtttccactaaaagaaaaccctggctcagaaagtctgcaagtgcagaggaatggaggatgagtaagtcacaccagcaggctggctcagatggggagaaccctgaggttgggtgaatgagtggaaacggaatgactccagtagctggctctactgcgcctttttctgcttgtggggaggctttgcattccagtagaagagcag

SEQ ID NO: 4650 - DNA, 189 bp, Homo sapiens
agaagaaggacgctggaaagtcggccaagaaagacaaagacccagtgaacaaatccgggggcaaggccaaaaagaagaagtggtccaaaggcaaagttcgggacaagctcaataacttagtcttgtttgacaaagctacctatgataaactctgtaaggaagttcccagctataaacttataaccccag

SEQ ID NO: 4651 - DNA, 320 bp, Homo sapiens
aaaatgcctttataataagctttgtttctttgtgaaactaattcagcaggctgaaggaaatggttcatgtgataatgtgggctggtatcctctagagtacctgggtacataaacagaaactcctgtaggtaaaaagtaatttgtgccattagtctttctatgtttctgcatccagatagagtgcagttcatgagggagggggcgggggactgaaggggaaagggcgttaaagtgatacatttttataccaaatgtgtttatttttttgtgcaagtaatccttaaaattgcaattgtattaggtgttaaaataaagttttt

SEQ ID NO: 4652 - DNA, 448 bp, Homo sapiens
ggatgtaggatttctttttagagtgattaaaatgttacaaaattgctggctgggtgcagtggcttatgcccataatcacagcacttcgggaggctgaagtgggaagatccaggagttgaagaccagcctgggcaacatagtgagaaaatgtctccctaaaaggaagaattaacctcatgtggtggtgtgcacctgtagttctagctacttgggaggctgaggcaggagaatcgcctgaacccaggaagcagatgttgtaccgagctgagatcatgccattacactccagcctgggcgacagaacgagacgccatcaataaataaataaataaagtaaagtaaaaaacctattaaattgaggctagagctggagatgtaattggtttttgagaaacattagtataaagcttgcccttgttgtgtggaagaagccattttgtactgcttt

SEQ ID NO: 4653 - DNA, 600 bp, Homo sapiens
  misc_feature (1)...(600): n = g, a, c or t
ctttttttttttttttttttttttttttttacttggttgataanatgttgaanaaaccatggaattatacacagcactatacattattactatanaatgtctggtccctcccatcataaatatggtttaatgaaggtattgaaaaacttcacaatatcgagctgcaattcttttttctttttatacaaatacaagttaattagctctattaagttgcaattttatttttataaagctttgtaaagttatgaacatggaaaccctaanaatcacctaagctttttacataagtaaatttcaagttgacagtctgtccattttgaactatttataattaacaggacacttaacacagtaatatcttanacaaggaagagggcattaattntgcaggcaggtagcaatgaaaatgccaaacctgaacaatcagtcactatttccttatacagtttgagtaaaagaggtngactacagaaagaaaaaaaaaagngaatntaaaatgtatnttccccaaatacaactctacttcaataagtcttgaagattaccgatgacntcaacaaaaatgaatgaactcagggaatgagttctttntcccca

SEQ ID NO: 4654 - DNA, 286 bp, Homo sapiens
aaaaaattacacggagcaatttccagcttatctttttttataaaagtactgcctatatcaaacattttatatcacgttaattccattgaagagctgcctttttctgttaaggtactgattccaattgatgggatacatgcccttaatacagaaagtttccattatttattcaaatatcaaaattaagattattgagaagtttattgctttatggctgggcaagatgctactagcacattttaggtaaataatattctttattaaaaactatgaggtcattctgttt

SEQ ID NO: 4655 - DNA, 297 bp, Homo sapiens
aaatgactgtgctgcccctttcacatcaaagaactactgacaacgaaggccgcgcctgcctttcccatctgtctatctatctggctggcagggaaggaaagaacttgcatgttggtgaaggaagaagtggggtggaagaagtggggtgggacgacagtgaaatctagagtaaaaccaagctggcccaaggtgtcctgcaggctgtaatgcagtttaatcagagtgccattttttttttgttcaaatgattttaattattggaatgcacaatttttttaatatgcaaataaaaagttt

SEQ ID NO: 4656 - DNA, 332 bp, Homo sapiens
  misc_feature (1)...(332): n = g, a, c or t
aaatagaaaacagtatattgaaagtggngggtttgatctttttatttagaaacccacaaaatcagaaacacagtacaaataaaacagaagtcaaactataagttgacttttagttcctaaaaagaaacatatttcaaaagcaatggaatctagaattcttataacatgaataacaaaatgtacagcaagcctatgtagttcaattaatatataaggaaaaggaaggtctttcttcatgatacaagcattataaagtttttactgtagtagtcaattaatggatatttccttgttaataaaattttgtgtcataatttacaaattagttcttt

SEQ ID NO: 4657 - DNA, 464 bp, Homo sapiens
  misc_feature (1)...(464): n = g, a, c or t
ctttttttttttttttttttttttttacaaaacagtatattttattttacaatagcaaccaactccccagtttgtttcaattgngacatctanatggcttaanattactttctggnggtcacccatgctgaacaatatttttcaatcttccaaacagcaaagactcaaaagagattctgcatttcacatcagttcacaagttcaagagtcttccatttatcttagcttttggaataaattatctttgaggtagaaggacaatgacgaagccacttaattccttgngtctgcataaaagcagatttattcatcacaacttcatttatgtgaataaagcagatgatgataaaatgttctcttattcttgtttaatcagtagtggtagtgatgccanaaactgngaaaggaaggcttttagttactttcttctttccattttccaataatccattccccatccccag

SEQ ID NO: 4658 - DNA, 505 bp, Homo sapiens; identical to SEQ ID NO: 645
  misc_feature (1)...(505): n = g, a, c or t

SEQ ID NO: 4659 - DNA, 387 bp, Homo sapiens
ccatttccaagtaacacccactgcatgcccatcaataaaagagaaccataacaaaatagaaaatttaccatatggctatgattttaagaaaaaaaaaatgcggacacgagcacatgagcaaagtccaatattaaagtaacattccttcttacgggctatgattaggaatctgattagataccagaataaaaatacaaatgctgaactatttaggtcaaagaacctctatagaagcatctgtcttcaaaggcattccagtttgagactcaattttagaataaggcataacaaatatgttaacaaaagacatacacaaagtgatgaaagagggattctataattccccacatactctgaacctaataaaacaaatctagattttttttt

SEQ ID NO: 4660 - DNA, 450 bp, Homo sapiens
ctgtcttgaggaggaagatgaagactgtgaatgaaggacagcagacttgcttctaggaaaataatatatgtaagttgggatgcctcttgcagccagatgtttccgaataagtcgctcagtaccataccagttaaaacctttcgtggcatgtccaatacgtggaagatgagcacttgctttcttcttttttgctgctaaaatatcttcttcaggccctcttctagggctgccatcttaatgccagacaggacattggaacgatcacgatgctgagccacaatcaaggccaacaaatcttgccctttgtttcttgattctttatcatcaacaggaaataaaaggacacctcccaaactcaggtctttcattttcccagccagctcatatattttttttggctcagcggatcgcttttccagagctgtaaataaaccacctctgccccagtgg

SEQ ID NO: 4661 - DNA, 238 bp, Homo sapiens
aaaatatgtttattttgtatgttttacaatgaatacttcagcaaagaaaataattataatttcaaaatgcaatccctggatttgataaatatcctttataatcgattacactaatcaatatctagaaatatacatagacaaagttagctaatgaataaaataagtaaaatgactacataaactcaatttcagggatgagggatcatgcatgatcagttaagtcactctgccacttttt

SEQ ID NO: 4662 - DNA, 196 bp, Homo sapiens
ccaggtgaaggctggggggagtgtggtgatggagtccagcaggggaactctggacaggcttgactcaagccagcttcaggaactcctgcagcgtgttttgttccacagcctccacgaagagctcatagtccccacagtactggtccccgttgacaatctggggtggggtggccttggggttgcctgccaaggctcg

SEQ ID NO: 4663 - DNA, 251 bp, Homo sapiens; identical to SEQ ID NO: 4543

SEQ ID NO: 4664 - DNA, 338 bp, Homo sapiens
aaaagaacttccccatcagcttctgcaaggttatttttacatagtctcatgcttatttgtatggggaagttctttttcctggaaaagatttaactaagcacaaaactaaaatccagagcagggataagggaagaatgcaggtgttcttagtggaagtatcagcatcagggaatctttctcttaaacactggaactggtagagttgaagaacttctttttctcaatacttccatcattctttgtatccattcatcagggaggaaagtttctttgaaaatagttattcagttataagtaatacaggattattttgattatatacttgttgtttaatgttt

SEQ ID NO: 4665 - DNA, 293 bp, Homo sapiens
aaaagacatacacaaatctagtacatcaataaccggggatttttcttttttgctatactattttcacaaccacgggtgtgcttgctaggcaatataaccatcacagaagcaaacgttaggcagaatactggtaagaaaaaacaaagcaagaaaagagctaccagatatacagacaggcttggttccacattcactactgcattttcaagcgccaagtattaactgcacatttttgttcagctagaaaggagggatttttttttttgtttttttctttttttttggtttgtttt

SEQ ID NO: 4666 - DNA, 468 bp, Homo sapiens
ccagataattttgcatctgcttggatgattgtagactgagatgtgagtggaggataaagtattagacttttgctgagtaactgccaaccaagaagtatttatcggacacttactaggtgcctaggattgtatcagagggaatatgaaatgtgtccctgccctacctagttttaacgacagaatatctattaaaggctacttagctgaagggtaagggtgacaggtctaggggaagctttgggaggtggtgtgctgtgacagaaaaagtggcagagtagggacgagagacctgcattctagccctgtttctgtcacttgctctgtacacttagacaacagcttgacctcttgagctttagtttcctcctctgcataatgagagggttagactactgaattgtatgggaaaaaaatacaaattcctgggtcctaggccatgcctgctgaatccgactgttcaggaagagg

SEQ ID NO: 4667 - DNA, 408 bp, Homo sapiens
ctgtgcaagaaaaattaaatgaaatagtagatcagataaaaactagaagagaagaagaaaagaaacaaaaagaaaaagaagcagaagaagctgaaaagcaattattccatggtactccagttacaattgagaatttcttaaattggaaagccaagtttgatgcagaactcttggaaattaaaaagaaaaggatgaaagaagaagaacaagcaggaaaaaataaattaagtgggaaacaactatttgaaacagatcataatcttgacacatctgatatccagttcttggaggatgttggaaacaacgtggaggtagatgagtctttgttccaagaaatggatgacttggagctggaggatgatgaagatgatccagactataatcctgctgacccagagagtgactcag

SEQ ID NO: 4668 - DNA, 557 bp, Homo sapiens
ccaagtggggtgagggagacccacgctggatcgtggaggagcgggcggacgccaccaacgtcaacaactggcactggacggagagagatgcttcaaattggtccacggataagctgaaaacactgttcctggcagtgcaggttcaaaatgaagaaggcaagtgtgaggtgacggaagtgagtaagcttgatggagaggcatccattaacaatcgcaaagggaaacttatcttcttttatgaatggagcgtcaaactaaactggacaggtacttctaagtcaggagtacaatacaaaggacatgtggagatccccaatttgtctgatgaaaacagcgtggatgaagtggagattagtgtgagccttgccaaagatgagcctgacacaaatctcgtggccttaatgaaggaagaaggggtgaaacttctaagagaagcaatgggaatttacatcagcaccctcaaaacagagttcacccagggcatgatcttacctacaatgaatggagagtcagtagacccagtggggcagccagcactgaaaactgaggagcgcaag

SEQ ID NO: 4669 - DNA, 247 bp, Homo sapiens
cctcttccatgtcctggagttgaatgagttcaaagattggcaataaaggaaaaaagaaagcattacgggtatgacgggaacaagctttggagtttatcgaacagtcacaccaagtttctctagcacacggacacccttttcttggtactcttgtcgggtcatccaaaagttgtctttgtctttcatgatatccgctagaactgcaccacccaggaataccatgtgctttctgcggggtgggtcttca

SEQ ID NO: 4670 - DNA, 228 bp, Homo sapiens; identical to SEQ ID NO: 3993

SEQ ID NO: 4671 - DNA, 473 bp, Homo sapiens
ccaatgaagatactccacagttgtatgtggcctgtggtaggggaccccgatcatctctgagagtcctaagacatggacttgaggtgtcagaaatggctgtttctgagctacctggtaaccccaacgctgtctggacagtgcgtcgacacattgaagatgagtttgatgcctacatcattgtgtctttcgtgaatgccaccctagtgttgtccattggagaaactgtagaagaagtgactgactctgggttcctggggaccaccccgaccttgtcctgctccttattaggagatgatgccttggtgcaggtctatccagatggcattcggcacatacgagcagacaagagagtcaatgagtggaagacccctggaaagaaaacaattgtgaagtgtgcagtgaaccagcgacaagtggtgattgccctgacaggaggagagctggtctatttcgagatggatccttcaggacag

SEQ ID NO: 4672 - DNA, 317 bp, Homo sapiens
ctaagcttgttgtggtcacctattatgtgccagataccatgctgggtgctagagctaccaaagggggaaaagtattctcatagaacaaaaaatttcagaaaggtgcatattaaagtgctttgtaaactaaagcatgatacaaatgtcaatgggctacatatttatgaatgaatgaatggatgaatgaatattaagtgcctcttacataccagctattttgggtactgtaaaatacaagattaattctcctatgtaataagaggaaagtttatcctctatactattcagatgtaaggaatgatatattgcttaatttt

SEQ ID NO: 4673 - DNA, 453 bp, Homo sapiens
ggaaaataggagtggttggctgggtgaagaataccagcaaaggcaccgtgacaggccaagtgcaggggccagaagacaaagtcaattccatgaagtcctggctgagcaaggttggaagccctagttctcgcattgaccgcacaaacttttctaatgaaaaaaccatctctaagcttgaatactctaattttagtattagatactaatagaagagaaaaattgtaacacactgaacaatagatactgtatgttcttaagactatgtatactagaataatagtagcagagtagggtgaaaaggaactttctgttctgaaagctaagcgactgtacgtgctactaaaaatgtctgacactgaaataattttactcaactatgttttcaacaagcaaaaatatagtattctaagattaaaatgtcattacaaaatatttagtgtgaacatttaattt

SEQ ID NO: 4674 - DNA, 606 bp, Homo sapiens
aaaaatataaagatgcagtatcatttctgatataaagttacttaaaaaaatccaaggtcttagggaattcacaaatcataactagaagtaacttttattaatttaatgtacacataattaccaaattttaatacattaaaaatgtgtaaatgcccacagactgtacaaaaattaacaccccattttgttaaaagttcccaaccacctcccaccataaatatacaaaaacctatttttagatatgtcaaaattgcatgcatgaatattttctaaagcttgaattttgctcttcactggataatgttatctatagctgtttctgtaacagactacataaacattgatatattatttaccatgcctttgaaactgtgcaggactttcataaacatggggaacaaaataaatagagtaaaaactgcaacagttttgtttagatgcaagtgcaattgggaaagctttcgaatttcaggattataaaactactataaaagtatttattctgttgttggcttagccacttgtattcaagcattatttgcagcattgctttacagcagttggtgctagaagatacaaaacatatagttaccactatttatactt

SEQ ID NO: 4675 - DNA, 171 bp, Homo sapiens
aaatgattttttttttcaaatagaaaaactaaagaactgaactatcacaggaatttttcttcactgcagaagctgagatgttccagtaggagaagtaggagatatcttcacttgattggaaaataaacaccgtaactcaaggctctgctgagtacataaaaaatctggtga

SEQ ID NO: 4676 - DNA, 590 bp, Homo sapiens
ctaactgcaacggagagactcaagatgattccctttttacccatgttttctctactattgctgcttattgttaaccctataaacgccaacaatcattatgacaagatcttggctcatagtcgtatcaggggtcgggaccaaggcccaaatgtctgtgcccttcaacagattttgggcaccaaaaagaaatacttcagcacttgtaagaactggtataaaaagtccatctgtggacagaaaacgactgtgttatatgaatgttgccctggttatatgagaatggaaggaatgaaaggctgcccagcagttttgcccattgaccatgtttatggcactctgggcatcgtgggagccaccacaacgcagcgctattctgacgcctcaaaactgagggaggagatcgagggaaagggatccttcacttactttgcaccgagtaatgaggcttgggacaacttggattctgatatccgtagaggtttggagagcaacgtgaatgttgaattactgaatgctttacatagtcacatgattaataagagaatgttgaccaaggacttaaaaaatggcatgattattccttcaatgta

SEQ ID NO: 4677 - DNA, 525 bp, Homo sapiens
  misc_feature (1)...(525): n = g, a, c or t
gaaagacagcgcaactttgaatgctttcttacttgttttgtgacccaatttatgtggnagattgttatttcattaggatttagtaaaatttttttttctgattctaaacttattgtgaaaattganctgtacagatattcttttgatttcaattgggaacatttggaagaacaacagtcttacttgcctgtacaatatagagacatatgaatagtcataacagttttcaacttgttcttgtttctgttaaactatattcctagaaacatagtttgaacaactnggtctttgttaggcttgtcaaattgccttcatggaaaaataatctacaaaagtatggtttaattgattgtcttacatgataattttccctggtaacaacttagtaagtgatatatcttttttcctaaattgcttaaatactgngaaattgctctgacaaattggaagtgtaccattggcatatttgtcttcctttttatgcatgatggtaaaataaaagcatgttgntctgctaaaaaaaaa

SEQ ID NO: 4678 - DNA, 262 bp, Homo sapiens
aagcgatgctgccaggttcagactggttactacttaaaggtgaagaactctctctctctattggagtcagatggctgcccgggaccacgtcaggaatattttcttcagtagtcaccacttctgttatactagaaagttcttctgtatgttccacttttcctggattgtcttcggtatgcatgcctggaactgttgctggagacaacggctcttcacagaccacctccttttctaaggaaaatggctggtatgacgtgatgag

SEQ ID NO: 4679 - DNA, 601 bp, Homo sapiens
  misc_feature (1)...(601): n = g, a, c or t
aaagtgcaatttattgaaaggtttaagcaaatcaggataaaggatctttctaataaatgactaacattaaagagatgctatattgatatatttagataaatctttcaaaaatcataattgatttctatagatgccaaatttacttctgttgtaacaatgacctgcccccctcaaaccccaaacttaattgctgaggattaagaagatcctctaattggcaagagctttttctgatgttaatatttttgtctgtttcaatacatctaactaaaaagaactatgggtctagagtagttgctttagcagccctgagttctataaccacaatggtattcctgttagaacttaagagaatgttgtgaacgttccccattctatttgaggagaaaacaaagaactcagttgctttctgatttagcaaagtaactatgctttgggctatagtgttaatgtctaagataaaggtagcaaaaattggagttatctaagaatcagaaaatgcttcagagaaatgaactgtaagaggaatgtttctaggagctgtctgatggggtagaagggattgcaacacaaaggccatttactgntgngattgaatatt

SEQ ID NO: 4680 - DNA, 361 bp, Homo sapiens
aaaagtctttatttcctctgaaaacttactggtaaagtatacaatttatgaataatcatatattcatgctttttgaaatatatctgaataaaagacaaattattcaatatcaatagcagtaaataacttatttgcaagaaaattattacaattcctactgtaaagaatcaccaaccactatttagcaattaaatttcaacacattttttttggaactctttaggactttagacaaaggccaccaaggctgacaatccaggtaactatggcagtgacagaagtcaatcattaatactgccattattttagacaaagggctgacaatctcagaaactagttctagaaattatcatcaatgtgg

SEQ ID NO: 4681 - DNA, 598 bp, Homo sapiens
  misc_feature (1)...(598): n = g, a, c or t
caagctttttttttttttttttttttttttttgcgattgtaaaattttattactgggctgtttacatgatactttctttcttattaaatataacctgacaatctttattaaatgaaaatatttttgtatcatcaacaacaacaaaagaactaggatgaanaatttcccacattcttaatatttatagggnttctctccagtatacattctcatgtgtgctcaaaaggctgngtgaaggctttcccaaatgtcttacatttatanactttcaccccactctgactcctttcatatattcacnctctanaggacagttggaanattttcccacttttattttttnttganacagngtctcattctgtcgcacaggctggaatgcagtggcgtgatctcagctcactgcaacctntgtctccaggttcaagtgattctcctgccttancctcctgagtagctgggattagaggcatgcnctaccatgcctggntcattttttggnaatttttantaganatggggntacnccatgttgaccacnctggnctcgaatttctgacctcaaatgatctgcccgccttgcaccttggnctccaaa

SEQ ID NO: 4682 - DNA, 391 bp, Homo sapiens
ctgctgttagtgtagcaacctcgcttttcatctgtttagcaatggaggaatgaatagcaccacacagtcctcgatctgaggacacaccaataaggaggtgtttcttcttgtcttcaggccccttgatatcagctttttcatacagagctaaagatcccaatccatatattcgagctggtttcagctctctctcagctcgggcatattttgctgccgctaccattttcatagacttggtaattttctggatgtttttgatggactttagtctcctggtgatatctttcaaagttgccatatttcgaacttgaatccattgcggctgcaaggtccaggccgacagcccaacgacacccgcgcgagagaacatggtagccacagccctgctgaa

SEQ ID NO: 4683 - DNA, 577 bp, Homo sapiens
  misc_feature (1)...(577): n = g, a, c or t
ctctagtcccagctacctgggaggctgaggcaggagaattgcttgaacccaggaggcagaggttgcagtgagccaagatcatgctactgcactacagcctggcaacaaagcgagactctgtctaaaatatatatatatatatattgtttactactcaccacagatctgcaggagttcactgatctctaggatctgccttaactccaacttacatgttttggtcactattacaaactgtcatcccagaatgatgctgcagaggctagggctaggacacagaccagtgtttccatgtgggaattccctcccagtatttcttaggaaatgtatgttttttgaatccataatccctagaaaaatcagttgaggaaatgagaagtattgtaattattctgtgaatagtaacacttaccattatggagacatcactagtttgaaagaatccaacttcatcaaatattaacgtaccgagttgaaggctacaagaactgagacaggagcatagcagagagaaacggtcaccatctcattagccctatttttggntgntgngatgccattacatctgtatatctgg

SEQ ID NO: 4684 - DNA, 252 bp, Homo sapiens
ctgactccctagggccttcagacgtgtatgcaaatgagtgatggataaggatgagtcttggagttgcgggcagcctggagactcgtggacttaccgcctggaggcaggcccgggaaggctgctgtttactcatcgggcagccacgtgctctctggaggaagtgatagtttctgaaaccgctcagatgttttggggaaagttggagaagccgtggccttgcgagaggtggttacaccagaacctggacattgg

SEQ ID NO: 4685 - DNA, 552 bp, Homo sapiens
ccaaggaatggcccaagaggaaggtgcttcaggacctggtacctgatgatcgaaagttaaaatatactcgtccagggctccctaccttcagccaggaagtactacataaatggaagacagatatcaagaaatatcatcgtattcagtgtcctaaccagggctgtgaggctgtctacagcagtgtatctggccttaaagctcacctgggctcttgtacattgggaaactttgtggctggaaaatacaaatgtcttctatgtcagaaagaatttgtgtcagagagtggtgtcaagtatcacatcaactccgtccatgctgagaaaatttcaaacacatgaaagtagagaaaatagcataatgaacccagtatgctgtcagccatcctcagcaatcatcagtgactggttcgttgtaaacccaacaacaaccaaaagctttgaaaagctgatgaagataaagcagcggcagcaagaagaagaaaagcggaggcagcagcacaggagcagaaggtctctaagaaggcggcagcagcctggcattgagcttcccgag

SEQ ID NO: 4686 - DNA, 281 bp, Homo sapiens
  misc_feature (1)...(281): n = g, a, c or t
ctctattggactaccgtgaggatggtgtgaccccatatatgattttctttaaggatggtttagaaatggaaaaatgttaacaaatgtggcaattattttggatctatcacctgtcatcataactggcttctgcttgtcatccacacaacaccaggacttaagacaaatgggactgatgtcatcttgagctcttcatttattttgactgtgatttatttggagtggaggcattattttaagaaaaacatgtcatgtaggttgnctaaaaataaaatgcattt

SEQ ID NO: 4687 - DNA, 292 bp, Homo sapiens
aaaaaaacaatatttgcttctataacaaaaggaaacaaatctaagaatcattcctgtactacagaagggttaaggcaaaggtagccttttgggccttttaatgaacatgacccctatagaaaagtcaaggaaaaaaaaacccttgtataaattattttatttattattgtaattagatcttcacaaagttgtcttttcactgtgttttgtcaacgtgaaattaaattgtagttataagcaaaagttggttgcctagggaacaattgtatattcagtttaacagaaataaaag

SEQ ID NO: 4688 - DNA, 308 bp, Homo sapiens
ccatttaccagactccgacacaatgggccaccaccagtgtgacagcaggacatcctaatatatggatcttgatttttaagtttcagtatctgaacttcgtaaattagtaacttttagctgggaaagtatagcatgaaaccagaggttctcagaatgactgtaagatagcttacatttcctctttttgcctttatctccccaactaaaatacaatggggaagaagtctgcctatgatctttgaatgagctttttaaggaagaaatattatatattgtttgttaaagtttattgaaataaagaatcattt

SEQ ID NO: 4689 - DNA, 237 bp, Homo sapiens; identical to SEQ ID NO: 206

SEQ ID NO: 4690 - DNA, 328 bp, Homo sapiens
ccaagtggtggccgatgtgctctgcgagttcctggaggtggctgtgcatctcatcctctacgtgcgcgaggtctaccccgtgggcatcttccagaaacgcaagaagtacaacgtgccggtccagatgtcctgccacccggagctgaatcagtatatccaggacacactgcactgcgtcaagccactcctggagaagaatgatgtggagaaagtggtggtggtgattttggataaagagcaccgcccagtggagaaattcgtctttgagatcacccagcctccactgctgtccatcagctcagactcgctgttgtctcatgtggagcag

SEQ ID NO: 4691 - DNA, 407 bp, Homo sapiens
aaaaatgttcattaagctccaatgattgtttgctgctatccttatctacagtcatgctgagtaaagctatagctaaatggaagttaaattgtattcacgaggtgttaatgtttacatcttattatctgcagtctctcagagaaagcaaaagtaactacaaatagcgctatgccagaaactggtttcttgaccaacaatgtcgcttcagcatgcaatgaactggttcattctaaagtggtcacggctgttgatgacaagaggctttgtatttttatatggcacatcttttggtccatgtgaaaacaagttttttgaatgttaactattttctgacactttggagttactgttgctcttcccatttccattaggtcgatatatggttcatggcaatactgtacaagttt

SEQ ID NO: 4692 - DNA, 124 bp, Homo sapiens
gacttgttcaagaataactgatatgccttcactcagaagaaaagaaatgaatgtgaaagaaagccaagcatcacttgcacttaaatcattaccacggaagatatattagcttcaactttagttt

SEQ ID NO: 4693 - DNA, 381 bp, Homo sapiens
aaaataatcattgatttgtgtgatgtctacatcttttaacttctggttctgttataaagagtacatgtcacggttcataggcagtaacatttcagagaactgacatgaacaagtagtgaaaattgggcattaaatataaaaataacagttcttcataaacagaaggaaaataaggaaatagaaataccgacgagaaaggagagtccttgaaagagacccaaggaaaccctgaattcatacccacgtcaaatatgcacatatcctgagatgatgccactttgatgaatgtgcattagtctgatttatcatgtaccttaagagagccagatggggtatgtttttgtgctgtgatatggtatttatacaggtacaaatataagg

SEQ ID NO: 4694 - DNA, 342 bp, Homo sapiens
ctgctgatacccaggcagtagctgatgctgtcacctaccagctcggtttccacagcattgaactgaatgagcctccactggtccacacagcagccagcctctttaaggagatgtgttaccgataccgggaagacctgatggcgggaatcatcatcgcaggctgggaccctcaagaaggagggcaggtgtactcagtgcctatggggggtatgatggtaaggcagtcctttgccattggaggctccgggagctcctacatctatggctatgttgatgctacctaccgggaaggcatgaccaaggaagagtgtctgcaattcactgccaatgctctcgctttgg

SEQ ID NO: 4695 - DNA, 544 bp, Homo sapiens
  misc_feature (1)...(544): n = g, a, c or t
aaaagattgtagatgacattggaatctaatttccgtatttgggtgctttcctagtattgtaagaatatgcttaattaatgagtcgcaatgaataatctgtttgtcttgatttgctttctgaaaggtgatgagggttttgggaaatggactttgttcaggcttttgccctttgtggctgtgacatattaagatgttggcagtaaaattgagagccaccagaagatgttaactgtgtatatgggcgctgccagataggaaatccaaatgagtagactatagtgttattgttagctactatggggtgagacgtagacagataaccatatgtaaggcagctccctaaatgctgaaacaaagaaccgtctcttgacttactcctgatgtctcatggtacatggtagctgccccaaaagcttgcaattaattgaaacttctcatttgttaggtggcaggtaggtangttttgaacttggtagtgatattcagacgaggagcaagattccacntggcagttctgtgatgcttaagtaaatgatgtgatcat

SEQ ID NO: 4696 - DNA, 208 bp, Homo sapiens
ctggatcacccttggaaaccaactggatgggatccacctactagacccagatgtggttgcacggttcaagcaaaggtacccagatggtatcatctctaaacctaagaatttatagaagcacttccttacagagctaagaatccatagccatggctctgtaagctaaacctgaagagtgatatttgtacaatagctttcttctttattt

SEQ ID NO: 4697 - DNA, 249 bp, Homo sapiens
aaaaaaaaccgaaacttaagaactgaacaaggattacaaccacattccaataaagaaaattttccttcaacaaagcatattgttttgtttatatacaatatgtgaccaccaagagttttaatttagttgtaccaaaggcaaaacattatacttaaaattaaattacagatgcatgaagaataaaagtttaatgtatcaaagataatttgttatttaatgcactcaatgtcagtatttggggcaattttt

SEQ ID NO: 4698 - DNA, 159 bp, Homo sapiens
gtgtgagcagtttatttattcaaaagtctttgtctgctgaagtcagcatacccctgctgaactgagtgctccaatgtggcaactaggagtgggtgctcgtgctggagaggtcatttcgtattatttcatttactgctgtggcagcagggccgggggtgg

SEQ ID NO: 4699 - DNA, 372 bp, Homo sapiens
cctgtggctgacctctgaccccagccctctttcttcagccctccctttactccaaccctctcctgcctgctttcctgagatgtcctggtcttccttggtgccagaagagggcactaccacaggaccctctcaagcttctcaggcaacagcttgaggtccctgaggggagtggcaagccctaatgcaactcaccctcatcctggtgcttaggtggcagagggtgggcagcaggggacagggatgggatggcaaaaccaccaactgcccttggtggcaggtgggtggagatgggatgcgtgccaacctcagatgccaactcaggtcatcaaggccaaggaccagtggcgaaagtgagtcttggggtaccttagg

SEQ ID NO: 4700 - DNA, 511 bp, Homo sapiens
aaaagaagcagaggtcaccatctccgagttcattctcatgtaactgaatgaaaacaatgagctgaaaataattctaagtttttttattgtttgacaggttcaacgttacagggtctgacaagtgtgtttttctgaaaaacacagaggtcagcagcatggaatgtgagaagaatttatactggatatgtaacaaaccttacaaataataaggaaacgtgttcacttattgactattatagaatggaactcaaggaaatctgtgtcagtggatgctgctctgtggtccgaagtcttccatagagactttgtgaaaaaaaattttatagtgtcttgggaattttcttccaaacagaactatggaaaaaaaggaagaaattccaggaaaatctgcactgtgggcttttattgccatgagctagaagcatcacaggatgaccaataaccatgcccaagaatgagaagaatgactatgcaacctttggatgcactttacattatttctggattcaaa

SEQ ID NO: 4701 - DNA, 543 bp, Homo sapiens
  misc_feature (1)...(543): n = g, a, c or t
ctgccgtggtggctaaagatagaagccctgggcaatggatcatctgtgtggaaggagacagtgcatttgggttttctggcatggaggtagaaaccatctgcaggtacaacttgccaatcatactgttggtagtgaataacaatggaatttaccaaggttttgatacagatacttggaaagaaatgttaaaatttcaagatgctactgcagtggtccctccaatgtgtttgctgccaaattcacattatgagcaagtcatgactgcatttggaggcaaagggtattttgtacaaacaccagaagaactccaaaaatccctgaggcagagcctagcagacacaactaaaccttctcttatcaacatcatgattgagccacaagccacacggaaggcccaggattttcattggctgacccgctctaatatgtaaataaagacgccagttggtggtcttgagttttctctttcttgcaagatgaaattttattttccacagcaaaattactctactgntaaaattgtgcaaaataaaataaacattt

SEQ ID NO: 4702 - DNA, 554 bp, Homo sapiens
ctgtatttttttgcattcattcattttccattctgcaacctccatcacattagcagagtaaccagtaagttgttttctattttctaaagtatttttttctatcactatatgtatcacttctgagtcttacaggtatagagctgagtttagagagttgctaaaattcacctattggaccaaactaaggttggtacttggctgtttgttccccatctgagcctaagtctccagctcagacacatctctttatgggcacaactgggaacaacaaaatggcaacagttctacagctcataatataaccagtctgaagggttcccctactcacagaccccttcatttactgggagttaagcctcactgctaaataatatattttgaaactggaaaactgggcatgctgccttccacaatacaccactatactcatgattgcaggagggtggcttggggactaggggcaatgacacgggaaggatacaatcattgcccttacttatctttgatcttcttcccatcctcacactgaataatcacttgttcctaccttccct

SEQ ID NO: 4703 - DNA, 289 bp, Homo sapiens
  misc_feature (1)...(289): n = g, a, c or t
ctgggcaggcngtgggtctgcatcccaggagagggacccgaaactgggagacttggagattttatcagggctgtggaggacctgcctttcttctcctccagagatagatgactcattatccagcaacacagaggtcagcaccgacctcaccagcagcaggctcacaggagtggcaggggcattgggagagtgggaggcagcacagggtcagctctttcacgaaaacagagaaacggggcagctctagagtgggagtaggggcacagagaacaggaaggaaaggcggccg

SEQ ID NO: 4704 - DNA, 228 bp, Homo sapiens
  misc_feature (1)...(228): n = g, a, c or t
cgaggtaaaaaaaaaggggggtgctttgatgttagggctcttggtaggggtaaaaggagggcaatttctagatcaaataataagaaggtaatagctactaagaagaattttatggagaaagggacgcgggcgggggatatagggtcgaagccgcactcgtaaggggtggatttttctatgtanccgttgagttgtggtngtcaaaatgtaataattattantagtaag

SEQ ID NO: 4705 - DNA, 445 bp, Homo sapiens
cgacaccgtaactatccgcactagaaagttcatgaccaaccgactacttcagaggaaacaaatggtcattgatgtccttcaccccgggaagacgacagtgcctaagacagaaattcgggaaaaactagccaaaatgtacaagaccacaccggatgtcatctttgtatttggattcagaactcattttggtggtggcaagacaactggctttggcatgatttatgattccctggattatgcaaagaaaaatgaacccaaacatagacttgcaagacatggcctgtatgagaagaaaaagacctcaagaaagcaacgaaaggaacgcaagaacagaatgaagaaagtcagggggactgcaaaggccaatgttggtgccggcaaaaagtgagctggagattggatcacagccgaaggagtaaaggtgctgcaatgatgttagctgtgg

SEQ ID NO: 4706 - DNA, 348 bp, Homo sapiens
aaacatggttagttgctagtacaaggaatcgtttattggtaacatcttggtggctggctagctagtttctacagaacataatttgcctctatagaaggctattcttagatcatgtctcaatggaaacactcttctttcttagccttacttgaatcttgcctataataaagtagagcaacacacattgaaagcttctgatcaacggtcctgaaattttcatcttgaatgtctttgtattaaactgaattttcttttaagctaacaaagatcataattttccatgattagccgtgtaactcctgcaatgaatgtttatgtgattgaagcaaatgtgaatcgtattatttt

SEQ ID NO: 4707 - DNA, 465 bp, Homo sapiens
ccaaaccaatgagaattaaggaaggctcttccaggccagtttggtcagatgatgactggttgaagaagttttctgggaagacgcttgaagagaataaagaggaagaagggtcagagcctcccaaagcagagacccaggagggagagcccattgctaaaaaggcccgctcaaatcctcaggtgtacatggacatcaagattgggaacaagccggctggccgcatccagatgctcctgcgttctgatgtcgtgcccatgacagcagagaatttccgctgcctgtgcactcatgaaaagggctttggctttaagggaagcagcttccaccgcatcatcccccagttcatgtgccagggcggtgatttcacaaaccacaatggcactgggggcaagtccatctatgggaagaagttcgatgatgaaaactttatcctcaagcatacgggaccaggtctactatccatgg

SEQ ID NO: 4708 - DNA, 367 bp, Homo sapiens; identical to SEQ ID NO: 3183

SEQ ID NO: 4709 - DNA, 501 bp, Homo sapiens
aaaatacataaaattttctaaaacgtaaaatggaaaggtttaatacacaggaaaaacactgcacaccttaactaaacaaactagaaagaaaatatatttatatacagaactaagatgagtccattcattatttttacaaatattcacatagatggtttagagataagtagttaagtgtgtctcattaattaatggatgctttctagcctctgtcttcattaattttatttcctattcaacaaaaaataatgctttcaggatatattacatatagagcaatatcatttttatcagtaatttgtctgaaaaagagaaaaacttaaaagcagaaccctacaaagcaaagcaaactacaaagcaaagagtaatcacagtgtttgcaaaatagaaatgtgtgactttaactttatagcaggctgcctaattaatccagacagtagagaaagcagactgaggcaggaagtaagaggtgggactaaactgttaagaagataataattt

SEQ ID NO: 4710 - DNA, 468 bp, Homo sapiens
aaactcttcagtttacagagaaggatgctgaggacctagatgagaagttacctgcaaaaggcaaaagggttacttagtgtcagaaccaaggcaatgacttctctctcccagatctcctagctactggtcctgggccattttttttttaaataatcccaactttctttaaaagacaagcatttcagtaagctagttattttcatgggttgctcatccatttttttcagtgatctaaaaatgtagggagatggctactactgaagttgtctgtctacttgggataatagcaaattaattgaagacaatgggaaagtaagttataaaaaatactgggaaatctgtttctcttctgagcaagcattcagggcaggtataaacatcaaacatagtgacattgtcaaaacctcttccatttgaacattgattaattcatcaaataaatggtatagtaaaaaaaaaaaaaaaaaa

SEQ ID NO: 4711 - DNA, 417 bp, Homo sapiens; identical to SEQ ID NO: 3179

SEQ ID NO: 4712 - DNA, 437 bp, Homo sapiens
  misc_feature (1)...(437): n = g, a, c or t
aaaactcattaataagataccaaattcaagagattatagttacattgtaaaacgtaatcttcttttaataaaagctaataatgactgatgaattacaaatgcacttatttattggtgattacaaacaatacttaagaacttaagcagcttgagtagtagtttaagctagacagagcaaagaaaattcttgtttaatatatatatatttttaattccagtaatattttcttaaattcctgttaaaaatataatcaatattaaagtcagcaaaatgcctttgactgacgcctggattattttaccacttaacctggttacacagtgatttttttttttttctgtcagatgtaactgacaaccagtttagtctttctttaagataaatgaagtgataactcacattgcagcatcttgnggaaaatattcaaactacattt

SEQ ID NO: 4713 - DNA, 303 bp, Homo sapiens; identical to SEQ ID NO: 3177

SEQ ID NO: 4714 - DNA, 451 bp, Homo sapiens; identical to SEQ ID NO: 3176

SEQ ID NO: 4715 - DNA, 525 bp, Homo sapiens
  misc_feature (1)...(525): n = g, a, c or t
ctggtggcttcctgatttccgcccacagaaggtatgttcacactgagagagctctcccgccaaggggaggaatcacctgctttaatacatgttgttctcttctgtgctagtgtggtcatccactctgtataaacttatgtgcaacattaagacaaaaaaagggagttgagttgataagatgacttgggaggctctcatagttgtaataactatggaagacagaagaacatgctatcatctttatttttagcactcatatctggacctattactaaaaaagcttcttcattccttccaaccactagattataatggctaaaaagtcttttccttaaatctgatgggtgtaaaaataaaaagtaacagcatttctctagggctctgtttttattttgttttgttcttcctttatagacacnacaaaaacaaggattaactttccaaatactcatggtgcacaagaaggttatntatgcncagtatttctaatttattcaaattcaatttgaatttggtctgaagcta

SEQ ID NO: 4716 - DNA, 507 bp, Homo sapiens
ctgagcacgagtatagcagcattaactttaatctcattggctacattaatgaactttcctaatcctctcaatgccatgcagattttgtggatcaatattattatggatggacccccagctcagagccttggagtagaaccagtggataaagatgtcattcgtaaacctcctcgcaactggaaagacagcattttgactaaaaacttgatacttaaaatacttgtttcatcaataatcattgtttgtgggactttgtttgtcttctggcgtgagctacgagacaatgtgattacacctcgagacacaacaatgaccttcacatgctttgtgttttttgacatgttcaatgcactaagttccagatcccagaccaagtctgtgtttgagattggactctgcagtaatagaatgttttgctatgcagttcttggatccatcatgggacaattactagttatttactttcctccgcttcagaaggtttttcagactgagagcctaagcata

SEQ ID NO: 4717 - DNA, 403 bp, Homo sapiens
  misc_feature (1)...(403): n = g, a, c or t
attttaattaatcttttgttttttttttttttttttttagactcaagatatcaatgaaatatgcatatcttatttggagtgtatgattttatagcctccatcttttagttcagttttaagaaaaacagactaaatgatccctgtaatgtttgaatatgttactagctggagttccagaaaatattctggcatgcctttgaactttganagctcatttcgngggtgctctgatttaatgtcaactatgcaaaagccaagtaaatgcaagcactgaatacacaaaggccaaataaatacaagacaggacagaaaataaaatacatgcttaccagtaagaatgataagccttctccaaagaaagggaaaaattccctcatccaagcctcaaggtccaaacctcgca

SEQ ID NO: 4718 - DNA, 372 bp, Homo sapiens
  misc_feature (1)...(372): n = g, a, c or t
ttttttttttttttttttttttttngggttaaatacaggcttttttttttaatctgnaattgatttacatttgattttaaaaanacactgnttacatcaggtcaccacaaagcagatttacatacaaccttcaattgcggaaaaacaaagtttntttttgatccaaacncaaagaaaaacttctttgggtttttttttaatgatcttttccttgatcataaaaaaagtaaaaaatgcagtacttttanaaggtaaagctagtaagtttacanaagtgcaaaacnccaaaacacttgaagcaaaaacttttttttttttttttaaaaaaaaggtntgacttcttgttttctgntcttggcanaaattttaatt

SEQ ID NO: 4719 - DNA, 292 bp, Homo sapiens
  misc_feature (1)...(292): n = g, a, c or t
aagcactttacagtctttgtggcagcagaatatacttgtccatggttcatatcaatgctaaaattccggcagggaaaaaaatgatatgttaagcacccaaatcttcacatggagggggagggggtgggaaaagaaggaaaaaaagggaaaaacaaccaaaataatttaagtaaatgacagattggaaaacagggtttataaaaattattctcttgagtttataaattgttaaactcaatntatagctatgttaaactncgtaagaaccactatactgaaaacaccatttaag

SEQ ID NO: 4720 - DNA, 379 bp, Homo sapiens
ctgatggtcatctttgtttacaagccattacaggtttgaacaaattcaaaattgcctattattaagcctccgcaggagctactgggcataagcaaacctaagattttataacccagcaattatcctatagaaaatagtccagattattatattctgccacacctttattcatacttgactccaaaaagttctcaattattcacagggataatctagaaaataaatattagttttgctttcaaagacattactggaatgagcaggaacctgcatctttgttatattaattaacttattatttagttttcctgtctgcttagaaattggctgtttaggttgaaaaatgatttaagaagcataaactataacacaacaattt

SEQ ID NO: 4721 - DNA, 458 bp, Homo sapiens
gttagtattgactttgtctaaaagaggcttgacttcaactgggataaaaatgtcagtgaattttgttaaagtagtaaaaatgcagttgacttagtaggaacataaaattatttcctaataagataatattgcactcctaccaaataaacaggattttagtaatatctgagggattgttgatggtgagttagactgtatttggcatagaatttggaaatgtaacttgaatgtaaatatgctgcaaaatgttgaatgtatacatagaaagactttttctgtcgacgccaaatgcccgttgtaaatgaaccttaaatattacattcctcctttgcacaataatatttctttataacacttatgattttttcccccaggacaacaaactgcccttaagagtcatttccttgttatcacaggtgtcaatatttttctgtattttgtttataattttatttttt

SEQ ID NO: 4722 - DNA, 428 bp, Homo sapiens
  misc_feature (1)...(428): n = g, a, c or t
aaatgtttttgaaaattgcaattcctacaaataaatgtcatagtgcaaataaatgtcaggatttagagaaggagcctaaactgaatttgtgttatttcagtaaaagttatggagttatgggtctagacgtgttaataagttagacagaactttggcactttagaacaaatgcatgagtggtatttcagttcctaagttacataaaaagtgtgaaagaacactgtgaggtcccagcaacgccagactatattaaggtaagtagaaagtgtttttatagggcttcaatacccaggtggtgacagagcagaagaaccggttttttttttttttttttactactaagcttttncaaaagaagtntctgttttattgnatanaacaagtacagcattttactacatagtatacaagtttttaatgagcattta

SEQ ID NO: 4723 - DNA, 262 bp, Homo sapiens
aaatgctttaatgaaagttatgaatgggatttaacatgggaactatgcatatgcaatatcatatttttcatatcaatgaaaaattccataaaaatagctatattaaatttcatatgtaaatatttaacaaatatgtttgtattcttctatttttatacaatgaatattaatacatattgcatttatttattttaatgacatttatttaagttcaattgtacaaaacctaatttgttgtcaaaagtatcaagcaataaatttt

SEQ ID NO: 4724 - DNA, 625 bp, Homo sapiens
  misc_feature (1)...(625): n = g, a, c or t
ctgagttacaaggactaaaagtgaaaagcattctaaaagtccatgaacactgttgttcacacccttcttcagaacacactaaacttgtctgacacatttctcttcatacatagcaagcaacagcacccaataaaagcctgagaagaaatgctgctgtgtaaatactgcaactattcctgaaaaaagaattatgggatatatactccaaagctgcccattcccataatttgtattgcataggtcacataatcacacacatatatatacacatgtgtgtatatatatgcacatgcaagaatatattaagacgacaatgaagtctagtcacagagcaatttacaggctcaatatatttttttacactttgcttgaaagaaaatttcaatattttacagtctttcagtaggcattatatacactgcactttatgaaatctaaaaggtattgaaataaatttttccaacattttggtaacaaaacaaacaacgtttctccaaatacttgtgctatctacatgatgtttgctctgataatcactaatcacaaaaaactgactcaatggaataattagaaaaattgnctaacaccatgcatgggtttcaatcatttttaatatcctatccta

SEQ ID NO: 4725 - DNA, 428 bp, Homo sapiens; identical to SEQ ID NO: 351
  misc_feature (1)...(428): n = g, a, c or t

SEQ ID NO: 4726 - DNA, 582 bp, Homo sapiens
  misc_feature (1)...(582): n = g, a, c or t
ctggttctagtcaattctgaaccaccaccccccgccccccgcaaaaagtaaaagtcaaaccaaacttcctcaagctgcatgcttttcacaaaatccagaaagcatttaagaattgaactaggggctggaagaagtgaaagggaagcatctaaaaatgaaaggtgagtaaccagatagcaaaagaaaagggaaagccatccaaatttgaaagctgttgatagaaattgagattcttgctgtcttttgtgcctctacaagctactactcattccagaattcctgggtcttccaagaggattcttaaggtaccagagatttgctagggaaccaaaagtgcttgagaatctgcctgagggcttgcatagctttcacattaaaaaaagaaaaagctagcagatttactcctttttaggggatcatatcaagaaagttagtctggttggaaaccaaganaatggctgatgtctctttcttggaatatgtgaaataaatttagcagtttaactaaatacaaatatatgcattgngtaatccactcnanaattaaacagacnaaaggtatgcttgctttggaatgatttt

SEQ ID NO: 4727 - DNA, 424 bp, Homo sapiens
  misc_feature (1)...(424): n = g, a, c or t
attatccaggcntnaggcnacatctgtctagtgttgncttcatcaagaacagactatatactaattcccactanaagctgtccatgccatacanaagatctattaaaaatgttttaaatggaaaatgtactctagaccacaggactaatgtaaattaatatacagtcattcattatttgttgaagttgatagaatttttgaagtgtaaacttgtgtctgaatgttttatttgttctttagctgaagttttgcaatttttatgtcaaaattcaattgctattaaacaagttgagatccagttataaattaaccttgttnttantagatgacatttatttcaataaaagttgcaaatngggcttaatcttaaaattggnggtcatttcaatggttgacatatttggctatttattaaccncctctt

SEQ ID NO: 4728 - DNA, 265 bp, Homo sapiens
ctcaaattaccctccaaaagcaagtagccaaagccgttgccaaaccccacccataaatcaatgggccctttatttatgacgactttatttattctaatatgattttatagtatttatatatattgggtcgtctgcttcccttgtatttttcttcctttttttgtaatattgaaaacgacgatataattattataagtagactataatatatttagtaatatatattattaccttaaaagtctatttttgtgttttgggcattttt

SEQ ID NO: 4729 - DNA, 410 bp, Homo sapiens
  misc_feature (1)...(410): n = g, a, c or t
gtcctactgtgcctggctccagttnttttttttttttttttttttttttganacagggtctcattatgtcacccaggctggagtgtantgcaatcacagctcactgcagcctcgacctcctgggctcaagngatcctcccaccttagcttcctgagtagctgggatttcagcccactttntgctgaaagaactgccagcaggtaggaccccanaggcccccaaatgaaagcttgaatttcccctactggctctgcgttttgctganatctgtaggaaaggatgcttcacaaactgaggtanataatgctatgctgncgttggtatacatcatgaatttttatgtaaattgctntgcaaagcaaattgatatgtttgataaatttatgtttttaggnaaataaaaactttt

SEQ ID NO: 4730 - DNA, 539 bp, Homo sapiens
  misc_feature (1)...(539): n = g, a, c or t
gtgggtgttttctaaatattaataggggggcttgattcaacaaagccacagacttaacgttgaaattttcttcaggaattttctagtaacccaggtctaaagtagctacagaaaggggaatattatgtgtgattatttttcttcttatgctatatccccaagtttttcagactcatttaagtaaaggctagagtgagtaaggaatagagccaaatgaggtaggtgtctgagccatgaagtataaatactgaaagatgtcacttttattcaggaaatagggggagattcaagtcatatagattcctactcgaaaatcttgacacctgactttccaggatgcacattttcatacgtagaccagtttcctcttggtttcttcagttaagtcaaaacaacacgttcctctttccccatatattcatatatttttgctcgttagtgtatttcttgagctgntttcatgttgnttatttcctgnctgngaaatggngntttttttttttgntgntggntttttttttttttttttaacttgggac

SEQ ID NO: 4731 - DNA, 398 bp, Homo sapiens
cgcctgggcaacgacttccacacgaacaagcgcgtgtgcgaggagatcgccattatccccagcaaaaagctccgcaacaagatagcaggttatgtcacgcatctgatgaagcgaattcagagaggcccagtaagaggtatctccatcaagctgcaggaggaggagagagaaaggagagacaattatgttcctgaggtctcagccttggatcaggagattattgaagtagatcctgacactaaggaaatgctgaagcttttggacttcggcagtctgtccaaccttcaggtcactcagcctacagttgggatgaatttcaaaacgcctcggggacctgtttgaattttttctgtagtgctgtattattttcaataaatctgggacaacaaaaaaaaaaa

SEQ ID NO: 4732 - DNA, 627 bp, Homo sapiens
ccatgacatcacgccgtagtggagttggcctggcagtggtcaatggacagctcatggcagtaggaggttttgatggcacaacatacttgaagaccatagaagtttttgatcctgatgccaatacatggaggttatatggcgggatgaattaccgtcggctagggggtggcgtaggagttattaaaatgacacattgtgaatcccatatttggtgaacacagagaagacagtcttgtatatattcctctgtattctggggagctttgaccttggagctttgtacagcttgagaaaacattagaacaaattttattatttgccggtgcctcaacaaatggaaatacaatccaatgaaagtacttcacctgcaagatgcacaataattttcaactctgtgcagaagaatatttatttttggttttaatttatcatggttttttgttgttttcgttttgaacttatccttcctcccacaaaaaaagaaaagaagaaaaaattccaagcagcaaaacttactttgtttgtaaggtattcatttaggtttgaaaatactatttaataagggcagaagggctatatatgatttggctattatttctagacactccatccacatgattccactaa

SEQ ID NO: 4733 - DNA, 410 bp, Homo sapiens
aaaaactatttgtaatgtaattttaatgcattttttacaggcccagtaatggttaaatacgtcagcttactgaataattttaactatttattcttctaaggatacagcttgtctctggattttccagtcttaattttatattttattaatctattttaatgcttgcttttcccatttatagacgttgtagcagtaattgcaagaagttcttgagctgaattcctgttgtgacaacttcctataattacagtagataactttttcttttagtcgtatataacttttctataacttgtgatggacaagagatatgcttatccaataaaataagcttaaatattagatgctcttgggtcaaaatgtccttttaccaaattgacctttttatgagttctttgggtaaatacttt

SEQ ID NO: 4734 - DNA, 516 bp, Homo sapiens
aaagaaggtagataaatttattgccacttgaaaactaaatataactcagatgagtcagacaaaaaaaatcattgacattaaaattattattatttgaccaggtttgtcttttgaagatttctctcacaggcacttctgcaacaaatttgtataatttaatataaatattttgtgattattcttaaaggccaagcaatgggcatttatgatggctaatcataaatacacaataatatatattacatagtatatattaattgacaggttgcattttttctttgagcttatacacttttggaaaaagtctaccttttataaatatcaagttggatattcttgtctgttgcatttgctaaataagagtcaatagttaagaatctgtttcttttatatatgtcggattgtatccatttggaatacagaatcccctgcataaaactagcatgttttgctgaagtacttgttaacttgactctaaaatattttttattttcctaatatatagcatttattttt

SEQ ID NO: 4735 - DNA, 483 bp, Homo sapiens
aaagatattttcttgaattatttagaacatggtaagcctggtattttttaatcaaacaaaatatttatgaaatgggttttctcttaattctggattcatcatggctttctaataccaattgtaatatttacaatattcaccaaaacttagaattttgcaaatgctggaattctgccagtgtttctttgctaagccttgcatgcaaaatttgaaattttaacattggcacccaaaacctacatggaatgtatgtctggagtatttcaaactttacattgaaacataatttccttggaaaacaaaccataagcctgaggaggtttttatcaactggaatgctttatattagtttgtttttcactgtacattcctcattttacattcatttaacctgccgattatttaatttttttattgtaaagtagtttttagcatttgcttttatttttttactttgatgccttttcaaattggcatgtcttt

SEQ ID NO: 4736 - DNA, 376 bp, Homo sapiens
  misc_feature (1)...(376): n = g, a, c or t
cttttttttttttttttttttttttttttctttttttttacaaacctcaaggttgttttatttaaaccaaataatctgagcaagacatatntacnttaaaaacaaatgaacacattaaaatttcactattttacaattaaattntagcaacatatacaaatactgagtgactacagtacatgccgaggtaananaagtacattctggganaatatnactgacgctcaaaccatttttatttccaatatgtatttcaatacatgtttgtttccacttttcccagtgccacacacacacacacacaaaaacaaaacaaancaaaaaaaancagncncaagttggattacattggaattggngccacagttaacttttt

SEQ ID NO: 4737 - DNA, 222 bp, Homo sapiens
  misc_feature (1)...(222): n = g, a, c or t
acagaaataaattaaactcttcatcaacaaagacctgtttttgtgactgccttgagttttatcagaattattggcctantaatccttcanaaacaccgtaattctaaataaacctcttcccatacacctttcccccataagatgtgtcttcaacactataaagcatttgtattgtgatttgattaagtatatatttggttgtncccaatgaagagcaaattt

SEQ ID NO: 4738 - DNA, 542 bp, Homo sapiens
aaaaaacaataaaatagtaattggggaaaaaacccttcactctattggtgtctttgtctggaaaactttcccagaatcactaaaattccaggtcaacaggtagtacctgaattattcaagtatactgtaatttgcttccaaatctgttagctgaagagagaaactaaaattttatccaagttaattcagtgcaaatcaaagcttcaagttgaaaatctgagagaaaaaataacgttcgaactgcaggaaatgcttctggaactgaaaaattaaaaaatcacattatgaagaaatctttgcaagtgttcttggtatatgaaatgctgagttaagaaatgggacccttttaagttgcagtgagggttctattatgaagactatttgcaatgtgggcaaaagggaaacagagagggaagagctgaaggttgtatttgtggaaggaaattcaagttaagcaaaaactgcttttattcaattctagaaaaatttggtgagatatatcatacattaggggataaaacagattatggagataaatttac

SEQ ID NO: 4739 - DNA, 417 bp, Homo sapiens
ccattacatcctctttttaatttacataatacagatacttgagaaagttgttgtggtgttgtatgccaagaaaattctttttattggtgcctatattgtaacaattatttttaatgcattgtattttgaagtaacggttcagttaaatttttcacctgctgtgtaactgaaacacaattacagtctataatcatctgtagaagtctggagataattttgcaactcatgttatgggttaaatgaatatttttgtaaaagtaaaagcaacaaatttataaattgattatttgaaactttacaacacaattgcatcccaaatacaaattgtattgcttattcattatagctattcgtcctgtaatctgtttctaggtgaagcatactccagtgttttaggggttttgaaaataaatattt

SEQ ID NO: 4740 - DNA, 355 bp, Homo sapiens
  misc_feature (1)...(355): n = g, a, c or t
aaaaaaaagtncgagtctgttgcactaggctgtacatgactaaagttgacagatgctatgctagatttataatcactagttctggtacttgtgtctttgtatgatcaaagcatgcaataagcaatacaaaataccaagccttatacttaaaagaagtttaacatattggttaatatactggttaatatactggttaaacatattgaatgtatataagtggcannactagatttttaaggaantgnacattataatattggagctcagtactgcatgaagagacttcattaaaactaanaaaacatttatttggggagaaattttaggcatttaagaacttgtatttttctatttt

SEQ ID NO: 4741 - DNA, 342 bp, Homo sapiens
ccacttgtgtgggtcctcacaagcaaagagagcactaaacttgacattgggagtccaccactccaactttgctttctgaaggttttggtgtacattgagccccagaaggaaaggagagtatctgtgagtgggggcctcccttgaccccagtacgaagtctatgccctgaatccccagagtagcccttcctggtgcccaactggcctggggacaaacagcgtccactacatctaggactgccggctaagtggacacacttcttgacctcctaccaggaactttggtaaaagctagctttggggaaggggttgggtgtaaatatgagagggtggagggagacca

SEQ ID NO: 4742 - DNA, 236 bp, Homo sapiens; identical to SEQ ID NO: 3153

SEQ ID NO: 4743 - DNA, 303 bp, Homo sapiens
aaaaacaggacttgtcactttatataaaagaatagtatgctctatttcctgaatggatgtggaaatgaaagctagcgcacctgcactttgaattcttgcttcttttttattactgttatgattttgctttttacagatgttggacgattttttcttctgattgttgaattcataatcatggtctcatttcctttgcttctttggaatatttctttcaacacattcctttattttattatacattgtgtcctttttttagctattgctgctgttgttttttattctatttacaggatgattttt

SEQ ID NO: 4744 - DNA, 596 bp, Homo sapiens
  misc_feature (1)...(596): n = g, a, c or t
aaaaaataagtatacttgctagtactatcttcactcttttttttttcagaagccaatgttctctaaatctgcagcttcattccacagctttacagaatcataatctcttgaatatatttccaatgttattaaaaaataaaaaatcatacaagatatatttagcacattaaaacttaagaggttacagtataactgtccagacctccaggtaccactgaatacttttccagtacaaagaggccaatatgttagaataattaattctctgtatttacttttattaaaaagaggtttttggtagtaagaacaaataatctctcatttgttgcctgaaatcctaaaataggatcattggtttctaggcttgctacttgctgcttancaacctgtcctacttgcctgccttcctttctgttgtaaagtacagtggacatgggagcaggctgacgatagatgaatactcgacgaaggcactcacaaagggctgcatacgagtaatttggagcacaggcaaaaaattttttgnctctctttgatgcttggacatagcctaaagcattgaaaggtngcgatgtgctcccacatatcatcttgtt

SEQ ID NO: 4745 - DNA, 228 bp, Homo sapiens; identical to SEQ ID NO: 3151

SEQ ID NO: 4746 - DNA, 328 bp, Homo sapiens; identical to SEQ ID NO: 2874

SEQ ID NO: 4747 - DNA, 491 bp, Homo sapiens
aaaatagctttaaatgcattcttcacaagtaattcagcatatatttttatatcatgtttacttatgcttaagaattaaagcaagtatatttattactctgatggaaatatgggaaatctctcattcatgcaatatacagggataatattcaagcgaagggaaaattcccgctttttatttttgtaaatgtatccatatataatcatcgacatgacagatgaggaaacccatgaagtttcccactagtcagatatacattttcacttcatcagaagcacctgatatctacagctaatttataattagatactgtttcaatgaaaccaaaatgagccctacaagttcctataaacaaaagcttccaatgtactaggacagtcagtaattaatgcatcattcagaggattatggctgttccttaagaagtgcaagttcaaacctgtcaacaccagaggtaatcattttatattaatttatacgtaataccattt

SEQ ID NO: 4748 - DNA, 196 bp, Homo sapiens
  misc_feature (1)...(196): n = g, a, c or t
aaaatggttgaaaagaattcaaagaataataatattttgggacatgttaaaattatgtgaaattcaaatttcagcatccataaataaagttttattgaaacacagccaaaaaaaaaaaaaaaaaaaaaaaaaaaaaaaaaaaaaaaaaaaaaaaaaaaaaaaaaaaaaaaaaaaaaaaaaaacnaaaaaaaaaaag

SEQ ID NO: 4749 - DNA, 594 bp, Homo sapiens
  misc_feature (1)...(594): n = g, a, c or t
ctgctgacagttctttggtggaaaagtaagttgcgtacttacccaagctgcccaaatgattatcaagccaagtttgtttttcaaaaataggttttaagatacaccaaagaaactatacaatacaaaaatttaacaatgaagttaaagtatatagcaaaagccaaatatgacaacacacatgtataatgtagaaaagaatcctttcagtcctagaaaactaaaatggggagaacttactgaagggtaacatacataaaatgagtactaatagcaaggaataatcctaaacattttcccaataaactgactaagcctcaaaaggacagcttaggaaaatgattaacatgcagtttttcttttttcctagccaattcagttctacttagataaatctggttgccaatcaatacatatataaattaatttttttctgctcaattactaccattttttctttttcaccttttccccaattttctctancaacacttttcctttggtttgatcagttgaactcaaaaggtttggtacctaanatgagtatcaactgttattgcaatagcacttgggaaatgcaatcctanaaaggcgaat

SEQ ID NO: 4750 - DNA, 625 bp, Homo sapiens
  misc_feature (1)...(625): n = g, a, c or t
ctggggagatggtgtttgtatatgaaaatgcaaaagaaggagctcggaatataagaacgtcagaacgagtgacactaatagtggataacactagatttgttgtagacccatccatttttactgcacagccaaatacaatgttgggcaggatgtttggatctggccgagaacataactttacacgacccaatgagaaaggagagtatgaggtggcagagggaattggttccactgtgtttcgagcgattctggattactataaaacaggaataatccgttgtcctgatggcatatctattcctgaactgagagaagcatgtgactatctttgtatctcttttgaatatagcactattaaatgtagagatctcagtgccctaatgcatgagttatcaaatgatggtgctcgtagacaatttgaattttatctggaagaaatgatcctccctctcatggtagctagtgcccagagtggggaacgggaatgtcatatagtggtgcttacagatgatgatgtggttgattgggatgaagaatatccaccacagatgggagaagaatattcacaaattatttatagcacaaaattatatagatttttcaagtatattgaaaacaganatgt

SEQ ID NO: 4751 - DNA, 414 bp, Homo sapiens; identical to SEQ ID NO: 3146

SEQ ID NO: 4752 - DNA, 373 bp, Homo sapiens
aaagtttatttcctttgtggatacaacattatttttacaaaaatgcaaattgggaggaaaaactaaggctagagaatatatcttctacttcttggcaaagcatgtttactattggtcaatgttattatttgactctatattgccaaagggataatcggggagaaggtcataggaattttcatccttctttaatagcagacattaaagatgtctcctattataaggagttatgtgaggtcagctaaaactaattatttgaggtcatacaaatgactcaaaattcttagagaaaccatgggtttggagaggaatcctcatatatatttcagaagaggagaaaaaataagatagaaataagatcttgtattttttt

SEQ ID NO: 4753 - DNA, 368 bp, Homo sapiens
aaaagatttacatgttcatatacaatttataaagttaaaaattctctgtacaaaatcttacatgtacagagtttatataagccccattcttatggctgtatcaccacacagatttgcttaaaactataatactacaaacactcgggttcttcatattcaatcttggcacccatatagcaatacactattctgaaatgtaaattacaaaggaaataaaatgtaatcatgcagacattttttaatataagaaaatgcgataaaatatactacaccagatcaacatttatcaattccatagatactgagttttcaacttactgcactgttttcatataagtacatgcaaaactagcagattatggattttt

SEQ ID NO: 4754 - DNA, 356 bp, Homo sapiens
ctggtgttcagcctctcaacagcaaaccatgagactacataactatcaggttttcacttcactttcttctcttctgtctaaataatcacaatgcctttaggcttataaaaagcatctaatcattacagtgtcttatcctttttaatgttctttccttttattaaactgtggcaagactgaatgtttaggaaaggtagcaatgttttggaggtaattttatttttgtataaatttatgattagaatattaagtcattgattgttaaagtaattatctaaatagaagatgttggattacaaaagaaaatgggagttaacatgattgcatgtcaaaatgtgggaaattgctggagttgg

SEQ ID NO: 4755 - DNA, 548 bp, Homo sapiens
  misc_feature (1)...(548): n = g, a, c or t
aaatggaaagttactattataaggttaatttgcagtcctcttctaaatagaaaaccatatccttggctactaacatctggagactgtgagctccttcccattccccttcctggtactgtggagtcagattggcatgaaaccactaacttcattctagaatcattgtagccataagttgtgtgctttttattaatcatgccaaacataatgtaactgggcagagaatggtcctaaccaaggtacctatgaaaagcgctagctatcatgtgtagtagatgcatcattttggctcttcttacatttgtaaaaatgtacagattaggncatcttaattcatattagtgacacggaacagcacctccactatttgtatgttcaaataagctttcagactaatagcttttttggngtctaaaatgtaagcaaaaaattcctgctgaaacattccagtcctttcatttagtataaaagaaatactgaacaagccagtgggatngaattgaaagaactaatcatgaggactctgtcctgacacaggtcctcaaagc

SEQ ID NO: 4756 - DNA, 385 bp, Homo sapiens; identical to SEQ ID NO: 3139

SEQ ID NO: 4757 - DNA, 547 bp, Homo sapiens
  misc_feature (1)...(547): n = g, a, c or t
gtcgatttgggaggaaaggtgtggctataaactttgttactgaagaagacaagaggattcttcgtgacattgagactttctacaatactacagtggaggagatgcccatgaatgtggctgaccttatttaattcctgggatgagagttttggatgcagtgctcgctgttgctgaataggcgatcacaacgtgcattgtgcttctttctttgggaatatttgaatcttgtctcaatgctcataacggatcagaaatacagattttgatagcaaagcgacgttagtcgtgagctcttgtgaggaaagtcattggctttatcctctttagagttagactgttggggtgggtataaaagatggggtctgtaaaatctttctttcttagaaatttatttcctagttctgtagaaatggttgtattagatgttctctatcatttaataatatacttgtggactaaaagatataagtgctgtataaaatcagccaattatgttaaactagcatatctgcctttattgngtttgtcattagcctgagtagaaagg

SEQ ID NO: 4758 - DNA, 268 bp, Homo sapiens; identical to SEQ ID NO: 3137

SEQ ID NO: 4759 - DNA, 283 bp, Homo sapiens
aaaccaatccaatatacagacctttgaaagtaaaagatcaactgcacagatattttttaactaaagaatgtgtcagtaaatctatgtaaatatccaaattgacacaaattttctaaagagttaaaattattaaatttcaaattattattttatatacttttgatcaaaatataatatttgcttcaccataagttgaagatattaagaaaacataatctaaggtttattacaaaaaataatggcctctgatagatatacagagaataatatattcttaaatttt

SEQ ID NO: 4760 - DNA, 592 bp, Homo sapiens
  misc_feature (1)...(592): n = g, a, c or t
aaaaatccatgttcaacccaaacccactccccaaccctaactataggagatgaccctttaggaagctgaaaaggtttttataaagtcacaaaatgcatctcaatgcaagtttatataatatcaaaattatctcactgattttaatgtgtaagttatataatttatttcacccaccttgtattattctagaaaataagtcagcttttatatttaacaaatatgtgcaaaaatcataaacatagcttatagaaatataaacagatatctaattacaaagtttccgatctacttcgctaaaaggcccaagtcccctttttcttttatttataactttattttaagcagtctctccctgtcaaacttacctgtatgttttcgagaatgagtgataagagaactagagacagcaaatgccttcccacaggtatcacatacataaggcttttctccagtatacctacggacatgataggtcagtgtgctggcttgagcaaatctctgtccacacctatcacagacatatggnttctctccactatgcttccttgcatgaatcttgagattgctagaagttgcaaactgtaagttgcat

SEQ ID NO: 4761 - DNA, 139 bp, Homo sapiens
  misc_feature (1)...(139): n = g, a, c or t
aaaactcttctaactgccatagcaccagcctccacaaaatacttcagacacatatcatcaattccaccagtggttagaataacattggcaccagctttttttttttttttttttttttttttttcngnggaaatttttt

SEQ ID NO: 4762 - DNA, 181 bp, Homo sapiens; identical to SEQ ID NO: 3134

SEQ ID NO: 4763 - DNA, 408 bp, Homo sapiens
  misc_feature (1)...(408): n = g, a, c or t
ctttcccagaattagttgtatagggttggcccaagagatgtaagaaaaatctcgcattgctccctaagcaccctgggccttattaaagagcaacttctatttccagtcgggggagtaacactaaagctacaagaaatatgtaataatgataggtaataatgtgttccaaagctttttcaaactagaataaggaggcaaatagaagaatgagatactgatgtccacagttcattggcagaatctaaccccttctgttatcttttttaatactatttttgtttanatagaagtttcaaagaagataaaaatgcttgaagagcctgagagtaaaaagattatgctgcaaagctatgatataaactgctcttgcagtccaaagggatacctgattaaagaagtttcttattt

SEQ ID NO: 4764 - DNA, 330 bp, Homo sapiens
  misc_feature (1)...(330): n = g, a, c or t
ttttttttttttttttttttttttttttacaagcnccaaactanaaccaaatttatttatcanaattattgagttggatgaaacagaaaataagccaacagaacacttaaaaatacaagtttattttctccatnttgntaagtctaattatgatttatttcaaaatcatgaaaagcanagcctagcataccaaatgctaggtcaaatttgctctggaaacttactttctanattatttttnggacttacttaaaaaataattaatttccattaatatagcnctaatagcctccaaattatactgcanaattcctatntgtaacctttttt

SEQ ID NO: 4765 - DNA, 336 bp, Homo sapiens
  misc_feature (1)...(336): n = g, a, c or t
ctgctatctancaagaaaaccaaggtcccttaatatagtctaaatataatgtgtggcttattatagagaaatctttagcaacgtaagtttaaccagtaagtgtcacaactgatcaacagtacttaaaaggaaacaaacaaaaatcacactagccacaaatttccaccatatacacatgaaattaattttaatctgttttgactccttgacactaactgatcattaatgaaatatgatatggaaagatcacagagtagaaaacaagcaaagattagtttatacaacagtgactatatacatcagagggaaaacatgctagctaatgcaacattaagg

SEQ ID NO: 4766 - DNA, 524 bp, Homo sapiens
  misc_feature (1)...(524): n = g, a, c or t
aaatttgaggtggtcttaagaataacaaatgaacagaattccaaatttttgaaataggtgaactgctgcagttacgggtatacatttaggaaaactgtatagctcttacaagaccagcaatgtaactttattttgtacatttttgaattgaaaatataaacaataattaaaaaataaaaagaaaatacagcataataaaaaacatacgcttctcaattaaatgtactggatacatataaattttaagggaagaagcaaaaaaggaaaatgattgatatttaagtgcagactgactacctagacaaaaaaaaaaagacttaaaaaaatatcataaaacctctagttcttctatgactaatatccatatggttggagtatcgtcactatggaagtgattttgttatgtttgcatatgttacactttactggtaatttacatgatggcttttaaggccctgggagacatggtttttggaaacaagattggataaaaatcactgctaanacgcaatacaccttatttt

SEQ ID NO: 4767 - DNA, 238 bp, Homo sapiens
gctgttttaagttagaaaactgaatagcaacactgaatactgtagaaatgcactttgctcagtaatacttgagttgttgcaatatttgattatccatttggttgttacagaaaaattcttaactgtaattgatggttgttgccgtaatagtatattgcctgtatttctacctctagtaatgggctttatgtgctagattttaatatccttgagcctgggcaagtgcacaagtcttttt

SEQ ID NO: 4768 - DNA, 431 bp, Homo sapiens
ttaaatgctatgtgttaatatttcacttgcttgtattagaaaggcaaaatgtaagactttggtatgtgtgacatatgctttatttggctttattttacaagcacagtatctgcaaaaaacaaagtaaccttttttcatacctgccagttttgaatttatatatgttattgaacaaatagtaatagaggattcgctgttgaaacaagttgtccaagcaatgttatattcatttttatacttattgggaaagtgtgagttaatattggacacattttatcctgatccacagtggagttttagtaattatattttgttgatttcttcattttgttttctggtataaaagtagagataatgtgtagtcacttctgatttagtgaaaccaattgtaataattgtggaaatgttttgtctttaagtgtaaatatttt

SEQ ID NO: 4769 - DNA, 623 bp, Homo sapiens
cggagagactcaagatgattccctttttacccatgttttctctactattgctgcttattgttaaccctataaacgccaacaatcattatgacaagatcttggctcatagtcgtatcaggggtcgggaccaaggcccaaatgtctgtgcccttcaacagattttgggcaccaaaaagaaatacttcagcacttgtaagaactggtataaaaagtccatctgtggacagaaaacgactgtgttatatgaatgttgccctggttatatgagaatggaaggaatgaaaggctgcccagcagttttgcccattgaccatgtttatggcactctgggcatcgtgggagccaccacaacgcagcgctattctgacgcctcaaaactgagggaggagatcgagggaaagggatccttcacttactttgcaccgagtaatgaggcttgggacaacttggattctgatatccgtagaggtttggagagcaacgtgaatgttgaattactgaatgctttacatagtcacatgattaataagagaatgttgaccaaggacttaaaaaatggcatgattattccttcaatgtataacaatttggggcttttcattaaccattatcctaatggggtt

SEQ ID NO: 4770 - DNA, 410 bp, Homo sapiens
aaagtatttacccaaagaactcataaaaaggtcaatttggtaaaaggacattttgacccaagagcatctaatatttaagcttattttattggataagcatatctcttgtccatcacaagttatagaaaagttatatacgactaaaagaaaaagttatctactgtaattataggaagttgtcacaacaggaattcagctcaagaacttcttgcaattactgctacaacgtctataaatgggaaaagcaagcattaaaatagattaataaaatataaaattaagactggaaaatccagagacaagctgtatccttagaagaataaatagttaaaattattcagtaagctgacgtatttaaccattactgggcctgtaaaaaatgcattaaaattacattacaaatagttttt

SEQ ID NO: 4771 - DNA, 481 bp, Homo sapiens
ctgtagaaagagcgagagagatggttaaaatgccattaaggaaagctccttgtttagaatctttaagatagagctatatgtaaccatcactattcagccatttttgacctacaaaaatggtcacttcatatggtccaacacatttggtgagaatccttaagaagtggagggcttttcctttgggcaataatttagaggtgatcccaaacctagaaatctaataatatatctagattcttctctcacctcttctacttctactctttctactttgaaagattttcaaagtagaacacctgtcacagaacggatgtaagttaattttcatagaggagtccctctatttcatagaggaatttgtgtatatacccaacttttaataaatgaggccacagttaatcatttatatttctggaatgacttgctacttctctaattctcattcgtccttactagggagtgtgtcctaacaatttggttt

SEQ ID NO: 4772 - DNA, 596 bp, Homo sapiens
  misc_feature (1)...(596): n = g, a, c or t
aaaggttttgtatgtgtgtatgtatgtgtaaatagcaataaaagaaagattcaaaagtttgctaagttttttctttttaagccctttaagtaatgatataactagaaactacgtttcatctcaaaggaaaaaccacaggtgatatattctcatgcttcaggttaaaaacctctcttaaaaggctaggtttgcgaaagccttcctaaaattatgcttctgttgttactatcaatttgatattcagccagaaaaattaaaaataattattaatcccaaagcatactttcaaaatttctactaagaattatattaaatcaaaccaaactacaattttagagagatcaaactgagtaggagagagcatggtatgaaaatttactctccctttcatctaagccacacactataggtctcaataactatacaattactcttgtaattgactgatttctttacacctaaggatcattataacctgccatattagtttaatttaacataaaatcgtaatacagaaatttggtcacagtaggggatatctagatttcttctgcattgaaaagaatggtttccatttatctgngtttacaaaaaat

SEQ ID NO: 4773 - DNA, 386 bp, Homo sapiens
cgggaacagcaagcacaattctgtactttggttataccatgataatggttttgatcttctttctttttacaggaacaattggcttctttgcatgcttttggtttgttaccaaaatatacagtgtggtgaaggttgactgaagaagtccagtgtgtccagttaaaacagaaataaattaaactcttcatcaacaaagacctgtttttgtgactgccttgagttttatcagaattattggcctagtaatccttcagaaacaccgtaattctaaataaacctcttcccatacacctttcccccataagatgtgtcttcaacactataaagcatttgtattgtgatttgattaagtatatatttggttgttctcaatgaagagcaaattt

SEQ ID NO: 4774 - DNA, 497 bp, Homo sapiens
gtcaccttcgtgaataccaagacctgctcaatgttaagatggcccttgacattgagattgccacctacaggaagctgctggaaggcgaggagagcaggatttctctgcctcttccaaacttttcctccctgaacctgagggaaactaatctggattcactccctctggttgatacccactcaaaaaggacacttctgattaagacggttgaaactagagatggacaggttatcaacgaaacttctcagcatcacgatgaccttgaataaaaattgcacacactcagtgcagcaatatattaccagcaagaataaaaaagaaatccatatcttaaagaaacagctttcaagtgcctttctgcagtttttcaggagcgcaagatagatttggaataggaataagctctagttcttaacaaccgacactcctacaagatttagaaaaaagtttacaacataatctagtttacagaaaaatcttgtgctagaatacttttt

SEQ ID NO: 4775 - DNA, 539 bp, Homo sapiens
aaaatactggcactttaagaaaacgataatctcgaaaaccacaaaattgccaaattgttccctaaactcctaagcagataaacatgactaatgaatgagtttgttttgtaaagaaaaatcattcaaataaattgaataattcatactgagatgcaaagtttgtcttctttcttcctatctacttggatttataaaggggcaaaccgtaatataggaaaatataccctattttgaatgtggcatctttgtttgaaaagctggcccaattaattaaaaatacttgtaatggaaagtctcgtttcctgagcagtccatatttagataaatgggaaaagacatctatagccagcattttcatagtcttcactgagactaatgtcaacaaaaaatttaatgtggcagtcttgtattttaagctcacgcttttggggatacattctcaggtcttctttaatgtgggaactgcaaaatataactgccattacatggtaatgggagttaaagaatagagtcctcatgtaaaggttagaacatacttt

SEQ ID NO: 4776 - DNA, 544 bp, Homo sapiens
  misc_feature (1)...(544): n = g, a, c or t
ccagaggtagccggagtgtgtcacagcccctcagatgcctttccttccacctttttttattttttaagaatcccaaataactcactgaagtgtctcaaaggcgaacaagttttaccaaaatgaatcctttttcagttaacagatcaaatggatgagttctgagcctctcaagttcctttccccagttagagtggggaactgggcaagtgttaactgtgggactcactgcagcgtcctatcctaaaggcacgagaagacggaaatgcaacctgcggagctgggcttggttcccaggtcacagtttggcccccgctacaggatgctgccctgctcagagagagatttaatagggagctgaaggaatcgttagggggccagggagatgtgactgaggctggctttccacgtgaatgagacggggtcggtggagggtttggtgctacagccagtcagaagatttgcaaatgcgaacacattcctgtgtgaggcatgttaccctttgtcagttattgngaatatgtgtattttaagcaataagattcag

SEQ ID NO: 4777 - DNA, 585 bp, Homo sapiens; identical to SEQ ID NO: 207

SEQ ID NO: 4778 - DNA, 253 bp, Homo sapiens
ctgaagcccgaggcagggttggtgtgatgccaaggcaaagtggtgaggagaaaacaggaaacgggctttctctgaattggtaaatgggaaagaagtgagcaacttaagattgtcacaattaatcacaagtgtacaggattagactgggtttatatttaactcttgcttcataggtgtaccatttaaagagtgttatttaatgctaagtttaactgctttaataaagtttatttttaaatatcttaaaaaaaaa

SEQ ID NO: 4779 - DNA, 144 bp, Homo sapiens
aaatatcggccaccactttcatgaggctgaatgggattcagcaattaggagcgttgcagggaagtgtggcagggcagaggtgggacaaattgcagatccctgtggggtcccttggttaggtgacaattagtctataaaacacag

SEQ ID NO: 4780 - DNA, 173 bp, Homo sapiens
ctgtggaggggacactgtctttgaggcatcactggttccacaaaaggtaggggaaggtcttgagggaccaccccatgccctcattaatcaaccagaagcttggcccggagcagcagcggggattccagtagctgtgggcatacaggatgctagggcggccacaacccaggcag

SEQ ID NO: 4781 - DNA, 534 bp, Homo sapiens
  misc_feature (1)...(534): n = g, a, c or t
aaaacaaatacaagttattgattcactcttctcaacttgacagtctacctgtggtataactgtcaggtaaaaacatacatctttacaacttggtggtcccaagttaaaaaaaaaaaaaaaaaccaacaacaaaaaaaaaaacaccatttcacagacaggaaataaacaacatgaaaacagctcaagaaatacactaacgagcaaaaatatntgaatatatggggaaagaggaacgtgttgttttgacttaactgaagaaaccaagaggaaactggtctacgtatgaaaatgtgcatcctggaaagtcaggngtcaagattttcgagtagggatctatatgacttgaatctccccctatttcctgaataaaagtgacatctttcagtatttatacttcatggntcanacacctacctcatttggctctattccttactcactctagcctttacttaaatgagtctgaaaaacttggggatntngcataagaagaaaaataatcncncntaatattcccctttntgnagctacttt

SEQ ID NO: 4782 - DNA, 463 bp, Homo sapiens
ccacggtgttccttatgttataaatgtcactctgcccgatgaaaagcaaaactacgtacatcgaattggcagagtaggaagagctgaaaggatgggtctggcaatttccctggtggcaacagaaaaagaaaaggtttggtaccatgtatgtagcagccgtggaaaagggtgttataacacaagactcaaggaagatggaggctgtaccatatggtacaacgagatgcagttactatctgagatagaagaacacctgaactgtaccatttctcaggttgagccggatataaaggtaccagtggatgaatttgatgggaaagttacctacggtcagaaaagggctgctggtggtggaagctataaaggccatgtggatattttggcacctactgttcaagagttggctgcccttgaaaaggaggcgcagacatctttcctgcatcttggctaccttcctaaccag

SEQ ID NO: 4783 - DNA, 106 bp, Homo sapiens
ctgtttgtgtatggggactgtgacggaaacagcaataattacctgaccaaggaggagtgcctcaagaaatgtgccactgtcacagagaatgccacgggtgacctgg

SEQ ID NO: 4784 - DNA, 386 bp, Homo sapiens
cagtgcctcagttgctgatcagtgtgttttttgtgtccaattcttttatcaccaaaaaagagaagaaatattgcagtgaatgaagattcctctgcattttagcactgctttttcaactgtagttggcttttgaatgaggatgacaatggaagagatgaagaatgaagctgagaccacatccatggtttctatgcccctctatgcagtcatgtatcctgtgtttaatgagctagaacgagtaaatctgtctgcagcccagacactgagagccgctttcatcaaggctgaaaaagaaaatccaggtctcacacaagacatcattatgaaaattttagagaaaaaaagcgtggaagttaacttcacggagtcccttcttcgtatggcag

SEQ ID NO: 4785 - DNA, 213 bp, Homo sapiens
ctgtacatatgtggataagctgattaatggttttgcaactgtaatagtagctgtatcgttctaatgcagacattggatttggtgactgtctcattgtgccatgaggtaaatgtaatgtttcaggcattctgcttgcaaaaaaatctatcatgtgcttttctagatgtctctggttctatagtgcaaatgcttttattagccaataggaatttt

SEQ ID NO: 4786 - DNA, 393 bp, Homo sapiens
  misc_feature (1)...(393): n = g, a, c or t
cctgtccctgcagacatgagagacagcaggtctcatgggggtgacaagcttttttttttttttcttaaagaattttcaaaatcaaattccagaatgattttacggagatntcccaggaaaattaaggcttctnttaaacactaaaaaggcatgtaattgcttgttagcaaaatggatatgacacatctctgatacttttttnattattggttgggctgancagncaaaanacctggtcgncgtcttgactttggcaaatgagccggagccccttgggcaggtcacacaacctgtcccagcgagggacaccgagtggcccttcatgtacatccatggtgtgctggcttaaaatgtaattaatcttgtaaatatactcctagtaatttaagattt

SEQ ID NO: 4787 - DNA, 244 bp, Homo sapiens
  misc_feature (1)...(244): n = g, a, c or t
aaacacaaantagatatagatgctaatggtggctaatctggtatgtttcttatagcaaactgttgttcatgcaacacttgtgctcaaaggggaaggcacaggatttcctacaatgagccaccttataaagagttctttttgtacaaattaatttatgtcacatttaatttagtgtgcataacctcaaaactgaggtactattccaatttataaaaaccacttgcataacttttatgcaagtttt

SEQ ID NO: 4788 - DNA, 358 bp, Homo sapiens
agaagagtcaagggcacgagcatcggccatgcctttcttggacatccagaaaaggttcggccttaacatagatcgatggttgacaatccagagtggtgaacagccctacaagatggctggtcgatgccatgcttttgaaaaagaatggatagaatgtgcacatggaatcggttatactcggacagagaaagagtgcaagatagaatatgatgatttcgtagagtgtttgcttcggcagaaaacgatgagacgtgcaggtaccatcaggaagcagcgggataagctgataaaggaaggaaagtacacccctccacctcaccacattggcaagggggagcctcggccctgaacagagcag

SEQ ID NO: 4789 - DNA, 452 bp, Homo sapiens
cctatctggttggcctttttgaagacaccaacctgtgtgctatccatgccaaacgtgtaacaattatgccaaaagacatccagctagcacgccgcatacgtggagaacgtgcttaagaatccactatgatgggaaacattccattctcaaaaaaaaaaaaaaatttctcttcttcctgttattggtagttctgaacgttagatattttttttccatggggtcaaaaggtacctaagtatatgattgcgagtggaaaaataggggacagaaatcaggtattggcagtttttccattttcatttgtgtgtgaatttttaatataaatgcggagacgtaaagcattaatgcaagttaaaatgtttcagtgaacaagtttcagcggttcaactttataataattataaataaacctgttaaatttttctggacaatgccagcatttggattttttt

SEQ ID NO: 4790 - DNA, 548 bp, Homo sapiens
  misc_feature (1)...(548): n = g, a, c or t
ctggtagtgtttcggatcttcagggaatagggcctttcattgggggcgtcgaaagaaccattttgccccttctgatgatagtgctgtcccctgaggtggtcttcctggggtgtctccatcctctcttcaccaccctccaataactgtgaagaaggaatcagagcgcatcacggtccactgcaagcactccaactcgacaccaatgtttccattttgttttcagaagatccagcctcaacttatgtttgtaaaacaagacgtgatgcttttgtgtgtgtgtgacctctgggggaggaaagatctatgaaaattcccaaggctacatcttcggaatatatcaggactacatctcatgattctatcataagtatcccaatttccaccctatattagggagagagagtcactgttgatgacagtgatatgctgtgtgtgaatcttgctggattatattttgngtctatgtatacatgtatagataggactgntctgnattaaatgttctcttgntttcttcagataccaactcacccactgaatgattccta

SEQ ID NO: 4791 - DNA, 237 bp, Homo sapiens
  misc_feature (1)...(237): n = g, a, c or t
ccttcccatcagcacagntcgtgaggtggctttactgaggcgactggaggcttttgagcatcccaatgttgtccggctgatggacgtctgtgccacatcccgaactgaccgggagatcaaggtaaccctggtgtttgagcatgtagaccaggacctaaggacatatctggacaaggcacccccaccaggcttgccagccgaaacgatcaaggatctgatgcgccagtttctaagagg

SEQ ID NO: 4792 - DNA, 224 bp, Homo sapiens
aaaatgaatcaattttattccaattcttcaaaatttatacgtaatatgttgtttccaaaatgtaagtcaccctttatataatagttttattatttcatctttctttgatagttttttttttcatcttttctttatggttcttcagtagaagccagaatcttgagttgcccagttaggagcctctgacctgctattctgattaagtttcttctcaatattcatgg

SEQ ID NO: 4793 - DNA, 623 bp, Homo sapiens
  misc_feature (1)...(623): n = g, a, c or t
aaactagtaatagaattttctgaagaatatccaaataaaccaccaactgttaggtttttatccaaaatgtttcatccaaatgtgtatgctgatggtagcatatgtttagatatccttcagaatcgatggagtccaacatatgatgtatcttctatcttaacatcaattcagtctctgctggatgaaccgaatcctaacagtccagccaatagccaggcagcacagctttatcaggaaagcaaacgagaatatgagaaaagagtttcggccattgttgaacaaagctggaatgattcataatagacaactggtctgttaatctttttcatcattgttgtgtataatttacctctcattagaaaggctaacaaattttaagtgccacaggttttaaggattctgcagaaaaaaaagaaaaaagtccttcagtttagaacctacaaaagcttgtgtatcttgattaatgtactttttattgcatggtgtgaactaagttattgctgcataaatttgnaatatatcctgtttgnatttttttccaagtgtataatgntggtgtggagttttcatgacagaatatacacattttgnaaatctgnacttttttcaaatattgaatgcct

SEQ ID NO: 4794 - DNA, 201 bp, Homo sapiens
aaagaacttgcatgttggtgaaggaagaagtggggtggaagaagtggggtgggacgacagtgaaatctagagtaaaaccaagctggcccaaggtgtcctgcaggctgtaatgcagtttaatcagagtgccatttttttttttgttcaaatgattttaattattggaatgcacaatttttttaatatgcaaataaaaagttt

SEQ ID NO: 4795 - DNA, 507 bp, Homo sapiens
tgagaatggaaggaatgaaaggctgcccagcagttttgcccattgaccatgtttatggcactctgggcatcgtgggagccaccacaacgcagcgctattctgacgcctcaaaactgagggaggagatcgagggaaagggatccttcacttactttgcaccgagtaatgaggcttgggacaacttggattctgatatccgtagaggtttggagagcaacgtgaatgttgaattactgaatgctttacatagtcacatgattaataagagaatgttgaccaaggacttaaaaaatggcatgattattccttcaatgtataacaatttggggcttttcattaaccattatcctaatggggttgtcactgttaattgtgctcgaatcatccatgggaaccagattgcaacaaatggtgttgtccatgtcattgaccgtgtgcttacacaaattggtacctcaattcaagacttcattgaagcagaagatgacctttcatcttttagagcag

SEQ ID NO: 4796 - DNA, 509 bp, Homo sapiens
ctgcatcttgtccacgggagagaagtagtgcatgccaatcaccttctcaggtcttttgctgacagcagcgatttcactgattgggagagcagatgtgttactggcaaagatacagtgatctggaatcaccgcttctacttcctttagcactctgtgtttaagactaaggtcctcaaacacagcttcaatcaccatgtcggccttttcaaaaccttggtaatcaagctgcccagtcaagttgctgaagatggaatccctttcaaatgatgttagagctttcttcttcactttgtcattcaatcctttgaacacttgttgctgtcctcggtctagcgcagtgagggtggcatctttaagtatagtctttagccccttatccacggagacttgggcgatgcctgctcccatcagccctgcaccaagaatagccagatgcttaacatccttctgtggagctccaaatttattcttcttgcacaggacctgaccatggtagagtcccatcaagg

SEQ ID NO: 4797 - DNA, 374 bp, Homo sapiens
ttttaacaagaagcagtttattacacaaaacgaaacctgagataatagaaaataacacttgcagtaataaaggaagcagccttgcactccacctccacactccagagtataattaaaagactcctatcagacatttctatcaccaataatgccaacctctgtatacagcagcaggctgggccccaaatcagaagattcatgttgcttgctttctctatagggaaagtgaagctttcggtaagtatcatgtggctattcctggttctactttcccttgtggaaatgtaatacctggtttacactgctcttttgtgagtacgtatatggtgataggaataaaggagaaagtctggaaagcaccaagcacaaagcag

SEQ ID NO: 4798 - DNA, 251 bp, Homo sapiens
  misc_feature (1)...(251): n = g, a, c or t
ccatcttacctgcttatgtctcctacacaaagctaaatattctagcagtgatgtaatgaaaaattacatcttactgttgatntatgtatgctctggtacacagatgtcattttgttgtcacagcactacagtgaaatacacaaaaaatgaaattcatataatgacttaaatgtattatatgttagaattgacaacataaactacttttgctttgaaatgatgtatgcttcagtaaaatcatattcaaattt

SEQ ID NO: 4799 - DNA, 354 bp, Homo sapiens
  misc_feature (1)...(354): n = g, a, c or t
gtacaagctttttttttttttttttttttttttttttctttttaggattgaataacaaggctttaatggctcaattttnttatgattatacaaacatataaatcttgaaaaggtaacnccatttagtaaaatccataaaaataacagttttgccacagngcananaaaagttcattcagtttgattccccatgccctcgacaagcagntttntgattanagctggaanacacaggctgggtacagnggcgaccccgtagtcccagctactggggaggctgaggnggaaggatcacttgagcccaggagtttccgaacagtctgggcaacataccaanaccctgtctnttttttt

SEQ ID NO: 4800 - DNA, 529 bp, Homo sapiens
ctggaagaactgagagatgacctggagctctactataaacttcttaaaacagccatggtcgaactcatcaacaaggattatgcagattttgtcaatctttcaacaaacttggttggcatggacaaagccctcaaccagctttctgtgcctttgggacaattacgagaagaggttctgagccttagatcgtctgtcagtgaaggaattcgggcagttgatgaacgaatgtctaaacaagaggacattaggaaaaaaagatgtgtgtattgaggcttatacaagttattcggtcagttgagaaaattgaaaaaatcttaaactctcaaagttctaaagaaacctctgcactagaagcaagcagcccccttttgactggacaaattttggagagaattgccacagaatttaatcagttacagtttcatgctgttcaaagcaaaggcatgcctcttttggacaaagtaagaccgcgtatagctggcattacagccatgttacagcagtcactggaaggtctcctattagaagg

SEQ ID NO: 4801 - DNA, 368 bp, Homo sapiens
gtctgtgtatgctcacttccccatcaacgttgttatccaggagaatgggtctcttgttgaaatccgaaatttcttgggtgaaaaatacatccgcagggttcggatgagaccaggtgttgcttgttcagtatctcaagcccagaaagatgaattaatccttgaaggaaatgacattgagcttgtttcaaattcagcggctttgattcagcaagccacaacagttaaaaacaaggatatcaggaaatttttggatggtatctatgtctctgaaaaaggaactgttcagcaggctgatgaataagatctaagagttacctggctacagaaagaagatgccagatgacacttaagacctacttgtgatattt

SEQ ID NO: 4802 - DNA, 388 bp, Homo sapiens
aaacaaatgtagactttattttgtactgtacaaagtgctaatgtcagtagatccattaaaatatagaatatttaagaaagatcattaataaaagtaatggtcattcaatttaatgttacagtttacagcgttttactgctagtgttttaagtcagcatgagcagtatcaaagtacttatgtagctagtttctaaaactttacagaaaacccagtacaattccaagtgcttatagccaatataagcatatttcatattagaaatagttatccatatgttaacaagaaactatggtcctcaaatatgccaattttagagtctaataactactgatagtaactatgtaaatattttggaataaacagttatttatgcaagccacacttcag

SEQ ID NO: 4803 - DNA, 334 bp, Homo sapiens
  misc_feature (1)...(334): n = g, a, c or t
caagcttttttttttttttttttttttttttttttctattcggttcagtctaatcctttttgtagtcactcataggccanacttagggctaggatgatgattaataanagggatgacataactnttagnggcaggttagttgtttgtagggctcatggtaggggtaaaaggagggcaatttntanatcaaataataanaaggngatagctactaanaanaattttatgganaaagggacncggncgggggatntagggtcnaagccncnctcgnaaggggtggatttttntatgtanccnttgagttgtggtantcaaaatgtaataattatta

SEQ ID NO: 4804 - DNA, 449 bp, Homo sapiens
aaaccaaagcctcagattttcatacaaacgacacgaccaaacttctaaagtattggtattacatcttaaaattgtcccgtatccttaaaaaaaaaaaaagtgtacactcacgtgccttacaggatattaaaccaaaaagctagaattaacaaacatgccaaatgttttcactttgaatcgtagacacagctcctatatttgagttttacagaaaggcatgtttctcaacatgcatccgaagttttcaatgtatttgtggtataagagcaacatttaacataagtgaaactgcattaacctaaatacgcttactgcttaggtacactcctacaacataactaacttgaggaaagctaaaaattgttttaacagttatggtcaatactgaactttgttattatgtcctagatgaatgtttcagtgttcaaaattactgagcttgaagtttt

SEQ ID NO: 4805 - DNA, 532 bp, Homo sapiens
aaacttgatttgagtttcagtgtctctgaattgaacatcccacgttggaagaagatacatttgggggctccaggactacagtagaaaagtatagagcaagcaggaaaatcttctagtaaaacttacatgcaggacaacaaaatgatgaaagatatccaaataccagataatccaccaggaaggcttttgtttaggaatttgtttcaagaggaacaagggatgagggagaaaaatccgttttatccatcagagtcagtgctataaaattgcctattaaggtaaaagaaaaatgtggagactattttactatacagagagcattaattcagatgacttagaaaagtgataccagcccaagaacagggatctaggtgagcccattgtaagtatcattgaaaacaaaacatgcccgtcaacatgtcacagaaaacgaacgaaggacaacaagaagtggatgagaatattttgttgaccttcatgggtttacagcctctgtctctaaacaaagtatggaaacaagtagagcttttat

SEQ ID NO: 4806 - DNA, 416 bp, Homo sapiens
  misc_feature (1)...(416): n = g, a, c or t
atccactgtccatacccttggattggttgaagagcctttggtcatactgaacttcattggaagtccgaggattaggaacaccgagagcaataacttcactgatatcccgattttcatttctctgaagtttcgacctcttatcaggagctgccctggaaagattccggtcatgctgtctctcttttcgcctgtcatgccggatttcatccctctcacgtgcctccccatcctctttttccacatgagttttgatcccagctcttctttccctggctttctgggccatttctctaagtttctcttcatgnttttccttttctttctgagccattnttctctctacttgggcacgcatttccacagcttnacgagccttccgatcagcaatgtanagggcttntgccaatttggcgaaa

SEQ ID NO: 4807 - DNA, 483 bp, Homo sapiens
  misc_feature (1)...(483): n = g, a, c or t
aaattctctggatgagcaagaaggggttaaaagtggaatgtatgttgtaatagaagttaaagttgcaactcaagaaggaaaagaaataacctgtcgaagttatctgatgacaaattacgaaagtgttcccccatccccacagtataaaaagattatttgcatgggtgcaaaagaaaatggtttgccgctggagtatcaagagaagttaaaagcaatagaaccaaatgactatacaggaaaggtctcagaagaaattgaagacatcatcaaaaagggggaaacacaaactctttagaacataacagaatatatctaagggtattctatgtgctaatataaaatatttttaacacttgagaacagggatctgggggatctccacgtttgatccattttcagcagtgctctgaaggagtatcttacttgggtgattccttgnttttagactataaaaagaaactgggataaggagttagacaattt

SEQ ID NO: 4808 - DNA, 507 bp, Homo sapiens
ccttcaacatgattgatcagaacagagatggtttcatcgacaaggaagatttgcatgatatgcttgcttcattggggaagaatccaactgatgagtatctagatgccatgatgaatgaggctccaggccccatcaatttcaccatgttcctcaccatgtttggtgagaagttaaatggcacagatcctgaagatgtcatcagaaatgcctttgcttgctttgatgaagaagcaactggcaccatacaggaagattacttgagagagctgctgacaaccatgggggatcggtttacagatgaggaagtggatgagctgtacagagaagcacctattgataaaaaggggaatttcaattacatcgagttcacacgcatcctgaaacatggagccaaagacaaagatgactgaaataacttcaaattccagccaaacgttccttgttgccactttgggtattctgagattttctcttgcatgcccttagctttacagcttttgcatttcc

SEQ ID NO: 4809 - DNA, 445 bp, Homo sapiens
aaagcttcttttgtgttagatactgtattagagatctgcatttatcatgagttcctttttttttttaactttatttttgggaaagtaacacatgaagtagttcagtcatgtcaggtttgtctggggtggaatggaacagtcaggtagttgaaagttttttttagagatgaaaagcttgtgaactcctgtaaaacatgctgtatttgaaatacatctgttaaaacttaaaaactaaagtgtgattttttttgttgttgttaagtttattgaagtttattcccttaatcagtgaaggacaacccttatttattacctagagcagttgtataattcgctgttagaaattttggtattgggacagtggataagcaggttatcacatagcatagaattcttaaaagatacatgtggggaaaagtagtctcaaataaaagctaatttcttt

SEQ ID NO: 4810 - DNA, 443 bp, Homo sapiens; identical to SEQ ID NO: 563

SEQ ID NO: 4811 - DNA, 563 bp, Homo sapiens; identical to SEQ ID NO: 352

SEQ ID NO: 4812 - DNA, 359 bp, Homo sapiens
cgtggagaacgtgcttaagaatccactatgatgggaaacatttcattctcaaaaaaaaaaaaaaaaaaaatttctcttcttcctgttattggtagttctgaacgttagatattttttttccatggggtcaaaaggtacctaagtatatgattgcgagtggaaaaataggggacagaaatcaggtattggcagtttttccattttcatttgtgtgtgaatttttaatataaatgcggagacgtaaagcattaatgcaagttaaaatgtttcagtgaacaagtttcagcggttcaactttataataattataaataaacctgttaaatttttctggacaatgccagcatttggattttttt

SEQ ID NO: 4813 - DNA, 434 bp, Homo sapiens
aaatctcactggcaatattcaaagttttcattgtgtcttaacaaaggtgtggtagacactcttgagctggacttagattttattcttccttgcagagtagtgttagaatagatggcctacagaaaaaaaaggttctgggatctacatggcagggagggctgcactgacattgatgcctgggggaccttttgcctcgaggctgagctggaaaatcttgaaaatattttttttttcctgtggcacattcaggttgaatacaagaactatttttgtgactagtttttgatgacctaagggaactgaccattgtaatttttgtaccagtgaaccaggagatttagtgcttttatattcatttccttgcatttaagaaaatatgaaagcttaaggaattatgtgagcttaaaactagtcaagcagtttagaaccaaagg

SEQ ID NO: 4814 - DNA, 629 bp, Homo sapiens
  misc_feature (1)...(629): n = g, a, c or t
ccatattactgaccctctacagagagggcaaaggaactgccagtatggtattgcaggataaaggcaggtggttacccacattacctgcaaggctttgatctttcttctgccatttccacattggacatctctgctgaggagagaaaatgaaccactcttttcctttgtataatgttgttttattcttcagacagaagagaggagttatacagctctgcagacatcccattcctgtatggggactgtgtttgcctcttagaggttcccaggccactagaggagataaagggaaacagattgttataacttgatataatgatactataatagatgtaactacaaggagctccagaagcaagagagagggaggaacttggacttctctgcatctttagttggagtccaaaggcttttcaatgaaattctactgcccagggtacattgatgctgaaaccccattcaaatctcctgttatattctagaacagggaattgatttgggagagcatcaggaaggtggatgatctgcccagtcacactgttagtaaattgtagagccaggacctgaactctaatatagtcatgtgttacttaatgacggngacatgttctgagaaatgcttacacaaa

SEQ ID NO: 4815 - DNA, 269 bp, Homo sapiens
ccttcatgccccgaggactagcagacaaacaaggacctgaggaatgtgatgcagttgctcttttaagtctcatcaactcctgcgatcacttcgtggttgatcgaaagaaagtcacagaagtaattaaatgtcgtaatgagatcatgcactcttcagagatgaaagtatcttctacgtggcttcgagattttcagatgaagatccaaaattttctgaatgaattcaagaacatcccagagattgtggcagtatactccagaatagaacag

SEQ ID NO: 4816 - DNA, 348 bp, Homo sapiens
ccttgggtctaactgtgctttagtaaagtctgaattgtccaataattttctcatttcataaacacccttatctctttatatatagctatatgcctttatgtgtatatatacatgacttttttttttccttctcaaaaataaaatagccatccccatagagggaggttctcagcagcattcacagcggttgcagcaggagccatgccttctattaatgttagagacatgcaggacgaaggaaaatgactctccacctgctccctttaatatacagcagggagagagtttctaaagggagggaagtgataaggctgagcatgagatggctaaccagggtttttgtggttt

SEQ ID NO: 4817 - DNA, 327 bp, Homo sapiens
  misc_feature (1)...(327): n = g, a, c or t
caacagtcttacttgcctgtacaatatanagacatatgaatagtcataacagttttcaacttgttcttgtttctgntaaactatattcctagaaacatanntttgaacaacttggtctttgttaggcttgtcaaattgccttcatggaaaaataatctacaaaagtatggtttaattgattgtcttacatgataattttccctggtaacaactnantaagtgatatatcttttttcctaaattgcttaaatactgtgaaattgctctgacaaattggaagtgtnccattggcatatttgncttnctttttatgcatgatggtaaaat

SEQ ID NO: 4818 - DNA, 552 bp, Homo sapiens
ccattggtagatgtttgattgacttaacaagagagggacaaattttcaatttgtgaaactccaaagcagaaagtattggtgcttgctaccttgtgaattcttccttagacatgcagagaaaatgtatgcaagagaccaaaaagatggctccaagctatgtcatgttacctgtaataaaatcttttcttctagattctttctatgttggcagataatctccccttatagcttccactcacttattcttgcattcagagtcacaatgatcatcttacccatgtggtttttgagaaagaaagatcaattctttgtttgcagtaggtaatcttagagatggagatgattgtagaattattcctagatgagtgtcaatttatttaattccattgtcatataaggagtcaaattgtttcttatcatttgttcattgaagaacagagacctgtctggaaaatcgatctctacaaattcaattaaataatgatccccaaatgctgaaaaagtgaaatacagcaattcaacagataatagagcaatgtttagtatattcag

SEQ ID NO: 4819 - DNA, 393 bp, Homo sapiens
  misc_feature (1)...(393): n = g, a, c or t
aaaataattactctcacacataattttttttatcatgtaaatnctaaacaaacttctgaaggtataattacacaaattcttagcgatcacaaaagtanatgattgggctaatgngtcatttttctaactgngttntgtcgataatatgcaaaatttaggaatantgtanaaaaatgatgtatttnaatacagcttacaaatgaaacttttttggcttcacaangacatacttattatcataactgatacnattttcatactacantgctcttttgcttnataaatactcaagtnattntgngcgctgcntnaaattttacttttgngcgtcgccttccatccccttagtncatcttatagnagctgtaagttgatcctgtgtntcttgaagct

SEQ ID NO: 4820 - DNA, 254 bp, Homo sapiens
  misc_feature (1)...(254): n = g, a, c or t
tttttttttttttttttttttgtttaactttattactgttgcaccatttatacaattacatataatttcaatgcatccattgtacatttttttgttttttttttgtttttttttttccattttccaatgagtggtgtgttggtgtctgtgacacanaatggaananaaactggaactgcaatgaacncanactttttttttttttttttnatttccactgnccaataaacanaactacaggngcncccaaccac

SEQ ID NO: 4821 - DNA, 236 bp, Homo sapiens
ctgatggtttggaaatgagagaactacagtggtgaagagaccaggaggcagctctcagtgaaaccaacattgcggatgcccttcgtgagccttctcagtcccagcaggaagcccacaacactggcctccccagcctgcctgctgacaacacctaggcttactttatctaaaatcagagtgtaccaggtctgtagcagaaaataatcaactaaatgtcagggacctatgagtcattt

SEQ ID NO: 4822 - DNA, 294 bp, Homo sapiens
ctgctcgaacactgagcttgtgtaaaagttgaaccatgaggccacaaaagcggtcaaaggttctgggaattcgggtctggggattcacttcaatcagaacattcttctgtgtatggatataaacctgtagcaagccagctcggttcaggggactatccatcagcatcagcaaactctggtgggtgatatctggccgcgcttccccagggtcccgtccattcttcaacaatatagacttgtgcttgtcacagttgagtagctcatatgtcttccctaccttgactgtctccagac

SEQ ID NO: 4823 - DNA, 222 bp, Homo sapiens
  misc_feature (1)...(222): n = g, a, c or t
gtacaagcttttttttttttttttttttttttttggngattttagcttattttattaatagcttatttccttacaaatatttccccacacgtttatttagtcgcaggcttcatgcatacaaaatgcacactgctatgatcatcgtaaccatcagcaagcaggcattgtcatcagcgcttctttatttctgnggtttctcagtctcttttattttctttcttt

SEQ ID NO: 4824 - DNA, 592 bp, Homo sapiens
  misc_feature (1)...(592): n = g, a, c or t
cctcagaatttcatacaaacaccaagaccaaaatcctaagtattggtattgcgtctcaaatttttcccattaacttaaaaaaaaaaagcttaaacttacgtgccttacaggttattaaatgaaactagaattaacaaacatgccaaaatgtttcacttttaatagtagacacagctcctatattgttttacaaaaaaataaaagcatgtctttcaacatgcatccaaaacagtgttcaatttaacgtggcaaagggcaacatttaacataattcaactgcttttacctaaatacgcttactgcttaagtacatcctataactaacttgagaaaagctggaacttaagtttaacagttatagtttactcagcttcactgttacatcctagatgagtattgtattcaaaaatactgggccttaagtcttcataacaatcctgatttccacttagagtaagcataaatcacaagcttgtattgcagaaactgttaaactgaagttttcttaaagaaaaaaaaaaaaaaaaaaggttgaccaagagtcagtgatcaggatcgatcaattacattcccnatccaccactcatactgg

SEQ ID NO: 4825 - DNA, 542 bp, Homo sapiens
  misc_feature (1)...(542): n = g, a, c or t
ctggaggtgaacaaccgcatcatcgaggagacgctcgcgctcaagttcgagaacgcggccgccggaaacaaaccggaagcagtagaagtaacatttgcagatttcgatggggtcctctatcatatttcaaatcctaatggagacaaaacaaaagtgatggtcagtatttctttgaaattctacaaggaacttcaggcacatggtgctgatgagttattaaagagggtgtacgggagtttcttggtaaatccagaatcaggatacaatgtctctttgctatatgaccttgaaaatcttccggcatccaaggattccattgtgcatcaagctggcatgttgaagcgaaattgttttgcctctgtctttgaaaaatacttccaattccaagaagagggcaaggaaggagagaacagggcagttatccattatagggatgatgagaccatgtatgttgagtctaaaaaggacagagtcacagtagtcttcancacagtgtttaaggatgacnacgatgtggtcattggaaaggtgttcatgcagga

SEQ ID NO: 4826 - DNA, 447 bp, Homo sapiens
  misc_feature (1)...(447): n = g, a, c or t
gtacaagctttttttttttttttttttttttttatctggaaggttctcaggtctttatttgctctctcacattccaggaattgacttatttaattaatccatcaacctctcatagcaaatatttgagaaaacaaatgtatattcagattcttattttcagtagggaagtaanaagttgcagctcagtgcacataaagttgagacagagatggagacatccagccccacctttntggaacaagaaagatgactggggaggaaacacaggtcagcatgggaacaggggtcacagnggacacgggggngggctgtctntccacctcctcacattaggctaacagggacgcanacacattcaggtgcctttgcanaaaganatgccanaggctcttgaagtcacaaaggggaggagtgaanaaatcctgcatctcagtccctcacaagaca

SEQ ID NO: 4827 - DNA, 417 bp, Homo sapiens
ccattacatcctctttttaatttacataatacagatacttgagaaagttgttgtggtgttgtatgccaagaaaattctttttattggtgcctatattgtaacaattatttttaatgcattgtattttgaagtaacggttcagttaaatttttcacctgctgtgtaactgaaacacaattacagtttataatcatctgtagaagtctggagataattttgcaactcatgttatgggttaaatgaatatttttgtaaaagtaaaagcaacaaatttataaattgattatttgaaactttacaacacaattgcatcccaaatacaaattgtattgcttattcattatagctattcgtcctgtaatctgtttctaggtgaagcatactccagtgttttaggggttttgaaaataaatattt

SEQ ID NO: 4828 - DNA, 332 bp, Homo sapiens
ctgcgtggagtgacgggaggagggaatcactgtgtgtgcgagagtgcttcagactcaatttccaaaataattttcacccctctaagcatgtaaatatacaaagatggatccttcatagaaattaaagaatcaatttgagctcatttcgaatacagaacaagtatggcacagatggaagtcctgccacgtttcctttaatgatgctgactcttgtatcacacaggccagcatgaagtttcttactcagactttacaggcattttccgtaattcaatcagtcctgctcccagcacaacacaggaggtgattcgagaataatcgtgagaatcagg

SEQ ID NO: 4829 - DNA, 304 bp, Homo sapiens
aaaaaagcaatttggaaggtaatttgataggctttccaacttaaccaaattttttattgtaattcttggatagtatttttgtctttttcaattcatttgtctttttcagtatagtttttgttaaggcaaatgtcttcccttaatatccaaatattgctaataaacggtagaagatgctttggaaattaaaattatctcgctgttggttagacttaacactgttaatcttcagccaaatatcacatatggatcaaattattttcttttttgttgtttaccctatcctcaacaacatttttagttt

SEQ ID NO: 4830 - DNA, 442 bp, Homo sapiens
  misc_feature (1)...(442): n = g, a, c or t
aaataattatcaggatatagaaacaaatatccattcagataaaacattactgcttaaaagtggctaagaaatattttgcatgtaataaatatatttcatgtttaggttaacaggcaccatcttgagagcagtttgtttttttttttagctaataaataaattacattcaagaaaacaaggtgtttatatctgagtatatcattaaatgtttttcttcatatagcacccaaacttcaaactgtctanaaagtatctcctaaaatataactcataccttaagtaataaaaataaaggccaagaaaaaaaatcaatttaagacaaaatttacagtttatattcttaattccccattcaataaaatatcgattgccaatttaataaaagtaaatgaactgtatatatgcaatctgttagcactgaaaatctgaaatatatattttt

SEQ ID NO: 4831 - DNA, 265 bp, Homo sapiens
  misc_feature (1)...(265): n = g, a, c or t
aaatttanatgttcaaaagtagttgtgaaatttgagaatttgtaagactaattatggtaacttagcttagtattcaatataatgcattgtttggtttcttttaccaaattaagtgtctagttcttgctaaaatcaagtcattgcattgtgttctaattacaagtatgttgtatttgagatttgcttagattgttgtactgctgccatttttattggtgtttgattattggaatggtgccatattgtcactccttctacttgcttt

SEQ ID NO: 4832 - DNA, 522 bp, Homo sapiens
cgacgaaggagtaggtggtgggatctcaccgtgggtccgattagccttttctctgccttgcttgcttgagcttcagcggaattcgaaatggctggcggtaaggctggaaaggactccggaaaggccaagacaaaggcggtttcccgctcgcagagagccggcttgcagttcccagtgggccgtattcatcgacacctaaaatctaggacgaccagtcatggacgtgtgggcgcgactgccgctgtgtacagcgcagccatcctggagtacctcaccgcagaggtacttgaactggcaggaaatgcatcaaaagacttaaaggtaaagcgtattacccctcgtcacttgcaacttgctattcgtggagatgaagaattggattctctcatcaaggctacaattgctggtggtggtgtcattccacacatccacaaatctctgattgggaagaaaggacaacagaagactgtctaaaggatgcctggattccttgttatctcaggactctaaatactctaacag

SEQ ID NO: 4833 - DNA, 429 bp, Homo sapiens
aaaatatttacacttaaagacaaaacatttccacaattattacaattggtttcactaaatcagaagtgactacacattatctctacttttataccagaaaacaaaatgaagaaatcaacaaaatataattactaaaactccactgtggatcaggataaaatgtgtccaatattaactcacactttcccaataagtataaaaatgaatataacattgcttggacaacttgtttcaacagcgaatcgtctattactatttgttcaataacatatataaattcaaaactggcaggtatgaaaaaaggttactttgttttttgcagatactgtacttgtaaaataaagccaaataaagcatatgtcacacataccaaagtcttacattttgcctttctaatacaagcaagtgaaatattaacacatagcattt

SEQ ID NO: 4834 - DNA, 490 bp, Homo sapiens
ctgacaaaaagtgtcagagccagaggccaacctctgctagatgaagcagcagcacatgactccatttctatctgataaggagacagagaagaggcatctcgaacagatgaaaaaccaaaggctggtgtcctaaaaaaaacagattggcttcaaagaaaacactaaggaagacccacagagctgtattaattttagtaaaaataatcatatgccaacaggggaattgaaccactttctaaatcatagtatgaactcatctcttcagatacttggtaagtggtcaaagcttgtttttataattactttcactgtcttgggcaaaaagtctttcttatctttggtccttaggtgtggtatcagtttcttccatttttttatgtgttacaaaacaatctttttttacttgacatcaacaaccaaggtgcagtataaacacgaagttgctgatattgttgcttttatacacataaaataccaacatctcccatac

SEQ ID NO: 4835 - DNA, 254 bp, Homo sapiens
aaaatatcttttataggttttatataaaaatgtctgagtatgattttgtgtgaaagttctgataccagttgtaatagagtcaaatttatgtgagcaataaagaagaaattggcagatattggaaaaatattttgtgaaaagctgtatttattataaatactagggccatgacatagtaccattggggttaagtcattttcccaatctatttataatttaatgatatgttagtgcctctgttatatgtcaagttt

SEQ ID NO: 4836 - DNA, 407 bp, Homo sapiens
gatctgtgttaatctgagtaacttattgcctagcctataaataaattccaaaatatccaattcatttcttcttgaaatggtgcttgttttgttttctttccattacacaattagactcctacagtttaaaacaaactttaaaccactatcttgcactgctaacttttttctacctttgtaaatagaaacatttctgcataaaagtcatacatatgaagcaagggctgaatcataatcacaaggcttaattttgataaacgaatccagtgacctaaggattttctgcaaaatttgactgggagttgtgataggtggtatttttgtttattttcttcctcttactccttaggataaaggtaagttgacttgaacaactttctttgcactgggaaaataagcaaatgttt

SEQ ID NO: 4837 - DNA, 404 bp, Homo sapiens
ctgtccgaggagctagtagggcaaactgctccctgagctgggccgatcttttgacatccttctccgagaaacaatattctttttcagttattacaaagaactgctgttgtgatgactagttatttgcttgagcagttccatattacataatcctgtgccacaaaacaccctgtacactagtggctgggatattattcatttccactaggcagctatctcactgttgaaatttatatccaaaagaatatttaattttggcttatttttcttataaaatagggaactcgtcttatcatttttaagtcctcacctcagtgtggtacttcaaactacttcaaattattactataattaaatgcttcattttatataataattaataaaaaaggtggcatatgcttttt

SEQ ID NO: 4838 - DNA, 517 bp, Homo sapiens
aaacctaacccatgttagctgcaactccactacagtcttgatcacttagctcaggaaacaaacacccagcaacaaccctcgtatctcattaataccaatctgtggccctcactgactcagtggtactttttataaaaatatctgaagaagtggcaaacggttacaacggatgtcaggtcgaagcaattccaaaagctgagaaaacgcttcatccgctgcttgtcttctccccctattgctacagttctgccaccaaagggggaaaattacgtgaatatgattgttgtgaccaagccttggcaaaagtcaataaataacagaacctgtcaagggcagagcaattttatgggcaacctcttctagttgcaaatgtgggggttgggaaaagtgggagagaggcatgtgtgcaagaaagagataagggtccttttgggaagggtttggtgacccagccccagctcaatgccagcagactaggacccgctaaaacccattattcagacggaaaggggagaag

SEQ ID NO: 4839 - DNA, 277 bp, Homo sapiens
aaatacttaatttgaacagctctaagatattgtcacttaggtcatctaaaagcttttagagatttgaacataagttcatttcctattaatcaaagacattccgtaagttggcaaaagaaattgggagagagaaatagaaggcttgatattctggacagcattaaggttgataggttgatgataaaaacttaaaaccaggacctccattctgtcatgactgacaccatggtagtctgtcagcttgaccagtggagagtcattcatttagcacaagcag

SEQ ID NO: 4840 - DNA, 489 bp, Homo sapiens
aaatgacttcagctaacttaccccaagagaaaaatctggcattgatctcttggttagcattattaccaatatcaactagcactattaaaatcaaagttgaaatggtacattcatttgccaaaaaaaaaaaaagaaaaaaaaggcttaaaggcaaagaaggtgaatcaacgtgcaaattagcatctggcccaattgcaaaattcatttcctggatgtgagggattgaaccatgcacacttgcaagcaagatgaagggcaaacagatgacatcaaatcaaaattaaccccacaaagaatccagaagacctcagatggtaaaggacagaggtctacgtctactgctgttagtgctcaggtatccatcctgttttccctaatctcccgattctgatccaagagtctttgagacctatgtcctaggccatcctttcatctagaaatggaaaccatggctgtggcaccaggcatggtcaaccctgcagtgattca

SEQ ID NO: 4841 - DNA, 499 bp, Homo sapiens
ctgatcttaacaaaattcgtagcagtggaaccttgaaatgcatgtggctagatttatgctaaaatgattctcagttagcattttagtaacacttcaaaggtttttttttgtttgttttctagacttaataaaagcttaggattaattagaagaagcaatctagttaaatttcccatttgtattttattttcttgaatacttttttcatagttatttgtttaaaaagatttaaaaatcattgcactttggtcagaaaaataataaatatatcttataaatgtttgattcccttccttgctatttttattcagtagatttttgtttggcatcatgttgaagcaccgaaagataaatgatttttaaaaggctatagagtccaaaggaatattcttttacaccaattcttcctttaaaaatctctgaggaatttgttttcgccttacttttttttcttctgtcacaatgctaagtggtatccgaggttcttaatatgagattt

SEQ ID NO: 4842 - DNA, 514 bp, Homo sapiens
aaaagcagagaaggcatccatagactatttccttgcttacaagctcagtgaacatactgaattcacttataaaaagaattttctcaattttagttgcttttcaaaaaattcttattccttttatttgtaattctttgacattgttgctgcttcacagttttggtaattggacagtttggtctttattatgatattaacatttttacctgtcctgaaacaaggaaatacaatcaaagaaacagaagattggtggaccttgaaccacattatgatatcagatgacccagagtcatggttactaagttgcttaaatttttagtaacaaagatgtattagaaagtgacaggtcaattcaataatggtttttttggatacatttaattatataatccccttaagttgtgcttagtcagcagtatttaatctgttgtctattatatatctaactggtctgttatgtttattatatatttatatattgcttattcatatcttattggagtaactcattttt

SEQ ID NO: 4843 - DNA, 345 bp, Homo sapiens
  misc_feature (1)...(345): n = g, a, c or t
aaatattntggtcatattttataataaaatattttggcaaaaataaaatataaggtttantttattttctattaatggtagatctggagagtattttacatttctaaatagtatctacttaatttgactgctttcacatttgtttctgaaaacactgctattcgcttttcagaattttgagattaaaagcacctaaaaataagataaaataaaatttaagtaaaatatttgtttgatgctcgaaagttgacaaattcacaaacttactttaagtgtcttacatgatatatgccaccacagaaactttattgcctgctaagacttatttgactaaatctaatcttt

SEQ ID NO: 4844 - DNA, 251 bp, Homo sapiens; identical to SEQ ID NO: 4543

SEQ ID NO: 4845 - DNA, 621 bp, Homo sapiens
  misc_feature (1)...(621): n = g, a, c or t
ctcaggcagaacacaaatagaaatttaatgatgtgctcaactccaccagaaattacctcgagtcagcattgacgatattggaggagctgccgtgctgctgatacggggtgtgctttatgctgctctttgcggtttgttgatcccctcctcccccactctcaatacctagagagtgaaacccgtacaatgagataaagactaaaaagagaaatcccttcctatatacagtgtgctacatttacaaaaaatttctccttaagaaaacagaatattcaaaaacagcacttttccaggaagttagtgaggaagataaggcacacatttatttataaatggatgttgctcctttgtatttttagcttccctatttgcttaaaagtacaggctccctaagagaggatggagagggagagactgaattgttagtaggtctaaacatcaaagaaaacatttttattagttacttatggaaaatcatctattacaatgataaccttcaagtgacttccattatggctggacaggcggtgagctcagtggattgcagtggtgtgctngntgattttgcacagtgagctctgcggaaggggtcaggctcaactgctgatgtgtntcacacgt

SEQ ID NO: 4846 - DNA, 501 bp, Homo sapiens; identical to SEQ ID NO: 4709

SEQ ID NO: 4847 - DNA, 437 bp, Homo sapiens
  misc_feature (1)...(437): n = g, a, c or t
aaaatacataaaattttctaaaacgtaaaatggaaaggtttaatacacaggaaaaacactgcacaccttaactaaacaaactagaaagaaaatatatttatatacagaactaagatgagtccattcattatttttacaaatattcacatagatggtttagagataagtagttaagtgtgtctcattaattaatggatgctttctagcctctgtcttcattaattttatttcctattcaacaaaaaataatgctttcaggatatattacatatagagcaatatcatttttatcagtaatttgtctgaaaaagagaaaaacttaaaagcagaaccctacaaagcaaagcaaactacaaagcaaagagtnatcacagtgtttgcaaaatagaaatgtgtgactttnactttatagcaggctgcctaattaatccanacag

SEQ ID NO: 4848 - DNA, 270 bp, Homo sapiens
  misc_feature (1)...(270): n = g, a, c or t
ttgacaaatgtataaccatctccacaaaggcaatgtanaaaattntcatcaccccttaaagtccttttacacttttttttgagactgcctcagtantaaccactgctaaatttatcananaactgcacacctggattgtattttgacagaacttccttccaacccaattgcttttaataatttttttatgataaatntttacccaaaatgttatagaatttatttacaaagaaatttcgtaagttgnattnctcctactggtgtggtatt

SEQ ID NO: 4849 - DNA, 592 bp, Homo sapiens
ctggcctgtcatataaaacatactgtcattgagcttaagctccgcttgttctgaggtttcacctccatgtgtttcattggtgcaaaagtggatctcttagttggtcacttaattctttctttttcagaaagatagtatgttcactggtatatttggtcactcttagaaccttccttcacattgttttttatgggacccatgaatggttagcctttcttttctattgtagaaggaaataaataggagtaaaaagaccattgtagtaaataagttcaaggggaacttgggaccagaaaccactgttatgtacaaaaaaatggcaaattcaataaactcaaatttaaaataatttttaaattaacagttatgataaattttatattttatacaaatagattgcttagaatggttctcaagaattataagagaaatgaactcacagtacaaaaattttataattactatacttgtgttttgtttgggggctgggaaatgtatttttacattgtagccaatcattttatatttgtcaatttaaatcttatgggtcttttttttttatctctcttgatgtcagattttatagtctttt

SEQ ID NO: 4850 - DNA, 379 bp, Homo sapiens
aaaaaaaatccttctaatctgctatgcttgaatgccacgcggtacaaaggaaaaagtatcatggaaatattatgcaaattcccagatttgaagacaaaaatactctaattctaaccagagcaagcttttttattttttatacaggggaatattttattcaaggtaaaattctaaataaaatataattgttttttatcttttctacagcaaatttataattttaagattccttttcttgtttatcagcagttgttattacatccttgtggcacattttttttttttaattttgtaaaggtgaaaaaagcttttatgagctcatgtagcaatcagattttcctgtggattgataataaatgaatatgatatatagttaaaa

SEQ ID NO: 4851 - DNA, 501 bp, Homo sapiens
  misc_feature (1)...(501): n = g, a, c or t
aaaatacataaaattttctaaaacgtaaaatggaaaggtttaatacacaggaaaaacactgcacaccttaactaaacaaactagaaagaaaatatatttatatacagaactaagatgagtccattcattattnttacaaatattcacatagatggtttagagataagtagttaagtgtgtctcattaattaatggatgctttctagcctctgtcttcattaattttatttcctattcaacaaaaaataatgctttcaggatatattacatatagagcaatatcatttttatcagtaatttgtctgaaaaagaggaaaacttaaaagcagaaccctacaaagcaaagcaaactacaaagcaaagagtaatcacagtgtttgcaaaatagaaatgtgtgactttaactttatagcaggctgcctaattaatccagacagtagagaaagcagactgaggcaggaagtaagaggtgggactaaactgttaagaagataataattt

SEQ ID NO: 4852 - DNA, 421 bp, Homo sapiens
  misc_feature (1)...(421): n = g, a, c or t
aaattctttaattaaggcattggtcccaacggtgcacatagattaagggattttgcttccttctgaactagatcatttgttagaggcttcagaaaaagaaaattagcttgaaatctagtctgggaaattgggggcagggaatgaaaaagttggtctcttgtttctccacgatacacaggcttcccatctaaagtcatgcttaactaaaagggaaaaaaatgaaccaagcaaaagtatatagagtagccgtgacatttgcattattttctagactttacatttgcctgcaacaggtataacatgaaactccagagggaatttggattgataggaatgttcacataaacaccancagtggctaactgttacacaacattcaaagtattcgagagaactgcctggagacagagagcgagggtcc

SEQ ID NO: 4853 - DNA, 501 bp, Homo sapiens
  misc_feature (1)...(501): n = g, a, c or t
cggagagactcaagatgattccctttttacccatgttttctctactattgctgcttattgttaaccctataaacgccaacaatcattatgacaagatcttggctcatagtcgtatcaggggtcgggaccaaggcccaaatgtctgtgcccttcaacagattttgggcaccaaaaagaaatacttcagcacttgtaagaactggtataaaaagtccatctgtggacagaaaacgactgtgttatatgaatgttgccctggttatatgagaatggaaggaatgaaaggctgcccagcagttttgcccattgaccatgtttatggcactctgggcatcgtgggagccaccacaacgcagcgctattctgacgcctnaaaactgagggaggagatcgagggaaagggatccttcacttactttgcaccgagtaatgaggcttgggacaacttggattctgatatccgtagaggtttggagagcaacgtgaatgttgaattactga

SEQ ID NO: 4854 - DNA, 477 bp, Homo sapiens
ccatctgcttagtagagctttttgcatgtatcttctaagaattttatctgttttgtactttagaaatgtcagttgctgcattcctaaactgtttatttgcactatgagcctatagactatcagttccctttgggcggattgttgtttaacttgtaaatgaaaaaattctcttaaaccacagcactattgagtgaaacattgaactcatatctgtaagaaataaagagaagatatattagttttttaattggtattttaatttttatatatgcaggaaagaatagaagtgattgaatattgttaattataccaccgtgtgttagaaaagtaagaagcagtcaattttcacatcaaagacagcatctaagaagttttgttctgtcctggaattattttagtagtgtttcagtaatgttgactgtattttccaacttgttcaaattattaccagtgaatctttgtcagcagttccctttt

SEQ ID NO: 4855 - DNA, 476 bp, Homo sapiens
ccacagaagttgctgctgacgctctgggtgaagaatggaagggttatgtggtccgaatcagtggtgggaacgacaaacaaggtttccccatgaagcagggtgtcttgacccatggccgtgtccgcctgctactgagtaaggggcattcctgttacagaccaaggagaactggagaaagaaagagaaaatcagttcgtggttgcattgtggatgcaaatctgagcgttctcaacttggttattgtaaaaaaaggagagaaggatattcctggactgactgatactacagtgcctcgccgcctgggccccaaaagagctagtagaatccgcaaacttttcaatctctctaaagaagatgatgtccgtcagtatgttgtaagaaagcccttaaataaagaaggtaagaaacctaggaccaaagcacccaagattcagcgtcttgttactccacgtgtcctgcagcacaaacggcggcgt

SEQ ID NO: 4856 - DNA, 432 bp, Homo sapiens
ctgttcccagctaaaggaattcagactctaaggattctaggagccgaaaagcaaagggtcgctggacgaagatgcagacactttgcctcaggtgacttgaatgggactgctgatgcctgtggtccccaagggacggaaaccacaaggaacagttctcctgactctgtcttattcctcctttatccgtagaacctaacgtagaggctggcatgttgcagctactcagtaaattacgtgagtgaattaatgaatgaccgcggctcattcattggaggttggtctccaacttgtctctcaacacccaggagacctacagggaaagctccccagggacttaaagccccaagaagagatggtttatccctggctgaaaacatgagccaatgcctgagagtcacctgtgtgtgaagtcggctcctgtcagggaatcag

SEQ ID NO: 4857 - DNA, 369 bp, Homo sapiens
aaaaatattaaattcaagttacatggaaattttatgcataaaaatcatattgtataatcagaatgaatcttcagtggtcatttctgaaaaacaaatactaactttagttaaaaagttaaacttttacttctctttttcaaagtattttcaaaacttcactattcaaattaaataggatattttaataatttacttcaaagatattatataattctgatcccaagagatcttcttgtggtgtttataaataaatctactaacagaaaagagtaagaaaagccaatctaggaaagaaaatcgttgaattaagtgagagtcaaagtgctaattcaatctatggggttttttcctccccatcatttcttttca

SEQ ID NO: 4858 - DNA, 379 bp, Homo sapiens
aaattgttgtgttatagtttatgcttcttaaatcatttttcaacctaaacagccaatttctaagcagacaggaaaactaaataataagttaattaatataacaaagatgcaggttcctgctcattccagtaatgtctttgaaagcaaaactaatatttattttctagattatccctgtgaataattgagaactttttggagtcaagtatgaataaaggtgtggcagaatataataatctggactattttctataggataattgctgggttataaaatcttaggtttgcttatgcccagtagctcctgcggaggcttaataataggcaattttgaatttgttcaaacctgtaatggcttgtaaacaaagatgaccatcac

SEQ ID NO: 4859 - DNA, 374 bp, Homo sapiens
ctggtggagaattaatgggttatattatgggtaaagcagaaggctcagtagctagggaagaatggcacgggcacgtcacagctctgtctgttgccccagaatttcgacgccttggtttggctgctaaacttatggagttactagaggagatttcagaaagaaagggtggattttttgtggatctctttgtaagagtatctaaccaagttgcagttaacatgtacaagcagttgggctacagtgtatataggacggtcatagagtactattcggccagcaacggggagcctgatgaggacgcttatgatatgaggaaagcactttccagggatactgagaagaaatccatcataccattacctcatcctgtgagg

SEQ ID NO: 4860 - DNA, 125 bp, Homo sapiens
gctttatgatattttatttgatattattcagtaatacaggttttgtggcaaatatgcatttctaaaagtgcataatgaaacattttatttttctagctcttgaatttgtcatagaaataagccat

SEQ ID NO: 4861 - DNA, 484 bp, Homo sapiens
  misc_feature (1)...(484): n = g, a, c or t
ccaatataattattaagtgactttggtgtgttcatgggaaactgatgtaattaaatattctgttatattaagagcgtgttcttattactgacattttgtaatcaagaaaagtgatatagaaaatatgtaggagactgttaaaattggtgattatggtaatatggtcatgtgaatcaatttttgatttataaagtactcacacaagttgtttcaaagatgatatttctgtgaacagagaggccatgggaagatttgaaaattattaaagaaaaattcctacagattttcaatgcagagaccataatcaaaaagtaaactttctttagtagtatgttcaatacatcatttaattttttaagttatcctgaagaaggaaaggtccttaattattatagtctaaacaaatttatagattactgtttgaagtaaataatacgagtgaatatttttcaaatgtgataaaatagcacaangtggctggtga

SEQ ID NO: 4862 - DNA, 235 bp, Homo sapiens
  misc_feature (1)...(235): n = g, a, c or t
tcaaaggnattntgntgactttaatattgattatatttttaacaggaatttaagaaaatattactggaattaaaaanatntatatattaaacaagaattttctttgctntgtctancttaaactactactcaanctgcttaagttnttaagtattgtttgtnatcaccaataaataantgcatttntanttcatcagtcattattagcttttnttaaaagaagattacgttttac

SEQ ID NO: 4863 - DNA, 417 bp, Homo sapiens
  misc_feature (1)...(417): n = g, a, c or t
aaatattnattttcaaaacccctaaaacactggagtatgcttcacctagaaacagattacaggacgaatagctataatgaataagcaatacaatttgtatttgggatgcaattgtgttgtaaagtttcaaataatcaatttataaatttgttgcttttacttttacaaaaatattcatttaacccataacatgagttgcaaaattatctccagacttctacagatgattataaactgtaattgtgtttcagttacacagcaggtgaaaaatttaactgaaccgttacttcaaaatacaatgcattaaaaataattgttacaatataggcaccaataaaaagaattttcttggcatacaacaccacaacaactttctcaagtatctgtattatgtaaattaaaaagaggatgtaatgg

SEQ ID NO: 4864 - DNA, 238 bp, Homo sapiens; identical to SEQ ID NO: 4661

SEQ ID NO: 4865 - DNA, 145 bp, Homo sapiens
tttgatgccatttctaagacctacagctacctgacccccgacctctggaaggagactgtattcaccaagtctccctatcaggagttcactgaccacctcgtcaagacccacaccagagtctccgtgcagcggactcaggctccag

SEQ ID NO: 4866 - DNA, 250 bp, Homo sapiens
ccaggagagtgacaccatggagggtacaattgccagctcccccgtgtctgtgcagcattgtctgggttgaatgacactctcaaattgttcctgggatcgggctgaggccaggcctctcctggaaccacctctctgcttggtctgaccccttggcctatccagttttcctggttccctcacaggtttctccagaaagtactccctcagtaaagcatttgcacgaaaaaaaaaaaaaaaaaaaaaaaaaaag

SEQ ID NO: 4867 - DNA, 423 bp, Homo sapiens
aaaacactctgatctgaggccaatggcatcaaaatacaaattgctgaagtgggagaggaagtgaagggctgtttgttagggggactacagtggagattctggtgagtgtgggtgggctcgccagtgaccccaatattttctttgtgtaacaaccagagtaagcattaggatgcccaggctgccctctactggcagtttctgggaaggaccacaacagcagcacccaacctgcaacccacaacagccgagacaggagagagagaagaaagcaagagagagagaggagaggaagagagagaggagaggaagagatagaggaggggaagagatagaggacaggaagagagagaggaggggaagagagacaggaagggaagggagaggagaggaagagagagaggagaggaagagagaggaggggag

SEQ ID NO: 4868 - DNA, 529 bp, Homo sapiens
ccaatcaataagggactttcctctctgccattaagagcaacgatgctgaccacatactctgtgcctggagtgaggttggtgagggtgatggaattccgagagtggggcacccgatcttctcgaggtctcccactgaagtgctcgggatgatggcggatcctgtagccagtgatggtggctcgaggagcaatccagtgcacagtaaaagagttggcagtaatatcagaaaagtcaatgccagttggggaatcaagacctgttttctgtcttcctctaagaggtgtgctctcatgttgttcgtagacactggagacactcactacatattctgtaccaggcaggagatttgttaagaccactgcattgtctgaaggagaaattgacaactctgcaacatcttcctcatttttcacaggtgagtaacgcaccaggaagttggttaaatcaatggatgggggtggagcccaggtgacacgcatggtgtctggaccaatgttggtgaatcgcaggtcagtgggaggaggaacag

SEQ ID NO: 4869 - DNA, 282 bp, Homo sapiens
ctgcgtccaaatttacttgacaaagctataaacacaaggccctttctgaagtcctgctgattgagtttccccttccttttgtcggtggagaggaatgtaaaggctaagcgggtgtactcggactgtgtgcctctgggcttgctggcggtggcacttaaaggaactcattcattctctggatggggcaacactcctcacccgggatcccccaagggctttcccacacggagaccttcccgaacacagagacatctgatcttggcttgcccaagctggcccagg

SEQ ID NO: 4870 - DNA, 427 bp, Homo sapiens
ctgggggagggagcagacagtgagtgggaactggctggcccggggctccttcttgctcactcaccagtcttgctcttcacctctaagccaatgttgaccccttcatctataaagtccacaactctccggaagtcatcctcacggaactgtcgagaagttaaggctggggccccaagccgcaggccgcccggtgtgatggcacttcggtctccaggacaggtgttcttgttggcagtgatggatacaagctctagcacccgctcagcccgagctccatccaggcccttgggccgcaggtccaccagcaccaggtggttgtcagtaccacctgataccagtgagtagcctcgctctagcagggcatctgccatggcccgagcattcttcagaacctgcagggagtactcccggaacatgggggtgcagg

SEQ ID NO: 4871 - DNA, 524 bp, Homo sapiens; identical to SEQ ID NO: 209

SEQ ID NO: 4872 - DNA, 552 bp, Homo sapiens
ccaagaaaaaggctgaggaagaagctgaggctaagcccaagttcctctctaaagcagaacgagaggctgaagctctaaagcgacggcagcaggaggtggaagagcggcagaggatgcttgaagaagagaggaagaaaaggaaacagttccaagacttgggcaggaagatgttgggtttgttattctaccctgtgtagcccctagatggaagaggaaagagtgggatgagatacagtgtctcttaggagagatagaaacctgttcactctggagtttggaaaggggaaggatggtgggagtttatgagaaaacatttttctgttagatctccatttaccccatatcataagtctacccctttttttcttcatttggggttcctcgtctggattccctccattccctctcctcttttcttccatgagctcttctgcagctttgctttctttggtctgcagaagatcctcaggaacgggaacgtcgggaacgcagggagaggatggaacgggagaccaatggaaatgaggatgaggaagggcggcagaagatccg

SEQ ID NO: 4873 - DNA, 132 bp, Homo sapiens
ctgcccttccatgtcgtcacaggcataccgggcgtggacccactgcttggtgcccttgccgaagtagtagcacttccgttggaaattgatccacttttcagggcacgtgttgcacacaaagccgctggacac

SEQ ID NO: 4874 - DNA, 436 bp, Homo sapiens; identical to SEQ ID NO: 208

SEQ ID NO: 4875 - DNA, 452 bp, Homo sapiens
ccattaaaagttatttacaacagtgggagaaaaaaagacaagaagttgtttcacattacagacctccccccaccccaaagcctaatacttgcttaccaagtcaaaaaagagacacagttgattcacaggctggaggtttgaacttgagtaagacatttataaaaacctagacggggcagtgtcctccccagcccaggtgccactaggcacagcacaagagactaaaaacaacaggggaaggctggacactcaaggtttgggagtataagcaccccacttctggctcagggatttggggagtagggtaaacaaaacctacttggaaaagaattggggaagaaaaccaacaactgccttatgcaggggtggggacagggaaggaggtagggccagggacaggagcatttcacatcactaacctaacttgggaagctgtaagggaccatcttcaa

SEQ ID NO: 4876 - DNA, 396 bp, Homo sapiens
ctgcgctgcacagcctgggcagcaggctgagtatgggctcctcactcccacctcctggccttcaaggccctacttgttgccccagacagccatctttgagaacacaggtcttgggaggaagcggctggacttcatgtaggcagagatcttctccaagccctcaaagcgggagatgaagtccttcagatttgggaaggcgtccaagcacttgggctcaaatatacggtggaggtcaaggacatcatagacgagaaaatctacaaaagtgatcttgtttcctgcaaaccatggccgcttccccagaaactctgagtagagctttagcttttcagggagttcctccaagtactttggcttcagtttctcaaattctggattgtagcagatcatgcccag

SEQ ID NO: 4877 - DNA, 484 bp, Homo sapiens
ctgccagagtagtggctttaatgaccttagaaagggtacatcattctacaacatcctgcccctccccatcactctcctattctttcagaagagtgttggaatccacgacctcttctgtaggtactggaaggggcccgaagaattcccgcatatatccagaaaagccagaagtttggggacccattcttaaacttcctagaatgtccccttaggaatgagcatcggcacttggaggtgaaactcttgaagggtttttatttagaaatcagattgtcagcatgtggtggcatcttcttaaacttagataacgggtccagagttgcctggctagttagtgtcaggttcattagactagatgcatctctcctgacttgccagagtctctaggtgtggttgtacattctgaatgcactgttttgagtattcagcacctgttgtgcatgtgtctctgcagcaagcgatccccctccaagaccatcccagg

SEQ ID NO: 4878 - DNA, 636 bp, Homo sapiens
  misc_feature (1)...(636): n = g, a, c or t
attttagctgtgcaaagggaggtagtgtgggaaaagtgtttccattctgggaaaagcccaaaccgaatacggtcagcagtcaactccagggtttgggcttgattcctgttgaataatagttttgagcattctttgtggttaaataaattcttaaatctgcctagttttgatgaattcttttgtgaaacttgaaagagaatagacagtatgacatatagaattaatacaaaacagtttaacaaccatttaactgcagtgtaagaaaattggactgtaatcatatcgctactggcatctgttatctagtatgcatttctggtgtgtatctgaaaggaagacattttctaccctagatccaattgcatttatttatcaataagtgccattaaattgaaattatattacattttacactttctcaatgaatgaacaaattagtctgtagaatctagccacctgtttagcctagtcatgtgccttgaacatatatgtgtcccataatctggctcatggtacctgttcttctatccaaacctttcaattcatgctacctgattcatttatttgacatagatcttaggcccacttgaactcttttcttgnttatctagcatagcacaaacgtttttccagtct

SEQ ID NO: 4879 - DNA, 323 bp, Homo sapiens
cgagaaaattgaaatcattgctacactgaagaatggagttcaaacatgtctaaacccagattcagcagatgtgaaggaactgattaaaaagtgggagaaacaggtcagccaaaagaaaaagcaaaagaatgggaaaaaacatcaaaaaaagaaagttctgaaagttcgaaaatctcaacgttctcgtcaaaagaagactacataagagaccacttcaccaataagtattctgtgttaaaaatgttctattttaattataccgctatcattccaaaggaggatggcatataatacaaaggcttattaatttgactagaaaattt

SEQ ID NO: 4880 - DNA, 264 bp, Homo sapiens
ctgtgggcccggagggcctcggcgaagctgagatagaagaagccatcctcggacatcacgtctcccagaagctgcacggccggccggctcaggttcccctccccgagaagatattccaagagcgtgtgcctttcaaacttcttcatcgcctttctgcagcccagtgccttgaggtctttgagggcctggttgagagccatctggtagatgccttcgggcgagtggcccttttcctggggacgcaaggcgtagcccagcttctcg

SEQ ID NO: 4881 - DNA, 384 bp, Homo sapiens
  misc_feature (1)...(384): n = g, a, c or t
gtctgtgtgcctgtgacaaggaggtggccttctgcctgaagcgcaacctggacacctaccagaagcgactgcgtttctactggcggccccactgccgggggcagacccctgggtgctagaagcccacaccctctaccctgttcctcagcatggagctctggcatccccacctcagtatctaacctgaaccagcctggcttttcaaacactccggggggaggtagtcccagcctcccccggaaccctctaccantgccttntgaccttctnaagctttccgaatcctcccagttgaggcantagctgtgtcctctgagggtggatgggaatcttgggagaagcccaagcaagggagccctcagaggtggtgtttggaccaaagca

SEQ ID NO: 4882 - DNA, 340 bp, Homo sapiens; identical to SEQ ID NO: 354
  misc_feature (1)...(340): n = g, a, c or t

SEQ ID NO: 4883 - DNA, 606 bp, Homo sapiens
ctggtcatcttgtcatgtgaagaccatcttcctacagagtctaggctggccgtcgttgaagtcctcaccagtactacaccacttttcctcaccaacccccatcctattcttgagttgcaggatacacttgctctctggaagtgtgtccttacccttctgcagagtgaggagcaagctgttagagatgcagccacggaaaccgtgacaactgccatgtcacaagaaaatacctgccagtcaacagagtttgccttctgccaggtggatgcctccatcgctctggccctggccctggccgtcctgtgtgatctgctccagcagtgggaccagttggcccctggactgcccatcctgctgggatggctgttgggagagagtgatgacctcgtggcctgtgtggagagcatgcatcaggtggaagaagactacctgtttgaaaaagcagaagtcaacttttgggccgagaccctgatctttgtgaaatacctctgcaagcacctcttctgtctcctctcaaagtccggctggcgtcccccaagccctgagatgctctgtcaccttcaaaggatggtgtcagagcagtgccacctcctgtctcagttcttc

SEQ ID NO: 4884 - DNA, 579 bp, Homo sapiens; identical to SEQ ID NO: 210
  misc_feature (1)...(579): n = g, a, c or t

SEQ ID NO: 4885 - DNA, 285 bp, Homo sapiens
ctgttaatcgagtagcgctttgaagaaatgtaatggcttttcttaagtctccttctgacactttaacaagataagctattccctcatcactaattttgacattttccttcttggcaatgtctagtaatcgctgctgttgaattttatctgacagaggcttgaagcggaattttgaacatctagaggtcaggggttcaattattcgactgacatagttacagataagacagaatcgggtggctttcgactccttctccatggtacgtcttaaagctgcctgagcag

SEQ ID NO: 4886 - DNA, 345 bp, Homo sapiens
ctgctgaaaacttccttgaagaagaaattattcaagagcaagaaaatgaacctgagcccctatccttgagctcagacatctccttaaataagtcacagttagatgactgcccaagggactctggttgctatatctcatcaggaaattcagataatggcaaagaggatctggagtctgaaaatctgtctgacatggtacataagattattatcacagagccaagtgactgaacacgcattcccaactatatatctacagatgcattccattttaactcttcttgagctaaaacgtcaaataggagaggaagataagataaatatttgtaaataaaacctaaagttt

SEQ ID NO: 4887 - DNA, 86 bp, Homo sapiens
aaatgctttccctgagtattctatgaagtctggggatcttcgaatgctattaatcttagacagtaaattttataaagaaattcttt

SEQ ID NO: 4888 - DNA, 355 bp, Homo sapiens
ccacctcaagatgaaaacagataactccctaaatgttaactggctctactcccctaatattaaacataaaaaccacatgggaaatatagaaattcaaatagaagtaacataaacctgtcataaatcgtaaacaaaaaactatttgtgggacagcatggatgacaaatggtctactgtgtaaattttagaatgaggcagacaaaagttggaaggccggttaattttcccctccttctcctgcttcagcttcgtctccttgggtatccgatgtccacaatgtcaagttgtctctcagtaattgcattattagcgtgctgtctttgtatgactcttcacttaatgtatcaagttcagc

SEQ ID NO: 4889 - DNA, 86 bp, Homo sapiens
aaagaatttctttataaaatttactgtctaagattaatagcattcgaagatccccagacttcatagaatactcagggaaagcattt

SEQ ID NO: 4890 - DNA, 568 bp, Homo sapiens
  misc_feature (1)...(568): n = g, a, c or t
ccatgagtgacaggtggcctcttggtgggagaggtggggcagggggaaggcagctcccactagaccagggcagtatttaggggaaggaggcagattggagcagttggctgccaacacctggcctcactcagggagaggggccttgggcctggaagatatctgggtgaggtacccacaccatctgctgcaacctctgtgtatccattatgggctcacgccattcacaggcatgaattgagcacctagtatgtgggaaaacaggggaaacagagatggcacagacatggtctccatccttcgggggctccagtctagttgggggagatcagagaagttccatttgccactctaggccaagctaggtaagcggcagagccatgaagcattgtgggagcttggaggagggagtgagcccttgcagtcagggagaaggagtcagcctggggagacttccagaaagtagccctttgaccctgaggaggtggggatcagtcgtgatgaaagtaatagccattcagtagccccttgtaattcaccctgagccaatgcctggaggcagganaaagta

SEQ ID NO: 4891 - DNA, 198 bp, Homo sapiens
cctcggcctcgggcagcgtcagcatcgaggagatcgacctggagggcaagtttgtgcagctcaagaacaactcggacaaggatcagtctctggggaactggagaatcaagaggcaggtcttggagggggaggagatcgcctacaagttcacgcccaagtacatcctgcgcgccggccagatggtcacggtgtgggcag

SEQ ID NO: 4892 - DNA, 545 bp, Homo sapiens
  misc_feature (1)...(545): n = g, a, c or t
cctctggccggagctgcctggtcccagagtggctgcaccacttccagggtttattccctggtgccaccagccttcctgtgggccccttagcaatgtcttaggaaaggagatcaacattttcaaattagatgtttcaactgtgctcttgttttgtcttgaaagtggcaccagaggcgcttctgcctgtgcagcgggtgctgctggtaacagtggctgcttctctctctctctctcttttttgggggctcatttttgctgttttgattcccgggcttaccaggtgagaagtgagggaggaagaaggcagtgtcccttttgctagagctgacagctttgttcgcgtgggcagagccttccacagtgaatgtgtctggacctcatgttgttgaggctgtcacagtcctgagtgtggacttggcaggtgcctgttgaatctgagctgcaggttccttatctgtcacacctgtgcctcctcagaggacagtttttttgttgngtttttttttttttttggtagatgcatgacttgngtgtgatgaganaat

SEQ ID NO: 4893 - DNA, 556 bp, Homo sapiens; identical to SEQ ID NO: 211

SEQ ID NO: 4894 - DNA, 272 bp, Homo sapiens
aaatcttttctcccgtgtccctcttcttcaagcaactgaattatctgtataaaatggaaacatatctggttcccatttcaaacgatagtacagataccaaagaggagactgccagaaaaggagagtacaaagtgacctcttagagaggcccaggcacttgctgaaaatttaggggaagggtatgagatttctaaatgattgataatcacacaggtgacaactacaacacaaaaaaaccattgacaggaaaaatgaacatagttctccttttt

SEQ ID NO: 4895 - DNA, 310 bp, Homo sapiens
ctgtgacttatcatggagttgataacaagaagaataaagggcagctcactaagagccctctggcacaaatggaagaagaaagaagggagcaagtagctaaaattaagaagatggagatggagatggagcaggtgtttgagatgaaggtcaaagaaaaagttcaaaaactgaaggactctgaagctgagtctgcagatgtggatcctgactcctgagagaagtagctcaccgtgacgaagctgcgtttgcttttatcgatttgcaaatcaaagaagggggacatattgggagaaggccccccaaaatctgg

SEQ ID NO: 4896 - DNA, 601 bp, Homo sapiens
  misc_feature (1)...(601): n = g, a, c or t
ccatcagcacgagggcactgaccagcacggcatacaaggtggccttccctagcaagatctcatagaggatggtggcagacaggaccccttgctggtaagactctgttgacaagaacagagcatgtaggcacctgtgcacaggtggctctggcctccctcacgcccctgtgtccgtggattctccatgccctggttcgagagcagagacggcgaaagatagagagaaaaaggagagactcacttaccggaggtgaagccacagtctgaaagaaaacaggggaagaaaaatggatgagagaatgctgctttgtaaggacattgagccttacatcacagactcacaggccacaaacacatgcatatcagatagtacaaagttagcctcctttgatagccctggttctgtctccctcatgctgctccagtgccagcgaagtggtcactatgatcttaggaaaccaggaccccagaagagaatgggatgcacaccactcagatgctgagctgtatggctggtcctcagggagacttgaaggcttagctctaaggngtcaggatctgaaggaagaatgagcntgaggtgctccattcagcctctatg

SEQ ID NO: 4897 - DNA, 526 bp, Homo sapiens
  misc_feature (1)...(526): n = g, a, c or t
ccaacatggggaaaccccatctctactaaaaatacaaaaattagccgggcgtggtggagcacctgcagtcctagctactcaggaggctgaggctggagaatcgcttgagcccggaaggtggaggtgcagtgagccaagatggcgccactgcactccagcctgggcaacaaccacaactgaaaaaaaaatctactgaggccagagtgagttggggcggggagcatggagagggggtcaggcttagccccaacaactcagaatttcacttccttgtacggccctcactttctccacctggccccggggcaggtctgagggtctgaagtctgttgatctgaaggtcctaggcaaatccagtcacttgggagccggagatatttaacatcacggcccggtcccctttcccaggggactcatttcctancactctctccactgtccttgccccacccctgggggaaaaaatgtatttttcttttgtgaatacttcctgaaacttgcgggcatagaaaccacaaactgctca

SEQ ID NO: 4898 - DNA, 561 bp, Homo sapiens; identical to SEQ ID NO: 356

SEQ ID NO: 4899 - DNA, 635 bp, Homo sapiens
  misc_feature (1)...(635): n = g, a, c or t
ccacaactgtgaagttagaaaagccctgtcaaagcaagagatggctagtgcttcatccagccaaagaggtcgaagtggttctggaaactttggtggtggtcgtggaggtggtttcggtgggaatgacaacttcggtcgtggaggaaacttcagtggtcgtggtggctttggtggcagccgtggtggtggtggatatggtggcagtggggatggctataatggatttggtaatgatggaagcaattttggaggtggtggaagctacaatgattttgggaattacaacaatcagtcttcaaattttggacccatgaagggaggaaattttggaggcagaagctctggcccctatggcggtggaggccaatactttgcaaaaccacgaaaccaaggtggctatggcggttccagcagcagcagtagctatggcagtggcagaagattttaattaggaaacaaagcttagcaggagaggagagccagagaagtgacagggaagctacaggttacaacagatttgtgaactcagccaagcacagtggtggcagggcctanctgctacaaagaanacatgttttanacaaatactcatgtgtatgggcaaaaaactcgaggactgtntttgtgactaattg

SEQ ID NO: 4900 - DNA, 353 bp, Homo sapiens; identical to SEQ ID NO: 212

SEQ ID NO: 4901 - DNA, 305 bp, Homo sapiens
acaacaccgggaatattgccagagttaacctgaccaccaacacgattgctgtgactcaaactctccctaatgctgcctataataaccgcttttcatatgctaatgttgcttggcaagatattgactttgctgtggatgagaatggattgtgggttatttattcaactgaagccagcactggtaacatggtgattagtaaactcaatgacaccacacttcaggtgctaaacacttggtataccaagcagtataaaccatctgcttctaacgccttcatggtatgtgaggttctgtatgccacccgt

SEQ ID NO: 4902 - DNA, 602 bp, Homo sapiens
  misc_feature (1)...(602): n = g, a, c or t
ctgtatctgtcatttggtgccactaacttaggccagattaaacagaaagcaacctctgccacaaagcatctccctaggaagagatcacaacataaactaaagcactaactctcaagatcctgttgtcacgatgattcagttcatatattatctctgacttttctgagatgatctaataagttctaagcaaaaataaatatttaatctttgattaaataacattattacttagtctagggtgactgggttacgtaggatggcttgaaagagataagccttggtggacatcttaaaaatttaactgaagtaaagagcaactggtttagttcccttcccctggagtgttgtggtgttgagaagacaaaactttgggaacaatcacagaggggctagatagacaatgcaaaattgctgctggagagactgagtgagtagatgttaaataactaagtgcgtgctggatgaataatgttctggatccaagaaagacatacacaggtaaaaaatgaattcatgccttttgngttgttcaaaacttgnactttatttttctcaaatatttttacttatgctttttgncattatccacagtgttttttttt

SEQ ID NO: 4903 - DNA, 566 bp, Homo sapiens
aaaaaaagaaaatacaaccatgggaaagaaatcttaaatgaaaaacgcatctcattgtaggcatttttgcctcatattttactgggccatgtttgtttcctggtactcatgtatttttttttccagatctctttccccaagttgctattgtaagagtattctgctgcgtgtggatgcagttatacacattaaagcagatctggagtctgaagtagctataaagcagctataaaacagaaatacatgcatagctgcagaaaccatgataggtagaggacttttcttttggttttgttttgttttgttttgttttgtttttggttttacagagaagagatttttattacaaagaaaaaaattccagtgaattgtgcagaaatgctggtttttacaccatcctaaagaaaaactttacaagggtgttttggagtagaaaaaaggttataaagttggaatcttaaattgtaaaattaaccattgagtgtcaaagttctaaaagcagaactcattttgtgcaatgaacataaggaaagactactgtataggttttttttttttctcctttt

SEQ ID NO: 4904 - DNA, 304 bp, Homo sapiens
aaaaacaagttccccagagaagctggcacttcctttgccctccaaaaaggacctgaaaagtcccaatccaaactttagaaaattagttatgagatgcaataaatgatgatcaaagcagtcagagggagaaggatgaatgtgtcttccatttagctagagactgtagcatagcctctttaggtgttggtggatcagtaaaaacgactgaagtaccagaagtgcttggaaggataggggtacaaagtaatgaccataataccttgtctaaatcagtagcagggcttcatggctaggaaactttttt

SEQ ID NO: 4905 - DNA, 592 bp, Homo sapiens
  misc_feature (1)...(592): n = g, a, c or t
aaaagcaaaaatgcaattctgtagatgaaaacagttatctcagagggtcaaccacacaatgtcatacagagacgctggtcttaagccatttttttccatattcatataatttcaaaacatgagaagtatcctacttgctgagaagtgccaaatgaccctaatattcaagatatcttagaaatgctatcctttagttaacatacccttaaattttgtaacattgattttaccctggatttagtccatacacgtcaatgtacagacttatcaaagtacaatgctggaacaactagtgtttgtatttttggaatctagaaaataaaaacaatatagccatgatttcaaataggtgagtttccttatataacatttattcatatttattgnataagcatcatgattttttcttccaattaagttttagtgacttcctaaagacatttttaacaacattcctcaaaaataaacttacttagttttcagttttagttactagtgcctgcctataaaaggaccttaaatgatttaaccctaaagccagattcattcctatatatacccagtcagttgtctgcaaagaagtcctaagact

SEQ ID NO: 4906 - DNA, 440 bp, Homo sapiens
  misc_feature (1)...(440): n = g, a, c or t
ctgccgctcatccaccatcagtgactttgtgctgttatcattcatgtgcaccttgacgacgagcttcttaaccttggcctccttcagtttttccagcgccagcttaattttatcagccttggcttgggcttcttcctcttcctgagagagaggttcaggaggtggtggtggcagtggaaggtctaacacaggatcggctggtggaggtggtaagtcatcctcatattggctgataccagtggcagcaacatttgttccataaccaagagaggctgcaccactgaaaattgatgcttgtanagatgctgaatgatgttgattctgcaaggactctttctgtgcctggattgncctctgctcancctcacttatgtctgctaccagatctgccatgagagcatctaaatcttggtcttccagtgcatttaaggactcattta

SEQ ID NO: 4907 - DNA, 282 bp, Homo sapiens
ctggtgctgcttgcaggaagggcagtaccaggggttttccttctccagggtctccacagtggtgaagagctcaatgcactcctgcagccgcacgggagccttcttcatcacgtacccgacgcagtcatgcttcacgtagccctcagcctctacctcgtcatagtaacgcttcttcatctctggctcccagtcgatagcaatgtacggctgggcatggacttcttcaggggaggttgtgcggtcgctggtcccattggagttcaccgtctgcagggtgaacag

SEQ ID NO: 4908 - DNA, 300 bp, Homo sapiens
gctgtgtgaacgtgtatgtacctaggatatgttaaatatatagctggcaccttagttgcatgaccacatggaacatgtgtctatctgcttttgcctacgtgacaacacaaatttgggagggtgagacactgcacagaagacagcagcaagtgtgctggcctctctgacatatgctaacccccaaatactctgaatttggagtctgactgtgcccaagtgggtccaagtggctgtgacatctacgtatggctccacacctccaatgctgcctgggagccagggtgagagtctgggtccagg

SEQ ID NO: 4909 - DNA, 549 bp, Homo sapiens
ctgtgaacatctgttctttcttcctcttctgtctactgcatgcaggcccggaagctgagcgttagtcaaaggtacaggaagggaaaagagaagagggcaaggcccatcccccaagaaaggaagggctctgatgcagagggagcaggagctgaggtggagacggccactgcctctctcaccctctgttccatccctctgctcaagaaaaccaggcttagcagagtgagacagacgctttttattggtctggctggcgtgcctagtggaaagctcaggcagagcttcctatcttgccctggctcccatcttccctctcctgggagttcatcacacatcccgagagggaagagtgtcctgggcagaggtggcaggcaaagccgggtaaaaactccagggctgggaagcaaatggggctcagggtgatgcagaaaatgtgatgttgccaggccatccaaataaagcatccatcggggcagaggagaagctgtttccctgcagacactcctctgcccccaccaggaatgggaggggcaggaggaagagcttccc

SEQ ID NO: 4910 - DNA, 513 bp, Homo sapiens; identical to SEQ ID NO: 213

SEQ ID NO: 4911 - DNA, 468 bp, Homo sapiens
ctggctgtgatttttgctacaggccacagtcaggagcacatgatagtagcattggcacaggccacggtggaccgtttttcagtgtacagttccagcaaaacctggtattctccctgaggaatagtaaattcaggattattgacaggcccagcatagtaaatctgctctcctttccttcttccacagaaagaaaacttgggcagagccgcctcacagatgggataggagaaattcaaaacagatgagccttgagacatgagagctaggtcaagaaaaagctctttgatgtcctctctcagaataattccaaatctaatgttgatatttgattttaattgcttggaacacttttcaacagaaaagccaaaatcttgtaatggatcgcaactctggtagagcacttccaagccgctgtcgctacagaccacgtgtgtgggccaggctttcccaccgccgcctccactgcag

SEQ ID NO: 4912 - DNA, 575 bp, Homo sapiens
ccatggagacagggccgttttcttccctgggagtttgctcagaaccaggcactgctggggaccatggatggggaggaggggcacagggcccagtgcagatgaaggttgcacaaacaccccaaactgagagcccggcctcctggcaggcgagtaagcgagcaggcgcctcgacagcacagcctgtgctttcccctcagatcaatctgctactcccttttccttaggagggagaggagcaggcagataagcctggtgtccaccaccctctctgccccacctgtagaggaagggctcaagggacaggagagcagagagggagtgtgacgctggcctcagagcccgtgcagggtcgaggagaggctctcctcggtggggagtcaggggaagatcggtttcctgttgaatctgggctgggtgtgtcttagctgatcttctgtatcagcttctcgtcagacaggcagtagaggctgttgatggacaagtctgagatgaagtgctcgcaggcttttcgagtgatctgcttgcatcctcgaaggtcgatcaaggtgacgttggcaatgcgccgtaggtagatc

SEQ ID NO: 4913 - DNA, 555 bp, Homo sapiens
ctggctgggcccaagagctccatctgtttccccaaagtacaggcagcttctaggccattgagtggggcatgatattggatgcttggctcaggaaacaaccccagccaacccaaggggcagtgggacatgttggcctcaggttagaaattattgctcaaagcagaaacagttgtgtcctagagagggtctgttaaaccctctttccatgtgtatctctatgtagcaattgatgggccctgcggtcaggatccctggtttctccagctccatgaatgcctccctgtgaggccctggacagtttctccctcttcttctcctggcttcagtttccccgtatgtacattgagacagtaagactggatgattctcaggttccctctggctttccattctggcatcccagagtggaggctctgggagggcagaaccctgttcctgcctcagtttccccacctgtgggtctgcgtatagggctgggtatggaggtactgagtaatggagtgctgcgtgaacatcccagtctccctgtggatagctgtgctgtgagatccaact

SEQ ID NO: 4914 - DNA, 490 bp, Homo sapiens
ctgcaactcggggacatacaggtgcactctgcaggacccggatgggcagagaaacctaagtggcaaggtgatcttgagagtgacaggatgccctgcatagcgtaaagaagagacttttaagaaatacagagcggagattgtcctgctgctggctctggttattttctacttaacactcatcattttcacttgtaagtttgcacggctacagagtatcttcccagatttttctaaagctggcatggaacgagcttttctcccagttacctccccaaataagcatttagggctagtgactcctcacaagacagaactggtatgagcaggatttctgcaggttcttcttcctgaagctgaggctcaggggtgtgcctgtcagttacactggaggagagaagaatgagcctacgctgaagatggcatcctgtgaagtccttcacctcactgaaaacatctggaaggggatcccaccccattttctgtgggcagg

SEQ ID NO: 4915 - DNA, 418 bp, Homo sapiens
ctgagtttttatccaattgaaatagtaatttaagtcactgccttccatcagttcttttccccaagctgctaacttggcaataattcttgctgccatatgaacagtgaagggatcctggcgattcaacattggcagaaagtagggccacgcagtgttcttgctacatcttgcatagtcaaagaaaatgctaacacgctgatgattttcctgcagcatatcatccaccatagttagtatatactgaacggtctgttctttgcagatatgagtcatcagatttataaatgttttagcacactggctgccttcagtttgaagcatctcttgcttctcttcagggcttcgtttcatttcaaacctctgaataaactcacaatcttcagcagaaatcatctgtccctgaagataggattgccag

SEQ ID NO: 4916 - DNA, 202 bp, Homo sapiens; identical to SEQ ID NO: 358
  misc_feature (1)...(202): n = g, a, c or t

SEQ ID NO: 4917 - DNA, 538 bp, Homo sapiens
  misc_feature (1)...(538): n = g, a, c or t
ctgtacacatgaaaattgaattgtttcaaaaggagcaatgatagcaagagaaagttcttggcattttaagaaaagtncatatacatagcaagaaatgaaagtaaatcaaaatacatagctttgtacatgttagaaatatccaatgtgccaccaacacaacaaccgccctattaaaaagtcctcaggtctggagacatctgtatttttctttgtataactacattcgcattacccaaccacatatctctcccatggtctgttacccattaggaagcttttaaccagaatttttggcaatatgcttttcttcaaataaaacaagccttcaaataaatcattatgtctgacaactgaattgggtaaagtctttctgaaatatgtgtaatctttagaaaattcttcttttttccttcataaatcagcagtgctccatcttcaaataaatcatgatcagtcacaatcttaactcatgtgctcatatgttctcttcatccaacattttgttgataccatcacatagtttttgtaagtggggttt

SEQ ID NO: 4918 - DNA, 322 bp, Homo sapiens
  misc_feature (1)...(322): n = g, a, c or t
ctggaaacgctgagtattcgaggaaataacattcggtattttattctaccagacagtttacctctggatacactacttgtggatgttgaacctaaggtgaaatctaagaaaagggaagctgttgcaggaagaggcagaggaagaggaagaggaagaggacgtggccgtggcagaggaagagggggtcctaggcgataatgtctctcaagatttcaaagtcatatgagatttgggatattttttgtacaggttgtgtttgtttatgtcagtttttaataaacataaatgtggggcanaaaaaaaaaaaaaaaaaaaaaaaaaa

SEQ ID NO: 4919 - DNA, 520 bp, Homo sapiens
aaaagatagagccacatggacagaaagatcaatattgccctttatagtggctgctgcggttgtagctccgagactatattggagggggtgaggaaggacaagggggccagcaggtgggggacagcggcagacccctcccccaccccgatgctttggtccaaacaccacctctgagggctcccttgcttgggcttctcccaagattcccatccaccctcagaggacacagctactgcctcaactgggaggattcggaaagcttcagaaggtcagaaggcattggtagagggttccgggggaggctgggactacctccccccggagtgtttgaaaagccaggctggttcaggttagatactgaggtggggatgccagagctccatgctgaggaacagggtagagggtgtgggcttctagcacccaggggtctgcccccggcagtggggccgccagtagaaacgcagtcgcttctggtaggtgtccaggttgcgcttcaggcagaaggccacctccttgtcac

SEQ ID NO: 4920 - DNA, 284 bp, Homo sapiens
ccaggaatcgcttaatcctgaaagtcttgtgagaagacatggcgagcagcggagtcaagaacacaccacgatggcggagaaaggagacattggagaagaaccaagctgggtctataaggaattgcacatgagatggcacacatatttatgctgtctgaaggtcacgatcatgttaccatatcaagctgaaaatgtcaccactatctggagatttcgacgtgttttcctctctgaatctgttatgaacacgttggttggctggattcagtaataaatatgtaagg

SEQ ID NO: 4921 - DNA, 453 bp, Homo sapiens
ctgccatgttgagaggtgccttgtggagaggctcatgtggcgaggaactgagactggcttctatccaacaaccagtgaggaactaaggccctaaagtcctatagtccacaaggaactaaatcctaccaacaactacatgagtgagcctggaatctgattttccccagtggggacttaaggtacctacaacctggctgttatgggctaaactgcatcctgcccaaatttatatgtttgagtcttaactcccagcacttcagaacatggttttgtttggagacatagtcattaaagaggtaatgaagttaaaatgaggtcattaggatgagtcctaatccaataggactggtgttcttatatgaagaggaaatttgaacacagacacatatacaggaaagaccatgcgaagaagacacagagaggaaacggccatctacaatccaaggagagagg

SEQ ID NO: 4922 - DNA, 343 bp, Homo sapiens
ccacttgtgtgggtcctcacaagcaaagagagcactaaacttgacattgggggtccaccactccaactttgctttctgaaggttttggtgtacattgagccccagaaggaaaggagagtatctgtgagtgggggcctcccttgaccccagtacgaagtctatgccctgaatccccagagtagcccttcctggtgcccaactggcctggggacaaacagcgtccactacatctaggactgccggctaagtggacacacttcttgacctcctaccaggaactttggtaaaagctagctttggggaaggggttgggtgtaaatatgagagggtggagggagaccag

SEQ ID NO: 4923 - DNA, 538 bp, Homo sapiens; identical to SEQ ID NO: 214

SEQ ID NO: 4924 - DNA, 562 bp, Homo sapiens
  misc_feature (1)...(562): n = g, a, c or t
ccatgagtgacaggtggcctcttgntgggagaggtggggcagggggaaggcagctcccactagaccagggcagtatttaggggaaggaggcagattggagcagttggctgccaacacctggcctcactcagggagaggggccttgggcctggatgatatctgggtgaggtacccacaccatctgctgcaacctctgtgtatccattatgggctcacgccattcacaggcatgaattgagcacctagtatgtgggaaaacaggggaaacagagatggcacagacatggtctccatccttcgggggctccagtctagttgggggagatcagagaagttccatttgccactctaggccaagctaggtaagcggcagagccatgaagcattgtgggagcttggaggagggagtgagcccttgcagtcagggagaaggagtcagcctggggagacttccagaaagtagtcctttgaccctgaggaggtggggatcagtcgtgatgaaagtaatagccattcagtagccccttgtaattcaccctgagccaatgcctggaggcaggag

SEQ ID NO: 4925 - DNA, 639 bp, Homo sapiens
  misc_feature (1)...(639): n = g, a, c or t
aaagatttagtgcttaacattttcccaagtgtgggaacattatttttagattgagtaggtaccttgtagcagtgtgctttgcattttctgatgtattacatgactgtttcttttgtaaagagaatcaactaggtatttaagactgataattttacaatttatatgcttcacatagcatgtcaacttttgactaagaattttgttttacttttttaacatgtgttaaacagagaaagggtccatgaaggaaagtgtatgagttgcatttgtaaaaatgagactttttcagtggaactctaaaccttgtgatgactactaacaaatgtaaaattatgagtgattaagaaaacattgctttgtggttatcactttaagttttgacacctagattatagtcttagtaatagcatccactggaaaaggtgaaaatgttttattcagcatttaacttacatttgtactttagagtatttttgtataaaatccatagatttattttacatttagagtatttacactatgataaagttgtaaataattttctaagacagtttttatatagtctacagttgtcctgatttcttattgaatttgttagactagttctcttgncttgngatctgngtncaattttagtca

SEQ ID NO: 4926 - DNA, 526 bp, Homo sapiens
  misc_feature (1)...(526): n = g, a, c or t
ccaggtgtgggctcaagagccttactctttccatctcagtttaggggcgcagccagctcctcttcccaatagggctctttctgctttccctctccttggccctagatttgtaatccatgaaaaagcacaaggtcctggctccttgcggtcacattctggttctctgcgttttgtggactctgctctcactgttcacccagcactagcagtaccagatggttctgtggagtcctggggaatggagagagcacagtctgactccctgccaagtagccaggagttgacttgcccatggtccgctggctttcccaccacttcctacaggatgggatctaagagactcaagagctgggtttctttcagcactctgtactgtcccaaatagcaaacaaatcactttgtagccagatttctgaatggaaatgagaaattgaattctccatggacttttaggtttatgggggagttttagctgngtttcttggttttatttcagccaaacatgtctgcttttgatttttttttt

SEQ ID NO: 4927 - DNA, 236 bp, Homo sapiens
ctgggccgctaagtaagggcctccaaagacttccatacccaaaccctggagcctgtgagggtgacctgatgcagcaaagaaggactctgcagacgggagtgagttaagggtcttgcgaggtcattctggacttggggtgggccttaaattcaatgaccagggttcttataaagagagcggccacaggaagacggaggagagactggaagatgcagccgcagcaagggacacggtgg

SEQ ID NO: 4928 - DNA, 463 bp, Homo sapiens; identical to SEQ ID NO: 359
  misc_feature (1)...(463): n = g, a, c or t

SEQ ID NO: 4929 - DNA, 596 bp, Homo sapiens
  misc_feature (1)...(596): n = g, a, c or t
ccacactgcacctccttcgctgtcaagtgggtcccccacgaagatactgcacggagagcagtgccaagcctgtggatcaggaatatcaacagcccccagagagtggtgctggctgagggtctgagagcaggacaggaaaacccacctatggaataggtgcctatccctgtgaagatgaacctctggcccttccaggatggaaggagtgcaatgtagtcaactcctcacttagggtctggttggtcacctaaagaaatagagccctaccagggaagatcattgggttcaaatgctgatgagtaggacatttagaggtggcagtgtctggatctaccttggtaggagggagtcagtactgttggacccataggtagcctcatccctgccactgtgtttgctccatttatgtacccatcctacccggcctgggctgacccatggggaaggctggctaatttcagtgcttctgcttggttgttcagggccatttcaggtttgggtgttttctggggatgttaacatgggattcaggctcaactcacaagaaacttttccatctcatgatggatgctgttgggcatgtccaatgtntgact

SEQ ID NO: 4930 - DNA, 139 bp, Homo sapiens
gtgctagggaaggcgggaaccttgggttgagtaatgctcgtctgtgtgttttagtttcatcacctgttatctgtgtttgctgaggagagtggaacagaaggggtggagttttgtataaataaagtttctttgtctcttt

SEQ ID NO: 4931 - DNA, 578 bp, Homo sapiens
aaattttctttttgtttcactggaaaggaaagatgatgctcagttttgccggacccaggatgaagaggttggagatgggaccacatcagtaattattcttgcaggggaaatgctgtctgtagctgagcacttcctggagcagcagatgcacccaacagtggtgatcagtgcttaccgcaaggcattggatgatatgatcagcaccctaaagaaaataagtatcccagtcgacatcagtgacagtgatatgatgctgaacatcatcaacagctctattactaccaaagccatcagtcggtggtcatctttggcttgcaacattgccctggatgctgtcaagatggtacagtttggggagaatggtcggaaagagattgacataaaaaaatatgcaagagtggaaaagatacctggaggcatcattgaagactcctgtgtcttgcgtggagtcatgattaacaaggatgtgacccatccacgtatgcggcgctatatcaagaaccctcgcattgtgctgctggattcttctctggaatacaagaaaggagaaagccagactgacattgagattacacgag

SEQ ID NO: 4932 - DNA, 483 bp, Homo sapiens
  misc_feature (1)...(483): n = g, a, c or t
cctacagacttatttcttcttggacacacccacggtgcggccacggcggccagtggtcttggtgtgctggcctcggacacgaaggccccagaagtgacgcagccctctatgggcccgaatcttcttcagtcgctccaggtcttcacggagcttgttgtccagaccattggctaggacctggctgtattttccatcctttacatccttctgtctgttcaagaaccagtctgggatcttgtactggcgtggattctgcataatggtgatcacacgttccacctcatcctcagtgagttctcccgccctcttggtgaggtcaatgtctgctttcctcaacaccacatgagcatatcttcggcccacacccttaatggcagtgatggcaaaggctattttccgccgcccatcgatgttggtgttgagtactcgcaaaatatgctggaacttttcagggatcactanagacatggctgcagcacaagc

SEQ ID NO: 4933 - DNA, 557 bp, Homo sapiens
cgtgactaagatggaggcgtttttggggtcgcggtccggactttgggcggggggtccggccccaggacagttttaccgcattccgtccactcccgattccttcatggatccggcgtctgcactttacagaggtccaatcacgcggacccagaaccccatggtgaccgggacctcagtcctcggcgttaagttcgagggcggagtggtgattgccgcagacatgctgggatcctacggctccttggctcgtttccgcaacatctctcgcattatgcgagtcaacaacagtaccatgctgggtgcctctggcgactacgctgatttccagtatttgaagcaagttctcggccagatggtgattgatgaggagcttctgggagatggacacagctatagtcctagagctattcattcatggctgaccagggccatgtacagccggcgctcgaagatgaaccctttgtggaacaccatggtcatcggaggctatgctgatggagagagcttcctcggttatgtggacatgcttggtgtagcctatgaagccccttcgctgg

SEQ ID NO: 4934 - DNA, 588 bp, Homo sapiens; identical to SEQ ID NO: 215

SEQ ID NO: 4935 - DNA, 392 bp, Homo sapiens
ctgcgctgcacagcctgggcagcaggctgagtatgggctcctcactcccacctcctggccttcaaggccctacttgttgccccagacagccatctttgagaacacaggtcttgggaggaagcggctggacttcatgtaggcagagatcttctccaagccctcaaagcgggagatgaagtccttcagatttgggaaggcgtccaagcagttgggctcaaatatacggtggaggtcaaggacatcatagacgagaaaatctacaaaagtgatcttgtttcctgcaaaccatggccgcttccccagaaactctgagtagagctttagcttttcagggagttcctccaagtactttggcttcagtttctcaaattctggattgtagcagatcatgc

SEQ ID NO: 4936 - DNA, 587 bp, Homo sapiens
aaagatttagtgcttaacattttcccaagtgtgggaacattatttttagattgagtaggtaccttgtagcagtgtgctttgcattttctgatgtattacatgactgtttcttttgtaaagagaatcaactaggtatttaagactgataattttacaatttatatgcttcacatagcatgtcaacttttgactaagaattttgttttacttttttaacatgtgttaaacagagaaagggtccatgaaggaaagtgtatgagttgcatttgtaaaaatgagactttttcagtggaactctaaaccttgtgatgactactaacaaatgtaaaattatgagtgattaagaaaacattgctttgtggttatcactttaagttttgacacctagattatagtcttagtaatagcatccactggaaaaggtgaaaatgttttattcagcatttaacttacatttgtactttagagtatttttgtataaaatccatagatttattttacatttagagtatttacactatgataaagttgtaaataattttctaagacagtttttatatagtctacagttgtcctgatttcttatt

SEQ ID NO: 4937 - DNA, 551 bp, Homo sapiens
  misc_feature (1)...(551): n = g, a, c or t
ccaagggaaggtctatcctcttatcaaccgaagacgatttcaacaaatggacgtacttgagggcttgaatgtcttggtgacaatatctggcaaaaaggataagttacgtgtctactatttgtcctggttaagaaataaaatacttcacaatgatccagaagttgagaagaagcagggatggacaaccgtaggggatttggaaggatgtgtacattataaagttgtaaaatatgaaagaatcaaatttctggtgattgctttgaagagttctgtggaagtctatgcgtgggcaccaaagccatatcacaaatttatggcctttaagtcatttggagaattggtacataagccattactggtggatctcactgttgaggaaggccagaggttgaaagtgatctatggatcctgtgctggattccatgctgttgatgtggattcaggatcagtctatgacatttatctaccaacacatatccagcgtagcatcaaaccccatgcaatcatcatcctccccaatacannatggaatggagctttctggtgtgcta

SEQ ID NO: 4938 - DNA, 490 bp, Homo sapiens
aaatgaaatgcaatataaaatactaatacacttttcttccaaaagtggaaatgcttaagtaccctatactagaaaaaaaaaaattaggctgtttattcaattccacaatgtataatacagcagttttatgtcccttattgctgacagcttcgataaaaactattaacaagtagttccaagcacagaaatagatgtacagtatgagcacgatttttctttatattaatttttaatgtcctatcatgtggattaaatgcataaagggcaaataaaaatgaggaatcttccctaagtaatcaaaacatatgtcttattgagaagaaaattttagaagctgattaaaatccttcagcactagctttgcaattaattctggagaaataccttgacacatcttatagtatttgagtttccttataactttaccttccttcaaacagaagctacctatgtgcaaataaactggttgttctgtcaggacttctaaaag

SEQ ID NO: 4939 - DNA, 92 bp, Homo sapiens
cggccgcagaagcgagatgacgaagggaacgtcatcgtttggaaagcgtcgcaataagacgcacacgttgtgccgccgctgtggctctaagg

SEQ ID NO: 4940 - DNA, 567 bp, Homo sapiens
ctgagagccatccccacactcctcagatgcctccatcaacaccaagcagcagtttcttaaccacgttgaaaccaagactgaagactgaacctgaagaagtttccatagaagacagtgcccagagtgacctcaaagaagtgatggtgctgaacgcaacagaatcatttgtatatgagcccaaagagcagaagaaaatgtttcatgccacagtggcaactgagaatgaagtcttccgagtgaaggtttttaatattgacctaaaggagaagttcaccccaaagaagatcattgccatagcaaattatgtttgccgcaatgggttcctggaggtatatcctttcacacttgtggctgatgtgaatgctgaccgaaacatggagatcccaaaaggattgattagaagtgccagcgtaactcctaaaatcaatcagctttgctcacaaactaaaggaagttttgtgaatggggtgtttgaggtacataagaaaaatgtaaggggtgaattcacttattatgaaatacaagataatacagggaagatggaagtggtggtgcatggacgactga

SEQ ID NO: 4941 - DNA, 387 bp, Homo sapiens
  misc_feature (1)...(387): n = g, a, c or t
ctgtcagggggtcagcgacaggcagtggcgttggcccgagcattgatccggaaaccgtgtgtacttatcctggatgatgccaccagtgccctggatgcaaacagccagttacaggtggagcagctcctgtacgaaagccctgagcggtactcccgctcagtgcttctcatcacccagcacctcagcctggtggagcaggctgaccacatcctctttctggaaggaggcgctatccgggaggggggaacccaccancagctcatggagaaaaaggggngctactgggccatggtgcaggctcctgcagatgctccagaatgaaagccttctcagacctgcgcactccatctccctcccttttcttctctctgtggtggagaaccacag

SEQ ID NO: 4942 - DNA, 297 bp, Homo sapiens
cctggttccatcctgggcactacagttgacatcagcgccatattcaaggaggtgtcgcacaatgttgagccagcccctagcacaagcttcatgcagggcgcagtaacctgcgttgtcccgatgatttacatcacaaatcttgttctctaagcagtacaggaccacttcctcatagccaagcctggctgcccgctgcagaagggtctcgccagcgttcttattgacaataagtctccgtgcttccggcggcatagggcgagactgggtggtctcctgaggggaacttgagcatggtag

SEQ ID NO: 4943 - DNA, 401 bp, Homo sapiens
  misc_feature (1)...(401): n = g, a, c or t
aaatcgtttgttttgaaaagtatatccttgaaaagtattttgatatagatgggaagattttcatagactggcatctatttttccacctactgtttaatgaagtaaactgttgaatgatgtaaactgttaaatgaagtaaacagttaaaactgatgacataaaagacaagcaaagcgaaggaaacatgttataaaagataagtattacagcattcttaagtatggtactttataaaatgaaaaccgggatgctgtcttctgagatatcaacatatttataaggagcacatgctatgtgacatacttcaggatgccaagaattttaattaaaactcaacttctataaagtgaatataaagctaataagaggaatatttttccacctctggcctanaccaccag

SEQ ID NO: 4944 - DNA, 497 bp, Homo sapiens
ccacaggagcagaggcagacctgggatgccccagtttctcttcagggatggatagtgacctgtcttcattttgcacaggtaagagagtagttagctaacctatgggaattatactgtggggccttgtgagctgcttctaagaggctaacctggaaactaagctcagaggcaaggtaataaagcacttcagggcttgctccccaagtgggcctgatttagcaggtggtcctgcgggcgtccaggtcagcaccttcctgtagggcactggggctagggtcacagcccctaactcataaagcaatcaaagaaccattagaaagggctcattaagccttttggacacaggaccccagagaggaaaaagtgacttgcccaaggtcgtaagcaggctactggcatggcaagagcccagcttcctgacggagcgcaacatttctccactgcactgtgctagcagctcagcagggcctctaacctgtgatgtcacactcaagagg

SEQ ID NO: 4945 - DNA, 580 bp, Homo sapiens; identical to SEQ ID NO: 216

SEQ ID NO: 4946 - DNA, 478 bp, Homo sapiens; identical to SEQ ID NO: 647

SEQ ID NO: 4947 - DNA, 461 bp, Homo sapiens
cctactatgtgccaaggaggggtaaggcagctagctctcacagacacaccccacagtgaaaatcacacacacacacacacaccccggcatctgtgctcactcacaggcagactgctcactttcttgcacctttcttgccatcacctcggccacacccacattcctccaataggcttgggaaccagcatggaagggtcaagtgtcatagaagaaaccccctagcctaccctactcccagacttcatgccagaggtttaactccacttcccttctgtttgcctgcctagatgctctccccttctccatccacaagcggtcagggcgacaggtaggcagactcctgagaaccagaagtccagaggctttgggtgtgtggagtgattccagtgccttcagattccttcaggctcctgggggtcccctctgccagccaccctatgttcagatcgtccatctgatgg

SEQ ID NO: 4948 - DNA, 479 bp, Homo sapiens
ctgtgagggtgtgactactgatgatgcttcaaaggaagaggaagcagcaatattttaggactgggtaccagcagagaaggcagggaggagggagcgggggatcaggctggagggcgcgagttcaccatgaggctgaggaacgattctctctcgtggggtccaagactagcccaggaaacagggagtcgcagggggactggagaggagacctgggccagcgggaggcagtgttctccagagggtcagatgcgtctctgattcaggccagaatacaggtcccgctggcctttccggatgggctcatagtctgggttgggaacaggtggtggcctctccttgttttgtcccctttgcctgccgccagcacccgctcctcgtgtcacaggcttggccttggcctttctattcttgctccagtagtaaaccagcagcagcaagcccccagtgatgcagatgtccactatgacaattgtggacct

SEQ ID NO: 4949 - DNA, 634 bp, Homo sapiens
  misc_feature (1)...(634): n = g, a, c or t
aaacaaaatatttaatgtctatacagtaaaattattcaaacttcaaaccagtattgaaagcagttggaaaccagctaatagtttcttaatctcagatttcgagatgaatgtaaactgcattcttttgaaatgtgcaagtgtttgattcatgccatttgataaacttctgccttgtagtcattgtttgatgggaccaacttgtaaagtatgagccttaaataaatctccatgctgaaaaatgtgttctaatgcaacacaaaaacatgaagtgactgcccagaggtagagttagtgtttaggtggaaagggagatgacagctttccaaagaaggacctaaaacacaccaagattgccttctacaggaattgctgggcaggtctccgactaaaggtcttatgatgaaaaggaagaaacaagcccccaacacaaggctctgatactactggtaaatgtaggagagaattaagaatctgttaattaaaatccaaacagagcttatttcagtagtcaagttacctgacatgataattatttctgcaggataattgatgttttatgttcttttttggactttatcttcttgcaaaaatttctacaaaaattggtttcttcatccttgnggngcttattcat

SEQ ID NO: 4950 - DNA, 306 bp, Homo sapiens; identical to SEQ ID NO: 484

SEQ ID NO: 4951 - DNA, 428 bp, Homo sapiens
ctgcatcgcggcccacgacaagagggggaggtacgggaccctgttcacgatggaccgggtgctgacccccccaatggggactgtcatggatgtcctgaagggagacaatcgctttagcatgctggtagctgccatccagtctgcaggactgacggagaccctcaaccgggaaggagtctacacagtctttgctcccacaaatgaagccttccgagccctgccaccaagagaacggagcagactcttgggagatgccaaggaacttgccaacatcctgaaataccacattggtgatgaaatcctggttagcggaggcatcggggccctggtgcggctaaagtctctccaaggtgacaagctggaagtcagcttgaaaaacaatgtggtgagtgtcaacaaggagcctgttgccgagcctgacatcatgg

SEQ ID NO: 4952 - DNA, 280 bp, Homo sapiens
  misc_feature (1)...(280): n = g, a, c or t
ctgtgctattggtcatagagctgcttatgtcctcttccagtttgtcaatgatcatagcaaaggctttgaagatggcattagtgggtccagccaaagngataattctctcaggacaattcccttctgagatgttgatacgtgcaccactctcctcgcgcatcttcttaactgattctcctttctttccgatgatactgccaacttcctttccatgcataagtagccggatggtgagagtgacatttaatccaccttcaatcacaccggtgtccatgtcgag

SEQ ID NO: 4953 - DNA, 349 bp, Homo sapiens
  misc_feature (1)...(349): n = g, a, c or t
gacctcgtgatccacccaccttccctcccaaagnactggaattacaggcattagccactgtgccnanccgaggctgncatttttaaccggctctggatgactctgatgcagccatcctggaccttggctgtggtctggtaactggaacccaatgacgtaatcaggngccatcgggggtcatgggaaagggggatccccaaggtctgaggtggactaggaaggctttctgaagaacctgggtctgttagggcatcanccaatcaaggtacaagtaaatagaggcaaaatgagggtttgaactgtgancagttggtcctggaaaagaaagaaaccaagagattatggggac

SEQ ID NO: 4954 - DNA, 426 bp, Homo sapiens; identical to SEQ ID NO: 218
  misc_feature (1)...(426): n = g, a, c or t

SEQ ID NO: 4955 - DNA, 253 bp, Homo sapiens; identical to SEQ ID NO: 362
  misc_feature (1)...(253): n = g, a, c or t

SEQ ID NO: 4956 - DNA, 291 bp, Homo sapiens
aaaggagcatctcagttacgtgtggcggacaaaaaaaaaggagcagactgtgacagaccattcccatcggccaagtggtcgaacccgacatccaagacccagcgagcagccaagctcagcgcaacctccgggcttctcgctctgactccaaaagggtgagtacgtcgccctcgcgcacggggccttttacattgcggatgatggatcggctcgtgtcgtccatgaattccacgcgcacctgcgtgcactgtccctgagaaccggtcctgcccaggaccttggtgaccctgg

SEQ ID NO: 4957 - DNA, 278 bp, Homo sapiens
  misc_feature (1)...(278): n = g, a, c or t
cctctagctgtgctgctcaagagactggatcagggtagctacaagtggccgggccttgcctttgggattctacctgttcctaatttggtgtggggtgcggggtccctggccccttttccacactcctcctccgacagcanctccctgggcagnggcctggtctcaccgtgtgcagccttgtggtttatgcttaaatgtacattttcctgctggtaaaaggagaaactgagaggtgtcctgcagaccggctgaccactccttttggagacggcaggagg

SEQ ID NO: 4958 - DNA, 566 bp, Homo sapiens
agagaggggtatgatggctaagaagcccccaaaaccagcccctcgcaggatcttccaggaaaggttaaagattactgctctacctttgtactttgaaggttttttattaatcaagcggtcaggataccgggagtatgagcattactggacagagttgagaggaactactcttttcttttataccgacaaaaagagtataatatatgttgacaaattagacatagtagacctcacatgccttactgagcagaattcaactgaaaagaactgtgcgaaattcacccttgttttgccgaaagaggaagtacaactgaagacagagaacacagaaagtggggaagaatggagaggcttcattcttacggtaacagagctgtcagttccccaaaatgtgtcactcctacctgggcaagtaattaaactgcatgaagtcctagagagagaaaagaaaaggaggattgagacagagcagagtacgtccgtggaaaaagagaaggaaccaactgaagattatgtggatgtactgaaccctatgccagcatgtttttatacagtgtcccggaaag

SEQ ID NO: 4959 - DNA, 498 bp, Homo sapiens
cctcaggggggcccacagcccccaaagctgagagtggtcgaagcggaggtgggggactcatggaagagatgaacgccatgctggcccggagaaggaaagccacgcaagttggggagaaaacccccaaggatgaatctgccaatcaggaggagccagaggccagagtcccggcccagagtgaatctgtgcggagaccctgggagaagaacagcacaaccttgccaaggatgaagtcgtcttcttcggtgaccacttccgagacccaaccctgcacgcccagctccagtgattactcggacctacagagggtgaaacaggagcttctggaagaggtgaagaaggaattgcagaaagtgaaagaggaaatcattgaagccttcgtccaggagctgaggaagcggggttctccctgaccacagggacccagaagacccgcttctcctttccgcacacccggcctgtcaccctgctttccctgcctctacttgacttggaatt

SEQ ID NO: 4960 - DNA, 189 bp, Homo sapiens
  misc_feature (1)...(189): n = g, a, c or t
tttttttttttttttttacactcaggttctaattttaatagggaaggaaaaagttacagctcagtgcaccatgaagttgaggcanagatggagacacctcagccccacctctntggaacaggaaagatgattggggagggagcacaggtcagncgtgggaagagggtcatggtggacatgggggtgggg

SEQ ID NO: 4961 - DNA, 396 bp, Homo sapiens; identical to SEQ ID NO: 217
  misc_feature (1)...(396): n = g, a, c or t

SEQ ID NO: 4962 - DNA, 145 bp, Homo sapiens
ctgcttcagcctgcccaacataccaagatggcaaccagacgataagaaactaccagagccggagccccagcccctttccctgccatccctgcaaaatgcctcgtctttggatgccaccagctcttcaaaggactccaggtcccag

SEQ ID NO: 4963 - DNA, 275 bp, Homo sapiens
ccttgggaagggggccaagaaaaaaagaacggccactctcctttctgtccttcccttgtgtggaggacagtgattgaaacaggggagttaaaaagccaggaagaaaagaaatcaattgcacatctctagttcgcaagcgtcaaagtcacaacaagtctatacacaacaactctctatctgtagatatgaaattccatcatgatagcacagcgcctgcttgcccctaaatgttcctttcttctgctaatcatgtcagttactatggatgggctgtg

SEQ ID NO: 4964 - DNA, 193 bp, Homo sapiens
aaaatgttagatttagaaaaatggcataataaccaacgtggagaagctgcttcaaatcaaggagacgggaggccagcttcattccatgggaggccagcttcattccagtaggttccgtttcacctggatgaaatggaagattttcttggaatgtataaattggcttagcaggaggcagaaaaccctttcacag

SEQ ID NO: 4965 - DNA, 394 bp, Homo sapiens
  misc_feature (1)...(394): n = g, a, c or t
ctgccagtagacccccggtcaccctgaggctggtggtccctgctagtcagtgtggctctctcattggaaaaggtggatgcaagatcaaggaaatacgaggagtacaggggctcaggtccaggtggcaggggatatgctacccaactcaactgagcgggccatcactattgctggcattccacaatccatcattgagtgtgtcaaacagatctgcgtggtcatgttggagtcccccccgaagggcgtgaccatcccgtaccggcccaagccgnccagctctncggtcatctttgcaggnggtcaggacaggtacagcacaggcagcgacagtgcgagctttccccacaccaccccgtccatgtgcctcaaccctgacctggagggaccacctcta

SEQ ID NO: 4966 - DNA, 166 bp, Homo sapiens
ccgggcaggtccttaggtgctacagctaaagtcatcaccgaccctgatatcctgaaaacctgtgtaccagacctaagtgacaagagactggaagtggttgggctggagggtgcaattgagatgggccaaatctataccaagctcaagaatgctggacgtcggctgg

SEQ ID NO: 4967 - DNA, 475 bp, Homo sapiens
ccagaggggcagggcacgctaggctggactaggagttaagagtactgtctaaccagtctggcttcttccttcttccagcagccagccctcccctcccattaaagttttactcccacatcctaaaagctcctaacttgaactttgtctaaatagtctctgagactgcatgtgaatttaatgttttttgaaaaagccttcttttttgtttggactatgtagcaatttgattctgccactcccttcactgtggcattcccctcccacccccgctctggcctagacaataagttaatgctagacaccacaaaaaagggcagacatggcagtgcagttttaatatacatatatgtagaatatatatgtacacacagttagcacggtcagggtggggaggggcatcttggggtaggcaggaggctggggtcactcactgtactgtagtgatgtggctaggaggtgttcacaagcccagggg

SEQ ID NO: 4968 - DNA, 519 bp, Homo sapiens
tggagtcgttgctgttgctgtttgtgagcctgtggcgcggcttctgtgggccggaaccttaaagatagccgcaatggctgaaaatggtgataatgaaaagatggctgccctggaggccaaaatctgtcatcaaattgagtattattttggcgacttcaatttgccacgggacaagtttctaaaggaacagataaaactggatgaaggctgggtacctttggagataatgataaaattcaacaggttgaaccgtctaacaacagactttaatgtaattgtggaagcattgagcaaatccaaggcagaactcatggaaatcagtgaagataaaactaaaatcagaaggtctccaagcaaacccctacctgaagtgactgatgagtataaaaatgatgtaaaaaacagatctgtttatattaaaggcttcccaactgatgcaactcttgatgacataaaagaatggttagaagataaaggtcaagtactaaatattcagatgagaagaacattgcataaagc

SEQ ID NO: 4969 - DNA, 226 bp, Homo sapiens
ccaagcagccagccactgcgatctaggagtgaattaccttcagtccttctgccccaccaccccataagctcccacccaggaggacaggggacctgccaaggacccagcgaggcagacaggatctgaatcaagctttgctcctccaggttctcagaaactcccaaaccctcttaatgcattcctcacagccctacctagcctgggaaaacgaaagacttgaggcgag

SEQ ID NO: 4970 - DNA, 571 bp, Homo sapiens; identical to SEQ ID NO: 363
  misc_feature (1)...(571): n = g, a, c or t

SEQ ID NO: 4971 - DNA, 447 bp, Homo sapiens
  misc_feature (1)...(447): n = g, a, c or t
ccatcaacacaagggcgctgaccagcacagcatacagggtggccttccctagcaggatctcatagaggatggtggcagacaggaccccttgctggtaggacactgttggcacggaggaaggacaggtgggtacctgtgcacaggtagctctggtctctcccaccctccaccctccagtgtctgtgagttcttcatgccttggttctaggtcaagaaccatgagagagggagaggaaaaggaagggcttacttacccgaggtaaagccacagtctgaaagaaagcagggagaggaaaataaatgagagaccttattttcataggcaattaaaagtaaagtcagatttgcagttggcacagactcccangcccanaccagcttcctctgacagcccagcacctcctttcttntgccatgcagatgtcagccacattgtccttgcaatcc

SEQ ID NO: 4972 - DNA, 293 bp, Homo sapiens
  misc_feature (1)...(293): n = g, a, c or t
aaatgttctcaccacaaaatgataagcgtgtgaggtgatggatatgccacttaccttgttttnatcatcccacaatatagacaggcattgtcactttgcattgtaccccangaatcttcacatttgcttttttgtcaattaaaaatagagacacaaaaggagagaggggagagcaatagactcttcacggaaccgngggcttctgcctccgggtaaaataaactgcaaaaaggattcccaggaaaccgttccctctttcagcccttggttacaggaagccggatttgggaaat

SEQ ID NO: 4973 - DNA, 414 bp, Homo sapiens
ctgttggctgaccagaataaactccctgctgagttcaagctttgaatggaatggatgcaaatgatgttgtttccattagagcaggtgctcacagcattctgattggcctgagcagaccgaggctatggctgttgggacaagcttagcatcctggacatcttgtcaaagaacctcactcacccctctggcctctacagccctcagaggagagaaaaccaattctccaacaaacaggtctctccaacatggtggtgctggcaggcttaggtttagaaaatcctgactgttaaaggcgtttgaatacatcacattcctatgcaaatgtttttaatctccagtttaatgtagtttatttttcctatatgtaaagtatttttatacggcttgtatcatgatagtttagcaataaaacag

SEQ ID NO: 4974 - DNA, 282 bp, Homo sapiens
cgacggctccttcttcctctacagcaagctcaccgtggacaagagcaggtggcagcaggggaacgtcttctcatgctccgtgatgcatgaggctctgcacaaccactacacgcagaagagcctctccctgtccccgggtaaatgagtgcgacggccggcaagcccccgctccccgggctctcgcggtcgcacgaggatgcttggcacgtaccccgtctacatacttcccaggcacccagcatggaaataaagcacccaccactgccctgggaaaaaaaaaaa

SEQ ID NO: 4975 - DNA, 377 bp, Homo sapiens
  misc_feature (1)...(377): n = g, a, c or t
ctgaaatgtctgcttaatggtgacgatggtgctattagcaggtgggtgagccagttcccaaggtacacgttcactatcaagagctaancacacctgctaacaactcagtctcctacaaacctgatgtttctccagcaaaacaaattaaaattaaacctaatggtacttctggctgaggctccagaggtccccaggagggagggtgtttgcgtggagggggccttggttccacagaatggtggcttatggacgcttttaagacactaaagaaacccacatggtaaaaggctgggtgcggtggctcacgcctgtgatcccagcactctgagaggctgaggcgggcggatcacaaagtcaggagttcgagaccagcctgg

SEQ ID NO: 4976 - DNA, 420 bp, Homo sapiens; identical to SEQ ID NO: 364

SEQ ID NO: 4977 - DNA, 212 bp, Homo sapiens
ccaggctgcactgtggctagctcaatgtttgttgcattcagcttctcctccattacttgtttgaggatgatgagtgaagacttgatggcttctttcaaagtcatagacttgtggtaaacttcttgcaaggagctctgggcaccctctgaagcagagccaattgctcgagcatcacactgtacaaaggtcccagatgggtccatatgaaacag

SEQ ID NO: 4978 - DNA, 274 bp, Homo sapiens
cctggctgagcaggcagagcaccctgggaccccagggcagaaggacccccgccctccagtccccaagacccaggcccgtctccactcatacacgccacctacatgtgacgtcagccctgaaaaggtaacaggaaagttcagaacaaaaacaaaaccccaaaagtaaaaaggctacgtgtagcagagtaataccggaaacgttatatacacaggcggtgatggccccctcggaagtgtccgggtcacttagggggcactgcagaggtccctgtgg

SEQ ID NO: 4979 - DNA, 460 bp, Homo sapiens
  misc_feature (1)...(460): n = g, a, c or t
aaatttcatagattttcatgtgtcataaaatattgatcttttcttgatttctccccaaccacataaaaatgtaaaaagtacattagtttgcatccacactaaaacaggcagtgagtcaaatatggcctgtgggccatactttgccaacccttggcctacagtanaaaaaaaacccctcagaattccttatgggctttgtgttattttgtcacgtggagccaccttaggctggggaagtagaaagcacagggcttttgggcattaggtcctangttccagttctggccctaccatctaccagccgggtagccttggacataaaattcaaactctctgggctttactaccatcatctataaaatggggcaataacacctagatcacagagttgtcatggcaattaagtgagctaatgtatatagagctcgtggcaccagtatctggcatacagtaggcactc

SEQ ID NO: 4980 - DNA, 398 bp, Homo sapiens
  misc_feature (1)...(398): n = g, a, c or t
aaaaacaaaatcttaaattactaggagtatatttacaagattaattacattttaagccagcacaccatggatgtacatgaagggccactcagtgtccctcgctgggacaggttgtgtgacctgcccaaggggctccggctcatttgccaaagtcaagacgacgaccaggtcttctgactgctcagcccaaccaataatgaaaaaagtatcagagatgtgtcatatccattttgctaacnagcaattacatgcctttttagtgnttaagagaagccttaattttcctgggatatctccgtaaaatcattctggaatttgattttgaaaattctttaagaaaaaaaaaaaagcttgtcacccccatgagacctgctgtctctcatgtctgcagggacagg

SEQ ID NO: 4981 - DNA, 302 bp, Homo sapiens
aaataaccttactttcaaaacttagtttaaggttgaacatcccagtgaccagattatgattaacagattgaaaaatgataaagcctgaagtctaagtttatccagcagggtgactcatgcttctttgtcatcctcccacggcagcaatttgttccatgtgaatgctagtaacaggcatcatacactgttaatgctaatatgtaggagtcagttggaggcaaaaacccctatcacgattagcattaacagcatacagcctacagcaagccttcagcactcagaggatgaggcataaagaattt

SEQ ID NO: 4982 - DNA, 171 bp, Homo sapiens
aaatacagtcatttcgtaatgaggagtgggcaggctcagggctgcactccctactcctcaccctcatctatagtggtagagatagggacagggtggaaagaagagaactgactagcaacggcctgactctgtgtgtgtgtgtgtgtgtgtgtgtgtgtgtgtgtgtgtgtg

SEQ ID NO: 4983 - DNA, 286 bp, Homo sapiens; identical to SEQ ID NO: 220
  misc_feature (1)...(296): n = g, a, c or t

SEQ ID NO: 4984 - DNA, 475 bp, Homo sapiens
aaaagaaattcagaaactaagcggttggagaggggcattggaaatagagggggatgctatgagatgggggttgggagcagagaagaaactgcaggagggcaaagtgtaactagcaatataccttctgtgatgctccagaaacacatgtctgctaagattaacttgattggagtttcttatgaaacaggctgatcatcaagatttttaactcaggtttcagtgaaaaaattggaaacttttacaagaaagatttgagaagtagaaggcaggcagcaaattttccagatattatgcttgcatttcaaattcctgtttcaggcttttcaagtaggcatgcacattcccaaagccatgatatttggctaaatacacaaggaccccagtcgcacaccgtccatctcgctgccggcagaaactgcagttgcagattcctcgacaaggcgggcaatgccagttcggatccagcagagcatcc

SEQ ID NO: 4985 - DNA, 536 bp, Homo sapiens; identical to SEQ ID NO: 221
  misc_feature (1)...(536): n = g, a, c or t

SEQ ID NO: 4986 - DNA, 221 bp, Homo sapiens
cttttcttacttaaacttcacaccagaaccttctgacattttctcctgcattgtgactcacgaaattgaccgctacacagcaattgcctattgggtaccccggaacgcactgccctcagatctgctggagaatgtgctgtgtggcgtggcctttggcctgggtgtgctgggcatcatcgtgggcattgttctcatcatctacttccggaagccttgctcag

SEQ ID NO: 4987 - DNA, 582 bp, Homo sapiens
  misc_feature (1)...(582): n = g, a, c or t
aaatatttattttcaaaacccctaaaacactggagtatgcttcacctagaaacagattacaggacgaatagctataatgaataagcaatacaatttgtatttgggatgcaattgtgttgtaaagtttcaaataatcaatttataaatttgttgcttttacttttacaaaaatattcatttaacccataacatgagttgcaaaattatctccagacttctacagatgattataaactgtaattgtgtttcagttacacagcaggcgaaaaatttaactgaaccgttacttcaaaatacaatgcattaaaaataattgttacaatataggcaccaataaaaagaattttcttggcatacaacaccacaacaactttctcaagtatctgtattatgtaaattaaaaagaggatgtaatggacctcggccgcgaccacgctaagggctgatgaatcccctaatgattttggtaaaaatcattaagntaaggnggatacacatcttgncatatgatcaaatggtttcgcgaaaaatcaattaatcagacaacaagatgtgcgaactcgatattttanacgactctnt

SEQ ID NO: 4988 - DNA, 414 bp, Homo sapiens
  misc_feature (1)...(414): n = g, a, c or t
ctgaggaggccaagtacaagttgtgcaaagtgagaaagatctttgtgggcacaaaaggaatccctcatctggtgactcatgatgcccgcaccatccgctaccccgatcccctcatcaaggtgaatgataccattcagattgatttggagactggcaagattactgatttcatcaagttcgacactggtaacctgtgtatggtgactggaggtgctaacctaggaagaattggtgtgatcaccaacagagagaggcaccctggatcttttgacgtggttcacgtgaaagatgccaatggcaacagctttgccactcgactttccaacatttttgttattggcaagggcaacaaaccatggatttctcttccccgangaaagggtatccgcctcaccattgctgaagagagagaca

SEQ ID NO: 4989 - DNA, 374 bp, Homo sapiens; identical to SEQ ID NO: 365
  misc_feature (1)...(374): n = g, a, c or t

SEQ ID NO: 4990 - DNA, 431 bp, Homo sapiens; identical to SEQ ID NO: 219
  misc_feature (1)...(431): n = g, a, c or t

SEQ ID NO: 4991 - DNA, 530 bp, Homo sapiens
ctgaagggctgcaggaaatattttatgttctgctaattttactctttcagaaagagttgcgacagtatcacccctcttcacgggaacagcttcttgcaaaataatctgtccagcatccacatcttcagctacaaagtgtacagtgcacccagtaactgtgactccggtttccagggcttgctcatgggcatttgaacccttaaaagaagggagcaaggatgggtggatattgagcatttttccattccacttttggacaaaggggccagaaagaattctcatgaatcctgcaagacagactatgtctatggagaactcttcaaggactaggtcaattgcactgtcaaattctacacgatttttatacagtttatgattaattactctagtgggaataccagctctttccgctttatctaacccagctactgcggctttgttggagataacaatatcaatttgtgcagagctatttggttcccgagtactgtctataagtgcttgcaggttcgatcctgttccagatatta

SEQ ID NO: 4992 - DNA, 565 bp, Homo sapiens; identical to SEQ ID NO: 222
  misc_feature (1)...(565): n = g, a, c or t

SEQ ID NO: 4993 - DNA, 529 bp, Homo sapiens; identical to SEQ ID NO: 223

SEQ ID NO: 4994 - DNA, 379 bp, Homo sapiens
  misc_feature (1)...(379): n = g, a, c or t
aaattagccaggcatggtagttggaggctgagacaacagggtcatttgaacccaggagttcaaggcttcagtgagctatgattgcaccactacattccagcctgggtaacagagtgagaccccgtctcaaaacaaacaaacaaaagtaacaactaaacaaaagagaataaagtacttgctcaggaggatagagaagggctaggggagagggcagaaaaggtttgtacaacttagagggcatgaacagcagcagcaccttgtttttttgaccaaacaagaaaaggcccccagagctcacgcacagctatcatcagggccggtgccatggcctggctcctcgggtgacacttncccatctgacacatggcacgagggctca

SEQ ID NO: 4995 - DNA, 266 bp, Homo sapiens
  misc_feature (1)...(266): n = g, a, c or t
cggtgtgattgaaggtggattaaatgtcactctcaccatccggctacttatgcatggaaaggaagttggcagtatcatcggaaagaaaggagaatcagttaanaagatgcgcgaggagagtggtgcacgtatcaacatctcanaagggaattgtcctgagagaattatcactttggctggacccactaatgccatcttcaaagcctttgctatgatcattgacaaactggaagaggacataagcagctctatgaccaatagcacag

SEQ ID NO: 4996 - DNA, 274 bp, Homo sapiens
aaaagagaagggttgaaaaagattgtgtgtgtgtgtgtgtgtgtgtttaattggcccagggttacttaaataaatcataaccattttgccacattctgtaactgtttagttaaggtcaaattaagtttaccctatggattttgtttcatcttttgtttcgtgtatatactgtttgcctttttcataaaaatcttggatttgttatatattgttcctgttatttttgacatctttgctattgtaaataaattactattttgttttaagtgaaaaa

SEQ ID NO: 4997 - DNA, 486 bp, Homo sapiens
  misc_feature (1)...(486): n = g, a, c or t
aaaaacaaaacaaaacgatccttttgattgtgtggtgcagacgcaggactgaagccacaggcttttggggtgctgtgagcccagggctttgctcagctcacagctagcgcggcgggcagagcaacccttcggcccaagccatcctcgcagcttgcacagaagcttcctgaacctaaggganccgttcccagctctccttaaattcccagtccccaccctgggcctctctccctaacgatcttgtcgctttgggagcccctgaagtgaaccctgaaatactccctccgtcaactctgggctcagacctttgcccttctctgtgtcacaaggaaatttcggtcaagagggtgggaacaggtggtttcagaccgtgcagcaaagccactgccaggtaagttttaaggcaaattttatctcttcttattcagtctgagccggacctaaccttctcaccaccgagcaatcctgcctatgctggacatgcat

SEQ ID NO: 4998 - DNA, 233 bp, Homo sapiens
cctccttccttcagtgcctgctgaaccatcttagggtcactcacaccctctgtaattttaagatgtatgtggtggccggcgggaagaccagccccgacagcacctcctgagaaagtcagccaagggcctaccctgatgccagagtccttgagctgtcagttcccacagttgctcctttgtttgctcttctcagcctcggccagatttacagtccaggcagcaaaatctcaagg

SEQ ID NO: 4999 - DNA, 392 bp, Homo sapiens
  misc_feature (1)...(392): n = g, a, c or t
aaaagtttttctatgatgatgcattaacaatacaaaaatattttgaacactacaataatctttttctcaagacttcttgcagtgttacactagaatatgtgatctttggattctgagaaaccagtggctaaagtaggaactaaaggctttttttgaggggtgtgtgaatacatggacagccctttttttttttttttttttttttganatgcagtctccctgttacccanactggagngcaatagcgccatctcggntcactggaacctccgcctcccgggttcaagngattcttccgcctcancctcccgagtagctgggattacatgcgcgcaccaccacgtccggctaatttttgnatttttagnanatacagggtttcaccatgttgg

SEQ ID NO: 5000 - DNA, 337 bp, Homo sapiens
  misc_feature (1)...(337): n = g, a, c or t
ttttttttttttttttccaanaaggggacaaatgtgggaggccatcactgccccattttattgatgcaggctggacaggaggactcaccacctgagctggggatactcaggtcctggggtgctgagganatggggctgcatctggagagggtgctgttggggtgtactctcatctggagagggtgctgttggggtgtactctcatctggagagggtgctgttggggtgtactctcatntgganagggtgctgttgggggcactcccatntggaaagggtgctgttggggtgtactcctgggaaggcaggggccatanaggagcgggagatgtgtcaa

SEQ ID NO: 5001 - DNA, 496 bp, Homo sapiens
  misc_feature (1)...(496): n = g, a, c or t
aaatccttacatgatttttgaaaccttattaactgaaaatattgcttgctgataaaacttgctcaaatgctattgctgaatgtacaagtcactgattatgccaatacaacaaagataaccacatgtttgaggattgcaatgtgccagacattcactgaaaaaaaaaaaaacacacaactaaacaaaatccacacaacaaacatctganaatctggacacttcacatcagtgttttgaagtgtttcattaatatcttaagacaagtgtatcaaaaccttggcatgatttaatttcaagtcgccaattttgtttttactaacatcagaaagttatggctacactgccaacgccgggtctgcttaatttgacttaagagtttaatatgacttaaacattaaaagctcacactaccccgaaatatataatttcacgcatacggngacattcaacattcaagtgccagtgtttttgtactgncttttggtcaagtttcttt

SEQ ID NO: 5002 - DNA, 297 bp, Homo sapiens; identical to SEQ ID NO: 224
  misc_feature (1)...(297): n = g, a, c or t

SEQ ID NO: 5003 - DNA, 88 bp, Homo sapiens
  misc_feature (1)...(88): n = g, a, c or t
ctgaggtggtcttgcttgtcatcgtcggtgaagaaggacttgttgnggnacgtgcctcncgccagcatgcccttgggagcctcctcaa

SEQ ID NO: 5004 - DNA, 327 bp, Homo sapiens
  misc_feature (1)...(327): n = g, a, c or t
aaaaacattttttttaatgttggtaacttttgcttcctctacctgaacaaagagatgaataattccatgggccagtatgccagtttgaattctcagtctcctagcatcttgtgagttgcatattaagattactggaatggttaagtcatggttctgagaaagaagctgtacgttttctttatgtttttatgaccaaagcagtttcttgtcaatacacggggttcagtatgacacagaatcatggacttaacccgtcatgttctggtttgagatttagtgacaaatanaggtgggaagcttataatctaattttaggaggaccaaatt

SEQ ID NO: 5005 - DNA, 526 bp, Homo sapiens
  misc_feature (1)...(526): n = g, a, c or t
ccaacatggtgaagccccatctctactaaaaatacaaaatttagctgggcgcagtggtgggcacctgcaatcccagctactgaggcgggagaatcgcttgaacctgggaggcggattgcactgagccaagattgcaccaagattgcaccactgcactccagcctgggtgacagaccgagactccgtctcaaaaaaaaaaaatcttgtttccgtagagtgcctcggggaacctagtttgggaaatgctcatttagggacctgtcgtaatgtgtgcaggggtcctctcacagaagtgtcctaattaaccacacacacttctgctgctggagctctgagcacaggcagaatgacactaaaatattcagcattgaaaggacacaagaagggaaccatttgcagtttcaaaatactgnttcacgccaggctgcatgttgccttacgaacgctgggcaccttggcgtctctcatccaaactcttccaaaactcccacttattctttgctcccttgatggaaaagcagtgatg

SEQ ID NO: 5006 - DNA, 421 bp, Homo sapiens
  misc_feature (1)...(421): n = g, a, c or t
ccaagacagctcgtttctggagagtatgagggtgtgttttcttattgtgaaaggaactaccttctcttagagggtaggaagaatgtggtgtgtgtgtgttctcataaagcaactggacattataggtgcccaggtcatctataaaaacgatccttgggctgtgtaaaaatgaagtggcttttcagtatcctctttcacacttgctgcttcgggagactatgcaatgatgggaaggtgattgcccctttatttcattcagtgccatggtccctgttgttgtagtaatttatttgtttagttcattttttttttcttaacagtcaaggggaagagtgattcctcacactgctttcaagctggactgagccagtctcattctgggaaaganatgctgtgtccagaactcagcagctccatctat

SEQ ID NO: 5007 - DNA, 217 bp, Homo sapiens
  misc_feature (1)...(217): n = g, a, c or t
ctgcggggtctggatccgagtctgccctctccgttacctaatctcggacctcagggcccggccctcacgcctgaacaagaaaacatactgcataccacccagacagactgctataacaatctagctgcttgtctccttcagatggagcccgngaactacgaacgagtgagagaatatagtcagaaagtcctggaacgacagcctgataatgccaagg

SEQ ID NO: 5008 - DNA, 165 bp, Homo sapiens
  misc_feature (1)...(165): n = g, a, c or t
ttaagtttgatttttttttcttttttcctttcttaaaaaaaaaaaaaggaagtaaataaattaaattgccaacaatgtggctgagatagccatgatcangccattcttaaaaaaaagaggggggggggcagtaggtggagtttgngaaatataaacaaacaatgg

SEQ ID NO: 5009 - DNA, 490 bp, Homo sapiens
  misc_feature (1)...(490): n = g, a, c or t
aatttcatacaaacaccaagaccaaaatcctaagtattggtattgcgtctcaaatttttcccattaacttaaaaaaaaaaaaagcttaaacttacgtgccttacaggttattaaatgaaactagaattaacaaacatgccaaaatgtttcacttttaatagtagacacagctcctatattgttttacaaaaaaataaaagcatgtctttcaacatgcatccaaaacagtgttcaatttaacgtggcaaagggcaacatttaacataattcaactgcttttacctaaatacgcttactgcttaagtacatcctataactaacttgagaaaagctggaacttaagtttaacagttatagtttactcagcttcactgttacatcctanatgagtattgnattcaaaaatactgggccttaagtcttcataacaatnnctgatttcnacttagagtaagcataaatcacaagcttgtattgcanaaactgttaa

SEQ ID NO: 5010 - DNA, 258 bp, Homo sapiens
  misc_feature (1)...(258): n = g, a, c or t
ctggggacnngtgcttgctgaaacccaggagctgaacagtgaggaggctgtccaccttgcttggctcactgggaccaggaaagcctgtctttggttaggctcgtgtacttctgcaggaaaaaaaaaaaaggatgtgtcattggtcatgatatttgaaaaggggaggaggccgaagttgttcccatttatccagtattggaaaatatttgacccccttggctgaattcttttgcanaactactgtgtgtctgttcacta

SEQ ID NO: 5011 - DNA, 402 bp, Homo sapiens; identical to SEQ ID NO: 370
  misc_feature (1)...(402): n = g, a, c or t

SEQ ID NO: 5012 - DNA, 389 bp, Homo sapiens
ctgtctgtactagacaaggttaccaagtgcggaattggttaatactaacagagagatttgctccattctctttggaataacaggacatgctgtatagatacaggcagtaggtttgctctgtacccatgtgtacagcctacccatgcagggactgggattcgaggacttccaggcgcatagggtaggaccaaatgatagggtaggagcatgtgttctttagggccttgtaaggctgtttccttttgcatctggaactgactatataattgtcttcaatgaagactaattcaattttgcatatagaggagccaaagagagatttcagctctgtatttgtggtatcagtttggaaaaaaaaatctgatactccatttgattattgtaaatat

SEQ ID NO: 5013 - DNA, 514 bp, Homo sapiens
ccagacagtgagcggtttggacgccaactggttagagcacatgagcgaccacttccggaaaggaggcatgctggtgaacgcagtcttctaccttggaatagtgaatgattccttacatggcttgacagatggagtattcatctttgaagctgtttccacagaagatagcaaaaccatacagggctatgatgctattgtggttgaacaatggacagtcctggaaggtgtcgaagtgcagacagactacgtgcccctgctgaactcgctggcggcctatggctggcagctcacctgtgtgctaccaactcccgtcgtcaagactaccagcgaggggagtgtatccaccaagcagattgtctttcttcagagaccttgtctacctcagaaaatcaagaagaaggaatcgaagtttcagtggcgattctccagagaagaaatgcacaacaggcagatgaggaaatcaaaaggtaaactcagtgccagagacaaacaacaagcagaagaaaatgagaag

SEQ ID NO: 5014 - DNA, 381 bp, Homo sapiens
ccacccagactgaccagcgggagatggggccccacagggcctcctgcgtcaatgccatggaagggaagaaactggcccaggatgtcagagccaagggctacctggagtgctcagcccttagcaatcggggagtacagcaggtgtttgagtgcgccgtccgaactgccgtcaaccaggccaggagacgaaacagaaggaggctcttctccatcaatgagtgcaagatcttctaaaccccaagagacttcacacaacacttatgtatgcaccccaaagactaatggggagagggagggccgggaagccaggaaagcttggtgttttctctgggtacaccccaagcagcgtctccttttggatacagttattgatgaggcttgg

SEQ ID NO: 5015 - DNA, 524 bp, Homo sapiens
cctcacctcctcatttcatcacactggggatgaggtttcaaccactaatttttggtgggaggagacaaatatttagaccttagcaaagtacaacaaaatgttcctgtggttgctttctgatattcacccaatcaccctgaagggacaaacctttctaccacttcaaagagggagacaatcttactagcatgtaataatcagcactgttacccacagctcaagccctcaccctagaaacaaagccaagaccactaagtgggtaggtgtcctggctaagtgtggacacagggcacaatcagagatgtgaacacacaaagagcttcaccagcttctcacagaccctgcttgcctttcgaagtgatgaatacacatggcctggtcattccagagactaataagacccctctggcccattacctgaaactggggacccaataccatgcagatggactgagtcattacaaaggcaattaaatgcccaactccataaccaggtgccaacatgtaggcttttgtgcatggat

SEQ ID NO: 5016 - DNA, 432 bp, Homo sapiens
ctgaggccaccacacattacatacattcacgcacttcataaaaaacacctgagggagagaccctggctttgattagcaaataaggtatgaacctgggccagtgcccacattcacacagaccctggcccagggacatcctcctcatatgaagcattaaggcacatgctgtactgtgagccagcactccctgacctcagggtgtgtgaggagttggcactgtagagagaaaccaagactcttcctcaatgcctgccttattctgagcacccacccttagctctgataaggatatcctgagaccacattcaagatccaaaacctttcctcatagatgagggccgtcacccctgcaaacatgaccctgttctgtttgcagggtctccaagattttcacttctgagacaaaaattgaggagacttctgtctgcacca

SEQ ID NO: 5017 - DNA, 328 bp, Homo sapiens
  misc_feature (1)...(328): n = g, a, c or t
cctacagacttatttnttcttggacacacccacggtgcggccacggcggccagnggtcttggtgtgctggcctcggacacgaaggccccanaagtgacgcagccctctatgggcccgaatcttcttcagtcgctccaggtcttcacggagcttgttgtccagaccattggctaggacctggctgtnttttccatcctttacatccttctgtctgttcaagaaccagtctgggatcttgtactggcgtggattctgcataatggtgatcacacgttccacctcatcctcagtgagttctcccgccctcttggtgaggtcaatgtctgct

SEQ ID NO: 5018 - DNA, 511 bp, Homo sapiens
  misc_feature (1)...(511): n = g, a, c or t
ccaaaagtttagcatattctgcagcctcttctttatttttcttggtacgctgcttcttcagagcaatacgccgccgtttgtgctgcaggacacgtggagtaacaagacgctgaatcttgggtgctttggtcctaggtttcttaccttctttatttaagggctttcttacaacatactggcggacatcatcttctttagagagattgaaaagtttgcggattctgctagctcttttggggcccaggcggcgaggcactgtggtatcagtcagtccagnaatatccttctctcctttttttacaataaccaagttgagaacgctcagatttgcatccacaatgcaaccacgaactgattttctctttctttctccagttctccttggtctgtaacaggaatgccccttactcagtagcaggcggacacggccatgggtcaagacaccctgcttcatggggaaaccttgtttgncgntcccaccactgattcggaccacataacccttccattc

SEQ ID NO: 5019 - DNA, 183 bp, Homo sapiens
  misc_feature (1)...(183): n = g, a, c or t
aaaaccacttnacntgaaaatgaattttctgcaaatgtattctttataaatgtanagcatgcaagaatgtataaacataacagaagcatttgtaactggntaactcagttgacagcttgcaagataagtttttgttttgggaggaattggaagtctcccagattttgctggagtctttgctta

SEQ ID NO: 5020 - DNA, 217 bp, Homo sapiens
  misc_feature (1)...(217): n = g, a, c or t
ccatgagtgacaggtggcctcttggtgggagaggtggggcagggggaaggcagctcccactanaccagggcagtatttaggggaaggaggcagattggagcagttggctgccaacacctggcctcactcagggagaggggccttgggcctggatgatatctgggtgaggtacccacaccatctgctgcaacctctgtgtatccattatgggctcacg

SEQ ID NO: 5021 - DNA, 434 bp, Homo sapiens
  misc_feature (1)...(434): n = g, a, c or t
cccaggctgactccttctccctgactgcaagggctcactccctcctncaagctcccacaatgcttcatggctcntgccgcttacctagcttggcctagagtggcaaatggaacttctctgatctcccccaactagactggagcccccgaaggatggagaccatgtctgtgccatctctgttncccctgttttcccacatactangtgctcaattcatgcctgtgaatggcgtgagcccataatggatacacagaggttgcagcagatggtgngggtacctcacccagatatcatccaggcccaaggcccctctccctgagtgaggccaggtgttggcanccaactgctccaatctgcctccttcccctaaannctgccctggtctagngggagctgccttccccctgccccacctttcccaccaagaggccaca

SEQ ID NO: 5022 - DNA, 370 bp, Homo sapiens
  misc_feature (1)...(370): n = g, a, c or t
gccgccntnaatgacncctatngggttccaatancctnatgtncaaatntgactcgttagcaaatccncccaactnaacatcggtcatnttgacnttgcaggatnttcagcaagtntgaagtttttaatcgggaaggattttntnccgttnctgaacaaataaaggttctttgtancaatggctggaaatgcaacatganccctttnttcacnccaaaagaactcataaatagttcaccgggngaaccaaanactttntttttcaaaagcaggtaacnccaaagtnctntggggtatccatnttcgtngcaaaaatgataattnctgnaattttccaaacatcaaatgaagggggatcaatggttaccac

SEQ ID NO: 5023 - DNA, 471 bp, Homo sapiens
  misc_feature (1)...(471): n = g, a, c or t
aaatttaggacacggtacattttccactgaaaatttacaatcatccaacataatgcacaccacccctcaaaggtaacattagctcatatacaaaatcatggaaaacctcacaacatccttggaaggtagatattgttatatccttacaaaaatttaatacacccattaacattcctatttcaaatagctcaatcgatatcaacacataagacagcccacaattgtgatacagnattaagaagaaactcaggccagccgcggtgcctcacgcctgtaaccccaacactttgggaggctgaggcgggcagatcacctgagcccaggagttcaggaccagcctggacaacatggtgagaccccgtctctacaaaaagtacaaaaattagctgggtgtggtgacccacgcctgtagtcccagctagttgggaggctaagacgggaggatggctngttgcttgagcccaaggaggt

SEQ ID NO: 5024 - DNA, 465 bp, Homo sapiens
  misc_feature (1)...(465): n = g, a, c or t
cctattctttctgtgggacagtggagtacatggcccctgangtcgtcaaccgccagggccactcccatagtgcggactggtggtcctatggggtgttgatgtttgagatgctgacgggctccctgcccttccaggggaaggaccggaaggagaccatgacactgattctgaaggcgaagctaggcacgccccagtttctgagcactgaagcccagagcctcttgcgggccctgttcaagcggaatcctgccaaccggctcggctccggccctgatggggcagaggaaatcaagcggcatgtcttctactccaccattgactggaataagctataccgtcgtgagatcacgccacccttcaagccagcagtggctcagcctgatgacaccttctactttgacaccgagttcacgtcccgcacacccaaggattccccaggcatcccccccagcgctggggcccatc

SEQ ID NO: 5025 - DNA, 485 bp, Homo sapiens
ccttgaaccaagtcacccagagagcctcccggagatcagactcagcctcctcagagcctgttgggatatatcagggtttcgagaagaagaccggagttgctggggaggacatgcaagacaacagtgggacctacggcaagatctgggagggcagcagcaagcgcaacatcaacaacttcatcttccacaaggtcctgggcaaaggcagcttcgggaaggtgctgcttggagagctgaagggcagaggagagtactttgccatcaaggccctcaagaaggatgtggtcctgatcgacgacgacgtggagtgcaccatggttgagaagcgggtgctgacacttgccgcagagaatccctttctcacccacctcatctgcaccttccagaccaaggaccacctgttctttgtgatggagttcctcaacgggggggacctgatgtaccacatccaggacaaaggccgctttgaactctaccgtgccacg

SEQ ID NO: 5026 - DNA, 297 bp, Homo sapiens
  misc_feature (1)...(297): n = g, a, c or t
aaaaaaaaaataccctaagtactctgtttacttctggtgaaacaaaaccagtcattagaaatggtctgtgcttttattttcccagactggagtggcttttctgaaacacacacacacacacacacacacacacacacacacacacgtacacacatccctcacttctcttaagccaagaagtttgctttccctagctgcagtgtagatggctcttgtttttgtttttttgntttaatcatttggcattcacatgtggctgttaatatgtgcttgtttttaattaaaacaagaagcttt

SEQ ID NO: 5027 - DNA, 411 bp, Homo sapiens
  misc_feature (1)...(411): n = g, a, c or t
caggaaacaaacactgcttgatttgaaatgaggtattcgtatacaaagcacactattgcnaagggtatgaaaggaagaacgtccgaacatgggcccctgccccaaccaatgcaggccanggctgggggcagccaagcaaggcaggctctcttccctaggtgattttctcagcanaacagacttatgagttgatgcngtgtctggaggacttgacgtcaanaagacctgtgcatggagaatctgataccnagcanctccaggatgatnacatngagaccaccaaggtggaaatgctgagactttctctggcncgaaatcttgctcgggcaattataagagaaggctcactggaaggttcctganaactgcttcaatgtggtatctttgtatggcaatgtatatagatttttt

SEQ ID NO: 5028 - DNA, 438 bp, Homo sapiens
  misc_feature (1)...(438): n = g, a, c or t
ctgtttcccagactccaaaatacctggtcacacagatgggaaacgacaagtccattaaatgtgaacaaaatctgggccatgatactatgtattggtataaacaggactctaagaaatttctgaagataatgtttagctacaataataaggagctcattataaatgaaacagttccaaatcgcttctcacctaaatctccagacaaagctcacttaaatcttcacatcaattccctggagcttggtgactctgctgcgtatttctgtgccagcagccaacccaccttggggggctctggaaacaccatatattttggagagggaagttgactcactgttgtagaggacctgaaaaacgtgttcccacccgaggtcgntgtgtttgagccatcagaagcagagatctcccacacccaaaaggccncactggtatgcctgg

SEQ ID NO: 5029 - DNA, 461 bp, Homo sapiens
  misc_feature (1)...(461): n = g, a, c or t
cctactatgtgccaaggaggggtaaggcagctagctctcacagacacaccccacagngaaaatcacacacacacacacacaccccggcatctgtgctcactcacaggcagactgctcactttcttgcacctttcttgccatcacctcggccacacccacattcctccaataggcttgggaaccagcatggaagggtcaagtgtcatagaagaaaccccctagcctaccctactcccagacttcatgccagaggtttaactccacttcccttctgtttgcctgcctagatgctctccccttctccatccacaagcggtcagggcgacaggtaggcagactcctgagaaccagaagtccagaggctttgggtgtgtggagtgattccagtgccttcagattccttcaggctcctgggggtcccctctgccagccaccctatgttcagatcgtccatctgatgg

SEQ ID NO: 5030 - DNA, 258 bp, Homo sapiens
aaaagtttgaagactctcacaggtaagtgcagctcaggatcctgtgagtgcagcagaaagtcttaagaaatggcaggggctggttgaacccagattttccattggctgagcagatatccccagaggcgtagaaaattaaatttgttttatgttgttccaaaagaggagaactgaggccagaggagcacacttctgagacactcatttttgctgggtagaggaactctctggcaagcaggaccatcgatattagagcag

SEQ ID NO: 5031 - DNA, 133 bp, Homo sapiens
aaagcaagaaacagaatgcgagtaatcagaaagcactagcaggcatcagttaatccaagatactagctcttagttccaaaagcacttgcaaagaaaaccttttggggggaaggggtggagagggatggaagca

SEQ ID NO: 5032 - DNA, 187 bp, Homo sapiens
aaaagtcaactggattgcccagcagtttagatgcatgtgttttgttctttatcttatccacattgaagatgtaagtaggtcatctgaaagcatcgggtttgattacaccacataatgcatgtctttctgaagttaagtgttggtgttacacaaatggttcttatctcagaagcagagaagctgacag

SEQ ID NO: 5033 - DNA, 363 bp, Homo sapiens
  misc_feature (1)...(363): n = g, a, c or t
gagatgctgacgggctccctgcccttccaggggaaggaccggaaggagaccatgacactgattctgaaggcgaagctaggcatgccccagnttntgagcactgaagcccagagcctcttgcgggccctgttcaagcggaatcctgccaaccggctcggctccggccctgatggggcanaggaaatcaagcggcatgtcttctactccaccattgactggaataagctataccgtcgtgagatcacgccacccttcaagccagcagtggctcagcctgatgacaccttctactttgacaccgagttcacgtcccgcacacccaaggattccccaggcatcccccccagcgctggggcccatcag

SEQ ID NO: 5034 - DNA, 543 bp, Homo sapiens
ccacagaagttgctgctgacgctctgggtgaagaatggaagggttatgtggtccgaatcggtggtgggaacgacaaacaaggtttccccatgaagcagggtgtcttgacccatggccgtgtccgcctgctactgagtaaggggcattcctgttacagaccaaggagaactggagaaagaaagagaaaatcagttcgtggttgcattgtggatgcaaatctgagcgttctcaacttggttattgtaaaaaaaggagagaaggatattcctggactgactgatactacagtgcctcgccgcctgggccccaaaagagctagcagaatccgcaaacttttcaatctctctaaagaagatgatgtccgccagtatgttgtaagaaagcccttaaataaagaaggtaagaaacctaggaccaaagcacccaagattcagcgtcttgttactccacgtgtcctgcagcacaaacggcggcgtattgctctgaagaagcagcgtaccaagaaaaataaagaagaggctgcagaatatgctaaacttttgg

SEQ ID NO: 5035 - DNA, 461 bp, Homo sapiens
  misc_feature (1)...(461): n = g, a, c or t
cctgcacccccatgttccgggagtactccctgcaggttctgaagaatgctcgggccatggcagatgccctgctagagcgaggctactcactggtatcaggtggtactgacaaccacctggtgctggtggacctgcggcccaagggcctggatggagctcgggctgagcgggtgctagagcttgtatccatcactgccaacaagaacacctgtcctggagaccgaagtgccatcacaccgggcggcctgcggcttggggccccagccttaacttctcgacagttccgtgaggatgacttccggagagttgtggactttatagatgaaggggtcaacattggcttagaggtgaagagcaagactgccaagctccaggatttcaaatccttcctgcttaaggactcagaaacaagtcagcgnctgggcggaggtgaangacgtccttccccaggagccgactgg

SEQ ID NO: 5036 - DNA, 491 bp, Homo sapiens
ctgctcatcttcagcagacggaaaccaagtgtgatgacccctactgagggcctggatacgggagagatgagtaatagcacatcctcactcaagcggcagagactcggatcagagagggcggcttcccatgttgctcaggctaatctcaaactcctggacgtgagcaagatcttcccaattgctgagattgcagaggaaagctccccagaggtagtaccggtggaactcttgtgcatgccttctcctgcctctcaaggggacctgcatacgaagcctttggggactgacgatgacttctggggccccacggggcctgtggctactgaggtagttgacaaagaaaagaacttgtaccgagttcacttccctgtagctggctcctaccgctggcccaacacgggtctctgctttgtgatgagagaagcggtgaccgttgagattgaattctgtgtgtgggaccagttcctgggtgagatcaacccacagcacag

SEQ ID NO: 5037 - DNA, 324 bp, Homo sapiens
ctgcccttctggcgagtacatgcacaggattgtaaatgagaaatgcagtcatatttccagtctgcctctatgatgatgttaaattattgctgtttagctgtgaacaagggatgtaccactggaggaatagagtatccttttgtacacattttgaaatgcttcttctgtagtgatagaacaaataaatgcaacgaatactctgtctgccctatcccgtgaagtccacactggcgtaagagaaggcccagcagagcaggaatctgcctagactttctcccaatgagatcccaatatgagagggagaagagatgggcctcaggacag

SEQ ID NO: 5038 - DNA, 570 bp, Homo sapiens
  misc_feature (1)...(570): n = g, a, c or t
tgttaacacttacatttttgtatatatagacactttttgtattttctacatttttcatatgtaaaccctccccactctccacacatcattattcattatgatcatgaggggtttatcccaggatattcattgatagaaaattaaaagagtaatttataaaatcactacatgaacaagtaaaaacacacacagcaaaatttacatcaaaattattacgtggtacagaatccaaaagtcataaaaagcaaaagctatctttttttcactctggcacccatctgttcttccctggagtnaaacactatnaccaatttttaggtatacttccaaagatacttactgcatttacaagcacagacttatattgattctaaaagaataagagacattttcagcatgtngtttngttcaacaccacagtatatcttaaagatggtcccccatcaatacatatagagatctctcttttttatggcttcatagtattatcatgtgctgatatgccaaaaactaatccattanacccttttgggtatatatttactattttgcagtcttctgctcttagga

SEQ ID NO: 5039 - DNA, 505 bp, Homo sapiens
  misc_feature (1)...(505): n = g, a, c or t
ctggagtaccaggaagaactgaggtcccactacaaggacatgctcagcgaactctccacagtcatgaatgagcagattacgggcagggacgacctgtcaaagcgcggagtggaccaaacctgcactcgagtaattagcaaagcaactccggccctacccacggtctccatctcatctagtgctgaagtctgagggctctgcagcatcagacccacctctaagagaactttctgaatttgcagctaatctcggggaagagaaagataggtttaatttatttgaagttttcatggtgttaatatttttgtttacctcgctagcttcagaattttgccaacctntgaatttgcacattttgtataatttttttttctttgagcagtgttgatcaagccaagttgaatatttgccatgaaattccagtgaatgtgtagctcaaatgcaaaccctaagtttgctgtcagttattgtatggtcagtgccccagtcctagtacacatatttt

SEQ ID NO: 5040 - DNA, 253 bp, Homo sapiens; identical to SEQ ID NO: 225

SEQ ID NO: 5041 - DNA, 430 bp, Homo sapiens
ctgaatgccactttcagatggaagggaaatgagatggaaaacaacaaaaaaggactgccaggcggaacagtttccaaccgagttttcgttgagtgaggatccagcagccatcaaactcaaacataggggcccgcagggaaactggaggaaatacttcagagacagcaaagctgaaggtttctgtgctctgagggatccgagagtggatgtcccactcctgtatcctcagccagacacagaactagccagattcattagggaagctcggatgctctcattctataaagtaaggcccccagcagggcacgtacatacattgggaaagaagaaaccccttagtaccatgttggtcaaaggcaagagagagaattctatttccatctggaatgtcattcttgtttacttcttccaacagtgaaatacttccagg

SEQ ID NO: 5042 - DNA, 381 bp, Homo sapiens
ctgggcctatgctggtcatgaacggtcctggaaaatgactcccttccttcagtatctgcatcctcatgaagtcattcattttggagattgtgtcttcacttttcttggtgaagaaactgctggatggagttgttggtggcatctgaggagtccgaaggtggctctcagggaaggttgtgctggcctctgaaggatttggaagctgactctgttcctggggtagcttcatgctcttggggtcattgtttctcgggtttgtttttttctttatctggataaaactatgcatttctgaaatcagttttgacatctggttcttttttctaagtcgaaagcagaaaagttggagcttatctccttcttcacaggggatattgtgac

SEQ ID NO: 5043 - DNA, 348 bp, Homo sapiens; identical to SEQ ID NO: 372

SEQ ID NO: 5044 - DNA, 318 bp, Homo sapiens
aaatatcacaagtaggtcttaagtgtcatctggcatcttctttctgtagccaggtaactcttagatcttattcatcagcctgctgaacagttcctttttcagagacatagataccatccaaaaatttcctgatatccttgtttttaactgttgtggcttgctgaatcaaagccgctgaatttgaaacaagctcaatgtcatttccttcaaggattaattcatctttctgggcttgagatactgaacaagcaacacctggtctcatccgaaccctgcggatgtatttttcacccaagaaatttcggatttcaacaagag

SEQ ID NO: 5045 - DNA, 568 bp, Homo sapiens
catggatcagtgcttccttccttttcatggctgcatcatattccacggtatggatggaggatggaccagtgatctacgggctggagttccaggcacgtgccttaacacctcaaactgcagaaacagatgccattcggtttttggttgggacgcagtctcttaaatatgataatcagatccatatcatagattttgacgatgaaaacaacattataaataaaaatgtcctcctccatcaagcgggtgaaatctggcatattagcgctagccctgcagacagaggtgtgctgacgacctgctacaacagaacttcagacagcaaagtcctgacatgtgcaaccgtgtggaggatgccgaaggaattggaatcaggcagccacgagtcccctgatgattcatccagcactgcacagaccctggagctgctctgtcaccttgacaacacagcccatggcaacatggcctgtgtcgtgtgggagccaatgggagatgggaagaaaatcatttccttggctgataaccatatcctgctgtgggatttacaggaaagctcgagccaggctgtgct

SEQ ID NO: 5046 - DNA, 598 bp, Homo sapiens; identical to SEQ ID NO: 226

SEQ ID NO: 5047 - DNA, 346 bp, Homo sapiens; identical to SEQ ID NO: 371

SEQ ID NO: 5048 - DNA, 556 bp, Homo sapiens; identical to SEQ ID NO: 490

SEQ ID NO: 5049 - DNA, 470 bp, Homo sapiens
aaataaagaagaaagctattgtacaaatatcgctcttcaggtttagcttacagagccatggctatggattcttagctctgtaaggaagtgcttctataaattcttaggtttagagatgataccatctgggtacctttgcttgaaccgtgcaaccacatctgggtctagtaggtggatcccatccagttggtttccaagggtgatccagttgggttgcacattgtgtggtcgtccaaataactcaatcttgcgagtgccaggagatagtctttcaatcatgccatagatttcatctggtttatgactggtggaacgaacctaggaaataaaaactagctgctttttaagttacacaagattgcaattctagccctttctattatgtttatgatctaaatgagaaaaatctgggatgagaatacacccaacatgaataactgataccaacaaaaatgtggaagctttggagg

SEQ ID NO: 5050 - DNA, 300 bp, Homo sapiens
  misc_feature (1)...(300): n = g, a, c or t
ctgcagggagtgccggctctgttcctgaaaatctgaacctgtttccggagccagggagcaaatcanaagaaataggcaagaaacagctntctaaagactccattctttcactgnatggatcccagacgcctcaaatgcctactcaagcaatgttcatggctcccgctcagatggcatatcccacagcctaccccagcttccccggggttacaccttctaacagcataatggggagcatgatgcctccaccagtaggcatggttgctcagccaggagcttctgggatggttgcccccatgg

SEQ ID NO: 5051 - DNA, 653 bp, Homo sapiens
ctgaacccaaacccacctttcttctcctctgggtctttctctttttcatcctctgttttgactctcttggcttttttgaagttggaagagttcttgcggcccccctctccctcctcttcagaatcggagaactcttcctcacaggcaattcgtttgtcagaggagcagactgggagggagtgggaagcatgggtgagagggcaggcgggtgctgatttagctcagcgtctatgcccagtgcttccctgcgtgtcctccaagagacaccaagggaaagggaaccagaagagggaggaactcgggctccctaacctgttcctacaggcactggaactcgaaaacagatttctctacaggtggggagcttggagggagtgtgcagccaggaatggtggtggaagtgtgagctgcctattgaatggaaggcatagggctctaggtctgggtctcactcgagatgcgcttgtcagggtcgtcttcgtcctcatcgccactctcctcagggatggcgtcctcaggaatcgcctgcatttggaccccaggtgcgtgcggcagcattctaaggttctcaaacagtcgctgtttgatcttctccaggtactcattcgtgttctggttagtcatattggaaggactgatgtggagcttgaaat

SEQ ID NO: 5052 - DNA, 278 bp, Homo sapiens
aaataaatacttagaacacgacttggctcctacaagcatctggactctaggtctcagtactgaagtgtctcacccatgggccccacgcagggacgccacggttccctcccaccccgtgatcaagacacggaatcggctgccgatggttggatcgcaatgcgccccttttctagagccttccccggccatctacaggcaggatgcggctgggaaaaagacaactggaatttctcgaaggttgatggtccgcacggttgaggattctacgtggttctctt

SEQ ID NO: 5053 - DNA, 171 bp, Homo sapiens
cgggcctgaggagggatgggagtaagaagtgctgtggaaaccgtcaggccatgaaccaggctgaccctcggctcagagcagtgtgcttgtggactctcacatctgcagccatgagcagaggcgacaactgcacggatctactcgcactgggaatcccctccataacccagg

SEQ ID NO: 5054 - DNA, 514 bp, Homo sapiens
ctggccgatttacaccttgataacaagaagcttggagagatgcgcctgaaggaggcgggcacagtggagcataacgcgctgtcaggatcgggggaattttccggtattttaatctgctgacatttggaatccgtgtgcagcccacatggtaaatgtggggagatttgctgatgatcggaacagatcaccaggggcctgctgtaggagacggagacatgctgttagtctgttctgtgagggtccatgacggatccacccaggcggcctgtgtgggagaggaggtgggcaggaggaacggccctttgtggcccggtttggatttgacgtggtgacgcgctgtggatacctcccccaggtgaatgactggcaggaggactgggtcgtgttctatgcccggcagcgcattcagccccagatggacatggtggagaaggagtctggggacagggaggccctccagctttggtctgctctgcagttaaagatccctgacctgttccgtgacctggagatc

SEQ ID NO: 5055 - DNA, 532 bp, Homo sapiens
aaataccataacctgtccctcccaccccccaactacattcgaaaaagtaagaacagcagaaagatcacgaaggccatgtaaaattaattcagatttaattttcttcagggctgtaatcactagggatcaaaactccttagtctggttgattgctgaatgggagaggagtaagtgagaaagatcatggcaggctggccctgcaattattcaaacccaggcccctggctgcctgggaacgggacttgggtgagatgaagtagtaaagacagtagttctgcccatggtgtggagactaaaaagcaaagcaggccaaacttagcttccatggttacatttggaagtttctattcatgacaccaaataaaagtggggaagaaggaagcatggcttactgaagtagtctcaggaagacagggcaagtgtgcaaaaagccacactgccaaagcaggctactagtgaggatcatcctgggtgacttcgaatgcacttgaggggaaaggctcaagtaccctgtagttgtagcaggaaaaag

SEQ ID NO: 5056 - DNA, 577 bp, Homo sapiens
ctgctgaagctcaactcccttttcgagcaggtgtggaagccctgaggcttctctgacatagcatgtgtttattttcttaggtgagacctgattcaggaaagtctgcagccgatatccatcttcaagtttgtggtcctttctccctctatatatccttgacctcagcagtcatgctggggtccagagtggatgattctctccgccttaggtagactcctccttaagagtgtaagtctctcagtctcacatattttgtgagacgtaagctgacattccacaaggagaggaggaaattctgtgggtcacatccaggggtgcttggaacctgattggttgtcaatcctccagttagtttgtcacgagtggaattctgtcctggattcccaaggatcaaggctgccccattagccaggaaatagggagatagaggaggtcacttgagaaagagctgcctctttgccgcctccaggttgtgtctgtttcctctcatatctgaagacagatgtgctggcagaagcaaagtcctttgtccggccacgtgcaaatgcatgggacataaatatgaacagagattctt

SEQ ID NO: 5057 - DNA, 647 bp, Homo sapiens; identical to SEQ ID NO: 571
  misc_feature (1)...(647): n = g, a, c or t

SEQ ID NO: 5058 - DNA, 426 bp, Homo sapiens
ctgcccttccatgtcgtcacaggcataccgggcgtggacccactgcttggtgcccttgccgaagtagtagcacttccgttggaaattgatccacttttcagggcacgtgttgcacacaaagccgctggacacctgcaactccatccttagctttgtcacctcctcccggagtctttccagcaaatctgaagcttcgttcctctcgttcaattcctgggacttgaagctgctcagatctgcttgaagcccgttcaggttccaggacagctccaagtcctgagatttcaatctctgctgttcagctcgaagttcctccagttcctgtgaaatctgcgtggactgggatttctgcgccatctggtcaccgtggtggctttccaagttcttggaaacttgagagacgttccgggcagccctctcttccag

SEQ ID NO: 5059 - DNA, 346 bp, Homo sapiens
aaaagtaagaacttcgttttgaaaatataaattaccaagatatacaaaggagctttcacattgtatttcatgcaatgtgtggatttttcttcaacttttcacttctcccttccatactgggttcttgaccagtgttttcatcagttgaacatataaatggtcttaaatttcctcgagcctccttcacaaaataatcaatgacactgaaaaggtttgggagtgttacaggtttttccagttcaatagtgtagttttgtcctacgctcatcactttgtagtgcttgattcttggaatgtctatctcctgccgaatagtgatggagtagtttctactgtcactaccagg

SEQ ID NO: 5060 - DNA, 514 bp, Homo sapiens
  misc_feature (1)...(514): n = g, a, c or t
ctgatgccaaaataataaaaatgttacaattgataacaaaatctattagaaaaacaggaatatgataaagctgcttcaatatgagaaaggtataataaaaacgaacacactttgtaaatatggatgaaatgttgcaatctttttacctaaaataggaactgatacatatgatatacatataacctttctgtgccttctattcaacattcaaaataaaaccttagctagtccanattcaatgcaatctgtatcaaaatgccagtgacattcttcacagaaatagcanaagcaatcctcaaatttatatggaaccacaaaacatccagtatagccaaagcaattctgagcaaaatatcaaagctggaggcatcacattacctgaatatactacaaagctacagaaaccaaaacagcatggngctcatattaaaacagacatacagaccaatgaatccananacaaatccattngtttacagacaactcacttttgacaaaggtgccangaacatac

SEQ ID NO: 5061 - DNA, 556 bp, Homo sapiens
ctgaagcaggggctccaggaggtgaagcaggtaaccctgtagtcctggtccaggtccagcttccaaaagggaatcacgtccaggaagcacagctctgcatggcggccttcaaggaaaccgtgtttatgtggagcctggttgcatagaaagcccctgcgctggttcagcaggacccaggtgtcattgtgcatgcgctccacctcataacacaggcaagtctcatgccgtcctctgacccaaggttcattgttaaagttgaaagtgaatgtgggtggatccatcgagtgtctgagaatctcccccagcatgatgtgcagtaatatataatatttaggcagattattccaaggctcaaatagctctctttggctgtacacgaacttgctccaacagtgctgaaattcgtcataattcatgatcttcatggtggcacgcggaccgtctcttttctgacacaggctgcgaagcgcctcctggtaatctgggtcccagaagtagtagaggcgggcaacgaagatggtcagggtaaccttcgggtcctcggccaggaacgtgg

SEQ ID NO: 5062 - DNA, 377 bp, Homo sapiens
ctgaaatgtctgcttaatagtgacgatggtgctattagcaggtgggtgagccagttcccaaggtacacgttcactatcaagagctaagcacacctgctaacaactcagtctcctacaaacctgatgtttctccagcaaaacaaattaaaattaaacctaatggtacttctggctgaggctccagaggtccccaggagggagggtgtttgcgtggagggggccttggttccacagaatggtggcttatggacgcttttaagacactaaagaaacccacatggtaaaaggctgggtgcggtggctcacgcctgtaatcccagcactctgagaggctgaggcgggcggatcacaaggtcaggagttcgagaccagcctgg

SEQ ID NO: 5063 - DNA, 270 bp, Homo sapiens
ccaacaataagaacttctctcccatgttgcacagcaagggtggcacgcccttctctccaagtccagaggctgctgctaagaacttttccaagagggcttccagtgttagtgagcgcacttcagggaaggcagattctaacagcttgaaggcccaagggaatcccgttatcagctctgatcctgagataatccctctgacttcctcccagaagccaagactctccagaactaagaagcaaaaaaagcaaaagggaaagagataatcacttt

SEQ ID NO: 5064 - DNA, 573 bp, Homo sapiens; identical to SEQ ID NO: 245

SEQ ID NO: 5065 - DNA, 280 bp, Homo sapiens
aaaatttattgcttgatacttttgacaacaaattaggttttgtacaattgaacttaaataaatgtcattaaaataaataaatgcaatatgtattaatattcattgtataaaaatagaagaatacaaacatatttgttaaatatttacatatgaaatttaatatagctatttttatggaatttttcattgatatgaaaaatatgatattgcatatgcatagttcccatgttaaatcccattcataactttcattaaagcatttactttgaaaaaaaaaaaa

SEQ ID NO: 5066 - DNA, 201 bp, Homo sapiens
ctgggggtcctgccgggcaagccgcagcagcatccctcgcttcaggtccatcccaaacttggagcacaggtcctccttcggggtcttgaggatgtaaaagtcgagcccataagcctcatcgatgaggtccagggtccgcatggtcacagtcactgtgaacttcttgtccaggatctcactgtagaactctcgctcaaacag

SEQ ID NO: 5067 - DNA, 295 bp, Homo sapiens
ccataaggaagaaattaaattaacactggtctttggtctctcagaaaccttcagccagaagaacctgtctttgaagaaaaagatcttatttcccacggtagtgacagcatcaaaactcaaattggggtcacagagagctggttctgaattgtcaggatttggcaagcgttggttctcttttgggtctccatacagggactgaatgccacgtatgtcatcagcagagaggcgaaatgtgttgatgtcaacatatttgtaggtggggaacattacggcctttggatcactagaatgg

SEQ ID NO: 5068 - DNA, 381 bp, Homo sapiens; identical to SEQ ID NO: 374

SEQ ID NO: 5069 - DNA, 372 bp, Homo sapiens
aaacacatgcatatatattgtcaattgtgggaagctttacaagttatattccatgcactttttggacagagttctaacagagccagccagtccacaaaacaggcagacaaaagttgaattaactggggcaaataggactcttatgcaacatccaaaatatctgacattctgccctgaaatacgttcagcacacctacaggactggggtgaaagtggataaagcaacatttatggttggcagctatggacctcggcctgaggagtatgagttcctcactccagagacaagtttatgtagtacttaatgtacatgatatgaatgtgaagcataaaattaaataaaatttttccccattggcttggttttatttt

SEQ ID NO: 5070 - DNA, 612 bp, Homo sapiens; identical to SEQ ID NO: 227
  misc_feature (1)...(612): n = g, a, c or t

SEQ ID NO: 5071 - DNA, 443 bp, Homo sapiens; identical to SEQ ID NO: 563

SEQ ID NO: 5072 - DNA, 460 bp, Homo sapiens
ctgatctacgagtctgccatcacctgtgagtacctggatgaagcatacccagggaagaagctgttgccggatgacccctatgagaaagcttgccagaagatgatcttagagttgttttctaaggtgccatccttggtaggaagctttattagaagccaaaataaagaagactatgctggcctaaaagaagaatttcgtaaagaatttaccaagctagaggttctgactaataagaagacgaccttctttggtggcaattctatctctatgattgattacctcatctggccctggtttgaacggctggaagcaatgaagttaaatgagtgtgtagaccacactccaaaactgaaactgcggatggcagccatgaaggaagatcccacagtctcagccctgcttactagtgagaaagactggcaaggtttcctagagctctacttacagaacagccctgagg

SEQ ID NO: 5073 - DNA, 498 bp, Homo sapiens
aaagaaacttgaccaaaagacagtacaaaaacactggcacttgaatgttgaatgtcaccgtatgcgtgaaattatatatttcggggtagtgtgagcttttaatgtttaagtcatattaaactcttaagtcaaattaagcagacccggcgttggcagtgtagccataactttctgatgttagtaaaaacaaaattggcgacttgaaattaaatcatgccaaggttttgatacacttgtcttaagatattaatgaaacacttcaaaacactgatgtgaagtgtccagattctcagatgtttgttgtgtggattttgtttagttgtgtgtttttttttttttttcagtgaatgtctggcacattgcaatcctcaaacatgtggttatctttgttgtattggcataatcagtgacttgtacattcagcaatagcatttgagcaagttttatcagcaagcaatattttcagttaataaggtttcaaaaatcatgtaaggattt

SEQ ID NO: 5074 - DNA, 386 bp, Homo sapiens
ccaagcaggtagccagagagcgccatcagccaagaaaccatccactggttctaggtaccagcctctggcttctacagcctcagacaatgactttgtcacaccagagccccgccgtactacccgtcggcatccaaacacccagcagcgagcttccaaaaagaaacccaaagttgtcttctcaagtgatgagtccagtgaggaagatctttcagcagagatgacagaagacgagacacccaagaaaacaactcccattctcagagcatcggctcgcaggcacagatcctaggaagtctgttcctgtcctccctgtgcagggtatcctgtagggtgacctggaattcgaattctgtttcccttgtaaaatatttgtctgtctctttttt

SEQ ID NO: 5075 - DNA, 258 bp, Homo sapiens
ctgctctaatatcgatggtcctgcttgccagagagttcctctacccagcaaaaatgagtgtctcagaagtgtgctcctctggcctcagttctcctcttttggaacaacataaaacaaatttaattttctacgcctctggggatatctgctcagccaatggaaaatctgggttcaaccagcccctgccatttcttaagactttctgctgcactcacaggatcctgagctgcacttacctgtgagagtcttcaaactttt

SEQ ID NO: 5076 - DNA, 487 bp, Homo sapiens
  misc_feature (1)...(487): n = g, a, c or t
ctgaggtagcaagaaccgcagactggagagatgtgtcagaacttcttaaacctcttggtctctacgatcttcgggcaaaaaccattgtcaagttctcagatgaatacctgacaaagcagtggaagtatccaattgagcttcatgggattggtaaatatggcaacgactcttaccgaattttttgtgtcaatgagtggaagcaggtgcaccctgaagaccacaaattaaataaatatcatgactggctttgggaaaatcatgaaaaattaagtctatcttaaactctgcagctttcaagctcatctgttatgcatagctttgcacttcaaaaaagcttaattaagtacaaccaaccacctttccagccatagagattttaattagcccaactagaagcctagtgngngtgctttcttaatgngngtgccaatggtggatctttgctactgaatgtgtttgaacatgttttgagatttttttacctgcc

SEQ ID NO: 5077 - DNA, 542 bp, Homo sapiens
  misc_feature (1)...(542): n = g, a, c or t
cctgggcttgagcaatagcctcaggtatctccatcacttacacagcactcattcgttcagtgagatgtcatttattaagcagttacaatgctgcaggtgctgtgcaggagactggacatacaaaagaagaatttgacccagaccttccccctctggggtctcataatcttgtagggggaagggaatacaaatacaaattagcgaagaatgatagcagtatcttaggacactgtaactgtgtgctacgggacccaaggactggagagccatcccttcgtgaaggtcagggaagagctgggtggtggagagagctgagcctgtgtggacccctgatgcatgctctgatgctgagggagtacagtagagatggacactgatagtgacagaagagtttggccccaaagcagaagcggcatcctgcaccgactccccttagaatgaatgagtacgcacaaganaacaaccacaggcatcgccgcccttcantggatctctttgctggagaattgacagantgcgtgtcgcgcctgantgagccggta

SEQ ID NO: 5078 - DNA, 220 bp, Homo sapiens
ctgcctgaggaacccagcccctgacccctgccaccctccggtggcccaggtgcctacctccctcaagcctgggaaggtgggtctggggaaagtgggccaagtgatctgggggtaccccttgggttggtgtggggaaggagtgcctccttagtggtgcttgcagtcacaggaagcagcagcagtaaggacaaggggccggattccaggtcttcaacactgg

SEQ ID NO: 5079 - DNA, 518 bp, Homo sapiens
  misc_feature (1)...(518): n = g, a, c or t
ctttttttttttttttttttttttgcaggtgaaccatagtctcactttatttcgaattttaggactgaacagaaagaaggttcacagatatttcttcagggaaggaaagtgggcaaatagcacaatgaggcaaaccacacaatctanacgtactttcccgggtaaacaaactgggaagcccanagctcacagaggaggagagcagagcttggggtggcananaggtgttccttgggaaggagtcaggaacacaaganaaatgttcatgagctcatccaggatagagaggactcttggggaaggggacctccttccccatgctgtctntgccccaagcccttaatgaagcaggagagggaagtctgtccanaaactcatctggttagacatttgcatcaggaatagggagggggtggaggcanagccactttggacatgggaaatcacagttgcagtanacagtgagctctagtcactccanaagctngacataatttgcagggaanagtccaaagtgg

SEQ ID NO: 5080 - DNA, 268 bp, Homo sapiens
ctgtatggctgggggctcctcgtatgcatggaacccccagaataaatatgctcagccaccctgtgggccgggcaatccagacagcaggcatagggcaccagttaccctgcatgttggcccagacctcaggtgctagggaaggcgggaaccttgggttgagtaatgctcgtctgtgtgttttagtttcatcacctgttatctgtgtttgctgaggagagtggaacagaaggggtggagttttgtataaataaagtttctttgtctcttt

SEQ ID NO: 5081 - DNA, 560 bp, Homo sapiens
  misc_feature (1)...(560): n = g, a, c or t
cctgctcctactatgtccttttccttctctcatatatttcagtcgtctggagttctcagaataaggaatccattatcaatgacctatcccatgaacattttttttgagaacctgtgtaagactatatagacatgaatatttgatgacctgacacctcaccgttcaaacctagatttgggttgtataaatatcaactcaaggctgtaagagcctcccatggtctaatgtttcaagagtaaagaagaatagacaaacacccatgttggaatcatctgttgcagaaaagaacacaaagatagttttattaatttagaacaaattttgagaactttacatagacagaaatcttctatctcctttttttctaattttggggaatgtcttccactagtggtcgctaaaaatgtagaaatatcatagggagtgcaaattacattgtctctttacctgccacaatctggcagcactcatcatgtagcaaatgcccaaataatagactacagattatagtgacttcaccctaggttaacattatttctaggtaaggnactagtatatct

SEQ ID NO: 5082 - DNA, 224 bp, Homo sapiens
ctgcctccgtttgggtggcagaaaatgtcacagggacctttcagccacaaagaggcttttaggccgtggttgggggtcttcagggtcttgctctgggcctggctgtatccatgctcaagagtggagaggggcagagggggtgggcaggcggccgtctgggtctggtcttgaatcaggtcccatggactccgcggaaccttcgctggctggcggcgtgcatgtgg

SEQ ID NO: 5083 - DNA, 288 bp, Homo sapiens
ctgtgagctggcaccgagaggggctgctgagctagaattcccacctatgtctttccaagggactgttcacggcttgggacttggtctctgtcctgccccatcctcgtcacttgggaccacgagccctggttcagtcacccagggaagcctcccagcggctcatgaagcatcgagctccaagcccagatgccaagctccctggctgagctgaatgatgtcactcatggtggacgcgttctgctcacgggcccagagccctgtgaaatgcatcaaggtcctctccgctgg

SEQ ID NO: 5084 - DNA, 181 bp, Homo sapiens
  misc_feature (1)...(181): n = g, a, c or t
caacaatctgngtgcctctctggttgtttctcttttttattattactcctgagttgatgacattttttgttagatttcatggtaattctcaagtgcttcaatgatgcagcatttcttgcactaaaaaaaaaaaaaaaaaactanaaagttttgggacatggggttatattaaattattctt

SEQ ID NO: 5085 - DNA, 288 bp, Homo sapiens; identical to SEQ ID NO: 228
  misc_feature (1)...(288): n = g, a, c or t

SEQ ID NO: 5086 - DNA, 343 bp, Homo sapiens
ctggtctccctccaccctctcatatttacacccaaccccttccccaaagctagcttttaccaaagttcctggtaggaggtcaagaagtgtgtccacttagccggcagtcctagatgtagtggacgctgtttgtccccaggccagttgggcaccaggaagggctactctggggattcagggcatagactccgtactggggtcaagggaggcccccactcacagatactctcctttccttctggggctcaatgtacaccaaaaccttcagaaagcaaagttggagtggtggacccccaatgtcaagtttagtgctctctttgcttgtgaggacccacacaagtgg

SEQ ID NO: 5087 - DNA, 635 bp, Homo sapiens
  misc_feature (1)...(635): n = g, a, c or t
cctgattggttaaaaacatcaggctgtagctaaagcttaaactccctatatgattgggtgaagtttcaatcacttagtttgcagcagtgactcatttttgcttaggagaaagtcccctttgattggttgaagtttcaatcccttagcttgcagctatgactcattttggcttagaggaatgtccccttagggaagtccctgttgacccaggaagtctagctaacttagccacttagtgcctcagtaccccctctcaacaggaaagcccaagtgctgttgagaagttgggcaatgatcattctagctacttcctgctgaactggggcacagaaggggatctgcagttgagggttcctcaggaggggagtcttcttcagtgtcgtggtgttagaacaggttggtaggtcagtctaggggtcctcgatagtaggtgctagtggtggtcatttggggctccatttgtagaaccacttgcagtttcatggattctattcacttcagagaaatcccggacaggcccccagaaatgagatgagaagtctcttccgatcgaaggtttttatcaattgaagagtttgnggttccacgggcttcaaagaatgaaggcttggaccgcagcagtgagtgttacagct

SEQ ID NO: 5088 - DNA, 535 bp, Homo sapiens
aaaaacaaaaggttgatatactataaaataagatgcttcagtgcagctccaaaaacctttataaatacagccatttggaaggacgatcctggatcagaaattattccttgtgtatctatattatgtgcatgcctcatttcagttgtcataattgtctctgtaatttcctcctgagtagcggtcataaccaccctggtttctgccattatagtctctggaacgtccatatccatatccataccctccaggtcgactgtcataatacctgccactcccatagccctggtccccaccacctctagagtagctgcgaccacgcccatgggccccaaagccacctcctctggttccccgagcagacttgcctgcatgatccacacggatctgacgaccatccagagactaagtgtgggagacacaaggatgatgggttggcagtcagtcagggcaatggtgagggaagagcaggcaagggtaagtgggcaaaagaggccaaaaattcctgctgggcaccaggttctgggtgccatgttcc

SEQ ID NO: 5089 - DNA, 418 bp, Homo sapiens; identical to SEQ ID NO: 4915

SEQ ID NO: 5090 - DNA, 545 bp, Homo sapiens
cctagattttcaagaagtccaatatctctcacttgaagtgtcttttccctggagtagattgggagatttgagggatatctgtccaaagatgagacagtctgtttctagtttcccatccagcctgatggggcgtctacagtttttaccacaaggtgtcgctgttgaacagattctggtgcagtctagtgcatagctgtccacttctagagtgatcacttgctgggccaagttcctctccttaagtggtgtctcacattaaggttcccaaattacagactcattaattcaccctaataagctcatccaggcagtttaggtcttcaggggcttccagcctccaacacacattgggccaaaaccagcctgtaccaccagctccaagccctgtgttgaatctaggtcattggtccagatgccccttcattctgggcctgtggtgtcctttccagacagcagacctcagttaagggcatcccagtccatcagagaagttccaggatcacagaccctcaaaaggggcagtgttgaggattcagtctgttttc

SEQ ID NO: 5091 - DNA, 571 bp, Homo sapiens; identical to SEQ ID NO: 230

SEQ ID NO: 5092 - DNA, 584 bp, Homo sapiens; identical to SEQ ID NO: 231
  misc_feature (1)...(584): n = g, a, c or t

SEQ ID NO: 5093 - DNA, 409 bp, Homo sapiens
  misc_feature (1)...(409): n = g, a, c or t
cctctcctccactgcatgtggcggcagggcgggtaggtcgcagggctccatgattgtggggcagcttcaagggcacatggggcagaggccctcgaaggtcccctcctcagtaggggatgtcattctgatagtactggatcatgttgtaggtccggctcctgttgctgaggaagcagctctggatgaccttcatgatgaaatttgcagcctcgcgctcagtcatgttggggctaaacctgtgcttcaagaacttgattggccgcgaaaacagggcaggcccgtgtccaacatgatagtgaccagggagacgaccacatccatgtagggccgcacagccaggtagcctggacacacatctncatgaaccacttgaagggtgtggcctccatcttgccccccatgatcatca

SEQ ID NO: 5094 - DNA, 135 bp, Homo sapiens
aaaaaagagcattttattttaataaagaataaaagagatcaatatactgttttaatggatacaaaaataaatattcattcagcatattaaagatatgtgctttgacattcatttgaattggagattcaagcctat

SEQ ID NO: 5095 - DNA, 549 bp, Homo sapiens
ctgaggaaatgggcagtcccatcgctagaaccctgttcttagaaattacctggtctcttgctctgacagatgctgagctaatgctgggtcacatatttaacagctagcctaaagccataggctggaacagagttggcaagagcctggctcaggtgtagcgaggagtagagagggaagacaaagggagtatcagacccctcacacgggcctctcctccccaaagatggttccacctgggtgtgttcaggagtcactaccttcacgctccctcctcccccaccccagctcttccagggtatacctaaggggtccagagcaaggaagggggcttgagctgggcccgaggaggtgaggttggctggaatttagggtggctggcagaggagagctggggaggctgcagcctttacagcagacagcaggcacggaatatcagcaggtccttcggctcagtaagcttcagtgagacactctcattggccccaatgaagagcacgccaccacgttgcagagggattggtgtctgggttgtgggtgtgctggctatta

SEQ ID NO: 5096 - DNA, 276 bp, Homo sapiens
ccacaggcttctaccccgaccacgtggagctgagctggtgggtgaatgggaaggaggtgcacagtggggtcagcacagacccgcagcccctcaaggagcagcccgccctcaatgactccagatactgcctgagcagccgcctgagggtctcggccaccttctggcagaacccccgcaaccacttccgctgtcaagtccagttctacgggctctcggagaatgacgagtggacccaggatagggccaaacctgtcacccagatcgtcagcgccgagg

SEQ ID NO: 5097 - DNA, 443 bp, Homo sapiens
ctgttggggctctgccaggtcccctgggaccaactacagctccaatcagaaaccctgcgcttccttgagtgtggcttcccacttttcctgcattgtggagctgactgagtacaccggtgaggctggggtctctgcaggggaggtcactggaacagcgagcaagggactggtgcctcgctggtgctgggtctctggtttgctgcagagccgtaggacactcctggctcctcagtaggacagacagacgcaggcgggtttattttggaggggtacttgtggcattttcctgtattgtcttggacatgggatgtggggaggtggaaatgatgagcagtagcatcatttctccctgttgggttttagccagtttgccagcaagcgcatcctagcagggtccccgagcagcaggttgtgtggatgaagggacaggcacttgcatccag

SEQ ID NO: 5098 - DNA, 332 bp, Homo sapiens
  misc_feature (1)...(332): n = g, a, c or t
aaatagaaaacagtatattgaaagtggtgggtttgatctttttatttagaaacccacaaaatcagaaacacagtacaaataaaacagaaatcaaactataagttgacttttagttcctaaaaagaaacatatttcaaaagcaatggaatctagaattcttataacatgaataacaaaatgtacagcaagcctatgtagttcaattaatatataaggaaaaggaaggtctttcttcatgatacaagcattataaagtttttactgtagtagtcaattaatggatatttccttgttaataaaattttgtnncataatttacaaattagttcttt

SEQ ID NO: 5099 - DNA, 594 bp, Homo sapiens; identical to SEQ ID NO: 229

SEQ ID NO: 5100 - DNA, 325 bp, Homo sapiens
  misc_feature (1)...(325): n = g, a, c or t
gtacaagcttttttttttttttttttttttttttgcanaaaanaacacaaagatagttttattaatttanaacaaattttganaactttacatanacanaaatcttctatctcctttttttctaattttggggaatgncttccactngtggtcgctaaaaatgtanaaatntcatagggagngcaaattacattgnctntttacctgccacaatctggcagcactcatnatgtagcaaatgcccaaataatanactacagattatagngacttcaccctangntaacattatttntaggnaagggactantatatntgaattgaa

SEQ ID NO: 5101 - DNA, 166 bp, Homo sapiens
aaagccacacaaataagagtgctaaactgtggacttaaaagtaggtgtgtaaatatttttaatcagtattacttggaaaataaaatataacaaacccatagaccaatatgctattttttttacctgttaaatattgggagttctttacattttttaagtaaacttt

SEQ ID NO: 5102 - DNA, 574 bp, Homo sapiens; identical to SEQ ID NO: 380

SEQ ID NO: 5103 - DNA, 510 bp, Homo sapiens
  misc_feature (1)...(510): n = g, a, c or t
ctggacacagacacttccccagccccagggccagagtggggctggagggaaggacagggctacagtagtagtgggggtatatgagggaaggctgcaaggatgtggtagctggagttttgagagatggataagagttttccaaggaggcaaaagtggcanaaaagctttgcaggtgaggaggagcagcanaagcttaacctgcatgagaatncctntcancagtcagaaagttgaccctgcacagccaaggggtaagctctgaccattttgcaggggacagaactgagacccagagagggaaaggaacttgcccactgtcacactgcatggaaggggcaaaactgtaggctccaatacttgngctcttaacctccttactctgagccttctcacgcttggcatgctgttccctctgccaggaatgcctttccttcccttgattgcgtgaaaagttcctgccaggtttggtgtcatccctttgtgccccttgtagggtgaggacagaaaggg

SEQ ID NO: 5104 - DNA, 130 bp, Homo sapiens
ctggcggtaaggctggaaaggactccggaaaggccaagacaaaggcggtttcccgctcgcagagagccggcttgcagttcccagtgggccgtattcatcgacacctaaaatctaggacgaccagtcatgg

SEQ ID NO: 5105 - DNA, 597 bp, Homo sapiens
  misc_feature (1)...(597): n = g, a, c or t
ccagggatcagtctcatggccgtagaagcagccaaattcctctgcctttgccttcccttcaggagtcacatgctaaggcatccttgggcatttggaaaaggccgcttggggtgagagtgctctaggccactctgcaatgtccctgggcccgatgagtaacaaatgcaccccgggacccagagaagtggaaagacatgaaagggatttggaaacagatcgtaaaaataacctgtatgaaaatcacacagacaagaaaacaaacaaatccagctagccccttggatcctgccatccgtcttttctcccgggactgcctttgctttgtggagggtgagtcctgggacaggctttgggtgacaagttgtgggcatgttccatccaagcctggctctcccgactggcagagggaggtggctgacaatcaattcctctggatacattttcctgtgattgctcctgtgatcaaaggcagccaccgacaggtgcgggagcggttagttcaccacgtcatagtagtaattgcgcagccgcagttccactgntgcgaatccgggcctgttttccacatcgtatgtccagcacagattcatganatcg

SEQ ID NO: 5106 - DNA, 583 bp, Homo sapiens
ctgtttttaacccacgtttttataggacctacttctttgtagataaccagtattggaggtatgatgaaaggagacagatgatggaccctggttatcccaaactgattaccaagaacttccaaggaatcgggcctaaaattgatgcagtcttctactctaaaaacaaatactactatttcttccaaggatctaaccaatttgaatatgacttcctactccaacgtatcaccaaaacactgaaaagcaatagctggtttggttgttagaaatggtgtaattaatggtttttgttagttcacttcagcttaataagtatttattgcatatttgctatgtcctcagtgtaccactacttagagatatgtatcataaaaataaaatctgtaaaccataggtaatgattatataaaatacataatatttttcaattttgaaaactctaattgtccattcttgcttgactctactattaagtttgaaaatagttaccttcaaaggccaagagaattctatttgaagcatgctctgtaagttgcttcctaacatccttggactgagaaattatacttacttctggcataac

SEQ ID NO: 5107 - DNA, 123 bp, Homo sapiens
  misc_feature (1)...(123): n = g, a, c or t
agctcttnttaagcctcttggatttccagattacaccaaagactgtttccaatttgactgagagcagctccaantccgtccagagcttcctgcagtcaatgatcaccgctgtgggcatccctg

SEQ ID NO: 5108 - DNA, 361 bp, Homo sapiens
ccagatggcgcagaaatcccagtccacgcagatttcacaggaactggaggaacttcgagctgaacagcagagattgaaatctcaggacttggagctgtcctggaacctgaacgggcttcaagcagatctgagcagcttcaagtcccaggaattgaacgagaggaacgaagcttcagatttgctggaaagactccgggaggaggtgacaaagctaaggatggagttgcaggtgtccagcggctttgtgtgcaacacgtgccctgaaaagtggatcaatttccaacggaagtgctactacttcggcaagggcaccaagcagtgggtccacgcccggtatgcctgtgacgacatggaagggcag

SEQ ID NO: 5109 - DNA, 343 bp, Homo sapiens
ccacttgtgtgggtcctcacaagcaaagagagcactaaacttgacattgggggtccaccactccaactttgctttctgaaggttttggtgtacattgagccccagaaggaaaggagagtatctgtgagtgggggcctcccttgaccccagtacgaagtctatgccctgaatccccagagtagcccttcctggtgcccaactggcctggggacaaacagcgtccactacatctaggactgccggctaagtggacacacttcttgaccccctaccaggaactttggtaaaagctagctttggggaaggggttgggtgtaaatatgagagggtggagggagaccag

SEQ ID NO: 5110 - DNA, 457 bp, Homo sapiens; identical to SEQ ID NO: 232

SEQ ID NO: 5111 - DNA, 547 bp, Homo sapiens
  misc_feature (1)...(547): n = g, a, c or t
ctgcagtttctcaatctctaggaatcctgcagtaaaacaagccccttggtgagctggaagatttgtgcccagtgacaaagagatagtttgtaaaatgctgtgtaattgtaagttaccacaaatgaaaatacatgacagcacaatgtggcccgtagaaaattcccctctccgcttctgcttttcctgaaggagagttctgagcatccaaaggctcctcacttacctcactgactccccttatttcctgggtttactttccccattaacactgacatctaaatctctagaggagtatgtcatcccttcctccctggttccatattctaagtttcagaatcatgatctttttctgcactaacgtcccacagtcctcagagtttctcacagttcattgatgtgtactgagtatataatttatacttagcccccacggcggggtggttctcagaagtggaagacaggtgggtctttggagaacacggngggaatcttggtgtactgactaacttgatgggcgcttggttcctcttccagccagacctcggcc

SEQ ID NO: 5112 - DNA, 256 bp, Homo sapiens; identical to SEQ ID NO: 233
  misc_feature (1)...(256): n = g, a, c or t

SEQ ID NO: 5113 - DNA, 388 bp, Homo sapiens; identical to SEQ ID NO: 574
  misc_feature (1)...(388): n = g, a, c or t

SEQ ID NO: 5114 - DNA, 259 bp, Homo sapiens
  misc_feature (1)...(259): n = g, a, c or t
cctatccaaggaacaggntagtaggaaatcacattctgaagcactcattctgcctttcttcagtgtaagaaagttgctcaaaagaagaagcgngacaacacaagctgctacaatggctacattctctacattcaatgtaagagagaaggagctatggtcactccatgcaaaggccagatagagatgtggtgcgtatgtgcagagtacctcaagaaatgaaagncagcatgtctcttggaagctatgaacactaatgttt

SEQ ID NO: 5115 - DNA, 143 bp, Homo sapiens
  misc_feature (1)...(143): n = g, a, c or t
gaggtaaagctgttttacaatatgataacaagaacacccagcagatacaggttgtacagttaatcattttgactgtgtcagtaatataatcagaatactgtaacggtaagagaaaaatacttttttttttttttnganactgg

SEQ ID NO: 5116 - DNA, 364 bp, Homo sapiens
  misc_feature (1)...(364): n = g, a, c or t
ccatgaacgcctttggagacatgaccagtgaagaattcaggcaggtgatgaatggctttcaaaaccgtaagcccaggaaggggaaagtgttccaggaacctccgttttatgaggcccccagatctgtggattggagagagaaaggctacgtgactcctgtgaagaatcagggtcagtgtggntcttgttgggnttttagtgctactggngctcttgaaggacagatgttccggaaaactgggaggcttatctcactgagngagcagaatctggtagactgctctgggcctcaaggcaatgaaggctgcaatggtggcctaatggattatgctttccagtatgttcaggataatggaggacctgc

SEQ ID NO: 5117 - DNA, 275 bp, Homo sapiens
  misc_feature (1)...(275): n = g, a, c or t
aaaaagcacaaaacttttggaatgttaatggataactactattagtctcaaaattctaggcatttctataaaacattggncaatgtgactagtaagttaacgggaccaaggtttcaaagatcaatactgaaccttgataaataataagaggaaatgtaactccacaaaatgtttctgattaagtttgtgcccatgcaaaattaacataaatttcttaactcaagaatgaggaatattaaagcaatgtattttttcaacataaagcatgcattttc

SEQ ID NO: 5118 - DNA, 247 bp, Homo sapiens
  misc_feature (1)...(247): n = g, a, c or t
ctgtaattatttancctcaantgactttctccattgcttcacgctatgccactattttgcttntttaatttttttaaccttgcttantattctatagttngcccaaccagttttacgtccaaggaaaattagccaatgcataaaatatacaaactatgaaaggcaaggatcangaanccaganactttgccaccaaatctcanattattagaaactaggtgtcagggtttatcaanaaggccaggaa

SEQ ID NO: 5119 - DNA, 205 bp, Homo sapiens
ccatctccttcaccgcactgatcctgaccgagctgctgatggtggcgctgaccgtccgcacgtggcactggctgatggtggtggccgagttcctcagcttaggctgctacgtgtcctcactcgcttttctcaatgaatattttgatgttgcctttatcaccaccgtgaccttcctgtggaaagtgtcggcgatcaccgtggtcag

SEQ ID NO: 5120 - DNA, 320 bp, Homo sapiens
ccatcctccgccaagctcgagagcccaggcaagctgtgattgtcacaaggaagctgactccagaggtcatgcccgacctcaactcctccactgactctgcagcctcagcctctgcagccagtgatgtttctgtagaatctacagcagaggccacagtctgcacggtgacactggagaagatgtcggcagggctgggcttcagcctggaaggagggaagggctccctacacggagacaagcctctcaccattaacaggattttcaaaggagcagcctcagaacaaagtgagacagtccagcctggagatgaaatcttgcag

SEQ ID NO: 5121 - DNA, 161 bp, Homo sapiens
  misc_feature (1)...(161): n = g, a, c or t
tgtcagagnacggctcctgngacgctttngcttattttntgtacggctttttcgagttggcttaggcagaattctcctctgagcgatnaagacgacatgcttcccactgaactttttctccaattcgcgnnnctagccggacttggnttttctggaaagat

SEQ ID NO: 5122 - DNA, 258 bp, Homo sapiens; identical to SEQ ID NO: 5075

SEQ ID NO: 5123 - DNA, 318 bp, Homo sapiens
  misc_feature (1)...(318): n = g, a, c or t
tggggcgtntttgtgtttgagatattagctcaggtcaattccaaagagtaccagattctttcaaaagtcagatgagtaagggatagaaaatttgttcatcttaaggaacagccaggcgctagccagttaagtgaggcatctcaattgcaagattttctctgcatcggtcaggttagtgatattaacagcgaaaagagatttttgttaaggggaaagttattaagttgacactgtggatcaccttcggccaagggacacgactggagattaaacgtaagtaatttttcactattgtcttctgaaatttgggtctgatgg

SEQ ID NO: 5124 - DNA, 327 bp, Homo sapiens
ctgcagtgtccctttttatatcatgctagtgttgagacatacttgactaacttgggaacagttcgatatattgacaaccgtcaacttaagaaaatcaacagcttttggccccagcgtccaagtgaacttttcatggagtgcagaatctcaaatggacaaaatactttgtctttttaaatactgaaaatttaattattagtactatgactgaaagattcttcatggctaaaaagctctgcatcaaactcaattcaggaggccttccctccccaccaccatcaacctcttcaaaacctactccctccctctaagtatctctcaacacag

SEQ ID NO: 5125 - DNA, 421 bp, Homo sapiens
  misc_feature (1)...(421): n = g, a, c or t
cttgctttgttatctnctacatatatnccaaagggataagntaggaacaccngaaactcagnagtaactcactttaaccttgcttntggggctccaattcaagtgatgctcaatttcnaggtacaaggaaaaccatnagaatataaagtcataatgccatttccactcagangaaaagatttatctntctttagatactcaaaattattcttggcattttagcacttttggnacacatttcctgatgnaggaaatagtaaaatttcagngcctatggcattggntttcaccacctatgcaattttntacacatctgaaaattaccaggttatctaactccttaaatgttcctctcttcaacaacaaaaaacacanacaaaaatgnngggagaaacaggaagcatccaggtccaaatgacag

SEQ ID NO: 5126 - DNA, 192 bp, Homo sapiens
  misc_feature (1)...(192): n = g, a, c or t
aagtgngctcctctggcctcagttctcctcttttggaacaacataaaacaaatttaattttctacgcctctggggatatctgctcagccaatggaaaatctgggttcaaccagcccctgccatttcttaagactttctgctgcactcacaggatcctgagctgcacttacctgtgagagtcttcaaactttt

SEQ ID NO: 5127 - DNA, 196 bp, Homo sapiens; identical to SEQ ID NO: 653

SEQ ID NO: 5128 - DNA, 323 bp, Homo sapiens
aaatttggggcgtttttgtgtttgagatattagctcaggtcaattccaaagagtaccagattctttcaaaagtcagatgagtaagggatagaaaatttgttcatcttaaggaacagccaggcgctagccagttaagtgaggcatctcaattgcaagattttctctgcatcggtcaggttagtgatattaacagcgaaaagagatttttgttaaggggaaagttattaagttgacactgtggatcaccttcggccaagggacacgactggagattaaacgtaagtaatttttcactattgtcttctgaaatttgggtctgatgg

SEQ ID NO: 5129 - DNA, 329 bp, Homo sapiens
cccggccaagagaagagattttcctaactgggcatatgcagcacatgtgtgccgatgggaatgatccactggaggaggagtagcgggaaacgacaggcactgtagagggggatacacaggggaggggcggagagaatcatccactctggaccccagcatgactgctgaggtcaaggatatatagagggagagaggaccacaaacttgaagatggatatcggctgcagactttcctgaatcaggtctcacctaagaaaataaacacatgctatgtcagagaagcctcagggcttccacacctgctcgaaaagggagttgagcttcagcag

SEQ ID NO: 5130 - DNA, 571 bp, Homo sapiens; identical to SEQ ID NO: 234
  misc_feature (1)...(571): n = g, a, c or t

SEQ ID NO: 5131 - DNA, 489 bp, Homo sapiens
ccgaagcgggagcggccaaaatgaagtttaatccctttgtgacttccgaccgaagcaagaatcgcaaaaggcatttcaatgcaccttcccacattcgaaggaagattatgtcttcccctctttccaaagagctgagacagaagtacaacgtgcgatccatgcccatccgaaaggatgatgaagttcaggttgtacgtggacactataaaggtcagcaaattggcaaagtagtccaggtttacaggaagaaatatgttatctacattgagcgggtgcagcgggaaaaggctaatggcacaactgtccacgtaggcattcaccccagcaaggtggttatcactaggctaaaactggacaaagaccgcaaaaagatcctcgaacggaaagccaaatctcgccaagtagggaaggaaaagggcaaatacaaggaagaaaccattgagaagatgcaggaataaagtaatcttatatacaagctttgattaaaac

SEQ ID NO: 5132 - DNA, 404 bp, Homo sapiens
  misc_feature (1)...(404): n = g, a, c or t
aaaagtgtcgtaaaattctcaactatatacaaaacattgtccacttaagctgcctgcctttcaagagtaactctcctcccatgcaaagggtactgttgcacataaaagatatcctcatctgcatgttttccagtacctctttctccaccctaaacagttgaaatttaattggtctcaaatttcaagtgaaactgatacatggcaaggctgacaccactgtatcatgtaggttttctaaataaagcattttatgtataattntaancattaaagtaagtagatagggatgccatttctaatatatcagcatggctgatggcagtgaaaccatccaagatagaaggcccacttttaacagagtttaaccagtatttatgggccttatnaaataaaaagataatttt

SEQ ID NO: 5133 - DNA, 413 bp, Homo sapiens
  misc_feature (1)...(413): n = g, a, c or t
aaaattaaagtcatcacgaaatggaagttttcccaggatggaaaataagaggaagtgctgctgtaattgggagcacaaggggcctcccaaaaaggagccccacctcagcatcactgccttaatcgtggcctccctggggtgggtggggttctctcctccctccctccctcctcctggggtgggagggcgctcctgttcccatctctgtgttccctggaggcaggtatcacaaagcatttgtgaattgctttaggtgcagggacaccacccactcaggactcttccccatcatcccttccattgccacaccctanatccagcctcaggaactaacaagttttgagaaaagcaggtggtagagcagcagcttcgtgctctcancggtggctggctggcatttttctctagcgttg

SEQ ID NO: 5134 - DNA, 252 bp, Homo sapiens; identical to SEQ ID NO: 656
  misc_feature (1)...(252): n = g, a, c or t

SEQ ID NO: 5135 - DNA, 379 bp, Homo sapiens; identical to SEQ ID NO: 657
  misc_feature (1)...(379): n = g, a, c or t

SEQ ID NO: 5136 - DNA, 374 bp, Homo sapiens
  misc_feature (1)...(374): n = g, a, c or t
ccaggctgatcttgaactcctgacctcaagtgatctgcccacctcggcctcccaaagtgctgggattacaggcatgagccaccgcgcccggccagcattgtatcttaaaggtagcctttcagttgtttggatgacagttgtctccactggacatctgcttcatgccaggccctctcctgggngttggtgtgtccactcttccctccaaccaccatattcccttgaggccaggaatggacctaagggtgcctcaggcatgggaagacccgataccggcctctctggagctcgctggcttctggagttctgagttaaggaggnagttgaagagacccatgtatgacccccagatgccagnaaaactaatcatgtgc

SEQ ID NO: 5137 - DNA, 271 bp, Homo sapiens
  misc_feature (1)...(271): n = g, a, c or t
aaacgcttcatgacagggtaattcatgtccaacatatcaaaaacatatttatagataactttagaaagaaaatacatactttttttgataatcacaagtagcaatgagattttctatattattttcagnctcactttagaaatgttttaattgtctaaatttaatcaattcatcgattaaaggaaagacaataaaatagtaaaattacatgtgtttatatataagngtgtgngtttcaaataacaaaacgcaggttgnaaactaaaatcac

SEQ ID NO: 5138 - DNA, 266 bp, Homo sapiens
  misc_feature (1)...(266): n = g, a, c or t
ctccaacacgaccatcgtagggngaagcccacgttttcttccatggcctcaaaggccctagaacttgcctacctttctggccttacctcctagctacttatccatctcttgaactttatactcttgtataaatttctaactttcagaaaatgccatactctgttttgncaccacacatgtatatttccccctggtacacttggaagactcttatccatctgtgaaaccctatgttgncatcacttggtccatgaaatattacctgg

SEQ ID NO: 5139 - DNA, 557 bp, Homo sapiens
ctgaggaaagacatcggaccgtcagagccggggactaccctcagcccagggagacacctgtgtttccagggctgggactgacctcacaggatcactgctggctctgctaacaaccccaaggacaccaacgtttcccattctgagtacttctccgcaaaccctttgtttcattaaggactgttttacatgaagggtgcaaaagtaggataaaaatgagaaccctagggtgaaacacgtgacagaagaataaagactattgaatagtcctcttctctacccatggacttggcatttttatattcgattttaaggaaatataacttagtagtaaagagatgagcattcaagtcaggcagacctgaatttgggtcaaggctgcgccactcaaaagctatatgacctctatatgagcagcttattcaacctcttttaacctccattttgtcatctgtagaatgatgataaatgcctagctcagaaggattcctaatgaataaatgagtgacagtgcatgtaaacagactagcttaattaatattaatatgattaggatgggc

SEQ ID NO: 5140 - DNA, 525 bp, Homo sapiens
gcaatttgagagcaagatcataaagtcctgcccagaatgccggatcacatctaactttgtcattccaagtgagtactgggtggaggagaaagaagagaagcagaaactcattctgaaatacaaggaggcaatgagcaacaaggcgtgcaggtattttgatgaaggacgtgggagctgcccatttggagggaactgtttttacaagcatgcgtaccctgatggccgtagagaggagccacagagacagaaagtgggaacatcaagcagataccgggcccaacgaaggaaccacttctgggaactcattgaggaaagagagaacagcaacccctttgacaacgatgaagaagaggttgtcacctttgagctgggcgagatgttgcttatgcttttggctgcaggtggggacgacgaactaacagactctgaagatgagtgggacttgtttcatgatgagctggaagatttttatgacttggatctatagcaaccttgcgtggcgtgtgaactggtctgctgacctca

SEQ ID NO: 5141 - DNA, 399 bp, Homo sapiens
  misc_feature (1)...(399): n = g, a, c or t
cagtggncttggngtgctggcctcggacacgaaggccccanaantgacgcagccctntatgggcccgaatcttcttcagtcgctccaggtcttcacggagcttgttgtccagaccattggctaggacctggctgtattttccatcctttacatccttctgtctgttcaagaaccagtctgggatcttgtactggcgtggattctgcataatggtgatcacacgttccacctcatcctcagtgagttctcccgccctcttggtgaggtcaatgtctgctttcctcaacaccacatgagcatatcttcggcccacacccttaatggcagtgatggcaaaggctattttccgccgcccatcgatgttggtgttgagtactcgcaaaatatgctggaactttt

SEQ ID NO: 5142 - DNA, 459 bp, Homo sapiens
  misc_feature (1)...(459): n = g, a, c or t
aaaaatggagagtctgaattttattagagctcacacaccatatattaacatatacaactgtgaaccagctaatccctctgagaaaaactccccatctacccaatactgttacagcatacaatctctgttcttgggcattttgtcagtgatgctgatctttgccctcttccaggaacttgtaatagctggcatcgttgagaatgaatggaaaagaacgtgctccagacccaaatctaacatagttctcctgtcagcagaagaaaaaaaagaacagactattgaaataaaagaagaagtggttgggctaactgaaacatcttcccaaccaaagaatgaagaagacattgaaattattccaatccaagaagaggaagaagaagaaacagagacgaactttccagaacctccccaagatcaggaatcctcaccaatagaaaatgacagctctccttaagngat

SEQ ID NO: 5143 - DNA, 248 bp, Homo sapiens
ccatggtcaagagaaaggatttctgaaggcagccctggaagtggagttaggagcttctaacccgtcatggtttcaatacacattcttcttttgccagcgcttctgaagagctgctctcacctctctgcatcccaatagatatccccctatgtgcatgcacacctgcacactcacggctgaaatctccctaacccagggggaccttagcatgcctaagtgactaaaccaataaaaatgttctggtctgg

SEQ ID NO: 5144 - DNA, 471 bp, Homo sapiens; identical to SEQ ID NO: 382

SEQ ID NO: 5145 - DNA, 452 bp, Homo sapiens
tgctgcccgagttatcgggaccctgttgggaactgtcgacaaacactcagtggaggtcaccaattgcttttcagtgccgcacaatgagtcagaagatgaagtggctgttgacatggaatttgctaagaatatgtatgaactgcataaaaaagtttctccaaatgagctcatcctgggctggtacgctacgggccatgacatcacagagcactctgtgctgatccatgagtactacagccgagaggcccccaaccccatccacctcactgtggacacaagtctccagaacggccgcatgagcatcaaagcctacgtcagcactttaatgggagtccctgggaggaccatgggagtgatgttcacgcctctgacagtgaaatacgcgtactacgacactgaacgcatcggagttgacctgatcatgaagacctgctttagccccaacagagtga

SEQ ID NO: 5146 - DNA, 425 bp, Homo sapiens
  misc_feature (1)...(425): n = g, a, c or t
ctgcacactggcacacttgaccttcatgcagtcagaagctttggctgattccccatccaaaatattagagatgaaatgaaagcaaagtaggcatctgacaaaagttgctttttcccttctgcattttaggacctcaagtaatgtttatccagaaactgctatcataccagagattcactgtgtatttaacaacataggcatccaatctggcaaatttgaaaaactcttaacatacaccccaaatccctgcccaaatttaagaactagggtggacacagtgcttttttccatgtcgcatcttctgtgatggggctacgatatgtgggagcagagaatgnggagggtggagcgcatnccagatgaggatctatcagcaatgggagggggcctccactttagcatctccaccctgctcctctcagagg

SEQ ID NO: 5147 - DNA, 348 bp, Homo sapiens
  misc_feature (1)...(348): n = g, a, c or t
aaagtttagacattaacaagtgatagattagcctcaaaaaaagacaatttggtaaggtttaggtcttttaatttggtgcttgttcacaacttgactggtgcttctttccttgctgtcttcacatcaagccatggggccaattctattttcagtaaatgtttgacagctttttacttagtaacagtctcagcacttttattaagcatgcaagactaacaaaaactttggcaatgcataagngtaacacagtgacaagagagcttttacaattaagncttctaatactgccttcacagngtggaaattgtgctacatccaccaaaagagggccccgnctactcaaatatt

SEQ ID NO: 5148 - DNA, 405 bp, Homo sapiens
  misc_feature (1)...(405): n = g, a, c or t
ctgcccttccatgtcgtcacaggcataccgggcgtggacccactgcttggngcccttgccgaagtagtagcacttccgttggaaattgatccacttttcagggcacgtgttgcacacaaagccgctggacacctgcaactccatccttagctttgtcacctcctcccggagtctttccagcaaatctgaagcttcgttcctctcgttcaattcctgggacttgaagctgctcagatctgcttgaagcccgttcaggntccaggacagctccaagtcctgagatttcaatctctgctgttcagctcgaagttcctccagttcctgtgaaatctgcgtggactgggatttctgcgccatctggtcaccgtggnggctttccaagttctnggaaacttgagagacgtt

SEQ ID NO: 5149 - DNA, 130 bp, Homo sapiens
  misc_feature (1)...(130): n = g, a, c or t
cggatcagaaggccacaagcttccctctcctcccctatcttcccaggtctgtattccgggagcctgtgtaactcgggcctcaactccaggctcccggctgggnattctcattctctgcagtacttgaaaa

SEQ ID NO: 5150 - DNA, 345 bp, Homo sapiens
gagagagcgagctgagtggttgtgtggtcgcgtctcggaaaccggtagcgcttgcagcatggctgaccaactgactgaagagcagattgcagaattcaaagaagctttttcactatttgacaaagatggtgatggaactataacaacaaaggaattgggaactgtaatgagatctcttgggcagaatcccgcagaagcagagttacaggacatgattaatgaagtagatgctgatggtaatggcacaattgacttccctgaatttctgacaatgatggcaagaaaaatgaaagacacagacagtgaagaagaaattagagaagcattccgtgtctttcatttttc

SEQ ID NO: 5151 - DNA, 400 bp, Homo sapiens
ctgtcccttgaatatcatcattgaaagtacaatatttttctcggtactttctaaagaacctgaatgcattatgatttccaaagtcttcgaactgaatgagtgtgttccggccatatctgtcagtaatagctttcataaactcatcaatcaggtcatcatactgttgtgtgcgatctcgtttctggtacaagcccatgtaaaatgggtcttttaagagtgcgatattatcagttcccacatcaatacacactggcaggcatctatcaggccgtattcctgcacaagctgtatacaaacaaagttttcctactggaattcccattccatagacacccagatctccaagacccagaattctctctccatcagtcactacaacagccttaacatgattttctgg

SEQ ID NO: 5152 - DNA, 316 bp, Homo sapiens
  misc_feature (1)...(316): n = g, a, c or t
taatgaaaaagacttanaacaatgtattatttacatgtaaataacnaaaaganagcagaatccccatatcctcttcaaaggaagggagacggcaggccatttatganaagaaagtccatataaaccccattaagnanaatctggatctaaatacttccaaacaggagtacacagcaggngaacagnctccctnatcccactgatctgctgcttcagataanatcagcaacnntcatcggcntctcatcaatctgagtggaatagtactgctcgatatctctgaggatgcggatgnngtcattctttacaaagttaa

SEQ ID NO: 5153 - DNA, 408 bp, Homo sapiens
  misc_feature (1)...(408): n = g, a, c or t
aaaaaaaaaaaaaaaaaaaaaaaaaaaaaaangaaaaacttctntttaggctgggtgcggttcctcatgcctataatcccancatttagggaggctgaggtgagtggattgcagganctcaggagttcganaccagcctgggcaaggnggcaaaaccccgtctntactaaaaaaaattagctgggcttggnggcaggcncctgtaatcccaggtnctcggganactgaggtagganaattgcttgaacctggaaggtggaggttgcagtgagttganatcacaccaatgcactccacccagggtganagtgananactgtctcaaaaaaaaaaancaaaagaaaaacttctntntagctntgtgacgggcagttcanataataccttcaccanatttacctgttttca

SEQ ID NO: 5154 - DNA, 327 bp, Homo sapiens
  misc_feature (1)...(327): n = g, a, c or t
caggncttattcatcagggaggaaagtttctttgaaaatagttattcagntataagtaatacaggattattttgattatatacttgttgtttaatgnttaaaatttcttagaaagcaatggaatgagaatttaagcctcaaatttgaacatgtggcttgaattaagaagaaaattatggcatatattaaaagcaggcttctatgaaagactcaaaaagctgcctgggaggcaganggaacttgagcctgtcaagaggcaaaggaatccatgtagnagatatcctctgcttaaaaactcactacggaggagaattaagtcctactttt

SEQ ID NO: 5155 - DNA, 426 bp, Homo sapiens
ctggaagagagggctgcccggaacgtctctcaagtttccaagaacttggaaagccaccacggtgaccagatggcgcagaaatcccagtccacgcagatttcacaggaactggaggaacttcgagctgaacagcagagattgaaatctcaggacttggagctgtcctggaacctgaacgggcttcaagcagatctgagcagcttcaagtcccaggaattgaacgagaggaacgaagcttcagatttgctggaaagactccgggaggaggtgacaaagctaaggatggagttacaggtgtccagcggctttgtgtgcaacacgtgccctgaaaagtggatcaatttccaacggaagtgctactacttcggcaagggcaccaagcagtgggtccacgcccggtatgcctgtgacgacatggaagggcag

SEQ ID NO: 5156 - DNA, 481 bp, Homo sapiens
ccacacagactcaccaagccacagacttgtcttccacaagcacgttcttaccttagccacgaagtgaccaagccacacgtactaaaggttgaactcaaagatatgtacagggtattaaacaaataccaaggggaacagttaacttcaatacaaggtcaaaatcagcaacaagttctacaatccagtgctgatatcagatacaagcttcaaggacaatttcttttcgaaggcttattccagtttcgtgaggctagcatgaggtgtgtgcatttgccaggggcaaatttctattctcaattaacccatgcagcaaatgctacgcatctgctgagtccgtttagaagcatttgcggtggacgatggaggggcccgactcgtcgtactcctgcttgctaatccacatctgctggaaggtggacagtgaggccaggatggagccaccgatccacaccgagtacttgcgctctgggggtgcgatgat

SEQ ID NO: 5157 - DNA, 463 bp, Homo sapiens
  misc_feature (1)...(463): n = g, a, c or t
ctgagattggctcagtgacccgggggcgtgaggctgaggcatgcggtactgactgaagattggctctggctcgtctgagggcacggatgtccttcccaatgcctcgtgtgagttggtaagtattgccagctaaggaaagaaagttggatatgttctcacccaaaaactccttcacctccttcaatttgtcaaggcttttgatgaccaggtcgtgggcttgggcttgtgtccaccacttctttccgtagtctatggtactgctggtaatcccggtcaaagctgctgtgattcccaactccatcccaggttccaagagtacaaggctgcctccctctgtgaagggtgccagacccatgccgacgagggtcaggatgccagangaaatgctgagagagccagacaccacattggcgatggnggtgcctttgtggaccttntgaaccccatctgcaagggcacggag

SEQ ID NO: 5158 - DNA, 326 bp, Homo sapiens
  misc_feature (1)...(326): n = g, a, c or t
cctgccttttacacaccagttgtgtgtttgttagtggctgctggatgccagtccacaccctcaaacacctctcagtcccaaacggggtgctcctacaggncccagggtcctgttagtggaagaaaggcagttccaggaagtcttcctctagccttcatgacaggaagtagttaatcctctgggaaatagacttgcagccctgggaagaaaagagttgttcctccttggggacatacaccatcatctgggctatttcatccagtgtctcttctttatacaggagctcctggctcaggaaggcatcccgtgcacacagcctcacgtga

SEQ ID NO: 5159 - DNA, 357 bp, Homo sapiens
  misc_feature (1)...(357): n = g, a, c or t
ttgtgttaatcccagttttagtgcagcttaggaggctgctagttaggaagatggcagtggctgtaggttgggttgccagaaaagatggnggcctagtcttattattcagatggagaacttagaaagcctgaagagtacccaaattggattgtattttaatggacaatggctgtattttttccatgttagaaggatcctaatgaaagcacctgttatttttaagnttctaagggtctagttgttcagaatccccaaggatatttccctaacctcactcagtcacattgtaggagccagngtagctatggaattatcttaggaactcaagcttctaaaactatccatgtagtcaaatct

SEQ ID NO: 5160 - DNA, 332 bp, Homo sapiens
  misc_feature (1)...(332): n = g, a, c or t
ctgtgtaaagtacagatcctaatataggtaactaactaatacctactaaatatgcattatttttagcttgttttagaagcagatacctatcgatttcagaagaatctgcgaatggcaaccaaaaggcaaaagaaaagtaaatgaacacagcagtgtttattaggtggnttttaatattgtttattagcacagnaacaaatgcagacttaagtagtccacaacatagaaccaatccactgagcaactcctattccacgccttacagntagttaacagcttaaggtatttcactacaggttttcacaagtcctgattcagaccttttttacctc

SEQ ID NO: 5161 - DNA, 452 bp, Homo sapiens
  misc_feature (1)...(452): n = g, a, c or t
gttttaaggatgataaaaaaaaataacaactagggacaatacagaacccattccatttatctttctacagggctgacattgtggcacattcttagagttaccacaccccatgagggaagctctaaatagccaacacccatctgttttttgtaaaaacagcatagcttatacatggacatgtctctgccttaacttttcctaactcccactctaggctattgtttgcatgtctacctacttttagccattatgcgagaaaagaaaaaaatgaccatagaaaatgccaccatgaggtgcccaaatttcaaataataattaacatttaggtatatttataatttccagatgacaaagtatttcatcaaataacttcatttgatgttccatgatcaaganagaatccctatctctattttacaagtaattcaaagaggccaaataacttgtaaaca

SEQ ID NO: 5162 - DNA, 292 bp, Homo sapiens
  misc_feature (1)...(292): n = g, a, c or t
ctgctggtgctgggcaggctggagactcacgggagaggcaggaggagaatcagcgtgttgagtccctcgctgtgttagtgtgaaaaattctcattactgttgcaaataaaagggatcacgatcactagccccggaaaccctcatctcccggaccatcaggatcgcactgaacagaatggtcccctaatggtccctgaggacagcgtcttgcagaacataaatgtnaacattgaatggcagacgactcccttccccttgaaatcttcacaaaagtgtgtacgagaaagtatgt

SEQ ID NO: 5163 - DNA, 464 bp, Homo sapiens
gagaaacataagctagactgaaacataggggcaacactttcactgtgcttttcaatccaaaataattttcctaagagcccactatgtaccacacactattgagcacttgggattaaaaaaaagttctccagaggctttccagtctagtaccatgtgtctcagtcttggtgctactggtattcggggcttcagaattatttgttggggattggtggggtggggagctttcctgtgcttcgtaggaggttcagcaacacctctggcttctaccaaatagataccagtaagcacatgcaccctcacagccagatgggacaatcagcaatgtcttcagccattgccaggggacagaatcatcctcgattgaaagcatctggtctaaggggaaagaccagtgtggaagtcagacaggaagtcactggcaggctagtatcctttggatgaacagtttacttactataagt

SEQ ID NO: 5164 - DNA, 505 bp, Homo sapiens
  misc_feature (1)...(505): n = g, a, c or t
cctcagggcctcttctggaaaatgaagaaattcaactagtagattcctgaggtctccccagcttaaaaaaaaaaaatctgccccgtgattctaacactcgcagtagtgatagtgtatctagttgttctgctggtgtccttccttggctaagtcttggccttcagttatcttcaaatgtaccagaacctgagccaacgcctccctgtgaaactgttgctgatctgtagtacagtaccaggaagaaacctcttttgttctctttagacatcttctacttgctcttggccttgagatcgtgtaacaaaatgaaggagggctctcttctttcttcctcatcctactcaaaaacttcccgagagcagtggtggttttgagggttttgacttctattacttttggcagcctggaaagttgtgtcttctgggaaagagacccggggaggccaggagtagctgagggtcctttctgtgcccttaaaccgcccanaggagccctattccactct

SEQ ID NO: 5165 - DNA, 489 bp, Homo sapiens; identical to SEQ ID NO: 235
  misc_feature (1)...(489): n = g, a, c or t

SEQ ID NO: 5166 - DNA, 480 bp, Homo sapiens
caacatgccatccagactgaggaagacccggaaacttaggggccacgtgagccacggccacggccgcataggcaagcaccggaagcaccccggcggccgcggtaatgctggtggtctgcatcaccaccggatcaacttcgacaaataccacccaggctactttgggaaagttggtatgaagcattaccacttaaagaggaaccagagcttctgcccaactgtcaaccttgacaaattgtggactttggtcagtgaacagacacgggtgaatgctgctaaaaacaagacgggggctgctcccatcattgatgtggtgcgatcgggctactacaaagttctgggaaagggaaagctcccaaagcagcctgtcatcgtgaaggccaaattcttcagcagaagagctgaggagaagattaagagtgttgggggggcctgtgtcctggtggcttgaagccacatggagggagtttcattaaatgc

SEQ ID NO: 5167 - DNA, 395 bp, Homo sapiens
aaaaaaaaaaaaaaacaaaaaacagggtggagaggaggataggaaggggacagttgataaaaccccagggccacagcagaggcaaagggcatctggggagagggttcgaagctgtggcggactccactaatgtaaccctccaatgtcaagccatgggcgtgatcagtagctaagtgatgacaaggctgttgggggtggacggaaaagacttggggcaaagcagactgtttatagcctgagctggtagggcctggtgcagcagcctacccggaactggcactactctttcccaggttccctgactctctatcctggtctctgagagcgtgccctacttccgtttcccccactccaaacacacctgaggcatcttccagtgctaggccccatgctgg

SEQ ID NO: 5168 - DNA, 269 bp, Homo sapiens
  misc_feature (1)...(269): n = g, a, c or t
ccaattatccatatgatgagacgcggagtggtagtgctcacgaatacagctcctccccagatgacgccattttccaaagcttggcccgggcatactcttctttnaacccggccatgtctgaccccaatcggccaccatgtcgcaagaatgatgatgacagcagctttgtagatggaaccaccaacggtggtgcttggtacagcgtacctggagggatgcangacttcaattaccttagcagcaactgttttgaaatcaccgtggagctt

SEQ ID NO: 5169 - DNA, 456 bp, Homo sapiens
ctggagtgaagggagctagtgtttaggtagcagtcaccattatgctcaaagcggtgatcctgattggaggccctcaaaagggaactcgcttcagacctttgtcttttgaggtgcccaaaccattgtttcctgtggcaggggtccctatgatccaacaccatattgaagcctgtgcccaggtccctggaatgcaggagattctgctcattggcttctaccaacctgatgagcccctcacccagttcctagaagccgcccagcaggagtttaaccttccagtcaggtacctgcaggaatttgcccccctaggcacagggggtggtctttaccattttcgagaccagatcctggctgggagccccgaggcattcttcgtgctcaatgctgatgtctgctccgacttccccttgagtactatgttggaagcccaccgacgccagcgtcaccctttcttac

SEQ ID NO: 5170 - DNA, 342 bp, Homo sapiens; identical to SEQ ID NO: 577
  misc_feature (1)...(342): n = g, a, c or t

SEQ ID NO: 5171 - DNA, 363 bp, Homo sapiens
  misc_feature (1)...(363): n = g, a, c or t
acgcagcagcctatccgtcgncctatgccccagtgagcacagcttttccccagcagccttcagccctgccccagcagcagagagaaggccccgaaggctgnaacctcttcatctatcacctgcctcaggagntnggtgatgcggaactcatacagacattcctgccctttggagccgntgtctctgctaaagnctttgtggatcgagccnccaaccagagcaagngttntggggttgttaattttgacaatccaactagtgcccagactgctattcaggcgatgaatggctttcaaattggcatgangaggctcaagnnccagctaaagcggnccaaggatgccaaccggccttactgacctg

SEQ ID NO: 5172 - DNA, 272 bp, Homo sapiens
  misc_feature (1)...(272): n = g, a, c or t
ctggaactggctcacagacaggacatctgcctcctcactcaactccactgctctctgggctaagaagatctcaagctccatgagctcatcaaggaactgattccgggtctcagtgtattcaagcagngncagggcatctgggcccctggcaacaccttctggagcctgggttcctgcttccagcactgtgatctgcaaagcaacagcatcgtctccccagtctatcccatcacctccaggatcctttgaatctgattccgggaagatgcccc

SEQ ID NO: 5173 - DNA, 275 bp, Homo sapiens
  misc_feature (1)...(275): n = g, a, c or t
caaagttgaaaattcatagtaagattgatatctataaaatagatataaanttttaagagaaagaatttagtattatcaaagggataaagaaaaaaatactatttaagatgtgaaaattacagtccaaaatactgntctttccaggctatgtataaaatacatagtgaaaattgtttagngatattacatttatttatccagaaaactgtgatttcaggagaacctaacatgctggcgaatattttcaactttttccctcactaattggtactttt

SEQ ID NO: 5174 - DNA, 560 bp, Homo sapiens; identical to SEQ ID NO: 237
  misc_feature (1)...(560): n = g, a, c or t

SEQ ID NO: 5175 - DNA, 306 bp, Homo sapiens; identical to SEQ ID NO: 236

SEQ ID NO: 5176 - DNA, 451 bp, Homo sapiens
  misc_feature (1)...(451): n = g, a, c or t
ttttttttttttttttttttttttttttttttataaaagcttatttttntttattanaatacttttttcaattctgatttgncacaatttaaattntttttntaagaataagcnnaaatttacaaaatttaatttttatttatacatccatccgttcaatacacatttnaanaaagctgtattgcaccctttcagnggtagttacaggacaaanaaacaaaataatccaagagaganaccaacaaatgtntntttataacacagagtaataaacncaaataaatgnggagttatttaagcatgtaanatggtacatgctntaccaggtntgggggcttntntaagacacaagatcagattaaagtnttgaaaganaatntggggttagtcaagcaggtaaaagtgtgaaaagcactttntgagcggaatntccatntgccaagtntaaacc

SEQ ID NO: 5177 - DNA, 484 bp, Homo sapiens; identical to SEQ ID NO: 238
  misc_feature (1)...(484): n = g, a, c or t

SEQ ID NO: 5178 - DNA, 416 bp, Homo sapiens
  misc_feature (1)...(416): n = g, a, c or t
ctttttttttttttttttttttttttttttttttatgacaaattttttatttcaaaaatntcaagttgtaaccagcatagcaccactgacatggatgccttgatagaactccttgatagaactttatgatctgttcaccanaaaanattctacatgatcacnccanactntaattaaggntaaccaatcaaaattcaggtacccaaaaccagttntaatccaggtagaaactacagatcataggaaccctgggactggttttccagggaaccctggaattattttttaagngctacagcatgtacaaggacactggcccanaagcttgcttntcacacgtanaaactgacagactaanaggtagatganagattccaggttccatntancantgganaggcagggctccagcatgt

SEQ ID NO: 5179 - DNA, 186 bp, Homo sapiens; identical to SEQ ID NO: 386

SEQ ID NO: 5180 - DNA, 439 bp, Homo sapiens; identical to SEQ ID NO: 240
  misc_feature (1)...(439): n = g, a, c or t

SEQ ID NO: 5181 - DNA, 306 bp, Homo sapiens
  misc_feature (1)...(306): n = g, a, c or t
ccacccagactgaccagcgggagatggggccccacagggcctcctgcgtcaatgccatggaagggaagaaactggcccaggatgtcagagccaagggctacctggagtgctcagcccttagtaatcggggagtacagcaggtgtttgagtgcgccgtccgaactgccgtcaaccaggccaggagacgaaacagaaggaggctcttctccatcaatgagtgcaagatcttctaaaccccaagagacttcacacaacacttatgtatgcaccccaaagactaatggggagagggagnccgggaagcca

SEQ ID NO: 5182 - DNA, 320 bp, Homo sapiens; identical to SEQ ID NO: 388
  misc_feature (1)...(320): n = g, a, c or t

SEQ ID NO: 5183 - DNA, 173 bp, Homo sapiens
  misc_feature (1)...(173): n = g, a, c or t
ccttagcagtagcntgagctgcccccagggctgtgagctgctgaatcttctgactcatcatttccatgacggctgtttcatggcgtgcttctcctgaagagctggntggattttctccatctgcttggctagaaaatctatcttcctcttgaagaagnccttggcatcctcag

SEQ ID NO: 5184 - DNA, 228 bp, Homo sapiens
  misc_feature (1)...(228): n = g, a, c or t
ctggaagatggccgcactctttctgnctacaacatccagaaggagtcgaccctgcacctggtcctgcgtctgagaggnggnntgcagatcttcgtgaagaccctgaccggcaagaccatcactctggaggtggagcccagtgacaccatcgaaaatgtgaaggccaagatccaagataaagaaggcatcccccccgaccagcagaggctcatctttgcaggcaagcag

SEQ ID NO: 5185 - DNA, 331 bp, Homo sapiens; identical to SEQ ID NO: 389

SEQ ID NO: 5186 - DNA, 439 bp, Homo sapiens
aaaagaggtgcctgcatgtcactattacccccctccccaaatgagaaaaggattttgtttccggaaactggatcagcttctcctcagttaaagaggaaacgggaagtgggcggctggccttctgaccaggcacccgtttgaaccaggatgctcagggcggcctaggcttggctttgtgaagtgtgtgctgctacgcgtcttgtttttggcagtttggtgtctctgagggaggggaggagagtggcaaccggccactggttaatggaagaggatgcgatgcggagatgcttgcttccttcctttggtccaccgccaccccgcctttggagagggcacccacgtaatagacctcatttgtctccaccagagctcactcttacaaaataagctttggattaataccgagttaggcgcagtatggcaggcagggggcgaaaag

SEQ ID NO: 5187 - DNA, 493 bp, Homo sapiens; identical to SEQ ID NO: 239

SEQ ID NO: 5188 - DNA, 435 bp, Homo sapiens
cctgtattatacgtgtcctcctgggggttggagatgatccctcaagtacacaaaggtcccctggcccttcatctgggaatcatatactccactctagctcccagaatctacagacctggctcctcggatctgaagcccagcacaaaataatctccccgtccaaggagcttgtggaacttgaattgggaactttggagtcttgtctcccatcccagcacattgaggatgtagttggtgaatggactcttccaggcatggagatcctccatcctaaaagtacctgcctccttcccagccatccctgacacattccagccagttggatctcacagcacagctatccacagggagactgggatgttcacgcagcactccattactcagtacctccatacccagccctatacgcagacccacaggtggggaaactgaggc

SEQ ID NO: 5189 - DNA, 377 bp, Homo sapiens
  misc_feature (1)...(377): n = g, a, c or t
ccgggttgacaaatggtggggtaacagaaaggaactggctaccgttcggactatttgtagtcatgtacagaacatgatcaagggtgttacactgggcttccgttacaagatgaggtctgtgtatgctcacttccccatcaacgttgttatccaggagaatgggtctcttgttgaaatccgaaatttcttgggtgaaaaatacatccgcagggttcggatgagaccaggtgttgcttgttcagtatctcaagcccagaaagatgaattaatccttgaaggaaatgacattgagcttgtttcaaattcagcggctttgattcagcaagccacaacagttaaaaacaaggatatcaggaaatttttggatggnatctatg

SEQ ID NO: 5190 - DNA, 345 bp, Homo sapiens; identical to SEQ ID NO: 498
  misc_feature (1)...(345): n = g, a, c or t

SEQ ID NO: 5191 - DNA, 391 bp, Homo sapiens; identical to SEQ ID NO: 390
  misc_feature (1)...(391): n = g, a, c or t

SEQ ID NO: 5192 - DNA, 178 bp, Homo sapiens
  misc_feature (1)...(178): n = g, a, c or t
tctctntcacacacacagagcccctaccagaaccagacagctctcagagcaaccctggctccaacccctcttccctttccagaggacctgaacaaggtgttcccacccgaggtcgctgtgnttgagccaccagaagcagagatctcccacacccaaaaggccacactggtgtgcctgg

SEQ ID NO: 5193 - DNA, 490 bp, Homo sapiens
  misc_feature (1)...(490): n = g, a, c or t
aggagctgtgcccagtgcctgcanccttcataagcncacacgtncattccctactaaggcccanacctcctggtatntgccccgggctccctcatcccacctccatccggagttgcccaagatgcatgtccagcataggcaggattgctcggtggtgagaaggttaggtccggctcagactgaataagaagagataaaatttgccttaaaacttacctggcagtggctttgctgcacggtctgaaaccacctgttcccaccctcttgaccgaaatttccttgtgacacagagaagggcaaaggtctgagcccagagttgacggagggagtatttcagggttcacttcaggggctcccaaagcgacaagatcgttagggagagaggcccagggtggggactgggaatttaaggagagctgggaacggatcccttaggttcaggaagcttctgtgcaagctgcgaggatggcttgggccgaagggttgctct

SEQ ID NO: 5194 - DNA, 457 bp, Homo sapiens
  misc_feature (1)...(457): n = g, a, c or t
ctgcttccagagtgctctgttactgactcagtgaacctggctgagcccatggaacagaatcctcctcagcaacaaagactagcactccacaatcccctgccaaaagccaagcctggcacacatcttcctcagggaccatcttcaaggacgcacccagaacctctagctggccgacacttcaatctggcccctctaggccgacgaagagttcagtcccaatgggcctccactaggggaggccataaggagcgccccacagtcgtgctgtttccctttaggaatctcggctcaccaacccaggtcatatctaancctgagagcaaggaagaacatgcgatatacacagcagacctagccatgggcacaagancagcctccactgggaagtctaagagtccatgccagaccctggggggaagggctctgaaggagaacccagttgacttgcctgccacag

SEQ ID NO: 5195 - DNA, 202 bp, Homo sapiens
  misc_feature (1)...(202): n = g, a, c or t
tcctctatggcccctgccttcccaggagtacaccccaacagcaccctctccagatgggagggcccccaacagcaccctctccagatgagagnacaccccaacagcaccctctccagatgagagtacaccccaacagcaccctctccagatgagagnncaccccaacagcacnctctccagatgcagccccatctcctcagca

SEQ ID NO: 5196 - DNA, 565 bp, Homo sapiens
ctggcctgggtttctgacccattgagactgccgtgccacgatgctccgtcacctcctttgatcctcctgtatgctgggctggagagaacaggaagggctactgacccatttttatagaagcaaccctaacgatttgagcaatggagtctggcacaggctcagcaggtggaggaagagtaagctgtcaggaaagcagcaggggagagtagtagggtcctgacttgactcagggtctttggaaagttgggtgtggcctccaaggtgagaagataggtgtgggccaccaccaggccatgacaggcgggcagtattgcccaggcttctctctccagtctgtcctgcgtggcatctcctttgagggtcagagaagccagggagggaggcaagctggggtgggtctcattatagaaaagagaagactggggctaagaggggatgttcctgccagcatgccagcctctgatgccacctgcaaaactggtggcaccacctcaaactcagcaatggccttttcaaacctggctcagtacaaacaactcccaaaccatacactttaggaaaactt

SEQ ID NO: 5197 - DNA, 441 bp, Homo sapiens
ctgcaaatggttctgctgaaacatctgccttggacacagggttctcgctcaacctttcagagctgagagaatatacagagggtctcacggaagccaaggaagacgatgatggggaccacagttcccttcagtctggtcagtccgttatctccctgctgagctcagaagaattaaaaaaactcatcgaggaggtgaaggttctggatgaagcaacattaaagcaattagacggcatccatgtcaccatcttacacaaggaggaaggtgctggtcttgggttcagcttggcaggaggagcagatctagaaaacaaggtgattacggttcacagagtgtttccaaatgggctggcctcccaggaagggactattcagaagggcaatgaggttctttccatcaacggcaagtctctcaaggggaccacgcaccatgatgccttgg

SEQ ID NO: 5198 - DNA, 441 bp, Homo sapiens; identical to SEQ ID NO: 5197

SEQ ID NO: 5199 - DNA, 462 bp, Homo sapiens; identical to SEQ ID NO: 391
  misc_feature (1)...(462): n = g, a, c or t

SEQ ID NO: 5200 - DNA, 276 bp, Homo sapiens
ccaaggaatgcaggctgtactatctgcgaaatggagaacgtatttcagtgtcggcagcctccaagctgctgtccaacatgatgtgccagtaccggggcatgggcctctctatgggcagtatgatctgtggctgggataagaagggtcctggactctactacgtggatgaacatgggactcggctctcaggaaatatgttctccacgggtagtgggaacacttatacctacggggtcatggacagtggctatcggcctaatcttagccctgaagagg

SEQ ID NO: 5201 - DNA, 469 bp, Homo sapiens
ccatccactagcccagggggggacgcagaccccacactccatggagtctggaatgcatgggagctgcccccccagtggacaccattggaccccacccagcctggatctaccccaggagactctgggaacttttaggggtcactcaattctgcagtataaataactaatgtctctacaattttgaaataaagcaacagacttctcaataatcaatgaagtagctgagaaaactaagtcagaaagtgcattaaactgaatcacaatgtaaatattacacatcaagcgatgaaactggaaaactacaagccacgaatgaatgaattaggaaagaaaaaaagtaggaaatgaatgatcttggctttcctataagaaatttagggcagggcacggtggctcacgcctgtaattccagcactttgggaggccgaggcgggcagatcacgagttcaggagatcgagaccatcttgg

SEQ ID NO: 5202 - DNA, 362 bp, Homo sapiens
aaaaaacaaacaataggatagtacttgagctcaggtctggttctcagctacttcatttttattttgttttattttattattatttttgagagagaatctcgctctgttgcccagtggcacgatctcggctcactgcaagctccacctcccaggttcacgccattctcctgcctcagcctcccgactagctgtgactacaggcgcctgccaccacgcccggctaattttttttttttttgtatttttagaagagacatggtttcaccacgttagccaggatggtcttgatctcctgaccttgtgatccgcccacctcagcctcccaaagtgctgggactacaggcgtgagccaccgtgcctgg

SEQ ID NO: 5203 - DNA, 300 bp, Homo sapiens
aaaacgatcaaaatctgtcatcttggctttcctttctctggcttcaatcttcttggcccatcgtgtggctgcccattttgtattgatgtctgccttctgccaggcttgtcggacatacttctggtgggcactgtgcggaaacttgaggatgaaatcagtgagctgcatgcacttgaaaggcatggcctgtctcctcacttgagtgcaaggtccatcgaccaaagccctgttctgatcaataacatctacaatcgcgaccaattttccggcatgaggtccaaaggagacataggccacccg

SEQ ID NO: 5204 - DNA, 574 bp, Homo sapiens
  misc_feature (1)...(574): n = g, a, c or t
ctggaagaccaagcccagaaattcagaggaaataatcttccaaacaaggaacaccaaggtgatcttcttccattccagccacaatactggtgatcataatggtgctagtcagttatccanattatcgagtgtttaccacatcatctattttcagaatgctccgaacagtttcagttgcaagagtcagagcactgactgataccaacagaggctggacaaccagttcctccaaaatgttggaaataccaccctttcggacattaatgcctgcagttttttctccctgggcatgccggtttcttagttctgttactgtanaaatgggattcaggccggcattttcagctagtgtagatggaatgacctccatagcatctgcaaaagcacgaacgcagtaggattccataccactcagtgttcgtgaatattcagttaatcgtagggccaactctatttctggagcaccacctcctgcaataagagccctcttcttcactaaacaacgaataacacatagggcatcatgaatggagcgctcagcttcttcaatcaccagtttgttagaaccacgaac

SEQ ID NO: 5205 - DNA, 88 bp, Homo sapiens
aaattacaaaagaatggggcactcctaggttcaggttgtgagtctgtccatcgcgaaatgcttccacagggtcagggctgaggcatgg

SEQ ID NO: 5206 - DNA, 607 bp, Homo sapiens
ccagggaacgactcagtggcacaaaggaaagagaagaaatgttacaggctgatgctgtcggggcaaatagccctgcaaccagccggacttactgtctaaaagtattaaccgtaatttcaaagacaaaccacaccccttccttttcccctaatggcctcagagatttgtaatgtactttggaaaattaacttctaaggcagagtggaagccaacctcaagtcctgccacttggactctgtgtcttctcttcgaggaagcagcattgtgcacccagcaggggcagatgctgaggcttgccttaacatctcagcagctacaaaatgaaatccactgatacagaaccccttgctgtgagcagtgaggagagagagctgtaaacagacacaaattgagatttttgcacttccaaaaaatacgaggtgaacattagtgctaaacagagagaatgttctaggaagggagaaatctgagaagaaaaagtaagatgagagagaagaaacatgatttttctaatgtacttgtttgagatcaacactttaagactactgataaaactaaatttcgtggggatagacagtgagcagtgagcatcagccagtgaatctgg

SEQ ID NO: 5207 - DNA, 537 bp, Homo sapiens
  misc_feature (1)...(537): n = g, a, c or t
ctggctgggcccaagagctccatctgtttccccaaagtacaggcagcttctaggccattgagtggggcatgatattggatgcttggctcaggaaacaaccccagccaacccaaggggcagtgggacatgttggcctcaggttagaaattattgctcaaagcagaaacagttgtgtcctanagagggtctgttaaaccctctttccatgtgtatctctatgtagcaattgatgggccctgcggtcaggatccctggtttctccagctccatgaatgcctccctgtgaggccctggacagtttctccctcttcttctcctggcttcagtttccccgtatgtacattgagacagtaaggctggatgattctcaggttccctctggctttccattctggcatcccagagtggaggctctgggagggcagaaccctgttcctgcctcagtttccccacctgtgggtctgcgtatagggctgggtatggaggtactgagtaatggagtgctgcgtgaacatcccantctccctgtggatagct

SEQ ID NO: 5208 - DNA, 539 bp, Homo sapiens
ccagtgggttgatttctttattccaggagtctctgtggttggtgggttttcaatatgctccagtcccagactgctagaacaagagagagtgatagaattggcagtgaaatatacgaaccaccctcctgccctctgggttcacaatacgtgtacacttgactgtgaagtggctgtgagagtgggtggagagttcttctttgaccctcagcctgcggatgcctctagaaacctcgtgttgattgcaggaggagtcggaattaactctctgctttccatcctgcggcacgcagcagatctcctcagagagcaggcaaacaaaagaaatggatatgagataggaacaataaaactattctacagtgcaaaaaataccagcgaactcctgtttaagaaaaatatccttgatttagtaaatgaatttcctgagaagattgcatgcagtttgcatgttacaaaacagactacacaaatcaatgcggaactcaagccatacatcacggaaggaagaataacggagaaggagataagagatcatattt

SEQ ID NO: 5209 - DNA, 543 bp, Homo sapiens
  misc_feature (1)...(543): n = g, a, c or t
ctgtgtagtaaagatgccttctggtgaatttgcacgtatatgccgagatctcagccatattggagatgctgttgtaatttcctgtgcaaaagacggagtgaaattttctgcaagtggagaacttggaaatggaaacattaaattgtcacngacaagtaatgtcgataaagaggaggaagctgttaccatagagatgaatgaaccagttcaactaacttttgcactgaggtacctgaacttctttacaaaagccactccactctcttcaacggtgacactcantatgtctgcagatgtaccccttgttgnanagtataaaattgcggatatgggacacttaaaatactacttggctcccaagatcgaggatgaagaaggatcttangcattcttaaaattcaaganaataaaactaagctctttgagaactgcttctaagatgccagcatatactgaagtcttttctgncaccaaatttgtacctctaagtacatatgtagatattggtttctgnaaataacctatttttttctctattctntg

SEQ ID NO: 5210 - DNA, 424 bp, Homo sapiens
ctgctggctggctgggcccccgtagctggactggtttgctgttaagttaagaaaacattagaaccttttttcttatgtgatgtggtacctggtggtaccgggcttgtaattctatagctatcattttccagtcttgatcttacattactgtaaccctctgcctccttctgcctactgtctataaccaggccacccttctatccatcatttgagccagtcaaatattgataaaccaaagtgctaacggtaaacacatcagcaggactaaaatcaacatgattccgtaagtagaggcattttgtgaagatcttatgaaactgcttgactggatttagtgggttccccctcagtttgatacatcaaaggcatgtcaatacacctaattatgcccacatttatcttaatcctgttttgctattgattt

SEQ ID NO: 5211 - DNA, 308 bp, Homo sapiens
  misc_feature (1)...(308): n = g, a, c or t
ccatttaccagactccgacacaatgggccaccaccagtgtgacagcaggacatcctaatatatggatcttgatttttaagtttcagtatctgaacttcgtaaattagtaacttttagctgggaaagtataacatgaaaccagaggttctcagaatgactgtaagatancnnacatttnctntttttgcctttatctccccaactaaaatacaatggggaagaagtctgcctatgatctttgaatgagctttttaaggaagaaatattatatattgtttgttaaagtttattgaaataaagaatcattt

SEQ ID NO: 5212 - DNA, 327 bp, Homo sapiens
  misc_feature (1)...(327): n = g, a, c or t
aaaaaaggtctgaatcaggacttgtgaaaacctgtagtgaaataccttaagctgttaactaactgtaaggcgtggaataggagttgctcagtggattggttctatgttgtggactacttaagtctgcatttgttactgtgctaataaacaatattaaaaaccacctaataaacactgctgtgttcatttacttttcttttgccttttggttgccattcgcanattcttctgaaatcgataggtatctgcttctaaaacaagctaaaaataatgcatatttagtaggtattagttagttacctatattaggatctgtactttacacag

SEQ ID NO: 5213 - DNA, 237 bp, Homo sapiens
cctaccgtttcctctttggtttttctgccgtttccatcatgtacctggtgttggtgttggcagtgcaagtgcatgcctggcagttgtactacagcaagaagctcctagactcttggttcaccagcacacaggagaagaagcataaatgaagcctctttggggtgaagcctggacatcccatcgaatgaaaggacactagtacagcggttccaaaatcccttctggtgattttagcag

SEQ ID NO: 5214 - DNA, 525 bp, Homo sapiens
  misc_feature (1)...(525): n = g, a, c or t
ctgtcttctctacatagtacccagttcccacatcgatgagcacgtgttccacatcatgcagnttcccagggacatacatagaactcgtnagtgggacgagtaattctttccctgtgaaagcaatgaagacaaacacctggggaaggttagcggctccaacgtaagacgttaaagagagttccaacagggcacagcacccacagacagtgtgaaaagaacggaaacaggggcaataggagcagaggaatgtcctgtacttttcaattctaggcaggcaacatgcaaagggttcatgaagcggtatacgatatgtaatggattttntcgtttcaggtaagaaaaactgggttaggaggtgggacgagagaagcaggttcgccactttaggttaccctcacccgcctaccccataccctcgttgctcttgttcagcacgttcagacagtccttggcttccacatacttggtctgtaccactttgagctgagcaatggacgtggacaagaactccacttcctggtccag

SEQ ID NO: 5215 - DNA, 118 bp, Homo sapiens
aaaaaaatgttttttaactctcctttctgtcccactgaaaaatttattttgaaagggttaagaagagtctatcattgctggtcaaaatcggcctgaggatggccgccagggacagagg

SEQ ID NO: 5216 - DNA, 616 bp, Homo sapiens
  misc_feature (1)...(616): n = g, a, c or t
cctgtattatacgtgtcctcctgggggttggagatgatccctcaagtacacaaaggtcccctggcccttcatctgggaatcatatactccactctagctcccagaatctacagacctggctcctcggatctgaagcccagcacaaaataatctccccgtccaaggagcttgtggaacttgaattgggaactttggagtcttgtctcccatcccagcacattgaggatgtagttggtgaatggactcttccaggcatggagatcctccatcctaaaagtacctgcctccttcccagccatccctgacacattccagccagttggatctcacagcacagctatccacagggagactgggatgttcacgcagcactccattactcagtacctccatacccagccctatacgcagacccacaggtggggaaactgaggcaggaacagggttctgccctcccagagcctccactctgggatgccagaatggaaagccagagggaacctgagaatcatccagtcttactgtctcaatgtacatacggggaaactgaagccnggagaagaagagggagaaactgtccagggcctcacagggaggcattcatggagctggagaa

SEQ ID NO: 5217 - DNA, 392 bp, Homo sapiens
  misc_feature (1)...(392): n = g, a, c or t
cctggcctccanttgggactcctccatcatcagagtctgagcctgtgagaaccagcagggaacacccagtgcccttgctgcccattaggcagactctcccggaggacaatgaggagcccccagctctgccccctaggactctggaaggcctccaggtggaggaagagccagtgtacgaagcagagcctgagcctgagcccgagcctgagcccgagcctgagaatgactatgaggacgttgaggagatggacaggcatgagcaggaggatgaaccanagggggactatgaggaggntctcgagcctgaagantcttctttttcttctgctctggctggatcatcangctgnccggctggggctggggctggggctgnggctctggggatctca

SEQ ID NO: 5218 - DNA, 496 bp, Homo sapiens
  misc_feature (1)...(496): n = g, a, c or t
ctgttgactcagattcggcattttaattacattgtttccaagtatgatattctgagagtgtctatancacttagtgtctgcttcatataaactaccagntattatatatttatgatgcaagtagttttccaaatgtggtgaaagtctgagtctttttatccccatgggtaaaatctgaatctggctctctgtgtctctcagtgcttgtttattgctggtcagagagtaaattcttgataaaagctgttgacttggctcccacagtttatgcagacattggagagacaatttggttatttcaaacatcacaggatttgagtaagaagacctggttatgaaacaaggctctcataattactagttntgactgttgacaagttaccttttcttgtttacaagttatttggcctctttgaattacttgtaaaatagagatagggattctttcttgatcatggaacatcaaatgaagttatttgatgaaatactttgtcat

SEQ ID NO: 5219 - DNA, 504 bp, Homo sapiens
  misc_feature (1)...(504): n = g, a, c or t
ccagcctcacgctggagtgcttcgtgcagatgttccccttggtggcggagcacgtgcgcaagtgcatgggggaggaactctaccagctcttcctgagcaacgctgaggacttgtacatgaaaatagacagcattcaggcggacatcttggcggccaacacagtcaatgttaccaaagccctgtgcctccatggcagctcctacagcatgaacactctctatggctcgcgcgattcggctcanatggcctacctcacacacttcgaggaggatgtagaatcaaaggagtaacagcccctgtggcaaaccaggaaggccaaggctgcggggcagggaagcctggcaagaggaaggcgcctggggtcaagctcanagccactccacttggctccaggggggagacggggattaggcatcccanaggggcagaggaaganccgctggctgcgaanagtcaataaacagccttgatacncaaaaaaaaaaaaaaaaaaaaaaaagcttg

SEQ ID NO: 5220 - DNA, 141 bp, Homo sapiens
  misc_feature (1)...(141): n = g, a, c or t
aaaaacaatgtttgcattttggtatttttcagattcaaattcagtaatacggttcatacgggagctaatacgtgcatntaccaatgaaaagcattgtatctcatgatttgcaaggcacccctgggggggtgaanaccccag

SEQ ID NO: 5221 - DNA, 344 bp, Homo sapiens
ctgctcagagtcttctgcagggattccattcgggacacctctgccagcctccatcttctccttcaggttccgtttgaagaaaccaacctgtacaaagacaaaatttgaacgagcaaagaattcactgagcactttggccccaagaaaatgtgagaacaccttttttttttgagatggagtctcactgtgttgcccaggctggagtgcagtggtgcgatctcggctcactgcaacctctgcctcccagacttaagcaattctcttgcctcagcctcctcagtagctgggattacaggcatctgccaccacgcccggctaatttttgtatttttagtagagacagg

SEQ ID NO: 5222 - DNA, 162 bp, Homo sapiens
gtgtgcatgcacatagggggatatctattgggatgcagagaggtgagagcagctcttcagaagcgctggcaaaagaagaatgtgtattgaaaccatgacgggttagaagctcctaactccacttccagggctgccttcagaaatcctttctcttgaccatgg

SEQ ID NO: 5223 - DNA, 505 bp, Homo sapiens
ctggagtaccaggaagaactgaggtcccactacaaggacatgctcagcgaactctccacagtcatgaatgagcagattacgggcagggacgacctgtcaaagcgcggagtggaccaaacctgcactcgagtaattagcaaagcaactccggccctacccacggtctccatctcatctagtgctgaagtctgagggctctgcagcatcagacccacctctaagagaactttctgaatttgcagctaatctcggggaagagaaagataggtttaatttatttgaagttttcatggtgttaatatttttgtttacctcgccagcttcagaattttgccaacctctgaatttgcacattttgtataatttttttttctttgagcagtgttgatcaagccaagttgaatatttgccatgaaattccagtgaatgtgtagctcaaatgcaaaccctaagtttgctgtcagttattgtatggtcagtaccccagtcctagtacacatatttt

SEQ ID NO: 5224 - DNA, 555 bp, Homo sapiens; identical to SEQ ID NO: 393

SEQ ID NO: 5225 - DNA, 78 bp, Homo sapiens
  misc_feature (1)...(78): n = g, a, c or t
ctggatggtcctcatgtctcttanttgcttccttcagcctaagcacagcagccncagncctttctggctccattgctg

SEQ ID NO: 5226 - DNA, 554 bp, Homo sapiens; identical to SEQ ID NO: 392
  misc_feature (1)...(554): n = g, a, c or t

SEQ ID NO: 5227 - DNA, 533 bp, Homo sapiens
cctgtcaggtctccttgggaaaggcttcatatttgcaactttgatgattctatgtccagcttcagagctgctttcccagaaattcacgcttaaacaaccaaccggtaaccaccacttccccacaccgccgcccggtaattatttgcattacaaaccggaggcgccctcatttgcatttgtgtacagattaactagttaaggcttgagaagctctgaataattcaaaagtattagacccacacagccttggagagaccttcagaaactaaggaggagttttatattaagggagacattttagtcagtaagacgatataacctacttactccgtaaggggaaatgaaggcccagagaagggaagggacttgaccgaggtcccacttctgtttcgaggcagaagccagactaattttcatgcctcctgactcccaatcagtttcacaaagggattcaatctgtttatatacgttacattcctggatacgaggtcttttgatgttcagagtaactgactagttagtattagaagacc

SEQ ID NO: 5228 - DNA, 236 bp, Homo sapiens
ggaaaggagagtatctgtgagtgggggcctcccttgaccccagtacgaagtctatgccctgaatccccagagtagcccttcctggtgcccaactggcctggggacaaacagcgtccactacatctaggactgccggctaagtggacacacttcttgacctcctaccaggaactttggtaaaagctagctttggggaaggggttgggtgtaaatatgagagggtggagggagaccag

SEQ ID NO: 5229 - DNA, 267 bp, Homo sapiens
ctgtagacaggtccttttcgatggtacatatttctttgcctttataatcttttatacagtgtcttacagagaaaagacataagcaaagactatgaggaatatttgcaagacatagaatagtgttggaaaatgtgcaatatgtgatgtggcaaatctctattaggaaatattctgtaatcctcagacctagaataatactagtcttataataggtttgtgactttcctaaatcaattctattacgtgcaatacttcaatacttcattt

SEQ ID NO: 5230 - DNA, 618 bp, Homo sapiens
  misc_feature (1)...(618): n = g, a, c or t
cctcgccccgatacggtcgccatgcccaagagaggaaagcgactcaagttccgggcccacgacgcctgctccggccgagtgaccgtggcggattacgccaactcggatccggcggtcgtgaggtctggacgagtcaagaaagccgtagccaacgctgttcagcaggaagtaaaatctctttgtggcttggaagcctctcaggttcctgcagaggaagctctttctggggctggtgagccctgtgacatcatcgacagcagtgatgagatggatgcccaggaggaaagcatccatgagagaactgtctccagaaaaaagaaaagcaagagacacaaagaagaactggacggggctggaggagaagagtatcccatggatatttggctattgctggcctcctatatccgtcctgaggacattgtgaatttttccctgatttgtaagaatgcctggactgtcacttgcactgctgccttttggaccaggttgtaccgaaggcactacacgctggatgcttccctgcctttgcgtctgcgaccagagtcaatggagaagctgcgctgtctccgggcttgtgtgatccgatctctgtaccatatgtatgagccatttgctgnt

SEQ ID NO: 5231 - DNA, 333 bp, Homo sapiens
cctgcgttcagttggtgcttccagacaccaagggcccttgtgaatcccatcctggaatggaagggctgactgaaaccgtggctaagaattgggagactctcttgtttcaagccaatttaacatcatttaccagatcatttgtcatgtccagtaacacagaagcaaccaactacagtatagcctgataacatgttgatttcttagctgacgttaatatttctttcttccttgtgttcccacccttggcattgccacccacccctcaattaaggcaacaatgaagttaatggataccctctgcctttggctcagaaatgttatagcaaaaatttt

SEQ ID NO: 5232 - DNA, 193 bp, Homo sapiens
  misc_feature (1)...(193): n = g, a, c or t
ctggctccaaaggananagcggnancangggtgancccggntctgctgggccccaangtcctnctggtcccagtggtgaagaaggaaagagaggccctaatggggaanctggatctgccggccctncangacctcctgggctgagaggtagtcctggttctcgtggtcttcctggagctgatggcanagctgg

SEQ ID NO: 5233 - DNA, 546 bp, Homo sapiens
  misc_feature (1)...(546): n = g, a, c or t
aaaaattgtgtaattgttaaatgtccagttttgctctgttttgcctgaagttttagtatttgttttctaggtggacctctgaaaaccaaaccagtacctggggaggttagatgtgtgtttcaggcttggagtgtatgagtggttttgcttgtattttcctccagagattttgaactttaataattgcgtgtgtgtttttttttttttaagtggctttgtttttttttctcaagtaaaattgtgaacatatttcctttataggggcagggcatgagttagggagactgaanagtattgtanactgtacatgtgccttcttaatgtgtttctcgacacattttttttcagtaacttgaaaattcaaaagggacatttggttaggttactgtacatcaatctatgcataaatggcagcttgttttcttgagccacggtctaaattttgtttttatagaaattttttatactgattggttcatagatggncagttttgtacacagactgaacaatacagcactttgccaaaaatgagtgtagcattgttt

SEQ ID NO: 5234 - DNA, 281 bp, Homo sapiens
gttacatctaaaatacagaatgtcaaatggttgcatagcttgtttcccacaagaagaaaaaaaagaacagactattgaaataaaagaagaagtggttgggctaactgaaacatcttcccaaccaaagaatgaagaagacattgaaattattccaatccaagaagaggaagaagaagaaacagagacgaactttccagaacctccccaagatcaggaatcctcaccaatagaaaatgacagctctccttaagtgatttcttctgttttctgtttcctttttt

SEQ ID NO: 5235 - DNA, 508 bp, Homo sapiens
  misc_feature (1)...(508): n = g, a, c or t
ccaggcgcaatggctcaagcctataatcccagcacttgggaacctgaggcaggcagatcacctgaggtcaggagttcaagaccagcatgtccaacatggtgaaaccccatctctactaaaaatacaaaaaaattagccaggcatggtggcacatgcctgtaatcccagctacttgggaggctgaggaggagactcactagaactcaggaagcagaggttgcagtgagccaagactgcgccactgcactctggcctaagcaacagagggagactccatctcaaaaaaaaaaaaaaagattatttctctaacttactggtttatcttttatagctcatttnaggtgatttgttgtgtttgtctatagagtaaaataacatgtctaatgagttataatttaatgtccttccattcaatcactgnatttcaaatttattccaatattttggaataagcttccaatattttaacttaaatagggaaggtcatacttggtatttttcctgacct

SEQ ID NO: 5236 - DNA, 446 bp, Homo sapiens
  misc_feature (1)...(446): n = g, a, c or t
aaaaatctatttatttatcaaaacagtattggcacagnaattctnatattatcatcaaataataaaattgctactttctgtactcaattctttanaatcctanaaattgcaaatgcattcaatttaacaatattgtaaataacaatacaaaagaaagaactctgcatatttatggaaacattgttgatggtacagttctactgaaacncatacacatttcactatttaatttacatatggtcttgttgaaaaaaaccantatgttntactttttcaatttncttatgctaaaatacatgtaattctaaaggatatctcttaggtgtnataaaaaccaaggaaggtccaccaccaagtcaaagttagagtcaaagatacttcaaagattccatgaaatgatctgaaaacaaanttaaccaaaaaatgtgtactgtattggggnacat

SEQ ID NO: 5237 - DNA, 538 bp, Homo sapiens
  misc_feature (1)...(538): n = g, a, c or t
ctgctgtgtgcctccacatggacttctcgtgtctctaggtcattggcattccttcctcctcctcctcctgggagtggggtggatttcaggcggtgtcaaaggctcaacggggctgcaacagtttttttttttttttgagacggagtttcgctcttgtcgcccaggctggtgtgcagtggtgtgatctcagctcactacaacctccgcctcccaggttcaagcgattctcctgcctcagcctcccaagtagctgggagtacaggcacatgccaccacgcccagctaattttgtatttttagtagagaaggggcttcactatgttggtcaggctggtcttgaactcctacctcaggtgatccacctgcatcggcctcccaaagtgctgggattacaggcgtgagccaccgcactgggctggaaagtctttttgagatcttcctcctccttctctccctttttcacagaagggacaaactaaggttgggaagcagcaagtcatgcaccctanatccacctgcccacccaggctcaaggacc

SEQ ID NO: 5238 - DNA, 340 bp, Homo sapiens; identical to SEQ ID NO: 325

SEQ ID NO: 5239 - DNA, 528 bp, Homo sapiens
aaaagaactggctggaatattcatcagcctactaatgtcatctcccaacccactctccaaactccatcccaaaaaagcatccagttcagaattgcccactgttggcaaagaaagaatgtcactaatttatttacaggtgagtattaacactttctgccaatgtgtattttaagcaattacatttagcaattacaattagattcttggcatcctcaagggttccatcatcttcaatctgtcctaagcctcagtttccccatctctaaaatgaggataatagtacctacatcataaggtggttctgagtattaagtaagatgatccatgtaaagcacttagcacaatgcctggcacataaaaacactcagtaaatattagctattattttgcatagatttatttacctggtttggaattttgaggatccacctcaaaagctgatctttgtaattttcctgaagcagggctcagaacagcccacttgataagagacagagtatgtgagtcttatcaaaggagtgaacccag

SEQ ID NO: 5240 - DNA, 443 bp, Homo sapiens
aaaaagttccatacccatcattcagcagcatgcctttttttccttactcaacagtgtttttgagattctgttgtataaatatattctaattttatttagccagtctcctgctgatggacagttaagcagcttccagttgttcactatcacaaacaatgctgcaatgggcatctgtgtatatggcttcctgggcgcagggaagccaccatgatgcctctctgggcaccaaactgctggatcggaaggtctggtggatattactaaaccataccccaacaccaccaccaccaaacttctgcctctgtctttaatacaagttgagagactggatgggctccagggtgaagtgagaggttcttcaaggtgaactgtttctgcatccagtgccaggtctcctgtctcaaactgcaggggtgcaggcagaagcggggagctatgcccag

SEQ ID NO: 5241 - DNA, 529 bp, Homo sapiens; identical to SEQ ID NO: 241
  misc_feature (1)...(529): n = g, a, c or t

SEQ ID NO: 5242 - DNA, 544 bp, Homo sapiens
  misc_feature (1)...(544): n = g, a, c or t
gttttcatactgctgtggtttgaatgttccctncaacactcatgttgagacttaatccctaatgtggcaatactgaaaggtggggcctttganatgtgattggatcgtaaggctgtgccttcattcatgggttaatggattaatgggttatcacaggaatgggactggtggctttataagaagaggaaaagagaactgagctagcatgcccagcccacagagagcctccactagagtgatgctaagtggaaatgtgaggtgcagggagaatggcgtcaacccgggaggcggaggttgcagtgagccaggattgtgcgactgcactccagcctgggtgacagggtgaaacgccatctcaaaaaataaaaattaaaaaaataaaaaaagaacctggatctcaatttaatttttcatattcttgcaatgaaatggacttgaggaagctaagatcatagctngaaatacagataattccacagcacatctctagcaaatttagcctattcctattctctagcctattccttaccacctgnaatcttga

SEQ ID NO: 5243 - DNA, 589 bp, Homo sapiens
  misc_feature (1)...(589): n = g, a, c or t
aaaataagctgttttaagaggaacagaagggaaatctgctacctagtctatacacagcgtgaacctcacagggggcttctgataccctcaaacatggagaacagtaagggagcagagtggttaaggactttcaggaacttaactattctggaataaggaatgaatcaactgaccttgggccagcaggtttttaactaaattgttacttgcctttctcacccagctaatcagtctctgtacttgtttccctttttgaaacaagtgtcttggttaactaattctgttttatggttgtgctaaattcatagcaggtgccttattctttgcttttagtcaaaccattccatatcagaattttccttggtttactatagatatttggctttaagttgttgtttgtgttttttaatgtacaatgttctgataaatttgactgttaaattgctatagctagcaatcattttacatatgtaaaattgcattccctttgtatttcatgtgtaattcaccaattaagtgcagtttatattcaggttggattatgcatgtttaggtaaacgaaagctgngtcttacttgatttattcttt

SEQ ID NO: 5244 - DNA, 498 bp, Homo sapiens
atagcaaatgcagttgttaaagaacttgctgagactataaaatgtcgtacattattttcaactcactaccattcattagtagaagattattctcaaaatgttgctgtgcgcctaggacatatggcatgcatggtagaaaatgaatgtgaagaccccagccaggagactattacgttcctctataaattcattaagggagcttgtcctaaaagctatggctttaatgcagcaaggcttgctaatctcccagaggaagttattcaaaagggacatagaaaagcaagagaatttgagaagatgaatcagtcactacgattatttcgggaagtttgcctggctagtgaaaggtcaactgtagatgctgaagctgtccataaattgctgactttgattaaggaattatagactgactacattggaagctttgagttgacttctgacaaaggtggtaaattcagacaacattatgatctaataaactttatttttcaaaaaaaa

SEQ ID NO: 5245 - DNA, 482 bp, Homo sapiens; identical to SEQ ID NO: 395

SEQ ID NO: 5246 - DNA, 440 bp, Homo sapiens; identical to SEQ ID NO: 242

SEQ ID NO: 5247 - DNA, 265 bp, Homo sapiens
  misc_feature (1)...(265): n = g, a, c or t
ctggcctnaggagggagtaagagccccatccntgaaggtacacaagttgnggcancaaccatctggcctgcagtttccanaggggantcangcgtggggtgggactggagtgaacgggtngatgcttncacatgcggnagttggcactgacggcaggaacacggnggtggcttaatgggtcctggggctcccctntggccctcangaaggcaggagcntgaggggcttgggatgcagcacctgcaaatttgnncgttcctggcct

SEQ ID NO: 5248 - DNA, 167 bp, Homo sapiens
  misc_feature (1)...(167): n = g, a, c or t
cttttttttttttttttttttttttttttttttncggataaaataagtttttatttatagtcttatagtaaagggggaanccttaacttgcaananaattnttcggcagtntgtncaacatactttttatttccatggaanggaatcaaacncnaactganactaca

SEQ ID NO: 5249 - DNA, 438 bp, Homo sapiens
gtaactatccgcactagaaagttcatgaccaaccgactacttcagaggaaacaaatggtcattgatgtccttcaccccgggaaggcgacagtgcctaagacagaaattcgggaaaaactagccaaaatgtacaagaccacaccggatgccatctttgtatttggattcagaactcattttggtggtggcaagacaactggctttggcatgatttatgattccctggattatgcaaagaaaaatgaacccaaacatagacttgcaagacatggcctgtatgagaagaaaaagacctcaagaaagcaacgaaaggaacgcaagaacagaatgaagaaagtcagggggactgcaaaggccaatgttggtgctggcaaaaagtgagctggagattggatcacagccgaaggagtaaaggtgctgcaatgatgttagctgtgg

SEQ ID NO: 5250 - DNA, 345 bp, Homo sapiens; identical to SEQ ID NO: 243
  misc_feature (1)...(345): n = g, a, c or t

SEQ ID NO: 5251 - DNA, 368 bp, Homo sapiens; identical to SEQ ID NO: 244
  misc_feature (1)...(368): n = g, a, c or t

SEQ ID NO: 5252 - DNA, 304 bp, Homo sapiens
  misc_feature (1)...(304): n = g, a, c or t
aaaagagaagggttgaaaaagattgtgtgtgtgtgtgtgtgtgtgtgtttaattggcccagggttacttaaataaatcataaccattttgccacattctgtaactgtttagctaaggtcaaattaagtttaccctatggattttgtttnatcttttgtttcgtgtatatactgtttgcctttttcataaaaatcttggatttgttatatattgttcctgttatttttgacatctttgctattgtaaataaattactattttgttttaagtgaaaaaaanaaaaaaaaaaaaaaaaanaaagctt

SEQ ID NO: 5253 - DNA, 272 bp, Homo sapiens
ctggcctcaggagggagtaagagccccatccctgaaggtacacaagttgtggcagcaaccatctggcctgcagtttccagaggggagtcaggcgtggggtgggactggagtgaacgggtagatgcttccacatgcggcagttggcactgacggcaggaacacgggggtggcttaatgggtcctggggctcccctctggccctcaggaaggcaggagcatgaggggcttgggatgcagcacctgcaaatttgcacgttcctggcctcaggagg

SEQ ID NO: 5254 - DNA, 191 bp, Homo sapiens
  misc_feature (1)...(191): n = g, a, c or t
caccttgaaggcccaagggaatcccgttatcagctctgatcctgagataatccctctgacttcctcccagaagccaagactctccagaactggctggttgtcctttgcagatntgttgaggcancaagtnantaggaagagaatatnaatatatacagntntggtcaccaaacatggattttgcctcttgg

SEQ ID NO: 5255 - DNA, 156 bp, Homo sapiens
  misc_feature (1)...(156): n = g, a, c or t
tttacantcncatgttcattgtgncactcttcacaatcactgtttccaaagttatggaaacaacccaaatttccattgaaaaataaatggacaaagaaaatgtgcatatacgtacaatgggatattattcagcctaaaaaaagggggaatcctgtt

SEQ ID NO: 5256 - DNA, 448 bp, Homo sapiens; identical to SEQ ID NO: 396

SEQ ID NO: 5257 - DNA, 577 bp, Homo sapiens
  misc_feature (1)...(577): n = g, a, c or t
aaagaatatgtagaatctaggtaagtggataaaaggtctgggggcaggggaaaggagagcatttcattgtgaatcaaggaatttctccacctgttttaactcttccatatgacatcaaagagatgtcacttgcagctagcatttcagtgatgttttcttactaataatatcgtgataaaagaaacattgactataagaaataggaatgggtctcataaaaggaaacagcaaaacccccaaactaaaaaacagcgcaggctgtttctctcttctctccttttgcttggcactcatgagatgctaggtgtggaagtcagccaactgaaaaagagaggtggctgaagaaggtggggaggctgaagccagttaaataggatggtccaattcacagacggcgaggctacagtgcaaataggactctttcaacttgagcaggaccccattacttcactggagttagaaagaaaggagagcgtagactttttgaactttctatnaagagtgtacctccacagtatacagaagacgacgtgaaatttgatctgcaagaaaactgagtccatattcacatatgtat

SEQ ID NO: 5258 - DNA, 525 bp, Homo sapiens
cttcgagtgcatcgaggacctgtctgaagacttggaatggaaaattatctatgtgggctctgcagaaagtgaagaatacgatcaagttttagactctgttttagtgggtcctgttcccgcaggaaggcatatgtttgtatttcaggctgatgcacctaatccaggactcattccagatgcagatgcagtaggcgtaactgttgtgctaattacttgtacctatcgaggacaagaatttattagagttggctattatgtaaataatgaatatactgagacagaattaagggaaaatccaccagtaaaaccagacttttctaagcttcaaaggaatattttggcatctaatcccagggtcacaagattccacattaattgggaagataacacagaaaaactggaagatgcagagagcagtaatccaaatctacagtcacttctttcaacagatgtattaccttcagcatcaaagggatggtccacatcagaaaactcactaaatgtcatgttagaatcccacatgga

SEQ ID NO: 5259 - DNA, 562 bp, Homo sapiens
  misc_feature (1)...(562): n = g, a, c or t
ccacacacagaaggaaagttgatccccagggcagcctttcccaccaaaaaaatcaggcccaatccaggagagtttgccagtagctccccagggttccagggtgtctgccagccttcctaggaatcgtgggcaggcttctaggtgccagtgactcaaactcctttttccacttcccagttcaacctggtcactctcatccccacaagttcccaatctgaatcccattctctgaccattctctgcttccttgtttttaatctcatttgagagtgatcctcacgggttcccctggcccctgcactcattttccttactgggtatgctaacgtttgtcttctaattcaggaaatccttccaaccctgttttcagctctgcctccaaacccttccatttccccatttcacctcccagtctcctcactcctggagcaaagagctctgcacttggattgctaagcatgcatggntcatgtggagcaggggagtgggaagatgtccctcanggcagaaagcctgcttttggtggggaacctacgtatnattcaaacaggcttagctgtag

SEQ ID NO: 5260 - DNA, 422 bp, Homo sapiens
ccaccaaggctatcgatgagtacatgaagctcgtggcacgggattacctccaggagaccctgggtgagctgggggagagtccatgtcagcggcctgctggtgagctaggggacctgggtgaagttctaagagtccttgagcaacctggattctggtagtgagtggtgttttgggggtgctaggatcctggggacaattgggagctccccaagatgttgggtgcctctggaataacctgaagacaaggttggaggatgggtgtggcaggttttggtggtcatggccccagcccctatctggctgtgctgggctgcaggacaggttgtgcggcgtctctgtgcttctactgaggactgtgaagtggaccccagcaaatgtccagcctcggagctgccagagcaccaggccagacttcggaacag

SEQ ID NO: 5261 - DNA, 573 bp, Homo sapiens; identical to SEQ ID NO: 245

SEQ ID NO: 5262 - DNA, 426 bp, Homo sapiens
  misc_feature (1)...(426): n = g, a, c or t
ctggaagagagggctgcccggaacgtctctcaagtttccaagaacttggaaagccaccacggtgaccagatggcgcagaaatcccagtccacgcagatttcacaggaactggaggaacttcgagctgaacagcagagattgaaatctcaggacttggagctgtcctggaacctgaacgggcttnaagcagatctgagcagcttcnagtcccaggaattgaacgagaggaacgaagcttcagatttgctggaaagactccgggaggaggtgacaaagctaaggatggagttgcaggtgtccagcggctttgtgtgcaacacgtgccctgaaaagtggatcaatttccaacggaagtgctactacttcggcaagggcaccaagcagtgggtccacgcccggtatgcctgtgacgacatggaagggcag

SEQ ID NO: 5263 - DNA, 354 bp, Homo sapiens
aggtctgagggaggggtcagggtgggtgcgcggtgacggggagggcaaaggtggtgtcagtatcttcattttgaggattggggttcagagcacttctggggtgtcagctcctccttgtccccccgtggggctccgtaggactggaaagaggacatgaagagctctgacagagagcagcagaaactctggaactgtttccagagggcctgcactgcatggaccagggccaccaccttctccttcacccaggccagaaccccgtgccaccaggtctgcagccgctgcagcatggcctggaaccatctcatgaccttgtcacaaaagctctccccaggctcctcggttgcgggatcc

SEQ ID NO: 5264 - DNA, 268 bp, Homo sapiens
ctgtatggctgggggctcctcgtatgcatggaacccccagaataaatatgctcagccaccctgtgggccgggcaatccagacagcaggcataaggcaccagttaccctgcatgttggcccagacctcaggtgctagggaaggcgggaaccttgggttgagtaatgctcgtctgtgtgttttagtttcatcacctgttatctgtgtttgctgaggagagtggaacagaaggggtggagttttgtataaataaagtttctttgtctcttt

SEQ ID NO: 5265 - DNA, 342 bp, Homo sapiens
ttgataaaaccccagggccacagcagaggcaaagggcatctggggagagggttcgaagctgtggcggactccactaatgtaaccctccaatgtcaagccatgggcgtgatcagtagctaagtgatgacaaggctgttgggggtggacggaaaagacttggggcaaagcagactgtttatagcctgagctggtagggcctggtgcagcagcctacccggaactggcactactctttcccaggttccctgactctctatcctggtctctgagagcgtgccctacttccgtttcccccactccaaacacacctgaggcatcttccagtgctaggccccatgctgg

SEQ ID NO: 5266 - DNA, 450 bp, Homo sapiens
  misc_feature (1)...(450): n = g, a, c or t
ccgaggtccaannttttccntgatgaggaatgggttggaaagctggcctacttatcagatatattttcacttataaatgaattaaatttaagtctccaaggaactttgactactttcttcaatttgtgtaataaaattgatgtatttaagagaaagttaaaaatgtggttgaagcgcacacaagagaatgattatgacatgttcccttcattttctgaattctcaaattcatcaggcttaaatatgacagacatcacaaggattatttttgagcacctggaaggactttctcaagtgttcagtgactgttttccaccagaacaagacttgcgttcaggaaatttgtggataattcacccttttatgaatcaccaaaataataatctcaccgacttcgaagaagaaaagctaacagagctatcttcagatttaggattacaagcactattt

SEQ ID NO: 5267 - DNA, 421 bp, Homo sapiens
ctgctgaagctcaactcccttttcgagcaggtgtggaagccctgaggcttctctgacatagcatgtgtttattttcttaggtgagacctgattcaggaaagtctgcagccgatatccatcttcaagtttgtggtcctttctccctctatatatccttgacctcagcagtcatgctggggtccagagtggatgattctctccgccttaggtagactcctccttaagagtgtaagtctctcagtctcacatattttgtgagacgtaaactgacattccacaaggagaggaggaaattctgtgggtcacatccaggggtgcttggaacctgattggttgtcaatcctccagttagtttgtcacgagtggaattctgtcctggattcccaaggatcaaggctgccccattagccaggaaataggg

SEQ ID NO: 5268 - DNA, 250 bp, Homo sapiens
  misc_feature (1)...(250): n = g, a, c or t
ctgttgaaacagaagaagttgagcctgatgaagaagaatttcaggaagagtctttggtggatgactcattacttcaagatgatgatgaagaagaagaggacaatgaatctcgttcttggagaagatgatttgactgatcattgatctacatatgctagaactctacctgtgtttcattagtattatctaatgtacttttacatatttgtaaaaacaatttttggtaaaatgtgatgaanatggatttcac

SEQ ID NO: 5269 - DNA, 395 bp, Homo sapiens
aaatgaaatggggttgaagtgaacatgattttgttgaccatgttcgtgaattacagatgcaatatgcattggtagaatcgtgtgatggtcttttgtgatacttaatttttacatatcccagtctctgtatgtatctgcatagacaaagaaaaaacaaactcctgctttgcttttattgaagggtttccaggactgcgtgtctgctcctgagctctgttttaagtatgtgtatcctttgcttgtattttgtattaaaaaaataagaaaaagaagcctttattgttgagcatgttggcattgtcccctttatttttttctctttttgggacatatgaagcaagttattctttttctgtatctttttttcttttgtaaactttttttttgttttgttt

SEQ ID NO: 5270 - DNA, 340 bp, Homo sapiens; identical to SEQ ID NO: 325

SEQ ID NO: 5271 - DNA, 425 bp, Homo sapiens; identical to SEQ ID NO: 246

SEQ ID NO: 5272 - DNA, 593 bp, Homo sapiens; identical to SEQ ID NO: 247

SEQ ID NO: 5273 - DNA, 453 bp, Homo sapiens; identical to SEQ ID NO: 248
  misc_feature (1)...(453): n = g, a, c or t

SEQ ID NO: 5274 - DNA, 504 bp, Homo sapiens; identical to SEQ ID NO: 400

SEQ ID NO: 5275 - DNA, 303 bp, Homo sapiens; identical to SEQ ID NO: 580

SEQ ID NO: 5276 - DNA, 363 bp, Homo sapiens; identical to SEQ ID NO: 581
  misc_feature (1)...(363): n = g, a, c or t

SEQ ID NO: 5277 - DNA, 584 bp, Homo sapiens; identical to SEQ ID NO: 582
  misc_feature (1)...(584): n = g, a, c or t

SEQ ID NO: 5278 - DNA, 591 bp, Homo sapiens
ctgttccctgaatggcttccctgggttatgtagaaacagcctggggaggaggtgatacaacatacttaatggggcctctgggcagaaaacagactgaatcctcaacactgccccttttgagggtctgtgatcctggaacttctctgatggactgggatgcccttaactgaggtctgctgtctggaaaggacaccacaggcccagaatgaaggggcatctggaccaatgacctagattcaacacagggcttggagctggtggtacaggctggttttggcccaatgtgtgctggaggctggaagcccctgaagacctaaactgcctggatgagcttattagggtgaattaatgagtctgtaatttgggaaccttaatgtgagacaccacttaaggagaggaacttggcccagcaattgatcactctagaagtggacagctatgcactagactgcaccagaatctgttcaacagcgacaccttgtggtaaaaactgtagacgccccatcaggctggatgggaaactagaaacagactgtctcatctttggacagatatccctcaaatctcccaatctactccagggaaaagaca

SEQ ID NO: 5279 - DNA, 365 bp, Homo sapiens
ctgtacaatactttggtgttaacctgtggtcttccttcacctcagtgaactctgccctgcccatctgtccagaggaagtcttagctcctaccccccaccctccctggcgcttggatgggaggcgacacagtatgggattgtgaaatccctgctgcgatgctgggtatctggaaggggagaagggggtggaagcagcgcagggaatgctgtgagatgagaagagctcacatcgatgggaaatggccctggcccaggctccagaatgtgacagcaacagtggcctggctgttttcccggggggcggggggcgggactggcaaactgggaggagaggcaattaagacgcaacaatcaaaccaaccttt

SEQ ID NO: 5280 - DNA, 553 bp, Homo sapiens
  misc_feature (1)...(553): n = g, a, c or t
ccacaactgtgaagttagaaaagccctgtcaaagcaagagatggctagtgcttcatccagccaaagaggtcgaagtggttctagaaactttggtggtggtcgtggaggtggtttcggtgggaatgacaacttcggtcgtggaggaaacttcagtggtcgtggtggctttggtggcagccgtggtggtggtggatatggtggcagtggggatggctataatggatttggtaatgatggaagcaattttggaggtggtggaagctacaatgattttgggaattacaacaatcagtcttcaaattttggacccatgaagggaggaaattttggaggcagaagctctggcccctatggcggtggaggccaatactttgcaaaaccacgaaaccaaggtggctatggcggttccagcagcagcagtagctatggcagtggcagaagattttaattaggaaacaaagcttagcaggagaggagagccagagangtgacagggaagctacaggttacaacagatttgtgaactcagccaagcacagtggtggcagggcct

SEQ ID NO: 5281 - DNA, 577 bp, Homo sapiens
ccagaggatcagtgtccgatgaggaaatgatggagctcagagaagcttttgccaaagttgatactgatggcaatggatacatcagcttcaatgagttgaatgacttgttcaaggctgcttgcttgcctttgcctgggtatagagtacgagaaattacagaaaacctgatggctacaggtgatctggaccaagatggaaggatcagctttgatgagtttatcaagattttccatggcctaaaaagcacagatgttgccaagacctttagaaaagcaatcaataagaaggaagggatttgtgcaatcggtggtacttcagagcagtctagcgttggcacccaacactcctattcagaggaagaaaagtatgcctttgtcaactggataaacaaagccctggaaaatgatcctgattgtcggcatgtcatcccaatgaacccaaacacgaatgatctctttaatgctgttggagatggcattgtcctttgtaaaatgatcaacctgtcagtgccagacacaattgatgaaagaacaatcaacaaaaagaagctaacccctttcaccattcaggaaaatct

SEQ ID NO: 5282 - DNA, 70 bp, Homo sapiens
  misc_feature (1)...(70): n = g, a, c or t
agaanctgcnaaagtnggngggagcgccccnggagaacaaacagcaagccttatttcccctagcccatcc

SEQ ID NO: 5283 - DNA, 484 bp, Homo sapiens
ccacattcattttgaagtaacctttccagccctggtggaaatccagtcggtctttctttaccgcctctgcctgtagatacttggcaatatgcttagggcagcggcggtttagggtacgctgcgagtcaaaataggtgatggtgcgtcgcctcacatcaacagagatgagggaccaatgcacctccaggtggatggggattagcagtagctccttattgaagatgtccacgtttttggtccaccttttcaccccatcataacccttggtacggagtttatcatagaagaaactattgaagaaatgcaccttttcagggactgtgtccatgaccaggtctccatacatgttcatcacctggtcattgagccagttctgtccatacaaggtccccaagtcatccatggtcagcacatgccgcttataagccactcggaagcccctcaccatggcattgcctggcatccgctggtaagactggatcag

SEQ ID NO: 5284 - DNA, 298 bp, Homo sapiens
  misc_feature (1)...(298): n = g, a, c or t
gcaagggaggacagtggatgacagggaagatgagtgggggcagagctgctcaggaccatggctgaggccatcacctatgcagatctgangtttgtgaangctnccctgaagaagagcatctncagccggttaggacaggacccgggggctgatgatgatggggaaatcacctacgagaatgttcaagtgcccgcagtcctaggggtgccctcaagcttggcttcttctgtactaggggacaaagcagcngtcaagtcggagcagccaactgcgtcctggagagccgtgacgtcaccag

SEQ ID NO: 5285 - DNA, 439 bp, Homo sapiens
ctgccgctcatccaccatcagtgactttgtgctgttatcattcatgtgcaccttgacgacgagcttcttaaccttggcctccttcagtttttccagcgccagcttaattttatcagccttggcttgggcttcttcctcttcctgagagagaggttcaggaggtggtggtggcagtggaaggtctaacacaggatcggctggtggaggtggtaagtcatcctcatattggctgataccagtggcagcaacatttgttccataaccaagagaggctgcaccactgaaaattgatgcttgtagagatgctgaatgatgttgattctgcaaggactctttctgtgcctggattgtcctctgctcagcctcacttatgtctgctaccagatctgccatgagagcatctaaatcttggtcttccagtgcatttaaggactcattt

SEQ ID NO: 5286 - DNA, 257 bp, Homo sapiens
  misc_feature (1)...(257): n = g, a, c or t
ccaaaaacaatnanggtcataaccatccatgcagacntggaggctcggctnaaccangactcctcactgnctacctgananaatgancncccctnatccatctcagcatcaacacaatttncaggggnnctcaggtctacctcaggactgaacgccncacctcangattcctcctccttgaatctgagactggctgcccattctgagatggggatgaangtaagatgccgcatcaccaggcncgccgcccctgacag

SEQ ID NO: 5287 - DNA, 496 bp, Homo sapiens
ccaacaggagcctgacagcaacaaggagattgagagctttgcccgccgcacctacagtgtctcattccccatgtttagcaagattgcagtcaccggtactggtgcccatcctgccttcaagtacctggcccagacttctgggaaggagcccacctggaacttctggaagtacctagtagccccagatggaaaggtggtaggggcttgggacccaactgtgtcagtggaggaggtcagaccccagatcacagcgctcgtgaggaagctcatcctactgaagcgagaagacttataaccaccgcgtctcctcctccaccacctcatcccgcccacctgtgtggggctgaccaatgcaaactcaaatggtgcttcaaagggagagacccactgactctccttcctttactcttatgccattggtcccatcattcttgtgggggaaaaattctagtattttgattatttgaatcttacagcaacaaataggaactcctgg

SEQ ID NO: 5288 - DNA, 628 bp, Homo sapiens
  misc_feature (1)...(628): n = g, a, c or t
cctcagggcctcttctggaaaatgaagaaattcaactagtagattcctgaggtccccctagcttaaaaaaaaaaaaaaaatctgccccatgattctaacactcgcagtagtgatagtgtatctagttgttctgctggtgtccttccttggctaagtcttggccttcagttatcttcaaatgtaccagaacctgagccaacgcctccctgtgaaactgttgctgatctgtagtacagtaccaggaagaaacctcttttgttctctttagacatcttctacttgctcttggccttgagatcgtgtaacaaaatgaaggagggctctcttctttcttcctcatcctactcaaaaacttcccgagagcagtggtggttttgagggttttgacttctattacttttggcagcctggaaagttgtgtcttctgggaaagagacccggggaggccaggagtagctgagggtcctttctgtgcccttaaaccgcccagaggagccctattccactctggttttaggctgatctgagagggtctccctttgctcctttctggagcatttctctaacgtttattacaattaggagggggaccccacatctgngagattctgtttcatttgaggnttac

SEQ ID NO: 5289 - DNA, 611 bp, Homo sapiens
ctggacacagacacttccccagccccagggccagagtggggctggagggaaggacagggctacagtagtagtgggggtatatgagggaaggctgcaaggatgtggtagctggagttttgagagatggataagagttttccaaggaggcaaaagtggcagaaaagctttgcaggtgaggaggagcagcagaagcttaacctgcatgagaatccctctcaccagtcagaaagttgaccctgcacagccaaggggtaagctctgaccattttgcaggggacagaactgagacccagagagggaaaggaacttgcccactgtcacactgcatggaaggggcaaaactgtaggctccaatacttgggctcttaacctccttactctgagccttctcacgcttggcatgctgttccctctgccaggaatgcctttccttcccttgattgcgtgaaaagttcctgccaggtttggtgtcatccctttgtgccccttgtagggtgaggacagaaagggtcccattggacaggtgggaaaactgaagccctaggacactcagataccattagggtggactgggaccccagcctttcctgccccctttcaggatcccaaag

SEQ ID NO: 5290 - DNA, 597 bp, Homo sapiens
  misc_feature (1)...(597): n = g, a, c or t
ccattgcccgggcccttgtacgagacccgcgggtcctcatcctggatgaggctactagtgccctagatgtgcagtgcgagcaggccaatgggttctgggtgggtcccctgggtggtggctctgctagtgaatctgacccgactggattcctccatgactcaaggcacagactctccagtgatgtggggatgtttgtggcattgaccaagctggggcagccagatgctgagcagtggaacagccggctggatctcttggagaggagcagacaggccgtggatggggtctgtagacacaactacaggctgggcgcacccttcactgtggggagaaaagtgcaaccagaggtgacagtgtacccagagaggaccccactcctgcaccagcataatctgctgcactgctctgtgacaggcttctatccaggggatatcaagatcaagtggttcctgaatgggcaggaggagagagctggggtcatgtccactggccctatcaggaatggagactggacctttcagactgnggtgatgctagaaatgactcctgaacttggacatgtctacacctgccttgtcgatcactccagcctgctga

SEQ ID NO: 5291 - DNA, 590 bp, Homo sapiens
  misc_feature (1)...(590): n = g, a, c or t
aaaggatttattttccagcagtcctgaggggcaaggacaggacaggagggagaaggagatcccaggacgcttgagggccccgttcatgggcagtaggcagattcgtccttctagtgcctgtggcaggcaggttgaccctgggttcgggagggacacaggccctggatgacactgagctggatgcctaggcagtgtcactccccacactttcaacctgagccccacagcaagcctataaggtgaacattctcactgtgatttgtcaggctgggttcagggagtgaaatggcctcctccaattccacaggttcaaataccctgcagagcggcaccagcctccctcagaaaggaccagacacttgtaacatttatgtcctttacctgggacactgctgtcccatacttgctgtatgaaaagaatatttctcaagaggaagaggaagccaggcgcagtgactcacgcctgtaatcccagcactttgggaggctgagccaggaggatcgnttgagcccaggagtttgagaccagcctgggtaacatggcaaaaccccgtctctacaaaaatcagccagaaaggcatagatagacc

SEQ ID NO: 5292 - DNA, 369 bp, Homo sapiens
ctgcaggaggcgctctgagtcagcctggaggaggcaggacttgctggtggacaccacctcaaagcagaaccgcctttctgagtcagggtagagtttcactgtgcagagacgaaggtcatccaccaccacagtcacagggtccttgtacttcttctggtaaaccagttggttgctctgaatggtgaaccagcgtctgctccaggtcttaaatgcgttgctggcccgtttgaagagatgtccttccatcaccaggccaccaggcccctctcttaagcttggttctggctcctccccacccagctccttctgtttcagcagcacgtgtctctgctccatgcccctcttctctcgtgctgaattcaagaccag

SEQ ID NO: 5293 - DNA, 608 bp, Homo sapiens; identical to SEQ ID NO: 249

SEQ ID NO: 5294 - DNA, 333 bp, Homo sapiens
  misc_feature (1)...(333): n = g, a, c or t
ccagtacanatctttgagaggtctgtgtacagtgacaggctccactttgaggctctgatgaacattccagtgctggtgttggatgtcaatgatgatttttctgaggaagtaaccaaacaagaagacctcatgagagaggtaaacacctttgtaaagaatctgtaaccaataccatgatgttcaggctgtgatctgggctccctgactttctgaagctagaaaaatgttgtgtctcccaaccacctttccatccccagcccctctcatccctggagcactctgccgctcaagagctggtttgttaattattgttagactttgccattgttttct

SEQ ID NO: 5295 - DNA, 345 bp, Homo sapiens; identical to SEQ ID NO: 4886

SEQ ID NO: 5296 - DNA, 581 bp, Homo sapiens; identical to SEQ ID NO: 654
  misc_feature (1)...(581): n = g, a, c or t

SEQ ID NO: 5297 - DNA, 574 bp, Homo sapiens
ctcagcaatcagactgtcgacattccagaaaatgtcgacattactctgaagggacgcacagttatcgtgaagggccccagaggaaccctgcggagggacttcaatcacatcaatgtagaactcagccttcttggaaagaaaaaaaagaggctccgggttgacaaatggtggggtaacagaaaggaactggctaccgttcggactatttgtagtcatgtacagaacatgatcaagggtgttacactggagaatgggtctcttgttgaaatccgaaatttcttgggtgaaaaatacatccgcagggttcggatgagaccaggtgttgcttgttcagtatctcaagcccagaaagatgaattaatccttgaaggaaatgacattgagcttgtttcaaattcagcggctttgattcagcaagccacaacagttaaaaacaaggatatcaggaaatttttggatggtatctatgtctctgaaaaaggaactgttcagcaggctgatgaataagatctaagagttacctggctacagaaagaagatgccagatgacacttaagacctacttgtgatattt

SEQ ID NO: 5298 - DNA, 547 bp, Homo sapiens; identical to SEQ ID NO: 583
  misc_feature (1)...(547): n = g, a, c or t

SEQ ID NO: 5299 - DNA, 531 bp, Homo sapiens
aaaattatttcttgaatctctccatacacaggcaaaaataagtgtgttacttaacatactggaaattgcctaacttaatcattgcctaaagaagagaaaattatccccaaaacgtgcttaaccaggaggccaatgcatttgccgacctccaagaacatggagatgaacgtgatagacagactgtccaccatctgaaccttcattcaccaccattcgataacccttattcaggcccagatcagcagcacatttcttgccaacaatcattaagtgtccaagaagactttcatcatcatcttctgccacagaaatctgggatatatgtttcttgggtatcaccagaaaatgtgttggtgcttgaggggaaatgtcatggaaagcaaggcaccggtcatcctcaaaaatgattttggctggtatttccttgcggatgatcttcccaaagatcgtgtcgccaccaggccgagcgacctgagccttggcaatctcatctgccatctcggcctctctcccgcgcggcggccagaggag

SEQ ID NO: 5300 - DNA, 246 bp, Homo sapiens
ctgagctggggatactcaggtcctggggtgctgaggagatggggctgcatctggagagggtgctgttggggtgtactctcatctggagagggtgctgttggggtgtactctcatctggagaaggtgctgttggggtgtactctcatctggagagggtgctgttgggggcactcccatctggagagggtgctgttggggtgtactcctgggaaggcaggggccatagaggagcgggagatgtgtcag

SEQ ID NO: 5301 - DNA, 410 bp, Homo sapiens
cctttgaccaggttcacgaagttctccaccgacttggcaatggttgggtgctctgcagcacattccatcaggattgactccaggagctgcatgtactgctcgtcgcctcggcccccttctacctcgtggtccagcttcaggatgatttcgttttcaaactttttgaaatccccacttctttgatattcacacagcatcatgtcgaagaagattggtatggtggctttccggagctcagcctcagggataagtgtcatctctaatataggtcctaccatgcctgggatgaagcagattttgttctgaccaagcttgtaccacatatcacggatggagaagccaattagccgtctcatgtccccatacttattcaggattttgttgtatttggcgtgtgagaactgctccag

SEQ ID NO: 5302 - DNA, 424 bp, Homo sapiens
  misc_feature (1)...(424): n = g, a, c or t
tacaagcttttttttttttttttttttttttttttgntttttttttttggatctcttaaagggaatttattgcttccatgganattttanatcgatgttactgaggaattaggtagctgggcggcttaccccaggcatntnttantaggtaacacctganaaaagaaaaaaaaatcaggaggtcagggaaagaattcaaaggcatttgngagctntgaggggatacanaagcttaanaaaaaaaagcaganaaaaggtaanagganaaacatttgcagganaaaaagggtntgataaatcgggccananaatagngctaggtcatgtagcaagtccactcttccgctgctgtaaatggngatgcaccttccttttcaggatgggattcacaagggcccttggtgtctggaagcnccaactgaac

SEQ ID NO: 5303 - DNA, 263 bp, Homo sapiens
cctaggaaatctgtgagggaatccccaggggaatctcgtgaccagccaggtgtgaaatctgctaactggaagatctcaaagcttccttcactttttgtgattttgtggtcatgtaacgttactgtattattctacgtaaatgtgggtacttggatgtttatcatactgtttctctgtgtttacatactaatttgtgtaagaaatgcattttagtctgtgtacctcaacctgctgtttgtttcctagaggtgttagtagtcttt

SEQ ID NO: 5304 - DNA, 606 bp, Homo sapiens
  misc_feature (1)...(606): n = g, a, c or t
ccaggacccctggcggacatggcacccacaaggaaggacaagctgttgcaattctaccccagcctggaggatccagcatcttccaggtaccagaacttcagcaaaggaagcagacacgggtcggaggaagcctacatagaccccattgccatggagtattacaactgggggcggttctcgaagcccccagaaggtgaggcgaaggacaaagccggaggtggaggaagtggtgtgggagctcagggcagaagccatacctccaggcaggagaggaggctgggcctgggttcggatgatgatgccaattcctacgagaatgtgctcatttgcaagcagaaaaccacagagacaggtgcccagcaggagggcataggtggcctctgcagaggggacctcagcctgtcactggccctgaagactggccccacttctggtctctgtccctctgcctccccggaagaagatgaggaatctgaggattatcagaactcagcatccatccatcagtggcgcgagtccaggaangtcatggggcaactccagagagaagcatcccctggcccggtgggaagcccagacgaggaggacggggaaccggattacgtg

SEQ ID NO: 5305 - DNA, 536 bp, Homo sapiens
ccagggccacaacttcttctgtcgtggggaagagggatgaaaagacaagaccagggctggagctggggtggaagaggggagggggacactggctgcattcccccgcccccaggaagcacctctaggccctggacccctcgctcaccctggcccctaagactccatctcttctctgcctctggccctcctggctcttcctcctgctccccttgactttttcccctgacagattctcaagtaggacgatgttcagggcctgaccccaaccccccataccaccttatgaaggtacaacctttaccggccctgcttctgcccctcctcaaacctcaccgctttccctctttgggacagctctgatccccctccttcctctcctccctccccctggaaaaaaaaaaggaaaagaaagcaccaactccccggggaggggctgcagacagcagggggagaggactggaaggagagaagaggaccgtcgagggaagaggctcacaagtccctgggaagacagggcatgggcttacagagaggag

SEQ ID NO: 5306 - DNA, 400 bp, Homo sapiens; identical to SEQ ID NO: 250

SEQ ID NO: 5307 - DNA, 493 bp, Homo sapiens
ccagggatcagtctcatggccgtagaagcagccaaattcctctgcctttgccttcccttcaggagtcacatgctaaggcatccttgggcatttggaaaaggccgcttggggtgagagtgctctaggccactctgcaatgtccctgggcccgatgagtaacaaatgcaccccgggacccagagaagtggaaagacatgaaagggatttggaaacagatcgtaaaaataacctgtatgaaaatcacacagacaagaaaacaaacaaatccagctagccccttggatcctgccatccgtcttttctcccgggactgcctttgctttgtggagggtgagtcctgggacaggctttgggtgacaagttgtgggcatgttccatccaagcctggctctcccgactggcagagggaggtggctgacaatcaattcctctggatacattttcctgtgattgctcctgtgatcaaaggcagccaccgacaggtgcgggagcg

SEQ ID NO: 5308 - DNA, 393 bp, Homo sapiens; identical to SEQ ID NO: 251

SEQ ID NO: 5309 - DNA, 361 bp, Homo sapiens; identical to SEQ ID NO: 5108

SEQ ID NO: 5310 - DNA, 620 bp, Homo sapiens
ctgagggaggggtcagggtgggtgcgcggtgacggggagggcaaaggtggtgtcagtatcttcattttgaggattggggttcagagcacttctggggtgtcagctcctccttgtccccccgtggggctccgtaggactggaaagaggacatgaagagctctgacagagagcagcagaaactctggaactgtttccagagggcctgcactgcatggaccagggccaccaccttctccttcacccaggccagaaccccgtgccaccaggtctgcagccgctgcagcatggcctggaaccatctcatgaccttgtcacaaaagctctccccaggctcctcggttgcgggatcctcaacatccgggacaggggatctgttgcctcggcaccgtaatccatctctttctttttcaagtagaggagtgagctctgggtgctgctcctcataataagccgccactgtctccaggtagccctctttgaagtcgtcctccagctctgccaggctcgacatcacctgtccacgtcctgattctgcattttgcattttatcataaaatctttctatggcctggtgcattcgggccttcagcttcttcatgtcatcagagaggaccttcggg

SEQ ID NO: 5311 - DNA, 514 bp, Homo sapiens
  misc_feature (1)...(514): n = g, a, c or t
ttttttttttttttttttttttttttttttttattttttttttttttttgctttcatgtttattaaanaanatcnctaaanatnttgactnganaatgctgngngctntttcaattacatttgtttttcttttattaacaggaattttgattnttcaaggaagnggctcaatttcaatttcaggngaccaggtttatcgggacttttccttnttgnttacttttcnctaggaaggggagttgtaggggcanattcaggttttggaataggaaaattacntntaaaccatggaaatcttggaaatggaattggnggaagtgggcnaaatggatntgggtaagggaacncaaaaaaccctgaagctaattcatcgctggcactgatacttcttttttctcgttcctggncttgananactgggaaaccaacagccnctgccaanatggctgngatcaggagganaactttnttnatntcaaacgtttcantcagttaccttgggcgggaacacgct

SEQ ID NO: 5312 - DNA, 588 bp, Homo sapiens; identical to SEQ ID NO: 402

SEQ ID NO: 5313 - DNA, 571 bp, Homo sapiens
  misc_feature (1)...(571): n = g, a, c or t
aaatggttctggcaaactgctcaagattacaggctgtgccagccctggaaaaacagttacaattgttgttcgtggttctaacaaactggtgattgaagaagctgagcgctccattcatgatgccctatgtgttattcgttgtttagtgaagaagagggctcttattgcaggaggtggtgctccagaaatagagttggccctacgattaactgaatattcacgaacactgagtggtatggaatcctactgcgttcgtgcttttgcagatgctatggaggtcattccatctacactagctgaaaatgccggcctgaatcccatttctacagtaacagaactaagaaaccggcatgcccagggagaaaaaactgcaggcattaatgtccgaaagggtggtatttccaacattttggaggaactggttgtccagcctctgttggtatcagtcagtgctctgactcttgcaactgaaactgttcggagcattctgaaaatagatgatgtggtaaacactcgataatctggataactgactagcaccattatgatcaccagtattgnggctggaatg

SEQ ID NO: 5314 - DNA, 637 bp, Homo sapiens
  misc_feature (1)...(697): n = g, a, c or t
atcgctgtgtcttgttccgccccctccctgacaccccagcttcccaggatgtggaaagcctggatctcagctccttgccccatatcccttctgtaatttgtacctaaagagtgtgattatcctaattcaagagtcactaaaactcatcacattatcattgcatatcagcaaagggtaaagtcctagcaccaattgcttcacataccagcatgttccatttccaatttagaattagccacataataaaatcttagaatcttccttgagaaagagctgcctgagatgtagttttgttatatggttccccaccgaccatttttgtgcttttttcttgttttgttttgttttgactgcactgtgagttttgtagtgtcctcttcttgccaaaacaaacgcgagatgaactggacttatgtagacaaatcgtgatgccagtgtatccttcctttcttcagttccagcaataatgaatggtcaacttttttaaaatctagatctctctcattcatttcaatgtatttttactttaagatgaaccaaaattattagacttatttaagatgtacagacatcagaaaaaagaagcacataatgcttttggtgcgatggcactcactgngaacatgtgtaaccacat

SEQ ID NO: 5315 - DNA, 255 bp, Homo sapiens
ctgcatggtgagctgcagagtggtcagaggggctggggccctgccaagagagcaaggccagacctgcccagcgggaggcaggaaggccctgatccagcaaggagaagtagaggaagtccacagccacctctgttactcatcgctactgggacatctggggacaggctctgttcttgggagagcaggccaccaggatttgtagggctgcctgccggtgacagacacgtaagtcacagggagaggccgggatccagg

SEQ ID NO: 5316 - DNA, 108 bp, Homo sapiens
  misc_feature (1)...(108): n = g, a, c or t
ccctggcnaactgctcangattacaggattatggaaaggcaaagtatatacagtaatgtgagagaaactcaaaccaagtaagggtaaaaatgaaatgattaacaccac

SEQ ID NO: 5317 - DNA, 546 bp, Homo sapiens
ctgtggccctggatacggagatccctaatgagcttccatacaatgactactttgaatactttggaccagatttcaagctccacatcagtccttccaatatgactaaccagaacacgaatgagtacctggagaagatcaaacagcgactgtttgagaaccttagaatgctgccgcacgcacctggggtccaaatgcaggcgattcctgaggacgtcatccctgaggagagtggcgatgaggacgaagacgaccctgacaagcgcatctcgatctgctcctctgacaaacgaattgcctgtgaggaagagttctccgattctgaagaggagggagaggggggccgcaagaactcttccaacttcaaaaaagccaagagagtcaaaacagaggatgaaaaagagaaagacccagaggagaagaaagaagtcaccgaagaggagaaaaccaaggaggagaagccagaagccaaaggggtcaaggaggaggtcaagttggcctgaatggacctctccagctctggcttcctgctgagtccctcacgtttct

SEQ ID NO: 5318 - DNA, 425 bp, Homo sapiens; identical to SEQ ID NO: 252

SEQ ID NO: 5319 - DNA, 459 bp, Homo sapiens
ctggaacagtatatgaagacctgaggtataagctctcgctagagttccccagtggctacccttacaatgcgcccacagtgaagttcctcacgccctgctatcaccccaacgtggacacccagggtaacatatgcctggacatcctgaaggaaaagtggtctgccctgtatgatgtcaggaccattctgctctccatccagagccttctaggagaacccaacattgatagtcccttgaacacacatgctgccgagctctggaaaaaccccacagcttttaagaagtacctgcaagaaacctactcaaagcaggtcaccagccaggagccctgacccaggctgcccagcctgtccttgtgtcgtctttttaatttttccttagatggtctgtcctttttgtgatttctgtataggactctttatcttgagctgtggtatttttgttttgtttttgtctttt

SEQ ID NO: 5320 - DNA, 603 bp, Homo sapiens; identical to SEQ ID NO: 404
  misc_feature (1)...(603): n = g, a, c or t

SEQ ID NO: 5321 - DNA, 603 bp, Homo sapiens; identical to SEQ ID NO: 253

SEQ ID NO: 5322 - DNA, 397 bp, Homo sapiens
gaaagagtaaaaccttttatgacaggggctgcagaacaaatcaagcacatccttgctaatttcaaaaactaccagttctttattggtgaaaacatgaatccagatggcatggttgctctattggactaccgtgaggatggtgtgaccccatatatgattttctttaaggatggtttagaaatggaaaaatgttaacaaatgtggcaattattttggatctatcacctgtcatcataactggcttctgcttgtcatccacacaacaccaggacttaagacaaatgggactgatgtcatcttgagctcttcatttattttgactgtgatttatttggagtggaggcattgtttttaagaaaaacatgtcatgtaggttgtctaaaaataaaatgcattt

SEQ ID NO: 5323 - DNA, 595 bp, Homo sapiens; identical to SEQ ID NO: 587

SEQ ID NO: 5324 - DNA, 444 bp, Homo sapiens
ctggaggggcagagaggccagggccaatgggagaggctgaaaagggggcagtacttgcccagggtcagggagatggtactgtttccaaaggaggaaggggccccggttcccagcataccaaagaagcagaagataaaattcccttggtcccctcaaaagtgagtgtcatcaagggcagcagaagccaaaaggaggcttttcctttggcaaagggagaggtagacactgcaccacagggtaataaagacttaaaggagcatgtgcttcaaagttccttatcccaggagcataaagacccaaaagcaacacccccatgatacaggtctgtggggaagagtgtttatatccctacgttaactttgcctagtagaggcccttctttgcacttgcttctcatttggctattcttttcctaaggaagtccattctcctctgtacagacag

SEQ ID NO: 5325 - DNA, 386 bp, Homo sapiens
ctcttctccggctccctgcccctccagattgcctggtgatctattttgtttccttttgtgtttctttttctgttttgagtgtctttctttgcaggtttctgtagccggaagatctccgttccgctcccagcggctccagtgtaaattccccttccccctggggaaatgcactaccttgttttggggggtttaggggtgtttttgtttttcagttgttttgtttttttgttttttttttttcctttgccttttttcccttttatttggagggaatgggaggaagtgggaacagggaggtgggaggtggattttgtttatttttttagctcatttccaggggtgggaatttttttttaatatgtgtcatgaataaagttgtttttgaa

SEQ ID NO: 5326 - DNA, 272 bp, Homo sapiens
  misc_feature (1)...(272): n = g, a, c or t
cacacattcaccgttggcctgcctctgttcaccctccatggccctgntactggccctcagcctgctggttctntggacttccccagccccaactctgagtggcancaatnatgctgaagactgctgcctgtctgtgacccanaaacccatccctgggtacatngtgaggaacttccactaccttctcatcaangatggctgcngggtgcctgctgtagtgttcaccacactgaggggccgccngctctgtgcncccccagaccagccctggg

SEQ ID NO: 5327 - DNA, 307 bp, Homo sapiens
aaatattttttacacagatttgatgctgtgcaaatgccctctccccttttaggtgttgcttgttcagtatctcaagcccagaaagatgaattaatccttgaaggaaatgacattgagcttgtttcaaattcagcggctttgattcagcaagccacaacagttaaaaacaaggatatcaggaaatttttggatggtatctatgtctctgaaaaaggaactgttcagcaggctgatgaataagatctaagagttacctggctacagaaagaagatgccagatgacacttaagacctacttgtgatattt

SEQ ID NO: 5328 - DNA, 600 bp, Homo sapiens
ctgtgcttttcacatcaagttggcttagttcttggaggaaagtcttagtgactaaaattgtacacagatcacaagacaagagaactagtctaacaaattcaataagaaatcaggacaactgtagactatataaaaactgtcttagaaaattatttacaactttatcatagtgtaaatactctaaatgtaaaataaatctatggattttatacaaaaatactctaaagtacaaatgtaagttaaatgctgaataaaacattttcaccttttccagtggatgctattactaagactataatctaggtgtcaaaacttaaagtgataaccacaaagcaatgttttcttaatcactcataattttacatttgttagtagtcatcacaaggtttagagttccactgaaaaagtctcatttttacaaatgcaactcatgcactttccttcatggaccctttctctgtttaacacatgttaaaaaagtaaaacaaaattcttagtcaaaagttgacatgctatgtgaagcatataaattgtaaaattatcagtcttaaatacctagttgattctctttacaaaagaaacagtcatgtaatacatcag

SEQ ID NO: 5329 - DNA, 232 bp, Homo sapiens
aaacaagttagtattaatgcgttggcccacgtagcaaaaagatatttgattatcttaaaaattgttaaataccgttttcatgaaagttctcagtattgtaacagcaacttgtcaaacctaagcatatttgaatatgatctcccataatttgaaattgaaatcgtattgtgtggctctgtatattctgttaaaaaattaaaggacagaaaccataaaaaaaaaaaaaaaaaaa

SEQ ID NO: 5330 - DNA, 442 bp, Homo sapiens
  misc_feature (1)...(442): n = g, a, c or t
acaagctttttttttttttttttttttttttttttttgattcttcagctaaaacagcggaanaggngatttattatatggttgttacactcggccacaaataaacacanaaatagtccanaatgtcacaggtccagggcanaggaccaacatgggcattttgtttatgancaaggngggtctcanaggngatcggcgatcanagggcgatgaagttctanatccattganacaagctntanacagtantntgcagtcccacaacttgtaccagcatccccagcgtntggcattccatgtttctgctcctgnggcctccacggngcaacaagctagcggtttacttggacctntgccnnatctttcttcttttgcgcttcancctgcncattcgcttcttcctccacttggctntcatggnncanaggtttccaaaaaaatgg

SEQ ID NO: 5331 - DNA, 114 bp, Homo sapiens
  misc_feature (1)...(114): n = g, a, c or t
ctttttttttttttttttttttttttttttttcgggngcaaanattcactttatttattcattctcctccaacattancataattaaanccaaggaggaggaggggggtgaggt

SEQ ID NO: 5332 - DNA, 483 bp, Homo sapiens
  misc_feature (1)...(483): n = g, a, c or t
aaatctttgcctttnanatacaggaaaaataatggcattaaattgctttaatttgcattattttagttatccagtttgcacatatttttataggtatcttaggcatcgattggtattttttaactgggccaagcccattaaggtctttcttctgttgggtgctatcattttctgattaagtctttttgactattgacatacagtctttcacagatggtggagtgtttttcccccaaatctgttgtttgtcttataatgttgtatatgaggttttatggtgtatgaatatgaatgcttctgtaatgtcaaacagatccctagtaaactccttcttcacttttactgtcagatttacaaaggtcctcccattgcaaagcagtgtttgtcctaatttatatattgtttttctagttcattttgtgtttccaacttttcatgtaaaattttaattatttttgaatgtgtggatgtgagactgaggtg

SEQ ID NO: 5333 - DNA, 319 bp, Homo sapiens
ccaagggtctctggtcacagtgccgaggtgggcctggcttttccacagtggagtccattgatgattacgtgaacgttccggagagcggggagagcgcagaagcgtctctggatggcagccgggagtatgtgaatgtgtcccaggaactgcatcctggagcggctaagactgagcctgccgccctgagttcccaggaggcagaggaagtggaggaagagggggctccagattacgagaatctgcaggagctgaactgagggcctgtggaggccgagtctgtcctggaaccaggcttgcctgggacggctgagctgggcag

SEQ ID NO: 5334 - DNA, 593 bp, Homo sapiens
ccacttttttttttctgtaaacctcaaatgaaacagaatctcacagatgtggggtccccctcctaattgtaataaacgttagagaaatgctccagaaaggaacaaagggagaccctctcagatcagcctaaaaccagagtggaatagggctcctctgggcggtttaagggcacagaaaggaccctcagctactcctggcctccccgggtctctttcccagaagacacaactttccaggctgccaaaagtaatagaagtcaaaaccctcaaaaccaccactgctctcgggaagtttttgagtaggatgaggaagaaagaagagagccctccttcattttgttacacgatctcaaggccaagagcaagtagaagatgtctaaagagaacaaaagaggtttcttcctggtactgtactacagatcagcaacagtttcgcagggaggcgttggctcaggttctggtacatttgaagataactgaaggccaagacttagccaaggaaggacaccagcagaacaactagatacactatcactactgcgagtgttagaatcatggggcagatttttttttttttaagctagggggacctc

SEQ ID NO: 5335 - DNA, 568 bp, Homo sapiens; identical to SEQ ID NO: 255

SEQ ID NO: 5336 - DNA, 485 bp, Homo sapiens; identical to SEQ ID NO: 254

SEQ ID NO: 5337 - DNA, 546 bp, Homo sapiens
ctggaactgaagcctgggtggactatggagccctggttgggacccccagggagtcaaaggctgcgggccaagaggccagaggtccttgagcctgggtgggcaggtggatctagggtgcatgacttgctgcttcccaaccttagtttgtcccttctgtgaaaaagggagagaaggaggaggaagatctcaaaaagactttccagcccagtgcggtggctcacgcctgtaatcccagcactttgggaggccgatgcaggtggatcacctgaggtaggagttcaagaccagcctgaccaacatagtgaagccccttctctactaaaaatacaaaattagctgggcgtggtggcatgtgcctgtactcccagctacttgggaggctgaggcaggagaatcgcttgaacctgggaggcggaggttgtagtgagctgagatcacaccactgcacaccagcctgggcgacaagagcgaaactccgtctcaaaaaaaaaaaaaaaaactgttgcagccccgttgagcctttgacaccgcctgaaatccacccca

SEQ ID NO: 5338 - DNA, 578 bp, Homo sapiens; identical to SEQ ID NO: 406

SEQ ID NO: 5339 - DNA, 475 bp, Homo sapiens; identical to SEQ ID NO: 4646

SEQ ID NO: 5340 - DNA, 450 bp, Homo sapiens
cgagcttctcgatcctcttggaggaatgggggtagtctttcctttgatgctgctgtggccctagcccgggaccgccaaaggactgaggctcaaggagttcggcgaacccagacctgtactgagggtggggattactgcctcatccccagaacctccccttgtagcatgatctctgcccattctcctcggccccttagctgcctggagctcccatctgaaggtgcagaagggtctggatcccggagtcgtcttagtctgccccccagagaaccccaggttcctgaccccctgttgtcctctcagcgcaggtcatatgcatttgaaacacaggctaaccctgggaaaggtgaaggactgtgattaggaccacagccctgggcaaaggggaccagcaagttgtcttgaatctccagggttcctgactagctgtctcctctgcagcatgagcag

SEQ ID NO: 5341 - DNA, 293 bp, Homo sapiens
cctacagcattccatcagtgtctttgcatcccaagtgtctgctttactgccacaaaggagctgatccagttcctccgggtagaagtactgaagatgactgagtgggaagactgattcaaatccatctctgaacgaatcaaattgcctagaaacgccttcatttagtgcccagaatataaccagtcttagatactcctctaaattgtggatagtgactggtatatccttccctcctttcttcagttcgatattgggaaaccctggcagagtgaaatccagtcctagatcttcaa

SEQ ID NO: 5342 - DNA, 525 bp, Homo sapiens
  misc_feature (1)...(525): n = g, a, c or t
ctggaatcagaaaagcagcaaataatggaaaagcattatggcttcaatgaaatacttaagcatatcaatgaattgtccatgaaaattgatgtggaagatatactctgcaaggcagaagcaatttctctacagatggtaaaatgcaaggaattgccacaagcagtctgtgagatccttgggcttcaaggcagtgaagttacaacaccagattcagacgttggtgaagacgaaaatgttgtcatgactccttgtcctacatctgcatttcaaagtaatgccttgcctacactctctgccagtggagccagaaatgacagcccaacacagataccagtgtcctcagatgtctgcagattaacacctgcatgatcactgttcttgcttttttgggaagagacactttgttgcaaccctttttcaagtacttgaaagttgaaaatttgaaatcttggtattgatcatgctttaaggnttatgtaaagaaagtgtactgatgttcttacattaaagctttacaaagattta

SEQ ID NO: 5343 - DNA, 429 bp, Homo sapiens
  misc_feature (1)...(429): n = g, a, c or t
tcaaccccaacttcgtggcgcgtatgatacctaaagtggagtggtcggcgttcctggaggcggccgataacttgcgtctgatccaggtgccgaaagggccggttganggatatgaggagaattaggagtttctgaggaccatgcaccacctgctgctggaggtggaagtgatagagggcaccctgcagtgcccggaatctggacgtatgttccccatcagccgcgggatccccaacatgctgctgagtgaagaggaaactgagagttgattgtgccaggcgccagtttttcttgttatgactgcgtatttttgttgatctataccctgtttccgaattctgccgtgtgtatccccaacccttgacccaatgacaccaaacacagtgtttttgagctcggtattatatatttttttctcattaaaggttt

SEQ ID NO: 5344 - DNA, 125 bp, Homo sapiens; identical to SEQ ID NO: 408
  misc_feature (1)...(125): n = g, a, c or t

SEQ ID NO: 5345 - DNA, 637 bp, Homo sapiens
cctgtattatacgtgtcctcctgggggttggagatgatccctcaagtacacaaaggtcccctggcccttcatctgggaatcatatactccactctagctcccagaatctacagacctggctcctcggatctgaagcccagcacaaaataatctccccgtccaaggagcttgtggaacttgaattgggaactttggagtcttgtctcccatcccagcacattgaggatgtagttggtgaatggactcttccaggcatggagatcctccatcctaaaagtacctgcctccttcccagccatccctgacacattccagccagttggatctcacagcacagctatccacagggagactgggatgttcacgcagcactccattactcagtacctccatacccagccctatacgcagacccacaggtggggaaactgaggcaggaacagggttctgccctcccagagcctccactctgggatgccagaatggaaagccagagggaacctgagaatcatccagtcttactgtctcaatgtacatacggggaaactgaagccaggagaagaagagggagaaactgtccagggcctcacagggaggcattcatggagctggagaaaccagggatcctgaccgcagg

SEQ ID NO: 5346 - DNA, 412 bp, Homo sapiens
ctgacattgataccagatctgaattctacaaacacattgtgctttctggagggtctactatgtatcctggcctgccatcacggttggaacgagaacttaaacagctttacttagaacgagttttgaagggtgatgtggaaaaactttctaaatttaagatccgcattgaagacccaccccgcagaaagcacatggtattcctgggtggtgcagttctagcggatatcatgaaagacaaagacaacttttggatgacccgacaagagtaccaagaaaagggtgtccgtgtgctagagaaacttggtgtgactgttcgataaactccaaagcttgttcccatcatacccgtaatgctttctttttcctttattgccaatctttgaactcattcaactccaggacatggaagagg

SEQ ID NO: 5347 - DNA, 518 bp, Homo sapiens; identical to SEQ ID NO: 256

SEQ ID NO: 5348 - DNA, 440 bp, Homo sapiens
  misc_feature (1)...(440): n = g, a, c or t
tgcaaatggttctgctgaaacatctgccttggacacagggttctcgctcaacctttcagagctgagagaatatacagagggtctcacggaagccaaggaagacgatgatggggaccatagttcccttcagtctggtcagtccgttatctccctgctgagctcagaagaattaaanaaactcatcgaggangtgaaggttctggatgaagcaacattaaagcaattagacggcatccatgtcaccatcttacacaaggaggaaggtgctggtcttgggttcagcttggcaggaggagcagatctagaaaacaaggtgattacggttcacagagtgtttccaaatgggctggcctcccangaagggactattcagaagggcaatgaggttctttccatcaacggcaagtctctcaaggggaccacgcaccatgatgccttgg

SEQ ID NO: 5349 - DNA, 272 bp, Homo sapiens; identical to SEQ ID NO: 5253

SEQ ID NO: 5350 - DNA, 533 bp, Homo sapiens
aaaattctaagtatgcatgcaatctgtaaaaattccaatttaggatagctaaattcattacatttttttttttgcttatattaccttactattttacctgtctccttgttattaatagcaagacatatgttccttttagaaatgtttgattctcttatttgcttagaaatagaattcaatgagtgattaatgtacaccatgattcagaaaaacaaatgcaaatttccatacattaactctacacataatggcttgcaatattttatctaaaacattcattttattttccaattcttaaagatagtttttgctataggtggcatctctgtgaacgcagagctctaaattaaaactgccaaagcaacaaaagatataatatattgggactttataagctaagaaacataaatacaggcgggaaaaagcatagcttatgtagattgctgctgggttaaatgaatatgaattcacactaaaattgtcaatcagctacacatctctcaccaaatcattctttttggtcgtgcataatt

SEQ ID NO: 5351 - DNA, 387 bp, Homo sapiens
ttgttttatcactggacaagaaatgtattaggtttgatatttacaaagatgtttatgttgtctgctattttctattataggtttattcaaagagaatatcacctatagcataaataattaaatttttcaataaaaacaaactaaaaaaaccctagaaacatttgacatcaccaaattcaacagctctcactagaaatccaagcaataaacttagatatttgaaataaacataaattatgattatataactctaagtcacatacataattttgaattatggtaatagcactgtaaacatgaatacaaaggattacagttttatacagaattttttttgtttttcttcttttaggcttatttctccttgaaagaacagaatgatctttt

SEQ ID NO: 5352 - DNA, 440 bp, Homo sapiens
  misc_feature (1)...(440): n = g, a, c or t
aaaaaacccacaaaatgctgattcagttcaaaattaatgcaaatgtttcaaaactgggtttctgatatttgtaaatgtgtttctttattagataagagtgtattaccattaaagtcattagtataatattgctttcaaaaagagatggtnnacaaaactataatccagcatcttttattgcattggaaagactggcaaagtcttttggatgggttgggagatgtggctggaaagtactttggaaaatatacaatcaagatatctcatggcatattaaaagaaaaatcttaatagcagtgttggcttttatttggattttttcatctcagttttttctgtggaatctccttcattggcattgttatttaatcataaacggggcagatgtctacttgttcagtttttcaaatctgttttcctgagtataaataagagtattt

SEQ ID NO: 5353 - DNA, 306 bp, Homo sapiens
aaatacaagtataattttggaaggggtatttgacaaattcagcattaactgccaactctatagacatgttttaacaaaaagcaaaacaaaacaaaacaaaaaaacaaaacaaggcatttactcttggccctttcagtacaggcgaagtgttctattgcatcacaagtgctagtgatgcagtaacagatccaagggcataatattaaatatgtttttttccaactgcgatttagttgaaaaataacataatacaaacatatattaatggctatcaagaccagcagtgatctgcagaatacctagagg

SEQ ID NO: 5354 - DNA, 347 bp, Homo sapiens
cctgtactgaagacagcaagctgttagtacagaccagatgctttcttggcaggctcgttgtacctcttggaaaacctcaatgcaagatagtgtttcagtgctggcatattttggaattctgcacattcatggagtgcaataatactgtatagctttccccacctcccacaaaatcacccagttaatgtgtgtgtgtgtgttttttttaaggtaaacattactacttgtaactttttttcttagtcatatttgaaaaagtagaaaattgagttacaatttgattttttttccaaagatgtctgttaaatctgttgtgcttttatatgaatatttgttttttatagttt

SEQ ID NO: 5355 - DNA, 603 bp, Homo sapiens
  misc_feature (1)...(603): n = g, a, c or t
aaactagtaatanaattttctgaagaatatccaaataaaccaccaactgttaggtttttatccaaaatgtttcatccaaatgtgtatgctgatggtagcatatgtttagatatccttcagaatcgatggagtccaacatatgatgtatcttctatcttaacatcaattcagtctctgctggatgaaccgaatcctaacagtccagccaatagccaggcagcacagctttatcaggaaaacaaacgagaatatgagaaaagagtttcggccattgttgaacaaagctggaatgattcataatagacaactggtctgttaatctttttcatcattgttgtgtataatttacctctcattagaaaggctaacaaattttaagtgccacaggttttaaggattctgcagaaaaaaaagaaaaaagtccttcagtttagaacctacaaaagcttgtgtatcttgattaatgtactttttattgcatggtgtgaactaagttattgctgcataaatttgnaatatatcctgtttgtatttttttccaagtgtataatgttgggtgtggagttttcatgacagaatatacacattttgtaaatctgtact

SEQ ID NO: 5356 - DNA, 444 bp, Homo sapiens
aaagataccatctaccttactcaggtgatgcaggcccagtgtgtcaaaacagaaactgaattctaccgccgtagtcgcagcgagatagtggatcagcaagggcacacgatgggggcactttattggcagttgaatgacatctggcaagctccttcctgggcttctcttgagtacggaggaaagtggaaaatgcttcattactttgctcagaatttctttgctccactgttgccagtaggctttgagaatgaaaacatgttctatatctatggtgtgtcagatcttcactcggattattcgatgacactcagtgtgagagtccatacatggagctccctgtggcccgtgtgctctcgtgtgactgaacgttttgtgatgaaaggaggagaggctgtctgcctttatgaggagccagtgtctgaattgctgaggagatgtgggaat

SEQ ID NO: 5357 - DNA, 332 bp, Homo sapiens; identical to SEQ ID NO: 4110

SEQ ID NO: 5358 - DNA, 640 bp, Homo sapiens
  misc_feature (1)...(640): n = g, a, c or t
ccaacatggtgaaaccccatctctactaaaaatacaaaaattagccgggcatggtggcagttgcctgtaatcccagctactcaggaggctgaggcaggagaatcgcttgaacctgggaggcggagatttgcagtgagccgagatcacgccattgtactccagcctgggcaacagagagagactcagtctcaaaaaaataaaaattaaaaagtaagcatgtcttattgtttatttttccccagtgctaaaaatgactattttgaaacaatgctgatagagtttacagttcaatttttactttgaggtactaattttgcatttggccggatgctcttaaaaattaaaaagtagacatgtcacctagtaatatgcctattttaattttctaagaagttttgttaaaaattctattaaaatatacatatcctagttaccaatcacattcatacagagaaaatgaacattaaacatattactgtacaaacaatttggacttcagttccagctttggagtcccctccattctattaattagggtgataaacatggcatttagcagggaattaactgtggataccagcacatgcctaagatctaaacaactgaaaaagtattnaagagttctactttggagcagagt

SEQ ID NO: 5359 - DNA, 562 bp, Homo sapiens; identical to SEQ ID NO: 346

SEQ ID NO: 5360 - DNA, 416 bp, Homo sapiens
cctagtatgaggagcgttatggagtggaagtgaaatcacatggctaggccggaggtcattaggagggctgagagggcccctgttaggggtcatgggctgggttttactatatgataggcatgtgattggtgggtcattatgtgttgtcgtgcaggtagaggcttactagaagtgtgaaaacgtaggcttggattaaggcgacagcgatttctaggatagtcagtagaattagaattgtgaagatgataagtgtagagggaaggttaatggttgatattgctagggtggcgcttccaattaggtgcatgagtaggtggcctgcagtaatgttagcggttaggcgtacggccagggctattggttgaatgagtaggctgatggtttcgataataactagtatggggataaggggtgta

SEQ ID NO: 5361 - DNA, 287 bp, Homo sapiens
aaatctttaatcctttgattaagcagcaagcatatcactcttccaggccaaacactgcttaaacaaaaaagaaaaataatgacgtgcaaaatatttacaaaatatgcaaagcacacaataaagacatctcactatatacatgtgtcatattactaatgaagctaacgtttttctactgtgtgctctaatgcatgtaaatcaaattacagcacatccctcagatacagcaccttggcccatgtctgggatagaagagattttttaatgaatcacaatatactgaacag

SEQ ID NO: 5362 - DNA, 334 bp, Homo sapiens
cctggcctcttcagagtaccccccattccactttccctgcctccttccttaaatagctgacaatcaaattcatgctatggtgtgaaagactacctttgacttggtattataagctggagttatatatgtatttgaaaacagagtaaatacttaagaggccaaatagatgaatggaagaattttaggaactgtgagagggggacaaggtggagctttcctggccctgggaggaagctggctgtggtagcgtagcgctctctctctctgtctgtggcaggaggcaaagagtagggtgtaattgagtgaaggaatcctgggtagagaccattctcag

SEQ ID NO: 5363 - DNA, 420 bp, Homo sapiens; identical to SEQ ID NO: 644
  misc_feature (1)...(420): n = g, a, c or t

SEQ ID NO: 5364 - DNA, 452 bp, Homo sapiens
  misc_feature (1)...(452): n = g, a, c or t
aaaaatctatttatttatcaaaacagtattggcacagtaattctcatattatcatcaaataataaaattgctactttctgtactcaattctttagaatcctanaaattgcaaatgcattcaatttaacaatattgtaaataacaatacaaaagaaagaactctgcatatttatggaaacattgttgatggtacagttctactgaaactcatacacatttcactatttaatttacatatggtcttgttgaaaaaaaccagtatgttttactttttcaatttccttatgctaaaatacatgtaattctaaaggatatctcttaggtgttataaaaaccaaggaaggtccaccaccaagtcaaagttagagtcaaagatacttcaaagattccatgaaatgatctgaaaacaaatttaaccaaaaaatgtgtactgtattggggcacatccatgg

SEQ ID NO: 5365 - DNA, 549 bp, Homo sapiens
ccacagaagttgctgctgacgctctgggtgaagaatggaagggttatgtggtccgaatcagtggcgggaacgacaaacaaggtttccccatgaagcagggtgtcttgacccatggccgtgtccgcctgctactgagtaaggggcattcctgttacagaccaaggagaactggagaaagaaagagaaaatcagttcgtggttgcattgtggatgcaaatctgagcgttctcaacttggttattgtaaaaaaaggagagaaggatattcctggactgactgatactacagtgcctcgccgcctgggccccaaaagagctagcagaatccgcaaacttttcaatctctctaaagaagatgatgtccgccagtatgttgtaagaaagcccttaaataaagaaggtaagaaacctaggaccaaagcacccaagattcagcgtcttgttactccacgtgtcctgcagcacaaacggcggcgtattgctctgaagaagcagcgtaccaagaaaaataaagaagaggctgcagaatatgctaaacttttggacctcg

SEQ ID NO: 5366 - DNA, 471 bp, Homo sapiens
atcactaagtcaagttctttacttcccagaagtgatggctaaggggagggaggagggtgagaagaggaagacagaaagagccagagagaatgaggaggtgagaagggggggacagtaaaccactgttctatgaagtctcacgaggcaagtgctcaaggtaaaaaaagagtcctggagaatcgtccacggctgcgggaagcatctcggtttccttctgcttttaagtcctctcagggaaggctgtcgccgctaccgctgcattaaatagttatgtacatcgcagagagtcccaggccatgggcaggtgggggaggggcgtcatttcaccaggggccgagttttatcatcgtcaccgcactggtgagctttgtactttttcacttctgccatgtacttggcccacgcgtcacctttacttgttaatacctcatcctccgtcttctgcttcttggctactattcccgtcttgag

SEQ ID NO: 5367 - DNA, 152 bp, Homo sapiens
ccaattgaaacaaacagttctgagaccgttcttccaccactgattaagagtggggtggcaggtattagggataatattcatttagccttctgagccttctgggcagacttggtgaccttgccagctccagcagccttcttgtccactgcttt

SEQ ID NO: 5368 - DNA, 574 bp, Homo sapiens
aaagaaaaaggtgtttatttaggccatcaactaggatcataataaataacgtaatatactaatgtaataacagatcttctcatgcatttatcgtgtttataaatatagaagaaagctggcttacagggctgttgggacaaatttggaaaagtgtatttggcaattacacagtaaaagttaacagtgttgactatcagattctcttttctgtcagtttttagaatacatcccctatacatctgtgaataaatggtaatggtctcttagagtttctactttttgtgaacatgccagagttaagtaaattgtcaaaggatccaggttgacaatgtgttatttgtcaatatttctaatgaaaaacagatcttagaaaaatgaactcttctgcatttcattgtagaggctgatatattacaagccggaatcattcaaacaataaaaaaagtgcctcaatgaaataaaacccaaaagtagtttatcaatagtaactgtgatacttaatatacaaatgctgtagtattgcgtttgtaatttggtaagtaaatgaccaagtatctgaatgcaaaagtgatga

SEQ ID NO: 5369 - DNA, 446 bp, Homo sapiens
  misc_feature (1)...(446): n = g, a, c or t
aaacaagttttttttagtgtttgtacacaatttgtcaatttttcaatattcaattttctgtacaggtacttttgggacaattcttatagttacataatgtgaattcatcaaaatgcagttaagaaacttacaggaatatatacacttgaacccaagacccaaacctgacattatatacaacctatttacaaatacatatggacagacaatatatgtacatagattatcataaatattgaaaaataggttagctttaatggattaatgttgttctataaataacattacagttgtaactgaaacatccacggaagacagtaatgcaaaatgaggtgacaagacagtggttttaatactgaagactgctcattaatgtgaggaagctcctccaatcctctggctatttaangttcaaaatcaagtgcctagggaaaattccaatggat

SEQ ID NO: 5370 - DNA, 565 bp, Homo sapiens; identical to SEQ ID NO: 204

SEQ ID NO: 5371 - DNA, 367 bp, Homo sapiens
aaagttgaactaagattctatcttggacaaccagctatcaccaggctcggtaggtttgtcgcctctacctataaatcttcccactattttgctacatagacgggtgtgctcttttagctgttcttaggtagctcgtctggtttcgggggtcttagctttggctctccttgcaaagttatttctagttaattcattatgcagaaggtataggggttagtccttgctatattatgcttggttataatttttcatctttcccttgcggtactatatctattgcgccaggtttcaatttctatcgcctatactttatttgggtaaatggtttggttaaggttgtctggtaataaggtggagtgggtttggg

SEQ ID NO: 5372 - DNA, 519 bp, Homo sapiens
ctggcttttcgatataaagagaattctaaagtggatgacaaatgggaaaagaaatgccagaagattttttcatttgcccaccagactatcagtgctttgatcaaagcagagctggcagaattgcccttaagactttttcttcaaggagcactagctgctggggaaattggttttgaaaatcatgagacagtcgcatatgaattcatgtcccaggcattttctctgtatgaagatgaaatcagcgattccaaagcacagctagctgccatcaccttgatcattggcacttttgaaaggatgaagtgcttcagtgaagagaatcatgaacctctgaggactcagtgtgcccttgctgcatccaaacttctaaagaaacctgatcagggccgagctgtgagcacctgtgcacatctcttctggtctggcagaaacacggacaaaaatggggaggagcttcacggaggcaagagggtaatggagtgcctaaaaaaagctctaaaaatagcaaatcagtgcatg

SEQ ID NO: 5373 - DNA, 205 bp, Homo sapiens
ctgtggatttcaaaacacagtgtattctagatcatctaagatccatgctgatttttattgcacaagaattaggtttgaactcttgagctggaacctcagcaaactagagtatatattgttcagtatttctttggaaacatttcattaatgtacttgtcttacagaaatttctgaactttagtaaaaaaaataaagttaaactttt

SEQ ID NO: 5374 - DNA, 332 bp, Homo sapiens; identical to SEQ ID NO: 4110

SEQ ID NO: 5375 - DNA, 90 bp, Homo sapiens
  misc_feature (1)...(90): n = g, a, c or t
aaataactcnctnaaccctgcccattaagatcacggtaaacatacaataatttttattatggaaattaatctttacatacaaaatcagct

SEQ ID NO: 5376 - DNA, 408 bp, Homo sapiens
  misc_feature (1)...(408): n = g, a, c or t
ctgtgcaagaaaaattaaatgaaatagtagatcagataaaaactagaagagaagaagaaaagaaacaaaaagaaaaagaagcagaagaagctgaaaagcaattattccatggtactccagttacaattgagaatttcttaaattggaaagccaagtttgatgcanaactcttggaaattaaaaagaaaaggatgaaagaagaagaacaagcaggaaaaaataaattaagtgggaaacaactatttgaaacagatcataatcttgacacatctgatatccagttcttggaggatgctggaaacaacgtggaggtagatgagtctttgttccaagaaatggatgacttggagctggaggatgatgaagatgatccagactataatcctgctgacccagagagtgactcag

SEQ ID NO: 5377 - DNA, 238 bp, Homo sapiens
  misc_feature (1)...(238): n = g, a, c or t
acaagcttttttttttttttttttttttttctanaaaaatttaacaggtttatttataattattataaagttgaaccgntaaaacttgttcactgaaacatttnaacttgcattaatgctttacgtntccgcatttatattaaaaattcacacacaaatgaaaatggaaaaactgccaatacctgatttctgtcccctatttttccactcgcaatcatatacttaggtaccttttggc

SEQ ID NO: 5378 - DNA, 342 bp, Homo sapiens
ctgctgatacccaggcagtagctgatgctgtcacccaccagctcggtttccacagcattgaactgaatgagcctccactggtccacacagcagccagcctctttaaggagatgtgttaccgataccgggaagacctgatggcgggaatcatcatcgcaggctgggaccctcaagaaggagggcaggtgtactcagtgcctatggggggtatgatggtaaggcagtcctttgccattggaggctccgggagctcctacatctatggctatgttgatgctacctaccgggaaggcatgaccaaggaagagtgtctgcaattcactgccaatgctctcgctttgg

SEQ ID NO: 5379 - DNA, 397 bp, Homo sapiens
  misc_feature (1)...(397): n = g, a, c or t
gaaaagccttgtaaatgcctatattgtgggcttttaacgtatttaagggaccacttaagacgagattagatgggctcttctggatttgttcctcatttgtcacaggtgtcttgtgattgaaaatcatganngaagtgaaatngcattgaatttcaagggaatttagtatgtaaatcgtgccttanaaacacatctgttgtcttttctgtgtttggtcgatattaataatggcaaaatttttgcctatctagtatcttcaaattgtagtctttgtaacaaccaaatnacctttngtggtcactgnnnaattaatatttggnagacagaatccatgtacctttgctaaggttagaatgaataatntattgtatttttaatttgaatgtttgtgcttttt

SEQ ID NO: 5380 - DNA, 314 bp, Homo sapiens; identical to SEQ ID NO: 3212

SEQ ID NO: 5381 - DNA, 332 bp, Homo sapiens; identical to SEQ ID NO: 347

SEQ ID NO: 5382 - DNA, 330 bp, Homo sapiens
caaaactttttatatcaaaaggctttgcacatttctatatgagtgggtttactggtaaattatgttattttttacaactaattttgtactctcagaatgtttgtcatatgcttcttgcaatgcatattttttaatctcaaacgtttcaataaaaccatttttcagatataaagagaattacttcaaattgagtaattcagaaaaactcaagatttaagttaaaaagtggtttggacttgggaacaggactttatacctcttttactgtaacaagtactcattaaaggaaattgaatgacaaaaaaaaaaaaaaaaaaaaaaaagcttgta

SEQ ID NO: 5383 - DNA, 570 bp, Homo sapiens
cttttgtaaagagaatcaactaggtatttaagactgataattttacaatttatatgcttcacatagcatgtcaacttttgactgagaattttgttttactttttaacatgtgttaaacagagaaagggtccatgaaggaaagtgtatgagttgcatttgtaaaaatgagactttttcagtggaactctaaaccttgtgatgactactaacaaatgtaaaattatgagtgattaagaaaacattgctttgtggttatcactttaagttttgacacctagattatagtcttagtaatagcatccactggaaaaggtgaaaatgttttattcagcatttaacttacatttgtactttagagtatttttgtataaaatccatagatttattttacatttagagtatttacactatgataaagttgtaaataattttctaagacagtttttatatagtctacagttgtcctgatttcttattgaatttgttagactagttctcttgtcctgtgatctgtgtacaattttagtcactaagactttcctccaagaactaagccaacttgatgtgaaa

SEQ ID NO: 5384 - DNA, 356 bp, Homo sapiens
caagcacatccttgctaatttcaaaaactaccagttctttattggtgaaaacatgaatccagatggcatggttgctctattggactaccgtgaggatggtgtgaccccatatatgattttctttaaggatggtttagaaatggaaaaatgttaacaaatgtggcaattattttggatctatcacctgtcatcataactggcttctgcttgtcatccacacaacaccaggacttaagacaaatgggactgatgtcatcttgagctcttcatttattttgactgtgatttatttggagtggaggcattgtttttaagaaaaacatgtcatgtaggttgtctaaaaataaaatgcattt

SEQ ID NO: 5385 - DNA, 397 bp, Homo sapiens
  misc_feature (1)...(397): n = g, a, c or t
ctgtcggaattaaaggatcagatgacagaacaaaggaagcagaaacaaagaattggtcttctaggacatcctcctcacatgaatgtcaacccacaacaaccagcataagcaaatgaaagaaaggaattgtatttaccttttataattattattanngtgggtatggctaatgagttctgattcacccacgaaggttacatttatgctgaatacatttgtaaatactcagttttatactgtatgtatatgattgctactctaaaggtttggatatatgtattgtaattagaattgttggcatgatgacatttcatttgtgccaaaaatattaaaaatgccttttttggaaggactaacagaaagcacctgatttgcacttgaaccagattatagattt

SEQ ID NO: 5386 - DNA, 314 bp, Homo sapiens
  misc_feature (1)...(314): n = g, a, c or t
gaaagtggtggnnntgatctttttatttagaaacccacaaaancnnaaacacagtnnaaataaaacagaaatcaaactataagttgacttttanttcctaanaagaaacatatnncaaaagcaagtggaatctanaattcttataacatgaataacaaaatgtacagcaagcctatgtagntcaattaatatataaggaaaaggaaggtctttcttcatgatacaagcattataaagtttttactgtagtantcaattaatggatatttncttgttaataaaattttgtgtcataatttacaaattagttcttt

SEQ ID NO: 5387 - DNA, 499 bp, Homo sapiens
  misc_feature (1)...(499): n = g, a, c or t
aaaagttgtattcgtctcnnattcaaaatattatcacacaggtgatttatcttaaaaatccatgtgagtactgacctatatgtcattttttgcaaatctaaaacaaaaatatttcaaaatgttcagtggcagagagtactggtaccacaaaatcagagcagtagaagcaaaggggatataagatgtggacattttgtagcttgaggagatggcacctagggaaaagagaattaagtgtttatttgggaaaatgttaatgatatacacagaacataggagctggaataaagaaggcatgcttaggttatagcaaggtatactcctggcctaaaatatcaccatctttctctgcatgcctgggacaaagtaagaatgggggcagaaaaaaagggaagactgagaacacagagcacttagtctacttattagcaaaaataaagtgagattttctaaaatcaggtataatgtcatctgcctctccaaaaaactgttctttttg

SEQ ID NO: 5388 - DNA, 570 bp, Homo sapiens
ctgtagctttttcattcagaaactggagaccatcttttcactgagttgttattccttcctcttcccttagcttagggatatgttgaaaaaggcttttcaacaagtattttattttttacaagttgctatgaaattaaaatttatatatatatcttaagtgtttataaagcactcaaaattgtagcttacatgtatatgacttctgaaaataaaaatcacacttctaacataatctttctgctctgcaaaaatattctacatacatgcatatgatcaaaacaatcttttcatgtttggggtatttcttacacatagtaaaagaaaagtcaacaattgtatcagtacttcccctgttaagataactgagtgccacctagtgttcaatttctgcaactactaagcttacaaattcaatactgctattaaaacccaggttctgaaaacggcattttggaaatctttttttttttttttttatgtttacggtggcaaaatacgactatgaaaagaacatgatatcaaaatcagtataaaaatagccacaggctacttaaatatgacaaacagact

SEQ ID NO: 5389 - DNA, 453 bp, Homo sapiens
tttttttttttttggtgggttttggggatgtttaccctattgttttttatttggatgccctaaggcatataaagcgcatagtgaattacctactggaatgtaaatggttctaaaattaaaactgttaaaatagaaagagggaaaaggaaggcccaagaactcttaaagagaggctgagaacaagaacaaaaaaacccagaagtgtaggtaatacataacagcgcagacagaaccgttgtaggccatgtataataaataatgcatgccccaaatttcagttaatcatataatttcaacttgagttctaatactggaaccagccaaccacttgggcttcaacactgtactagatgtcagtagaatcgcttgatggaattacagccttgttacagttgagatcaagagagggtgcttttttttttccttcttttattaaagctatcattccaggct

SEQ ID NO: 5390 - DNA, 520 bp, Homo sapiens
aaattggctttgcccgcttcagtagtcacaggtagctacctgaccgagaagccgacttgggaattactgttacttgtgggtgatactgtcataaaggggttgaaagtacttgttagctgtatatgtcagaattgattaaagagaaccaactattcttgtgcaagggatggtattgtagttaattatgacatttggagaaactaatttctgtctgtcgacactatctctgttccatttagacttagagacttacatgggcaatgcttgactttttgcattcagcacagaaagttaagtaatccactgtggtaaaatattaactaaatttatatgacttcttgactgctgtaagtagagaatatttatcatataagcaccattttcctgaattttttgttactgcatattttatcttactgtcactattgtgtaaaatctttgaaaggaaaatgaatactgtgtaatagttaaacccattcataggttgcaatagagtgtcagccaaatgtgtcatacatca

SEQ ID NO: 5391 - DNA, 519 bp, Homo sapiens
ctggcctgtcatataaaacatactgtcattgagcttaagctccgcttgttctgaggtttcacctccatgtgtttcattggtgcaaaagtggatctcttagttggtcacttaattctttctttttcagaaagatagtatgttcactggtatatttggtcactcttagaaccttccttcacattgttttttatgggacccatgaatggttagcctttcttttctattgtagaaggaaataaataggagtaaaaagaccattgtagtaaataagttcaaggggaacttgggaccagaaaccactgttatgtacaaaaaatggcaaattcaataaactcaaatttaaaataatttttaaattaacagttatgataaattttatattttatacaaatagattgcttagaatggttctcaagaattataagagaaatgaactcacagtacaaaaattttataattactatacttgtgttttgtttgggggctgggaaatgtatttttacattgtagccaatcatt

SEQ ID NO: 5392 - DNA, 522 bp, Homo sapiens
  misc_feature (1)...(522): n = g, a, c or t
caagctttttttttttttttttttttttttttttnattcaatttcctttaatgagtacttgttacagtaaaagaggtataaagtcctgttcccaagtccaaaccactttttaacttaaatnttgagtttttctgaattactcaatttgaagtaattctntttatatctgaaaaanggttttattgaaacgttngaaattaaaaaatatgcattgcaagaagcatatgacaaacattntganagtncaaaattagttgtaaaaaataacatantttaccagtaaacccactcatatanaaatgngcaaagccttttgatataaaaagttttgtacaccaagcacctatttttataacttancttcccatgganagataanggctngcgtgcattttatgtatccataacatacatacaaggctcggtcttttcaatgggataacagttcacaactcttcgatttgaattgnaatgaatctggngacaaggattttnntntaatggattccaaagttagccana

SEQ ID NO: 5393 - DNA, 336 bp, Homo sapiens
ctgtgttatttgatttcttgcttttcggagctccttaagaattacaagcaattgatgctgcacatgttgacggtcgagtttttcattttcaaagtctaaagtacatgcctgcatctgttgttccaacagagctacccttgtttgttcttcttgctgctttagcagagatgtgtaaagaaactggacctgagataagagctcttcggatctcttcttctcttcttcaagttttcccctagcaatatcattctcttccctgagtttttgtatcttctctgttttatgcctatcatcttccagatgttgcacatctgcccttctttgtgaatacaacag

SEQ ID NO: 5394 - DNA, 275 bp, Homo sapiens
aaatcctttactaattatataatttgaaagcaaaaagaagggcctatattaaatgctgaaagtgaaaagtgatgacattattagcagacactgcttaaaggagaccatttgtagcagttggcttaacctcaacttctaaaactacattgaaaatgtaaatacatagcttagttttttgtaatatatggtgacttcagatttttttgtacagtattttgaatgtgagatgattgtcaggactaactgcctttttaacaaaacattttcagtatttt

SEQ ID NO: 5395 - DNA, 168 bp, Homo sapiens
ctgcggagcatgtcgaccccggcccggaggaggctcatgcgggatttcaagcggttacaagaggacccacctgtgggtgtcagtggcgcaccatctgaaaacaacatcatgcagtggaatgcagttatatttggaccagaagggacaccttttgaagatggtactttt

SEQ ID NO: 5396 - DNA, 126 bp, Homo sapiens; identical to SEQ ID NO: 348
  misc_feature (1)...(126): n = g, a, c or t

SEQ ID NO: 5397 - DNA, 469 bp, Homo sapiens
cctcaggcaaattatagtcaaatacatcacccccctcaggcatctgtggcaaggcatccctctagagaacaactaattgattacttgatgctgaaagtggcccaccagcctccatatacacagccccattgttctcctagacaaggccatgaactggcaaaacaagagattcgagtgagggttgaaaaggatccagaacttggatttagcatatcaggtggtgtcgggggtagaggaaacccattcagacctgatgatgatggtatatttgtaacaagggtacaacctgaaggaccagcatcaaaattactgcagccaggcgataaaattattcaggctaatggctacagttttataaatattgaacatggacaggcagtgtccttgctaaaaactttccagaatacagttgaactcatcattgtacgagaagtttcctcataagcactgtggacaaaaaaagcgggga

SEQ ID NO: 5398 - DNA, 408 bp, Homo sapiens
  misc_feature (1)...(408): n = g, a, c or t
atcccattgaaaagaccgagccttgtatgtatgttatggatacataaaatgcacgcaagccattatctctccatgggaagctaagttataaaaataggtgcttggtgtacaaaactttttatatcaaaaggctttgcacatttctatatgagtgggtttactggtaaattatgttattttttacaactaattttgtactctcagaatgtttgtcatatgcttcttgcaatgcatattttttaatctcaaacgtttcaataaaaccatttttcanatataaagagaattacttcaaattgagtaattcagaaaaactcaagatttaagttaaaaagtggtttggacttgggaacaggactttatacctcttttactgtaacaagtactcattaaaggaaattgaatgat

SEQ ID NO: 5399 - DNA, 307 bp, Homo sapiens
ctgagggtctccgcaggaacaccatcacccggcatgactgccaagtcccaggtctgtctggaagccagcgggaggatcagcatcctgccccctttggtccatcctgtgggctgtggggaccaggcccctgctactcaaggccaaggtaggaaacagtctttcctgttttcttcagggttgcaagcagagtgtccatgctgtgctcagattcaatgcagaccttcttgttgggcaggtcaatgtcatacttaactccggcatgactgaggcagcggcggtgtggcggcggtgtggcggcggtgtcagc

SEQ ID NO: 5400 - DNA, 350 bp, Homo sapiens
ccttcactgcccctccagtttttatagacctgaggttccagtgtctcctggtaactggaacctctcctgagggggaatcctggtgctcaaattaccctccaaaagcaagtagccaaagccgttgccaaaccccacccataaatcaatgggccctttatttatgacgactttatttattctaatatgattttatagtatttatatatattgggtcgtctgcttcccttgtatttttcttcctttttttgtaatattgaaaacgacgatataattattataagtagactataatatatttagtaatatatattattaccttaaaagtctatttttgtgttttgggcattttt

SEQ ID NO: 5401 - DNA, 620 bp, Homo sapiens
  misc_feature (1)...(620): n = g, a, c or t
agaatggcaacngacaccaagtactttgtagagattgacttcctaagctacttaagacaacttgcatcactaagaaaaaaatgtagaaccatttggaaaaatgaaatttagtagttccaagtttcaaagaaatgtcaacattttattccattcaataaagaacaaaaccaatagtgtttttattactttcatctgaaacattccatgttttaatctgagccttgcagactttcatttggagtttgaacccgttttggttgcatttcatttttggagaacttaattaacgtgagattggcaattgaaatgcaggtgcagttttctgttaatgtcatgctgttgttttaggtaataagaaatattaagtaattggctttagattttgtaatttttttnccctgagtttcctgctagatttcgnattctagtagtcaatgtattttcagtgaaatgcaaaaatattcccattatcttttgaccagtattaatttttgagatcttactgcttgtcacttgaatcccgtgattgtcatacatctctggtataagcaacatttgatttttgaagtgtgtagaccatctcttcatattttncagatgtaattttacatttctgcatt

SEQ ID NO: 5402 - DNA, 408 bp, Homo sapiens
aaacttaaggaaagagtgggaaagtgagggcaaaataatcctatggtgaaaaaaatcaacaagataatctctgcttgagaaaaaggaccaaagacaagtgaattttctgagggtgatgaaagtgttgcttcgaaaaggggcgaagtttatatgggtctatttatttgtctaacatgtacagttaaggtttatgccttgcaatgtatgtacatcttcacaaaaaaaatcttaaaaaaattaaatgggtgggggtagggaaagggttgaagtatagatgaagcagaagtggtacatgattagtagttgaagctgggggcaggtctatatattttatttttatgtctttaatagcatttgtataaatgtacaatattcgtttacaatgttagctcaggatcttgtttacct

SEQ ID NO: 5403 - DNA, 314 bp, Homo sapiens; identical to SEQ ID NO: 3212

SEQ ID NO: 5404 - DNA, 147 bp, Homo sapiens
agaatcattttgttctttactaacaataatttgaaaattggtaatttaatatcttgtgaatatgaaaatattatggtatagattagcttctaggagaagttaagtgtagcatgatttcttgaagattaaaaaaacatttaacttttt

SEQ ID NO: 5405 - DNA, 524 bp, Homo sapiens
ccaattatttccaatttttattttattcttaaaacttaagcatggtaaaatgttaagctgttttcatccactgatattattctactataaaaagcccttcttgagcagatttgatgataaaaaggagaacatttctaaggtataattagagaagctgttgcatgagaaatcatgtctccatctccattttgctatgcgttatctgaggattgtttctgaaagagatctatttaggcagtgtatgtatgtgtcagcatgtaaaaagtaaagaactgaaaatagacaaaccttgtaaatgcacttcaaaaccaattgtggctcaagtgtaggtggttccccaaggctggtaccaatgagactggggtttgggaattagttggtcatcatccctcctgctgcccagcagtggtcagtcatttttcatgagggatggactaggaaaatgaagtgtctattataaggagagttcctgtaacttaaggagcaagctcactacaaaacccagctacctgcttatcgtagtg

SEQ ID NO: 5406 - DNA, 526 bp, Homo sapiens
ccacagaagttgctgctgacgctctgggtgaagaatggaagggttatgtggtccgaatcagtggtgggaacgacaaacaaggtttccccatgaagcagggtgtcttgacccacggccgtgtccgcctgctactgagtaaggggcattcctgttacagaccaaggagaactggagaaagaaagagaaaatcagttcgtggttgcattgtggatgcaaatctgagcgttctcaacttggttattgtaaaaaaaggagagaaggatattcctggactgactgatactacagtgcctcgccgcctgggccccaaaagagctagcagaatccgcaaacttttcaatctctctaaagaagatgatgtccgccagtatgttgtaagaaagcccttaaataaagaaggtaagaaacctaggaccaaagcacccaagattcagcgtcttgttactccacgtgtcctgcagcacaaacggcggcgtattgctctgaagaagcagcgtaccaagaaaaataaagaagaggctgcaga

SEQ ID NO: 5407 - DNA, 349 bp, Homo sapiens
aaagagtaaactgaaaaattatgaaggatttttcccagtaatgcatagccttcattaattatttttttaataaataaactagtttagcattttttttttttaaccctacaaaatgctactattcatcatgtcttatttaaggtagccttttattctgattaattaagatacatctttaagggttattctggtggtaagaacatttatcttgacttatgtttaatttttttaatgctttggcagatgaagtaacgtttgaaaactgtttgtgaaaatagtatgagactggaaagattacgtcgtggtaaaagtttcacagttttccaggtatttccttatactgaagagg

SEQ ID NO: 5408 - DNA, 201 bp, Homo sapiens
cctagcctccattttatttatttgttctgcaaattcgatgcgtctaccttcaaataaagcgttcatttttctctgtgactcttctattagtttttgggtagctggacacattcttccaggaatataaaacaaatggggctttgtcttagttcttatatatttaattattttggcattatgttcattccattcttcttgcag

SEQ ID NO: 5409 - DNA, 246 bp, Homo sapiens
aaatatttgtgactctttcctaaagccaaagtttctgttgaattatgttttgacacacccctaagtacaaggtggtatggttgtatacacatgctgccttcttggggattcaaaaacaggtttttgattttgaatagcaattagtgatatagtgctgtttaagctactaacgataaaaggtaataacattttatacaatttccatatagtctattcattaagtaatctttttacagttgcatcagg

SEQ ID NO: 5410 - DNA, 307 bp, Homo sapiens
  misc_feature (1)...(307): n = g, a, c or t
aaaaaattaacagccaagtcacaaaggtaatggattgcacatagactaaggaataaacttcagatttgtgatttttgtttctaatcttgatgtaaatttacactatttataaatacatatttattgcttgaaaatatttgtgaatggaatgctgttattttttccagatttacctgccattgaaattttaaggagttctgtaatttcaaacactactcctattacattttctatgngtaaataaaactgcttagcattgtacagaaacttttattaaaattgtttaatgtttagaaaaaaaaaaaaa

SEQ ID NO: 5411 - DNA, 331 bp, Homo sapiens
aaatagaaaacagtatattgaaagtggtgggtttgatctttttatttagaaacccacaaaatcagaaacacagtacaaataaaacagaaatcaaactataagttgacttttagttcctaaaaagaaacatatttcaaaagcaatggaatctagaattcttataacatgaataacaaaatgtacagcaagcctatgtagttcaattaatatataaggaaaaggaaggtctttcttcatgatacaagcattataaagttttactgtagtagtcaattaatggatatttccttgttaataaaattttgtgtcataatttacaaattagttcttt

SEQ ID NO: 5412 - DNA, 251 bp, Homo sapiens; identical to SEQ ID NO: 4543

SEQ ID NO: 5413 - DNA, 128 bp, Homo sapiens
  misc_feature (1)...(128): n = g, a, c or t
aaaatggttgaanngaattcaaagaataataatattttgggacatgttaaaattatgtgaaattcaaatttcagcatccataaataaagttttattgaaacacagccaaaaaaaaaaaaaaaaaaaaa

SEQ ID NO: 5414 - DNA, 533 bp, Homo sapiens
  misc_feature (1)...(533): n = g, a, c or t
ctggcctnncatataaaacatactgtcattgagcttaagctccgcttgttctgaggtttcacctccatgtgtttcattggtgcaaaagtggatctcttagttggtcacttaattctttctttttcagaaagatagtatgttcactggtatatttggtcactcttagaaccttccttcacattgttttttatgggacccatgaatggttagcctttcttttctattgtagaaggaaataaataggagtaaaaagaccattgtagtaaataagttcaaggggaacttgggaccagaaaccactgttatgtacaaaaaatggcaaattcaataaactcaaatttaaaataatttttaaattaacagttatgataaattttatattttatacaaatagattgcttagaatggtttctcaagaattataagagaaatgaactcacagtacaaaaattttataattactatacttgtgttttgttttgggggcttgggaaatgtatttttacattgnngccaatcattttatatttgtc

SEQ ID NO: 5415 - DNA, 563 bp, Homo sapiens
aaaaaaagaaaaataaaataaagtgttttgattatttagggctgacttacatttcagtatgtgacaaaaattcaaacccaaatgcatctagctcactcagtttcagacaggtcctatgttcagcccctaaacgaatggcacaatgccaccaattttgggattcctgagtttggttcccttaagttctcagagttttcccaactctcaaaaccaaagcatcatgggagtgacagggccactggcaagactttttgccagtcagcctagttcttcttttaagatgcagtagtctcaaagcttaaagtcagaaaatcttgcaatacaagagtaactgcaagaacatataaagaaggaaaagaaaggacggggtttctagttgctaagatttgccaaacatggctacaaaactggtaaacaaacctttcttgagtgcaaagtccattagcccaacttgccatgaagagatttgaaataaaaatgaacaaatcaatttctgttgtagatacaaagcgaaaaaataaaattcaatcaatatattgaatttctctgagtttatcactaga

SEQ ID NO: 5416 - DNA, 292 bp, Homo sapiens
aaaaaattaacagccaagtcacaaaggtaatggattgcacatagactaaggaataaacttcagatttgtgatttttgtttctaatcttgatgtaaatttacactatttataaatacatatttattgcttgaaaatatttgtgaatggaatgctgttattttttccagatttacctgccattgaaattttaaggagttctgtaatttcaaacactactcctattacattttctatgtgtaaataaaactgcttagcattgtacagaaacttttattaaaattgtttaatgttt

SEQ ID NO: 5417 - DNA, 309 bp, Homo sapiens
ctgctgctgccgttgaccatcctgaactctgggggagaggaggagtcagcctggcttgcagacggccgacccagaacatggctgtctgtggtcatttccttccttcacacccagtgggatgggcacagagcccagccttggtctcaccagctcccccaccctcctctgcatcagcatccagctcacacagctctccagaagaatttgatcttagctgcagccttggggtacatcactctacacccagtctcttccctgcgcttctttcaaccaacagaagcaaacatcaaaagcacccacacctactgg

SEQ ID NO: 5418 - DNA, 388 bp, Homo sapiens
agcacttatggcaaggcatctcgagggggtggcaatcaccaaaacaattaccagccatactaaaggagaacattggagaaaacaggaggagatgttaaagtaacccatcttgcaggacgacattgaagattggtcttctgttgatctaagatgattattttgtaaaagactttctagtgtacaagacaccattgtgtccaactgtatatagctgccaattagttttctttgtttttactttgtcctttgctatctgtgttatgactcaatgtggatttgtttatacacattttatttgtatcatttcatgttaaacctcaaataaatgcttccttatgtgattgcttttctgcgtcaggtactacatagctctgtaaaaatgtaattt

SEQ ID NO: 5419 - DNA, 344 bp, Homo sapiens
  misc_feature (1)...(344): n = g, a, c or t
tttttttatctttaacctgggactttatttgtacaactaagacatttgtntaaaacaaacagaaaatgaaagaagcnttaagccatgggagagtagaaatgggagctgagaaacttaagagtanaaatgggagctgagganatgaagtgaactcctatcctcaaacccgcaagttcccggccccaaaggaagccctcanagactgatatgccttctgggaactggacagcccctctcancaagcctcattcccaacctgcacctggcctctntgcgaggaaggncagccccagcctgggaagaccaannagggagccagcccancntcaccccatnaaagaccc

SEQ ID NO: 5420 - DNA, 458 bp, Homo sapiens
  misc_feature (1)...(458): n = g, a, c or t
ctgccatcttganaacagttttctgagagatttcccacacagttttataaagttgcttcaggtcatcaggaatttctggtatgctctgaatagagccattgcatgcaataatctggtttttcatctcttcatgccataggccccgctcggtaagatctttcaataagtgaggatttacaatctgaaattctcctgacaagactctgcgagtatagatgttgctggtgtaaggttcaatggactcattattccccaggatctgagcagtggaagctgtaggcatcggggcaataagtaaactgtttcttataccatactttgcaatcttctccttgagaaccttccagtcccatangtctgtaggagtaacattccacatatcatactgaagaattcctttgctaactggagagccctcataggtttcgtatgggccctgctccttggcaaggtcacag

SEQ ID NO: 5421 - DNA, 243 bp, Homo sapiens
  misc_feature (1)...(243): n = g, a, c or t
ctggatgggtccagacnaagtggaatccctggaacctttaactgagcagtgaaggtcagtgtctcanagcctgagagatgaacaggaccagagagagaggtgggcaggcaggcacaaggttatgtcttcctcagactcggaacccttgagatccttcctgaaggctgtgtacattctgtttatctgtgtcctgtatcactgcactcctgtgtgtacacctctgtttgcacatgcgtggcatgg

SEQ ID NO: 5422 - DNA, 548 bp, Homo sapiens
ctgtttcagaggaggggggaggaggtagcagatgtcaagggatttccatttctctttcgatgccgacatacttcagggcatcagcctggctgtatctgtaatcaaaaaacagctcttcgccagtctggatggctctcttggcaaaaatacctatcctgtgatcaccgttaaccatcataacttttgcatagcagtttggatttaccgaatgatttgcaaaacgaattttgttacccttgcgggttgcatccaccacaaaatcattgttcaagttgaacagaaagctgcacatgtatttatcatacactttccctcttctgtcagcttcatcttgagaaataatctctccacagtattctgagatgaattcatttttctgcacaggatctttgataaaaatcccccagcctgccacgtcagatggtgccagcaatagatgctttttggagccccgctgaatactgcagttcttgcaggacacatttttactgtcccaatggtcagcggctccacaagtaagacagaggtcagggtcacactctcggaca

SEQ ID NO: 5423 - DNA, 203 bp, Homo sapiens
ccagagggccctctacagggaagtgatgctggagaaccacagcagtgtggctggactaggattcctggttttcaagcctgagctgatctctcggctggagcagggagaagagccatgggtcctcgacctgcagggagcagaggggacagaggcaccaaggacctccaagacagattctacgattaggactgaaaatgagcagg

SEQ ID NO: 5424 - DNA, 513 bp, Homo sapiens
  misc_feature (1)...(513): n = g, a, c or t
aaagttcatatggnnccaaaaaagagcccacatcgccaangcaatcctaggccaaaagaacaaagctggaggcatcacactacctgacttcaaactatactacaaggctacagtaaccaaaacagcatggtaccggtaccaaaacagagatatagatcaatggaacagaacagagccccagaaataacgctgcatatctacaactatctgatctttgacaaacctgagaaaaaaaagcaatggggaaaggattccctatttaataaatggtgctgggaaaactggctagccatatgtagaaagctgaaactggatcccttccttacaccttatacaaaaatcaattcaagatggattaaagacttaaacgttagacctaaaaccataaaaaccctagaagaaaacctaggcattaccattcaggacataggcatgggcaatgacttcatgtccaaaacaccaaaagcaatggcaacanaagacaaaattgacaaatgggatctaagtaaacta

SEQ ID NO: 5425 - DNA, 167 bp, Homo sapiens
aaagaaacaccaccaaaaggggattagcttagtccatcccttcctcagtcatctgcttcccaccttcctccaaatgttatcccagaacattctggaggcagggagaaggggaggcagctaatcagagtctgagagcacgatgatctcttctggatcgcattgtgtgg

SEQ ID NO: 5426 - DNA, 306 bp, Homo sapiens
  misc_feature (1)...(306): n = g, a, c or t
ctgaggagcggcgncgggactttggagagaagttaactcgtctgcgggaacttatgggggagctgcagcggcggaaggcagccttggaaggtgtctccaaggaccttcaggcaaggtataaagcagttctccaggagtatgggcatgaggagcgcagggtccaggatgagctggctcgctctcggaagttcttcacaggctctttggctgaagttgagaagtccaatagtcaagtggtagaggagcagagttacctgcttaacattgcagaggtgcaggctgtgtctcgctgtgactacttcctgg

SEQ ID NO: 5427 - DNA, 487 bp, Homo sapiens
ctggctcaagacctctcctttctcagagcctggcccaggccccccactgcctgcagctcccttccggacattttgggtggtcagtgtcgtcctgggagcccttcttggtcttctccttctgggcctcatggcttttctgattctgcctcgagtcacacaagccatgcagaggggtctgggaagatccgaggtatctcctggagaagccatctatgatgtcattggggaaatgccgctagcaggactgtacgaggaaatcatggaggccgaggctgtgctccaagatgaggaggacggaagtgtggtgaaggtggacacagaagccgcagtttcaggggaggtgtctaacctcctggagggacagtctatacgtgcggagggaggacacagcagacctgtttctcagggatatgacgaggctgcgtttcctctggaggagatgacgttgtaaagcaacctgaggatgagatacaccagacctcggccg

SEQ ID NO: 5428 - DNA, 312 bp, Homo sapiens
gatgtgatggtgtccaccttccacaagtactcgggcaaagagggtgacaagttcaagctcaacaagtcagagctaaaggagctgctgacccgggagctgcccagcttcttggggaaaaggacagatgaagctgctttccagaagctgatgagcaacttggacagcaacagggacaacgaggtggacttccaagagtactgtgtcttcctgtcctgcatcgccatgatgtgtaacgaattctttgaaggcttcccagataagcagcccaggaagaaatgaaaactcctctgatgtggttggggggtctgccag

SEQ ID NO: 5429 - DNA, 292 bp, Homo sapiens
aaatttagcaataccatctcaaacctggagcaatcctggaacagttaccaggatcaccttttcccttcaatccttgtggcttctgggaatcttcagagcctgggtctgaaaggtgtttcctacatgtctcagggctggatgcaaacctggctggggacctgagcatcaactcccatttagaatcagacatctcccttccctgcaaatgtctacaactaccaaattgctccccaacagttagctcaatggattgaatttgcagaagccaactcctaaaatggggactgcctgg

SEQ ID NO: 5430 - DNA, 443 bp, Homo sapiens
  misc_feature (1)...(443): n = g, a, c or t
cctagtgcagctcgacgacgtttagtgcaatgttccgcggtctcttgcatacctggacgctactgtttctccaactcagtcacatagatcaggtggtcctcgggagacttgccgtgggtcttactaaggtgcagtttgactgcgtgcttgctcgcaaaagtccggttgcagagcttacattggaatgtggagcccaagtcttcctcggtggcccccagtgggcccagagttttgttggtgaggactttcgaaacattctgctgttcttgaatctgattgagtggcagcttggagagatccttcaggctgaagcccaagtgtgtctccaaatgacttatgtatgtagaagcagttctgaactgagaggcacaatcgttgcaaaaganaacaggatgccctgtgtccaggttctttaggaatttcgttccccctgtcctcctcaa

SEQ ID NO: 5431 - DNA, 342 bp, Homo sapiens
ctgcacaaaaacacttcagccaattctaacgcagagggagcatagacatggaggggctgggggttaggctgggggagaccagccttccctgctaagggctcgtggtccaagcccacaaccagagggtgctctgggtggtgtccaggaacatgcagtgccggctccggggaggagggacgagaagagaaaggggagtcacagaggaggctgcagatgagcacgagtttattggactctggcctcgcgctgctgcttgatgaagttgatgagcccattggtagaagcgtcgtgagaggtcacttgagcactgccatcaagctcaggctctattttcttagccag

SEQ ID NO: 5432 - DNA, 247 bp, Homo sapiens; identical to SEQ ID NO: 2922

SEQ ID NO: 5433 - DNA, 371 bp, Homo sapiens
  misc_feature (1)...(371): n = g, a, c or t
aaacatctgcctannntcccccattcctccaacacctagaatgtgctgaaactctattcctcttccaaagtgcatctcagcctcatgaagcttttactggtcctctttccggacagagttaaccttcacaccgagggattctaaacgttttctcaatcttggagtcatgggatattcacaatcaccctgtgagatactaaaggatggaaccagggctctaggggcagagccattttactaagctgacagagttggtgagtggcggtggctctgtattgactctgagctggttcccaagcctagcgcctttccactcggaccctggctcactgtccctgcagcgtctggctggatggtggtgttggtgtgtc

SEQ ID NO: 5434 - DNA, 313 bp, Homo sapiens
  misc_feature (1)...(313): n = g, a, c or t
ctgagttcccttcccgaaggtcagctcggggctcccgacgatcatgcagaagtagatgccactgtcttccggcttcacgcttgtgagattgagaatgaaccggcttgcatcccgaaacacagctatcttctcctgttccacctcttcaccgtggatagtcccttttgcggaatcccanagggccaggaactcgtggtgactgtcactgctcggtgcctggcgctgtctcagccagtaanatgcgcatgttactgagggagattttancctcgnangacagcatcaccatcttgtnggtttgcacctttatata

SEQ ID NO: 5435 - DNA, 386 bp, Homo sapiens
ctgtcaatgcattccaggaagcagctagtcttttaggtaagaagtatggagagacagctaatgagtgtggagaagccttctttttctatgggaaatcacttctggagttggcaagaatggagaatggtgtgttgggaaacgccttggaaggtgtgcatgtggaagaggaagaaggagaaaaaacagaagatgaatctctggtagaaaataatgataacatagatgaaactgaaggctcggaagaggatgataaagaaaatgataagactgaagaaatgccaaatgattcagtccttgaaaacaagtctcttcaagaaaatgaggaggaggagattgggaacctagagcttgcctgggatatgctggatttagcaaagatcattttt

SEQ ID NO: 5436 - DNA, 372 bp, Homo sapiens
cgctgcctcagcctctgcctcccagcctctttctgagggaaaggacaagatgaagtggaaggcgcttttcaccgcggccatcctgcaggcacagttgccgattacagaggcacagagctttggcctgctggatcccaaactctgctacctgctggatggaatcctcttcatctatggtgtcattctcactgccttgttcctgagagtgaagttcagcaggagcgcagacgcccccgcgtaccagcagggccagaaccagctctataacgagctcaatctaggacgaagagaggagtacgatgttttggacaagggacgtggccgggaccctgagatggggggaaagccgagaaggaagaaccctcaggaagg

SEQ ID NO: 5437 - DNA, 407 bp, Homo sapiens
aaaatacattcaaataaaaagatataagttacttgcagtgaatgcacacatacaacagcagggagagctgagaacataattaaccaatactcttgtgttcagagaataaatagtctgaaaccgtgggactgaggcttgttccttaggggctttctcaaagtatccttggtggacataaggttaccctcactcaatggaaggacacatcttctgctgccggggaggacacagcatgacagtttcatttatatgggatgttttccttccataaatgtctggaacacggtgtcacaggacaccatggtgtacagtgcagccctcaaattagaataaataagtcacatggttggactggaatgccacagacacactatgactgaaactggaaggaacgagaatgtttattt

SEQ ID NO: 5438 - DNA, 332 bp, Homo sapiens
  misc_feature (1)...(332): n = g, a, c or t
tttttttttttttttttttttttaggacaggaagtagaatttattggtgagtattaagaggggggcagcacattggaagccctcatgagtgcagggcccgccacttgtccagagggccacgactggggatgtacttgaccccacagccatctgggatgagccgcttttcagccaccatgtcttcaaattcatcagcattgaacttggtgaagccccacttctttganatgtggatcttctggcggccaggaaacttgaacttggccctgcgcagggcctcaatcacatgctccttgttctgcagcttggtgcggatggacatgataacttgg

SEQ ID NO: 5439 - DNA, 428 bp, Homo sapiens
ctgtcaaacttggcctgggcctgctcccctccaatgccctggctgaagagcttggtgcagtcactctccagtgtcttcttcagagtggagatgttttcactgcagacttccacgttgttcagagtcaccaggaaggacatcttcgcctcgtcagtactctcgatgccttttgtgtcaaatttgccttgctggaggctgctgtgcatgatgttcacggcacttgtcaccccgcgctggatgtcctggaaggtggtggcaggaaagcccatccgcagcttattacacagaacatccctgaagtcagactccagctctgtggtggcgaggttgatcatggcacagagacagtcaatgctggagctggacagagcccgcccaatgcacttcttaacaatgtagaagacatcatccaccatgctggatgtcag

SEQ ID NO: 5440 - DNA, 360 bp, Homo sapiens
ccagaactgttacaaggccaccccttgcttcaagggaggttagagcagtgaatattcagcttctcctttctctactgtagaggtcagcgaggatgaagagagccagaaatgggcattgggtcagtcaagccatgcttctgacctgcaaagcctccatatcagacccaaaaattcacgagtaagtaagtaagagcttcaaagaacttctctccctcagccagggttaactataaaatgacccaaatatgcttaacagaccaaaaaaaaaaattggctaatgaatggaactatttacaactgtatttttgcaaatagaatcaaaagctagatattgaattaaatgaattgtttctacagttt

SEQ ID NO: 5441 - DNA, 333 bp, Homo sapiens
  misc_feature (1)...(333): n = g, a, c or t
aaaagaaatgcaaactgcanattatanagtgcagctacacatatatataatggggtggatagtttatagtgtgctcattgctgctttgttattattagngttgagagttcctgtgctgtgtggaattcaacactaatctgctgtaagtatggagctgggtatgtggaacatttgcagggaagtttgtttctncgcttgtttttccaggggtattcnagatgacattgnagaggaagatgaccaantgagttcctatgcagtatttctatcttttattttnatccacaaagnctatnctggggacaagctagagcttgccttcactcaaaatgg

SEQ ID NO: 5442 - DNA, 333 bp, Homo sapiens
cctgaggtgcacaagcccatcagtggaagatatgaggtgtttgaccaggtcactcaggagggcgctggacatgacccagcccctgagggccaagcagactatgatcccgtcactccatatgtcacggaagctgagtctgtggttggagagaacaccgtgtatgcacaagtgttcaacttacagggaaagaccccagtttctcagaaggaagagagctcagccacaatctactgctccatacggaaacctcaggtggtgccaccaccacaacagaatgatcttgagattcctgaaagtcctacctatgaaaatttcacctgaaaggaaaagcag

SEQ ID NO: 5443 - DNA, 231 bp, Homo sapiens
  misc_feature (1)...(231): n = g, a, c or t
ctgcagaatagcaggtnagagggatcccagacttgaccaaatagccagaactggctacggttctgagaaatctatggaagcagtcttgctatgggcggcagaggagagtgaaaacagtcttcaaaatttaatcgtagaataattctatcaaattaagccctttattagagctgaaaaaattgagtttaagagcacagctagtttagcataaagtgcagattatacagtttt

SEQ ID NO: 5444 - DNA, 206 bp, Homo sapiens
gccgtgcgtggaccgcatcctcaagctctgccaggacatcttcctggtgcgggagactcgggagctggagctggaggaggagttgtacgccaagctcatcttcctctaccgctcaccggagaccatgatcaagtggactcgtgagaaggagtaggagctgctgctggcgcccgagagggagggagccggcctgctgggcagcgtgg

SEQ ID NO: 5445 - DNA, 384 bp, Homo sapiens
  misc_feature (1)...(384): n = g, a, c or t
aaaagatactttgnatncaattaagaagagtttttaagaaaaaagaggaaggttctggcatggggagctctgcaacccactgctgggtgccagaagcgagctgtggagcggaagatgaagatggcaccatgtgtctctaaaccacaaatggaaccactgatttctatgtgtatttgcatttgctgtaatgtgtgggaaatctgaaggttacacancacaactgtccacagcagatggccctcgaaggggatgaggtttagaaccaggcagggcctggaaggactggattttacatggacatgggggacattgcanaganaaaggcatccaaggtgttctnacgaaatccactacaattgtncaagaaaatgaanagctgtgatt

SEQ ID NO: 5446 - DNA, 557 bp, Homo sapiens
  misc_feature (1)...(557): n = g, a, c or t
aaaaaaggcattngaatgaatgtttgactcaggtttgttaaattaaccttcagtaactgcagtaccaaaaattacactcaactgatgaaaaaaacgaattgtatgatttaggaatcaaaaactaaaataagtggaattatgtatcttttctaaagttaaaaaagtaaaatattttattatgagttattataaaaattggttaattgtataggaagatgacagcatttttttcaagttatcataaaaagtaattcagatgacatttgagaagtaggggaaagggaatcatgttgacagttttagttctgtgaacactaatttgtgtgaagctattaaaatgattgtaaagttgactactgtaaatttcccataattatgtgtgtatatgtgtcatatgtatgtacatgtatatgtctaaaaattactttacacatgtgcctacatagacacaccaagaagtggatgtatataatatagaaagtatatagcaaagtaattttactctgataataaaaattgtttgacatgtattttgttatgaatagtttatcttccaa

SEQ ID NO: 5447 - DNA, 496 bp, Homo sapiens
  misc_feature (1)...(496): n = g, a, c or t
aaaaaaggcatnngaatgaatgtttgactcaggtttgttaaattaaccttcagtaactgcagtaccaaaaattacactcaactgatgaaaaaaacgaattgtatgatttaggaatcaaaaactaaaataagtggaattatgtatcttttctaaagttaaaaaagtaaaatattttattatgagttattataaaaattggttaattgtataggaagatgacagcatttttttcaagttatcataaaaagtaattcagatgacatttgagaagtaggggaaagggaatcatgttgacagttttagttctgtgaacactaatttgtgtgaagctattaaaatgattgtaaagttgactactgtaaatttcccataattatgtgtgtatatgtgtcatatgtatgtacatgtatatgtctaaaaattactttacacatgtgcctacatagacacaccaagaagtggatgtatataatatagaaagtatatagcaaagtaa

SEQ ID NO: 5448 - DNA, 229 bp, Homo sapiens
ccaatcaaggcttgctggagtgtctcccagccaatcagggccttgaggaggatgtatcctccagccaatcagggcctggggaatctgttggcgaatcagggatttgggagtctatgtggttaatcaggggtgtctttcttgtgcagtcagggtctgcgcacagtcaatcagggtagagggggtatttctgagtcaatctgaggctaaggacatgtcctttcccatgagg

SEQ ID NO: 5449 - DNA, 137 bp, Homo sapiens
aaacactgttataaaatgtagccaaagctcacctttgaacagatcccggtgacattctatttccaggaaaatccggaacctgattttagttctgtgattttacactttttacatgtgagattggacagtttcagagg

SEQ ID NO: 5450 - DNA, 221 bp, Homo sapiens
ctgtctccacccaggaaaaggaaagccaggtacacttctcatcacagtaagactagcctaacaggggaaaacagatttacatgtttcgttcattagcatattagggaaggggaaaccttttgggctctggccccgtggttgggaaacccttcctaagagcatggagccacactctggccttgatacagtagatgggacttaacacactctgatgctcaagg

SEQ ID NO: 5451 - DNA, 234 bp, Homo sapiens
cctacagatgaaggccaaataatccccaaacagccctgtttgatcacagaactaccattcataggaaattgtatgtaaaaacacaggactgtttctgggggcttatccaataaagaaaacaaacaacaaaaaacaaaccccaaaggattagatcagctactgcctaagcagattccacgtggactatattatcaacatttaatgggaacaactattcaaagctcccactcattt

SEQ ID NO: 5452 - DNA, 492 bp, Homo sapiens
  misc_feature (1)...(492): n = g, a, c or t
ctggtacacggcagggtcagggttctggatatcaggtaaaacagtcaattgtgtcccagatccaaaggtcagttgccttgcagaaccagaagactccatgtcacccacgaggcagtagtacacagcagtgtcgctcagggaaacccggggcaggctcagagtgctggactttctgtcggcagggataaacagggaggccacttcgtttgtaacttttgtcttgtatccttgaataataaatcgtggtccttggctgggaaactgttggtaccacgtgatataatcatttgtagcaatgttgttgtggctacaggttatgttcacttcttgtccttcatatgagtccatggagatgggctgggtggtcttagcaaggctcaaagtactcagggtcaggaacacgatcactctcgccacttgcctcatattctaggtgcaaactaggacccaggttctaggctcttttgctgtgtctganctgcaatgagccca

SEQ ID NO: 5453 - DNA, 218 bp, Homo sapiens
  misc_feature (1)...(218): n = g, a, c or t
cctcttgaaaaaccttaatcacagttaantgatggcatgggcaatgaattttaatcatatttaggaataaaatactagatattagtgtataacaattagatatatgttaattgagcactacaaagcctgaaagcttaacaaagtggggctataactagtaattttttggtaaaaatatagtgatctttttctacagggtattattataagggacaaat

SEQ ID NO: 5454 - DNA, 271 bp, Homo sapiens
  misc_feature (1)...(271): n = g, a, c or t
aaatttaacagcgncctcttgaaaaaccttaatcacagttaagtgatggcatgggcaatgaattttaatcatatttaggaataaaatactagatattagtgtataacaattagatatatgttaattgagcactacaaagcctgaaagcttaacaaagtggggctataactagtaattttttggtaaaaatatagtgatctttttctacagggtattattataagggacaaattatacgttgtaaattagattaatgaattttgtgagtttt

SEQ ID NO: 5455 - DNA, 297 bp, Homo sapiens
aaatgactgtgctgcccctttcacatcaaagaactactgacaacgaaggccgcgcctgcctttcccatctgtctatctatctggctgacagggaaggaaagaacttgcatgttggtgaaggaagaagtggggtggaagaagtggggtgggacgacagtgaaatctagagtaaaaccaagctggcccaaggtgtcctgcaggctgtaatgcagtttaatcagagtgccattttttttttgttcaaatgattttaattattggaatgcacaatttttttaatatgcaaataaaaagttt

SEQ ID NO: 5456 - DNA, 369 bp, Homo sapiens
aaaagtttttcttctgtaattgttgaacgggtgattattattaactctagataagcaggtactagaaaccaaaactcagaaaatgtttactgttagaattctattaaattttaagtgttgtattctttttcattgggtgatgtcagggtgataaccagacattcatggaaaggcatgcagtttgtccattgtgacagtttgtttaataaaaccacatacacactttatttaagattaaaatctaactggaaagtcagcttggaaaatggacatttccaagtatgtttggtgagtcacagatataaaaatagaaattctgatgagaggtttcagtttttaataccaagtccttaggagtcttaacattgg

SEQ ID NO: 5457 - DNA, 437 bp, Homo sapiens
  misc_feature (1)...(437): n = g, a, c or t
aaattgtatgnncncacaagttttggacatgtctgaagtaaaagctaaggtacagtcactggaccttattttgggtgcacttcaattatgactgtgactttagtggtgggttagtatggtttattgcaatgatgcttttttaagccctttaatacagatgatgggtaccatggatgccagatgaatacatatttcaactagtattttacattcattccaaaagtgcctattatatgccaggcactgtcctattccacaaggatatataacagtaaatgaaccagataaatccctgccaccgaggaacttacatgaccaccagttaaaatcaaaacaattggaagagtaatgtaagaataaggatggtaagaatcatcagactggtatacgccattaccagaagcacagantgagattataagcctgttagaacacag

SEQ ID NO: 5458 - DNA, 207 bp, Homo sapiens
ccttgtcctacggccagaagccctacaagaagatgaaagggccggaggtcatggccttcatcgagcagggcaagcggatggagtgcccaccagagtgtccacccgaactgtacgcactcatgagtgactgctggatctacaagtgggaggatcgccccgacttcctgaccgtggagcagcgcatgcgagcctgttactacagcctgg

SEQ ID NO: 5459 - DNA, 390 bp, Homo sapiens
cctgaggcttctatctatcttggaacatgggctttccatcttagtcctcgggtctcaagtctcaaaccatctgtcttatactttgggccttctatccatatgagccttccaccttctgccctacttgagttctgggttttactgcagtctagggccttgttttggtcttggatcatctcacatggcagcctggcataaggaaccgctccacaatgcttgctctgatagccgacgttctgcacctatcaggcaggggttaggaagcccctctgccacacatgacacacacacacgtacacttgcccacatatgcaaagaaatatttaaggagagattacatgaaatcaaagagagggagatagattcatgaagaggctgaaatactcaaag

SEQ ID NO: 5460 - DNA, 610 bp, Homo sapiens
  misc_feature (1)...(610): n = g, a, c or t
aaatttgaacatgtactgtgacacttttgacacttttctgaagatttatcccgtttttctagcctttaaggtaatgctgaaggaatacatatactttaatatcaccttttttagaaacttaaaattgaatcaaaataatcagttttaaggaagctttttctcctccttccttttttgtagaggaaagaacacttgataaaaattagatttgttcttaaaaacacccatgattaccatcacattttcagcctgggagagattctcaaggaggtgatatagatcgcaatgatgtgatttatcaccctcaagaaaattcactaaaggctttttctccccaaagatcatattgaaagtaatcatttggagtaaattagaattattaactttaataagcttttatggaatcatgtactggatttactaattctcaaaatctttcactataaagatattttgttgaaacttactatttggcaaaagtttgcactgagcgttaactgctttcaacagtcttggcagattgagagtttgtggcagggaagagagggcactagtctcttcattaagattataaatttnataaaacaaaaaccaaatggagatctggaat

SEQ ID NO: 5461 - DNA, 314 bp, Homo sapiens
  misc_feature (1)...(314): n = g, a, c or t
tgaacataacctgtatccacaanaacattgctacaaatgatnatatcacgtggtaccaacagtttnccanccaaggaccacgatntattattcaaggatacaagacaaaagttacaaacgaagnggnctccctgtttatccctgccgacagaaagtccagcactctgagcctgccccgggtttccctgagcgacactgctgtgtactactgcctcgtgggtgacatggagtcttctggttctgcaangcaactgacctttggatctgggacacaattgactgttttacctgatatccagaaccctgaccctgcc

SEQ ID NO: 5462 - DNA, 236 bp, Homo sapiens
ctgggcttgccttggagacctgcccctgctcagttctgttcctgttctcctggccctgggtggcccctactcgtcctctgtggtggatgtcagcatccctttgtcgatcagatgagaccgcagcgtgttgaagatgtggagctgctgatctggccgtaaagtcaggaactgctgaatcagtttgcttgggttagggcctctgataaaactggcgatgtatacattgacaaaggtgg

SEQ ID NO: 5463 - DNA, 292 bp, Homo sapiens
ccagcagccaggagggaggtaggctgatgtgatgggatgggatcttgccctgggttggtctcatggtgcagaagagcagtgttggaatcattctaatgcttcaggatgcctcatgtgccccatggagctcagacatcaggaggtgctgggactctatttagccgttcgatgatgcggttgttgtccaggaggtcagatgccggcagcttcatcccctcgcagagctcttgcatgtggagaagcaggccctttcgtgtagggctggggtaaggagctatgggaggcggcgagg

SEQ ID NO: 5464 - DNA, 284 bp, Homo sapiens
ctgagacccctgccctgtgagcccttctatccccacaagttgtcaggacaatcccttgtggttagggggaggggcggggagagagctctatttctcagccagtgccgagctaccctccctcctgggctgtgatttcatttgtgcaatgggggtgtgcaggagtcactagcttctcggggcctgtcccgcacatacacgcacttatgcgacatccagacatttgctacattttccaagggcttggcctctcccctccagcctccagaagggagggcaggacacag

SEQ ID NO: 5465 - DNA, 427 bp, Homo sapiens
ctgagaagatccttgaggacaattttggcctattcagaagaggacacagccatgcagatgactccttttcccacccaggtggaggaacttctctgtaatctgaatagcatcttatatgacacagtgaaaatgagggaatttcaggaagatcctgagatgcttatggatctcatgtacagaattgccaagagttaccaggcatctcctgatctgcggctgacctggctccagaacatggcagagaaacacaccaagaagaagtgctacacggaggctgccatgtgcctggtgcacgccgctgcgttagtggctgagtatctgagcatgctggaggaccacagctacctgcccgtgggcagtgtcagcttccagaatatttcttccaatgtgctggaggagtctgtggtctctgaggacaccctgtcac

SEQ ID NO: 5466 - DNA, 167 bp, Homo sapiens; identical to SEQ ID NO: 3712

SEQ ID NO: 5467 - DNA, 236 bp, Homo sapiens; identical to SEQ ID NO: 3713

SEQ ID NO: 5468 - DNA, 326 bp, Homo sapiens
ctggctgataagaagggcctccatgttgtggaaatccgggaggaatgtggccctctgcccattgtggttgcgtccccccgggggcccttgaggaaggatccagagccagaagatgaggttccagacgtcaaactgactgggaagatgtgaagactgcacagggaatgaagcgctctgtgtggtctaatttgaagagagccgccacgtaacctctctggccttgtgcagccagttcctgtgctgccctgcacctaggagagactcagcccctcacagcttgggatgttaccttgccttttgtttgttttgagggaagtttaatcttt

SEQ ID NO: 5469 - DNA, 87 bp, Homo sapiens
  misc_feature (1)...(87): n = g, a, c or t
cctggaaggtgtgcnggagtttggnagaggagtgatctaggtgaggggaatggaaggtgcanagaccatagctgagagggcctgagg

SEQ ID NO: 5470 - DNA, 461 bp, Homo sapiens
ccagagggaaggcccaagagacgtctctgaagccaccgttcctgattattcagaggcagggtccacagtgagtgactcggtggggctggaggaacccagggtgacccagagggggctctggagcgggtccctaacatctgaaaaagtcctcccagggaactcggagctggaacttccaggcagcttcgggggtgacatttgtatccggccagccgagcggggaaaggagaccttgtgtcctggcaacagggagagccgggactgggatggccacagctcagcctccaggtgaggagcccagggccctgctcgagctgtgacctccacggtcacggagtcctcggaaaaagagaagttgagcttgttcccctggtagaagatgccggagacgctcactctggagatccccgacagacacacagggtcaaaggtcacacccgctcgggtgaccctgaaccccg

SEQ ID NO: 5471 - DNA, 294 bp, Homo sapiens
ggccgcttctgtgtggtgtggggagacgctggtcctccccgtcctcccatagcgcttattgcctcaccctcaccccctaggggccggatccaaaggcgctgcactccccaagccttggggcatcagccaggaaggtttcctacctcctaattcaggggcaggactcctcttttccccccacggggaaaagaggcagaaacttaggggtttccctcctttcttagggtcagacgctcttagggtccacttcttcaggggcggaagcctctcctacccttcccataggggcacagg

SEQ ID NO: 5472 - DNA, 176 bp, Homo sapiens
cttttgtaatggaaatctcgcgagggttaatcttctcttgagaatggcagtcaagaaatgagatggttcacttgactactgagcagttacaccaaggagagcgtgaaggagatgattgagccagagaagaaacgggttgtgatggcaatggtgtgggggaaatgaacttgagcttt

SEQ ID NO: 5473 - DNA, 247 bp, Homo sapiens
  misc_feature (1)...(247): n = g, a, c or t
cctggaaggtgtgcangnntttggtagaggagtgatctaggtgaggggaatggaaggtgcagagaccagagctgagagggcctgaggcactttccagagcgtggggaggggcctccaccaaggcgagaagggctgcaggtccagatcaccagcgtttgtagacagtagtgtggcgcttggagtttacctgagggccagtggagctccagggacctatcaggacggggacctgtggggactgggaagg

SEQ ID NO: 5474 - DNA, 345 bp, Homo sapiens
aaaaagaccacatgaaatgctgattctaattgtgtgtaggtcttgaggattaagcacacaaatttcacaaacttctgtttgagtaaacaaactcggccttctgtaaatatacatgcaagtttggaaacagtaatactgtacctataaatatatgctgtctgttttgtgtacagtatgtaaaaactccttttctgccacactaaaaatgcaagccatttatgggaatcctaaaactagtattgaactaaaactttgctaatgatctttattagaggatcgtccaacttttcacttaccttgggttttcttttcaattcactcttacactagtctgcttatttccag

SEQ ID NO: 5475 - DNA, 369 bp, Homo sapiens
cctaatcttttcttcccacccccacccagccatcctgtgtgccctcttccccttggaggccactgccctaagtgaggatcagcatcgactccaccacagcccactttagtggtgacaacttttaatccacggaagcagtttttcaaagtgaaaactgtttcaaatcacgaagcttaccacttagacaattcagacaaggtaatgctcatttagactgacacaggtatgaaaattccaatcccttcttttcactatcattgtatctgacacacacatcaccttcctaggcactatgacactatcctgggagaagcaaatgtgtacaaagaagcacaatcctgctctctccccacacttcacataaaccag

SEQ ID NO: 5476 - DNA, 315 bp, Homo sapiens
aaagaggccacacatcttttttctgacttgaataaactgaaaccagatgactcaggagttaatatagcagaagctgctgcccagaacgtgtactgcttgagaacagaatacattgctgattatctcatgcaggaatcacctcctcatgtagaaaattactgtctaccagaagctatttcatttattcagaataataaggaacttgggactggattatcacaaaagaggaaagctcctacagaaaaaaataaaatcaaacgacctagagtacactaatcgcatctaccctttagttaccaaacattaaatgttttt

SEQ ID NO: 5477 - DNA, 257 bp, Homo sapiens
ccaaatcttttgccgtctaggcccagccaggcttttctgactaaataagcaataagaggctctaagctgactgagttgcaaggaccctttccgccctcccttggatctccatgtttttccagatggcggaagagcatgtgccaccccctttcctaacagacttgtccaagtgcttggcgtgggacccatgaccaaagcccaggatggcttggtgggagtgtccctgctgcatctgcatgaagcccctgctttttagg

SEQ ID NO: 5478 - DNA, 178 bp, Homo sapiens
  misc_feature (1)...(178): n = g, a, c or t
ccagagggaanncccaagagacgtctctgaagccaccgttcctgattattcagaggcagggtccacagtgagtgactcgntggggctggaggaacccanngtgacccanngggggctctggagcgggtccctaacatctgaaaaagtcctcccagggaactcggagctggaacttnca

SEQ ID NO: 5479 - DNA, 344 bp, Homo sapiens
aaaaatggaactctgaaaattaagcatctgaagaccgatgatcaggatatctacaaggtatcaatatatgatacaaaaggaaaaaatgtgttggaaaaaatatttgatttgaagattcaagagagggtctcaaaaccaaagatctcctggacttgtatcaacacaaccctgacctgtgaggtaatgaatggaactgaccccgaattaaacctgtatcaagatgggaagcatctaaaactttctcagagggtcatcacacacaagtggaccaccagcctgagtgcaaaattcaagtgcacagcagggaacaaagtcagcaaggaatccagtgtcgagcctgtcag

SEQ ID NO: 5480 - DNA, 320 bp, Homo sapiens
aaaagcctgagggaacctggaggggggctcccactctctaccttctttcctccgagtttgtgactccgagatggacaaagtgtgtgctgtttttggaggctcccgaggcattggcagagctgtggcccagttaatggcccggaaaggctaccgactggcggtcattgccagaagcctggaaggggccaaagccgccgccggtgacctcggcggagatcatttggcatttagctgtgatgttgctaaagaacatgatgttcaaaatacatttgaagagatggagaaacatttaggtcgagtaaatttcttggtaaatgcag

SEQ ID NO: 5481 - DNA, 188 bp, Homo sapiens
ccacagcgcatcactttccttgcaaatgttcactgacagcagcacggtggaaagcatctcgctccagtgtgcgtgcagcctgaaagccatgatcatgtgccaaggccgcggtgcgttctgtcacgatgactgtattggaccctcaaagctctgtgtattgtgccttgtggtgagataataaattatgg

SEQ ID NO: 5482 - DNA, 347 bp, Homo sapiens
ccattcttgcactggcagagagtacactcagtgccatgtttgatccaagaggacccggtgaagcgaaccacattcatttcgtccaggcaagtcttggtgatgtcattgcggatggtgtcagcctggcaagggtctgtgacacagcgcgggcagcactcattctctgggagaatgctgaattcacactccacatctgggcaaggcaggggccaacaatcaacttccccttgctacaaggaaagcagatgtgcaagggcagagggagagggaggaggaaatggagggaggccaggaaaaagcagatgagcacagtgtttactgaatactcaattatttgattgatattt

SEQ ID NO: 5483 - DNA, 319 bp, Homo sapiens
ctgacagttctccatggcaactcagtcctccagcagacccctgcatacataaaggtgcaaaccaacaagatggtgatgctgtcctgcgaggctaaaatctccctcagtaacatgcgcatctactggctgagacagcgccaggcaccgagcagtgacagtcaccacgagttcctggccctctgggattccgcaaaagggactatccacggtgaagaggtggaacaggagaagatagctgtgtttcgggatgcaagccggttcattctcaatctcacaagcgtgaagccggaagacagtggcatctacttctgcatgatcg

SEQ ID NO: 5484 - DNA, 373 bp, Homo sapiens
ctggctttcctgtcccaaatcagccagtgtataatcagccagtatataatcagccagttggagctgcaggggtaccatggatgccagcgccacagcctccattaaactgtccacctggattagaatatttaagtcagatagatcagatactgattcatcagcaaattgaacttctggaagttttaacaggttttgaaactaataacaaatatgaaattaagaacagctttggacagaaggtttactttgcagcggaagatactgattgctgtacccgaaattgctgtgggccatctagaccttttaccttgaggattattgataatatgggtcaagaagtcataactctggagagaccactaagatgtagcag

SEQ ID NO: 5485 - DNA, 490 bp, Homo sapiens
aaaaacagaaaatctttattgtgccataactgatttttagtatacaaaaaacctaatataacctaatttcctggaccaaataatgtaaaataggccaaaatcaagccacagcacaaaggatactattggatatggacctttttgctttggtgaaaacttcaaagtaaggagacactgtcaatcaattccactaaaattgcatttattttcctgtcatagtaaaaaaaggaaaaacagtagcaaatactgggcttcgttttccccctcaacggcacgccttccacaacagcacaggtggttctctgcttcactggcagaaccacacaagcttatcctagagaaaatctgctgtcgtaagtccacaaggaagagttgactgggcccaccgctatagccaatacttccagaatcaccagcccaccttcgtcaaagggctgactgtggcagcaaggggtgtctgtcacattcgtcctggctcactgagcccagg

SEQ ID NO: 5486 - DNA, 241 bp, Homo sapiens
ctggaaagcattggggagcttttctcaagatcagtcacacatagacaactctctgaagtatatattaagtggcagaaacactcccagcttctcaaggacagtgattttagttttcaggagcctatcatggctctacgcacagtcattttggagatcctgatggaaaaggaaatggacaactcacaaagagaatgtattaaggacattctcaccaaacaccttgtagaactctctatactgg

SEQ ID NO: 5487 - DNA, 232 bp, Homo sapiens
ctgatgaagacggagcggccccggcccaacaccttcatcatccgctgcctgcagtggaccactgtcatcgaacgcaccttccatgtggagactcctgaggagcgggaggagtggacaaccgccatccagactgtggctgacggcctcaagaagcaggaggaggaggagatggacttccggtcgggctcacccagtgacaactcaggggctgaagagatggaggtgtccctgg

SEQ ID NO: 5488 - DNA, 506 bp, Homo sapiens
tgctctttcagctttgaacgtcctttcccattctccatcatccacattcacctatcctgcctgccccagttaaaatcctgtttcttctaggaagtccctcatcccacccgcttaccccagggagactgagcttgttccttctcctagtaagaccctcagcccatggagtcctgtgtgatgttgtgagcgtgggaggacagactgaactgctcggcccgtggagtcctgtgtgatgttgtgagcggggaggacagactgaactgcgtggtgcttcgcacatagacctcaacagggattggcattttgaagctgttggcgggggctgtggactgcttttcttcctttctagctcaacggcagctaaagccactgcatacaatgcaaggactggctcctgtttggccgcgactgattgcagcccctggtgaaatgagaaccctgtgggtcggaacaaagtttggattatttatgttgcaagtaactaaaatctcaagtgaaactggttt

SEQ ID NO: 5489 - DNA, 282 bp, Homo sapiens
tgctcactcaccctggcacattcagcccccctaacccaccttgaacattgaccaccacacactccctggcacgctcttctcaccctcaacttctgccacctctccctgggcaatactgccagcctttccctaatctcagagctgcagccctgccctgtcactcacctcaaacctgccatgtccctggggctactgaaattccaggcagtgggtgaagaggacgaggaggatgaggagggggagagcctggactctgtgaaggcactgacagccaagctgcag

SEQ ID NO: 5490 - DNA, 326 bp, Homo sapiens; identical to SEQ ID NO: 3635

SEQ ID NO: 5491 - DNA, 480 bp, Homo sapiens
aaatcacagcttttacctatttgttaggctatagtgttttgtaaacttctgtttctattcacatcttctccacttgagagagacaccaaaatccagtcagtatctaatctggcttttgttaacttccctcaggagcagacattcatataggtgatactgtatttcagtcctttcttttgaccccagaagccctagactgagaagataaaatggtcaggttgttggggaaaaaaaagtgccaggctctctagagaaaaatgtgaagagatgctccaggccaatgagaagaattagacaagaaatacacagatgtgccagacttctgagaagcacctgccagcaacagcttccttctttgagcttaggtgagcaggattctggggtttgggatttctagtgatggttatggaaagggtgactgtgcctgggacaaagcgaggtcccaaggggacagcctgaactccctgctcatagtagtgg

SEQ ID NO: 5492 - DNA, 307 bp, Homo sapiens
aaatccttagcactgagtttgaatggtataaaaagtataacttccatagatgagctgttgttaggaaggcaccaaagaacctcctctgcactaaacaggagaatggaaagaaaagtctccattgagtacatatcatgtcagtttagtaatcaattatgttgatattgttaaactggttcaaagaaataaactggcaatatgtaaagtaattcctcatttgtgtcactatgatatagagatattaaaggaatgttggtttgctaaatagtatagatgtccatttgtactatagtttactgagcatttt

SEQ ID NO: 5493 - DNA, 258 bp, Homo sapiens
ctggaaagaccaatagctgactggaaagaagaaaggaagcagtttctattttcaatgtagaaaaaaaatctaatcgctacaaaggtcttgtaaaatcctcaaaacaaggtctagccaagtttattgtttggtaatttttttctttttttaaggggaaaaaaagcaagatttaatgtgaatactactggttacaactaatataacagcttgaaaaaatcatgacacagaagcataaatataatataaaaagacaatttt

SEQ ID NO: 5494 - DNA, 197 bp, Homo sapiens
cctacagggggggactatgtctagagtaggctgaacctgtaaagtggggctcccagataaattgggggcccctgagcaggaaggacctgactggcttaatttgacctggcccaggacagttccctttctgaaagaagggggcattctatgaaacacctgggtagaagtccagcagtgaagagttgggtcagtgtgta

SEQ ID NO: 5495 - DNA, 268 bp, Homo sapiens
ccatcatgtttaagttgaggaaaactcagttcttaaattatctgggaagggtctggattctctatttttgagattgactttatcacaatatgattcttacatctttataccatttacaattgtgttttagatctacagagttagaaattcgaaaactattccaggactaattcttaatcggcattatttatacaagaggtcaagtaacatttactagcgcaatactgcacttgtaaatgaattataaacgctcttctggaatatattt

SEQ ID NO: 5496 - DNA, 490 bp, Homo sapiens
  misc_feature (1)...(490): n = g, a, c or t
ttttttttttnntntttttttgcatcaagattcctgtactctaccctanaactaatacatctgaatctctgggaatggagtataacaatcagatttgaaaaggtttctttagtaattttaaggactgaccagtttanacactgctttgttagagtaaaatgattaggtacctagtatcaacctagccatccaaccttatattaataactaggaaaataaagggttggagcctctgtgtttctttgttgaaaaatctgctactattattagatctgngaaaacaattgaaaattcggttattatcaccttaaaagtacaaaacctatagattttgaaaatgtaattatttttctgtaggcatagttaaaaagattttgtaaatgttataaatcagtttntttataagcggtttatttanataaattttgttatactganatgattcactaatttttctaaatatnaatggttcagcctcttanttattttt

SEQ ID NO: 5497 - DNA, 489 bp, Homo sapiens
  misc_feature (1)...(489): n = g, a, c or t
gccgccgcttgtgctgcagccatgtctctagtgatccctgaaaagttccagcatattttgcgagtactcaacaccaacatcgatgggcggcggaaaatagcctttgccatcactgccattaagggtgtgggccgaagatatgctcatgtggtgttgaggaaagcagacattgacctcaccaagagggcgggagaactcactgaggatgaggtggaacgtgtgatcaccattatgcagaatccacgccagtacaagatcccagactggttcttgaacagacanaaggatgtaaaggatggaaaatacanccaggtcctagccaatggtctggacaacaagctccgtgaagacctggagcgactgaagaagattcgggcccatagagggctgcgtcacttctggggccttcgtgtccgaggccagcacaccaagaccactggccgccgtggccgcaccgtgggtgtgtccaagaagaaataagtctgtagg

SEQ ID NO: 5498 - DNA, 159 bp, Homo sapiens
  misc_feature (1)...(159): n = g, a, c or t
cctcctgcagnntnccgcacagcaaaccgcacgctatggctgacagccgggatcccgccagcgaccagatgcancactggaaggagcagcgggccgcncannaagctgatgtcctgaccactggagctggtaacccagtannagacaaacttaatgtta

SEQ ID NO: 5499 - DNA, 528 bp, Homo sapiens
ccatctcccagaaagtttaacaaaacccgaccaggttgcccccttcaccttcttacaacctcttcccctttccccaggggtcctgtcctccactccagatcattcctttagtttagagctgggcagtgaagtggatatcactgaaggagataggaagccagactacactgcttacgttgccatgatccctcagtgcataaaggaggaagacaccccttcagataatgatagtggcatctgtatgagcccagagtcctatctggggtctcctcagcacagcccctctaccaggggctctccaaataggagcctcccatctccaggtgttctctgtgggtctgcccgtcccaaaccttacgatcctcctggagagaagatggtagcagcaaaagtaaagggtgagaaactggataagaagctgaaaaaaatggagcaaaacaagacagcagccactaggtaccgccagaagaagagggcggagcaggaggctcttactggtgagtgcaaagagctggaaaagaagaacga

SEQ ID NO: 5500 - DNA, 406 bp, Homo sapiens
cggccgaggtaaagctggctcaagactggcccaggcataatactgtcaatctaaaggtaaccggcaacatcaaaaagtacatctcaaaagaatcaggcttaaagataaacaggagaactggaaatatctaagagtaagaagtgtaaacaatagaaaagaggtagggtttagggttctcatcttgggatttccccaggtcttcaagcttctatccttcccgggttctgggtcatgggcctccagattccggccgttagtcttgagatacctttttcgcttgggtcctctatccatctaggtaggctttgtgacaggggccttccatccttgggttgtaggtcttccagctacaaccctgggctaatcttaggtcgttggccttgtgtcacaagtctcagttcttagg

SEQ ID NO: 5501 - DNA, 377 bp, Homo sapiens
cgccaacatgggccgcgttcgcaccaaaaccgtgaagaaggcggcccgggtcatcatagaaaagtactacacgcgcctgggcaacgacttccacacgaacaagcgcgtgtgcgaggagatcgccattatccccagcaaaaagctccgcaacaagatagcaggttatgtcacgcatctgatgaagcgaattcagagaggcccagtaagaggtatctccatcaagctgcaggaggaggagagagaaaggagagacaattatgttcctgaggtctcagccttggatcaggagattattgaagtagatcctgacactaaggaaatgctgaagcttttggacttcggcagtctgtccaaccttcaggtcactcagcctacag

SEQ ID NO: 5502 - DNA, 367 bp, Homo sapiens
gttttttaccgccttgtctggcactatgaccacgcttcagggttgcttctgggggtcttggtccctggatgtgccatttccttgcccttctgaccctcacacttcttccaaagtcttgagcagagttgggggccaatggtagcattgctgtcatctctgggaggagagtgagtatacaagtcagtgacagttcagccaggctcccttgggtttgggaagaggcactgcccttctgtgctgtggatcctgcttgtctgctctggagtccccccacccttgccaggagcttcacaaaccagagacgggctgtcagcaagagctcagacaggatgtggtgcaagtgcaggtgcacgagtttaaccctcag

SEQ ID NO: 5503 - DNA, 381 bp, Homo sapiens
ctgaaggccaaaggaatgtgcctgtgggatgccaaagccatcagtagctggaagaaagaatacctctttctagaggtttggtgtcctcttgctggcctgtcattatttggaaatacgcgcttttggaatttccttcattttcgctatttccaggttcagaaatcatacctaccacttgttctttctttgcccagtaaaactcagggtttctcttattcagagttaccatgttgcacacccccggtgctcagcctgcccagaagcccttctctgatctcagcaagatcttagtagtaaagctaacggatccattgaaattcatactcagcatctgtgactactagacaaagcccatttactgaaccataagtgtgcactttt

SEQ ID NO: 5504 - DNA, 264 bp, Homo sapiens
ccaacattggagaccacttctgtcaaatggtgatttctgaaaaggaagctatgtcaactattgagccacacagacaggttgcttggaagcgagctgtcaaaggtgttcgagaaatgtgtgatgtgtgcgacaccaccatcttcaacctgcactgggtgtgtcctcggtgtgggtttggagtatgtgtggactgctaccggatgaagagaaagaattgccaacagggtgctgcttacaagactttctcttggctaaaatgtgtga

SEQ ID NO: 5505 - DNA, 279 bp, Homo sapiens
gtgtgagaggtgtggtagcagattgcaatgctctgcacctcttccttgcaagtgagcaacttcaggctctctgggcagaggctggcccactgtagtttgcagacatgctctccagatggttttactaagtcccctctccctgatagggaatcctgctggaccagcgcagccctggtgtggagaggttaaaagacttgcacaggatcaccaagtcatgctgtagagccaggattcctagacccagggctctgcactctcaaggctggccccatgtgctca

SEQ ID NO: 5506 - DNA, 406 bp, Homo sapiens; identical to SEQ ID NO: 5500

SEQ ID NO: 5507 - DNA, 270 bp, Homo sapiens; identical to SEQ ID NO: 2914

SEQ ID NO: 5508 - DNA, 497 bp, Homo sapiens
ctggtgatcaagtctgggaacagccgtaacaggtcaaccttgtggagccatcgcgagttagagggtgaaagatggcagaaaaaaaagtcttgtgtgtgagtgtgttttttgagtttgcatcaatcttaatgtctcttcataatacttttataatacattaagcctcttgtctacatatttggagagaatatgactttactagcagagaaatacaatatatcttgtctactggactgtaaaatatatgtatgaaataaaattagttccatttggtcttctagtatattaaagtgctatctgacgttgttatcctgtttttgcaaaaaaaaaaaaaaagttaactacagaccattgtttctaataagcagagagatctattttagtagtaaactgaaggtttagttgtgagcttcagattttgtgaactccagatgttgtgcggtgttttttttttttttaagacaacaactaaaaaaatgcaaggaatatgtacactg

SEQ ID NO: 5509 - DNA, 286 bp, Homo sapiens
aaatgaacacattccaggcaatgtaagacagtcaaaagacaaactcaaatccctgagaatggctgggaagggaagatggtggtaaaaattccaaatgagtgaaacttacaaagggcagtctcccctgcctgggctctgtcctagacagaagtgacagtgatgactttggtgatgttctccccagtgcagagaactgcattcagaattagacaacctcagtgacgagtatctctcctgcctgcgtaagctgcagcactgtcgagaagagctgaaccagagccagcag

SEQ ID NO: 5510 - DNA, 419 bp, Homo sapiens
ccttctaattagtctaacttaaacggacgggattcacctaacaaaagcaagaagaaaagcacaagaacaggtgtcttaatgcatttggataatttatttggggtgtgtgcgtgtgtgtgtgtgtcttggtggaggtgggggccgtgttctcaccaagccttttcataatcaagtttgctttgcaaactttatggccttacacccagcagaacagtccttgctaataaaaggaggatgccctgtcacagttctctgtaaattatcatgtgttgggaagttctgttgatgcttagtttgatcttccatggtggacacatctgttctgtatgtacaaggcattacatgtgtgttttagcggatgggaattgaagcctttccacagtccttgtgctctgagatggctgttgagctctgctcag

SEQ ID NO: 5511 - DNA, 264 bp, Homo sapiens; identical to SEQ ID NO: 5504

SEQ ID NO: 5512 - DNA, 275 bp, Homo sapiens
ctgggcgacatcggcacgtcctgttacaccaaaagtggcatgatcctttgcagaaatgactacattaggttatttggaaatagcggtgcttgcagcgcttgcggacagtcgattcctgcgagtgaactcgtcatgagggcgcaaggcaatgtgtatcatcttaagtgttttacatgctctacctgccggaatcgcctggtcccgggagatcggtttcactacatcaatggcagtttattttgtgaacatgatagacctacagctctcatcaatgg

SEQ ID NO: 5513 - DNA, 335 bp, Homo sapiens
  misc_feature (1)...(335): n = g, a, c or t
cctgcttcacttgcanataagtttattataattctccagaaatgtgcaggatgtgcattagcaaattgcactgtacttttcactccagcctgggtgacagagcaagactcccgtctcgggggcttaaaaaaaaaaaaaatgctgtatctaaatgaatctgtgtaattgggcccagatgtgggtttgctcagtattagtagacaaggtctttgttcagacgattaggtgcctaactggcaaatgccttagtttcttaaaacgtattttctgatgtggctttacatttcaaaagtgaacttgattcaacctgagaaaactgattaaaaaattagttt

SEQ ID NO: 5514 - DNA, 294 bp, Homo sapiens
ttggcatttcaagcaggaaatgaaatgcttgctttaatggcaaagcagcgttaacatttttcctgtcgtgtagcagagagtacaagaatcatttcagcaaagcagtgactcaccatgagacgttatctccgtggagctgcgttttgacttttcccactctcttactcatagaaggaggacaaaggaacgaaatgaaatcatgctcacaatgaactgttcattacatcaactgatctctctctctctctcttcctctctttctctttctcccataccccaaggcaaaattttttt

SEQ ID NO: 5515 - DNA, 93 bp, Homo sapiens
ttttttttttttagataatatatattaaaaaataaacctccaattcagggtataaaaacagagcgaaggcacttgggggtgggggtggagggg

SEQ ID NO: 5516 - DNA, 188 bp, Homo sapiens
cctgggacctggcctgcacccagtctgtggcccagggaggcatggcaccctagcagcaaagcctgggcaaaggctgagccataccagacacagtagcccaggctacacagggcagagctgcgagtgctacctagccctggggccaaggcgggcaccacaatgctgaagagggcactgcccacagccag

SEQ ID NO: 5517 - DNA, 286 bp, Homo sapiens
aaatgaacacattccagacaatgtaagacagtcaaaagacaaactcaaatccctgagaatggctgggaagggaagatggtggtaaaaattccaaatgagtgaaacttacaaagggcagtctcccctgcctgggctctgtcctagacagaagtgacagtgatgactttggtgatgttctccccagtgcagagaactgcattcagaattagacaacctcagtgacgagtatctctcctgcctgcgtaagctgcagcactgtcgagaagagctgaaccagagccagcag

SEQ ID NO: 5518 - DNA, 356 bp, Homo sapiens
ctgacagttctccatggcaactcagtcctccagcagacccctgcatacataaaggtgcaaaccaacaagatggtgatgctgtcctgcgaggctaaaatctccctcagtaacatgcgcatctactggctgagacagcgccaggcaccgagcagtgacagtcaccacgagttcctggccctctgggattccgcaaaagggactatccacggtgaagaggtggaacaggagaagatagctgtgtttcgggatgcaagccggttcattctcaatctcacaagcgtgaagccggaagacagtggcatctacttctgcatgatcgtcgggagccccgagctgaccttcgggaagggaactca

SEQ ID NO: 5519 - DNA, 405 bp, Homo sapiens
ccttattttgtcatactaagtgtctcctgtaattttcaggaagatgatttgttctttccagaagaggagacaaaagcaagatagccaaatgtgacatcaagctccattgtttcggaaatccaggattttgaattcgagatgaaacaaccagcaatcacagttaaatcttaactttgcctgcactctttgtaggaatgatcagaaatttatctttatcattctgagtgcttcaggagtacaataggaagaaagatactggagaaagcacaagtgtaatcaccatgaagtctgacaacaggagcccattatttgcgtactgtcccaccctgtatcatggttctctgggaacaagctttatgattctcattagagtttatttgttgattgtcagtagttgcgactttt

SEQ ID NO: 5520 - DNA, 208 bp, Homo sapiens
aaaataacctaaattagaactacatataaacagggagttttctcatacattcagaacccaagcaacagcaactatccttaaagctcaaaactgattacagctaacatcaggtccgacgtgacttacgtaaagctgaacccagagttagttcaagttaagattttacgaattttacaaaacatgaactttgatcttggcctctgtcttt

SEQ ID NO: 5521 - DNA, 488 bp, Homo sapiens
cctgcttgatccataggctcacatttgatcccaactggcggctgcttcttggcattaactttggattcccaaccagtaaatcttagcaagatctgagtttctccaggtatgatattattttgtttgaccatccttatcttcaagggctgtgggatctggcagctcttcatttggcccacaccgtgtgaggttgctcttggtgcaccgaatggggaagtttctacatcagtacctcggagagtccactggaagccctggacagtgggaattggtggcacccccagcatggaggccaagaacacacagcactgaagctccaggacaccctcaggaggacggtaagggacggtaaggtgagagcctgggtcaccaggaaccttcgcctgcatctaaacaggatttgctttcagattgcctgtaggtcccagctacttgggggctgaggcaggaggatcacctgagccttgggaggtcaaggttgcggtcag

SEQ ID NO: 5522 - DNA, 236 bp, Homo sapiens; identical to SEQ ID NO: 3713

SEQ ID NO: 5523 - DNA, 287 bp, Homo sapiens
cctctcctgtgggttccagaccctgttccagcaacaattgctgggacacctgggccgactgctccacctcgccaggccctggccctctccatctcagccctgacagccacccagtgataaacacagcaggcttcctaagcaatgtgacgcaccagaggggtggtggtacacgctccccttgaagtcatctgaaaattagagaacagatttgcctcagagctgaagagagaccctattccaagcatgaatggccttgacaatgttcctgcccagtgagcgacccttgg

SEQ ID NO: 5524 - DNA, 312 bp, Homo sapiens
ctgccgggcctgcttagctcctccctaggcagaagctttgttccagccccacttccacatcccaactccacagtcaggatgggaggcacatggttgctagcaggggaaagaatactgtagttccagcctctgctcctttcagtctcagcctggatggtggtcactcatccctctgcagctagttcctcacttgtcccagcccaggagccaggagggcactcaatcacacccaaaggagcaggcagtgtgacttcagtcatcttcagatgactcctcttctgcctcttttagccactggatgaacctctgcag

SEQ ID NO: 5525 - DNA, 269 bp, Homo sapiens
aaaaatgaatttcctgagtattaatactaaaatactgttacatgatcagctcttgatataattgaagagatttcagatacctgatgagtctcattctcacactaattcagaaccttggaaggcactgagtgttcaaaaaaggtagctcttaactgaggaccctctgttgaaccattgtgcgcacccctggctcttgggcagtgtagtagcaggaagacagggttgttgccattagaaatggaggctttaactctccctgtcccccattt

SEQ ID NO: 5526 - DNA, 329 bp, Homo sapiens
aaagtaacgttactgctatatccttaggcacggtaagctgaggatattgtgagtgttcgcaaatatacagagaccaccctcacatgtagaaccgtagaatcctagagttggggaaaagaggtcttgggggacatctggacggctcccctccagagtagaaccttctcccccgtgggttccacattgctctgtggggggcagagcatggtacggtgtgcaagaaacaagctctccaagtcacctccccccatacctccatctccttatctggaaaaggaggggagtcatccacatgacctttgaaagcatttccagctcagttactttgg

SEQ ID NO: 5527 - DNA, 346 bp, Homo sapiens
ctgggcccgggggaccactaccaccaattcgcggagaccagtagtggccccgaatgtctagctgcgctgttatttattggatacaaagcaaaaggggcagggtaaagagtgtgactcatctccaatgatatgtaaggttacgtgggtcacgtgtccactggacagggggcccttctctgcctggcagccaaggcagagagagagaggaagagagagagacaggcttatgtcattatttctgcatatcagagacttttagtactttcactaattttgctactgctatctaaaaggcagagccaggtgtacaggatggaacatgaaagtgggtggaccaggagcgtgg

SEQ ID NO: 5528 - DNA, 142 bp, Homo sapiens
cctgcccgtccgccagtgagtccttggtttttaataatgagaagtcctttcccccaaggtgtgagcattgcagcgcagtgtgtgtgtgtggttagagccagcttagtccttcactttgtcgaccgaagtgggagctcaacag

SEQ ID NO: 5529 - DNA, 470 bp, Homo sapiens
  misc_feature (1)...(470): n = g, a, c or t
aaatgatctgccaaatctctttgatagtttaggaatgttgtggggagggttcattaataaaagttcagcaattttttaactgaaatagtttatctcttttacctagtcacaaaaaaggtatgtaaacaaggccattatatgtgtttattgctctttatttccctatctagattttctaagtatcttagctttcttaatataagtttaacttggtacttactgaaaatgcctttttacccctgttaacggtattttgagncttttgaaaagaacttggttgacactgcttttattgtggataaaggagagatggtcnnntaattaatggcttgaagtattattggagtggtttatcatttctgaaactaatcgtggtcagaattgactttgaaaagcattgcntttttacagaagtatattaactttttaggagtaatttctaggttttggattgtaatatgaaataattt

SEQ ID NO: 5530 - DNA, 281 bp, Homo sapiens
tggccccgaatgtctagctgcgctgttatttattggatacaaagcaaaaggggcagggtaaagagtgtgactcatctccaatgatatgtaaggttacgtgggtcacgtgtccactggacagggggcccttctctgcctggcagccaaggcagagagagagaggaagagagagagacaggcttatgtcattatttctgcatatcagagacttttagtactttcactaattttgctactgctatctaaaaggcagagccaggtgtacaggatggaacatgaaa

SEQ ID NO: 5531 - DNA, 319 bp, Homo sapiens
ctgcatttcagggctttctatcgatgggcgtgcctgcgcctgcagctcctggccttataggaaatgtgatgggacagagtccaagcatgatggtgggcatgcccatgcccaatgggtttatgggaaatgcacaaactggtgtgatgccacttcctcagaacgttgttggcccccaaggaggaatggtgggacaaatgggtgcaccccagagtaagtttggcctgccgcaagctcagcagccccagtggagcctctcacagatgaatcagcagatggctggcatgagtatcagtagtgcaacccctactgcaggttttgg

SEQ ID NO: 5532 - DNA, 404 bp, Homo sapiens
  misc_feature (1)...(404): n = g, a, c or t
cggccgaggtaaanctggctcaagactggcccaggcataatactgtcaatctaaaggtaaccggcaacatcaaaaagtacatctcaaaagaatcaggcttaaagataaacaggagaactggaaatatctaagagtaagaagtgtaaacaatagaaaagaggtagggtttagggttctcatcttgggatttccccaggtcttcaagcttctatccttcctgggttctgggtcatgggcctccagattccggccgttagtcttgagatacctttttcgcttgggtcctctatccatctaggtaggctttgtgacaggggccttccatccttgggttgtaggtcttccagctacaaccctgggctaatcttaggtcgttggccttgtgtcacaagtctcagttctta

SEQ ID NO: 5533 - DNA, 391 bp, Homo sapiens
cctacagtgagattgggatgaaaggcgagcgccggaggggcaaggggcacgatggcctttaccagggtctcagtacagccaccaaggacacctacgacgcccttcacatgcaggccctgccccctcgctaacagccaggggatttcaccactcaaaggccagacctgcagacgcccagattatgagacacaggatgaagcatttacaacccggttcactcttctcagccactgaagggccagaagatgaacagactgaccttgatgagctgtgcacaaagtggcataaaaaacagtgtggttacacagtgtgaataaagtgctgcggagcaagaggaggccgttgattcacttcacgctttcagcgaatgacaaaatcatctttgtgaagg

SEQ ID NO: 5534 - DNA, 277 bp, Homo sapiens
ccaggatggtttcgatctcctgacctcgtgatccaccggcctcagcctcccaaagtgttgggattacaggcgtgagtcaacgtgcctggatgtaacagttctcagtttagcagttatccgtccagttctttttcaattgatctgtgctttttaacccataaaaataggatagatagtagtatctgtctcacaggaaaagaacagaagtgaaatgcaaagtgggtaatgttttcctttttctcgttcctaagagctgagacctactgcagaaacacag

SEQ ID NO: 5535 - DNA, 274 bp, Homo sapiens
caggtaaacacctatagagatcttcaattccttgagtctgagcttgtgggtggaattctaaatttgtatcataatctgtcttttgtgaaacattttgaaaatatgtatatataatattgtatatgcaaattgtgttgtttcacttgtaaagggaaaaggcttatttttctttatatttctgataacttgttttgcatatgaccagcactgactgaaaggcatgtgtagctgcaaacactgttgctttttttgtgaaatgaaaataaaagtattt

SEQ ID NO: 5536 - DNA, 261 bp, Homo sapiens
  misc_feature (1)...(261): n = g, a, c or t
ctcttttttttttttttttttttttttttttttncggctaattttgttttttaatganaaacatctganttgtacatatcacaaacagcttcaagtttctgtaccaacccccggcccccacccccgccggggaaaccttnactntgtanagcctaaaggatgatggaaaaagggcnaggaaagcanaaagagaancncancatantacaaactacnccgcgcggnttatttaggatttggaaattcaacatgctcagggac

SEQ ID NO: 5537 - DNA, 198 bp, Homo sapiens
ccaaggccccttttgcagcccacggctatggtgccttcctgactctcagtatcctcgaccgatactacacaccgactatctcacgtgagagggcagtggaactccttaggaaatgtctggaggagctccagaaacgcttcatcctgaatctgccaaccttcagtgttcgaatcattgccagccaggaggaagttcaca

SEQ ID NO: 5538 - DNA, 546 bp, Homo sapiens
ccttgctctattactgtgaagcactaacaaagacaaacctccagctccagaaagcagcttgcctggctctgaaaatccttgaggctactgaaagcattaaaatgctggtgacattgtgtcaatctgatactgaagaaatcagaaatgtggcctcagaaaccctcttgtctctgggagaagatgggcggctggcatatgaacaattggacaaatttcctcgagactgtgttaaagtcggaggtcgtcatggaactgaagttgccacagccttttaattacaggttaactgcctaacagacctgcccgggcggccgcccgggcaggtaaatttcaccagttaaattaggtcaaatggaaggaactcaaatgagtattgcccaatcagagcccattatttgtaagtcatcagtaaccttaaaactccacttagacctaattattgaaaacttgcatataatgaagtgaaagaatttccattcatcaacctctcaatcccaggttttcaaagaaaaacctatctaaggaatacttaccaaaatcagataa

SEQ ID NO: 5539 - DNA, 236 bp, Homo sapiens
cgcccggcacccaggccgcaccaaaggctataactcagatgacaacctctgtgagccatccctggagtttgaggtccccaaccacaggcagtacgtgtcgcggccaagtagcttagagagcagtagaaacacatccagcaacagctcacctcttaacctaaaaggctcctccgagcagctccatggccggtctgagagcttcagcagcgaagacctgatccccagcagggacctgg

SEQ ID NO: 5540 - DNA, 322 bp, Homo sapiens
ctgctcatgctgcagaggagacagctagtcaggaaccctggagattcaagacaacttgctggtcccctttgcccagggctgtggtcctaatcacagtccttcacctttcccagggttagcctgtgtttcaaatgcatatgatctgcgctgagaggacaacagggggtcaggaacctggggttctctggggggcagactaagacgactccgggatccagacccttctgcaccttcagatgggagctccaggcagctaaggggccgaggagaatgggcagagatcatgctacaaggggaggttctggggatgaggcagtaatcc

SEQ ID NO: 5541 - DNA, 415 bp, Homo sapiens
  misc_feature (1)...(415): n = g, a, c or t
aaacgattttgccttaaattgttgctaaatgtttatctacacatgctgtcagaaataaccttgttaagaaggtgaagctggtgtctcagcaaatcagaccccttggagaaggcgtcgaatggcctgtgccccgttttcctttttctctttccgcaccatcaaaaggaaaagtgagaaaatagcagaaacattagttaaatcctgaattataccccataacctacaggaataatctcactacactgaaagctgacaatatttgtaggattttttgaaataattaggatcctaattattaataaactggtaattttggctaggtttacatctttaactaataatactttcaattaaaaaccttnnngaaaaaaacananggttgcttttnactatttatggnttacctgacttacca

SEQ ID NO: 5542 - DNA, 498 bp, Homo sapiens
aaattgaaatgaataaagttagcaccttgcttgttgatgtgaaatttcttcaactccacaagtgttaccattcataaatctaatttccatgaatggaaagtggaggaacatgtgttcaaatgcctggctgaagggtgcagcaaggttcttaccagccaagaggtggggtgatctgtccaacaccacccggagacaagggataaaaagtagggatatcaggagctggaggatgtctggacatgccttgtttggagttgacatctgatgggatgtgcgacgggtgtgatcctggagaaaagtgctcgtcactgtaagtgatgaggggggtgagaggatggaccgcatgggatggctgcaccacgggcactttatttgatgttctcgggatgggtggagaaagagatccatttgacatgtatgggtcgttattcatatttggcatcattatgtacccggaataactcgagtaggagggtcccttgttgtagaggacctcgg

SEQ ID NO: 5543 - DNA, 245 bp, Homo sapiens
ctgaacggtctggggtgagttggaggtcaaaggaggttgaagggttcgggggagaacaggacggtcggcgtgcagagttcctggagtgctggggggcctgagatggttgtatgacgtctggaggattcaggagggtgtatggggtctcaaggacacagcagtcccgcttcctcccctttcccacaggacccccaaggaagtgggagatgtgatcgccctgagcgacatcacctcctcgggggcag

SEQ ID NO: 5544 - DNA, 491 bp, Homo sapiens
ccctatagggcgaattgggccctctagatgcatgctcgagcggccgcccgggcaggtctgcttttgagtcccgcctggagaaacgcagtgaatttcggaagcagccagtggggcattccaggcaaggtgattttatcaaatgtgtggaacagaagacagatgccttggggaaacagtctgtgaacagaggattcactaaggacaagactctcagttcaatctttaacattgagatggtaaaagaaaaaactgcagaagaaataaaacagatttggcagcaatattttgcagcaaaagatacagtctacgcagttattcctgcagaaaagtttgatttgatctggaaccgggctcagtcctgtccaacatttctatgtgctctgccaagaagggaaggttatgagttttttgtaggacaatggacaggtactgaactccacttcactgcacttataaatattcagacccgaggggaagctgcagccagccag

SEQ ID NO: 5545 - DNA, 452 bp, Homo sapiens
aaaacttgctttgtttagaattcccacctcatttttccatggacaaaagtattctttatgtcctagtgcacttacaatttggtattacctgggagtgaaaagaaatattacagccatgcctaactgacttcttgaggtaagattgttctgtcagaaaaccctctcccagttcccctgcagctcttcaggaatccacatctctccagagctctttgttctcatgggtggcacctccagagtgaagaagatcctttgtcaagaagggaaacagaggggaaatgagagggtcctgcaggcagagctggaatcaacttccactctgcctcttgcaagctgtgtgaccctgggcacaatttctccttcctctggaaacctctgttttcttagatttggagcaggatggtcacactgaccttgcagagttctgagaatcagagacagaacataaaagg

SEQ ID NO: 5546 - DNA, 338 bp, Homo sapiens
aaagaaatacagaaaaagaatgttaagtattctcagtccaacgtgctttgcatcatcaacaaaatgacaagtcaaagtattttgcagggatcagatatcaatcaacctccataacaagttaggtatatcaaatactgctgtaaaacccatccagcaaaaactgattattgtggatttcagtacaaatttccaagttgtcacacattactgatgatgatcagggcaggcatggaattctgctgacttgtttcaaacactgtaacttggtccgataacttggcaaataccctaggagttccaaggttataaacacctgtatgaacaaagcatgctttcag

SEQ ID NO: 5547 - DNA, 488 bp, Homo sapiens
  misc_feature (1)...(488): n = g, a, c or t
caattatttccaatttttattttattcttaaaacttaagcatggtaaaatgttaagctgttttcatccactgatattattctactataaaaagcccttcttgagcagatttgatgataaaaaggagaacatttctaaggtataattagagaagctgttgcatgagaaatcatgtctccatctccattttgctatgcgttatctgaggattgtttctgaaagagatctatttaggcagtgtatgtatgtgtcagcatgtaaaaagtaaagaactgaaaatagacaaaccttgtaaatgcacttcaaaaccaattgtggctcaagtgtaggtggttccccaaggctggtaccaatgagactggggtttgggaattagttggtcatcatccctcctgctgcccagnagtggtcagtcattttccatgagggatggactaggaaaaatgaantgtntattataaaggagagttcctgtaacttaaggagcaa

SEQ ID NO: 5548 - DNA, 549 bp, Homo sapiens
ccaagtctacttttgaaataagacatggagttttcttgcataacccagggctgagctgctcagttaggagtcagagttggcaacatgagaggaagaggaggaaaaattatcctctctgcacattaacttgctctggaagctctcacataattacacctagaagttctaagggtcatataagggtctgatctttgggtcatatgtcaaaacagagcagctctgatgataagatctctctctctccacatccccatctcctttgtcatctctatctctgcacatatatttctcaacttgctttgctcaaagcagcctatacgttctggataaaaacctcataatccttatgttccccacgtttcatttcagaatttatcaaagagtatggcatgaatctaactgttcctttcactttccttgctcttgtagatcaattattacctaccgaacacaaggattagaatcataatgtgagatgtaggattatctaattttacaaaccttcaactcgaaaaacttcacattccaaatactgacggtggacctcgg

SEQ ID NO: 5549 - DNA, 273 bp, Homo sapiens
ccttccaattcaggccacatgtacctccagatactatgtggctggctgcctctgcctttttgggcaatctcagttccaaatattctatcatgttgtcatgccagcttttggcttgggaaatatggtcagtatgtctgtggggaaactgattctgtgtgccggccgcagaggaaggactctgggctggaggaaaggggtagggctcagcgccagtgctaggactggttgaactgtagggtgcagccctggctagtgaccacaccccatgtccag

SEQ ID NO: 5550 - DNA, 207 bp, Homo sapiens
  misc_feature (1)...(207): n = g, a, c or t
ccagagggaanncccaagagacgtctctgaagccaccgttcctgattattcagaggcagggtccacagtgagtgactcggtggggctggaggaacccagggtgacccanagggggctctggagcgggtccctaacatctgaaaaagtcctcccagggaactcggagctggaacttncaggcagcttcgggggtgacatttgtatccg

SEQ ID NO: 5551 - DNA, 291 bp, Homo sapiens; identical to SEQ ID NO: 409

SEQ ID NO: 5552 - DNA, 293 bp, Homo sapiens
ctggcctctcctgacgtgttcctctttaggagcaacaggtgaaaaaatgatacggttctggggcaggcccatgttttgtgcatactgttgaatattaggttctcctactgctggaaaacgcaacagccagagtacactattgggaacacgcttcagaatgtttgcccacatctgcaaagtagaagggtcaattttatacaactgattaaagttacagtatacgatggcatcttctggtaacccgtactgagaacgggtggttacaataatggtacggggaacctcctctccag

SEQ ID NO: 5553 - DNA, 399 bp, Homo sapiens
aaaatgactgtctgactcaccatggtaatttttcacaaattaaaaacacattttgggttgtgcaacagtgttctcatctttccaggcaggcagattattttaatgctgttatacagggaattgggactctcggattttcttttttaacctttttatgcctttcagtaggggaagtttccttgaaagttagagagctgcaaatctctaagtatcaatgtaaagaagccgatgacccaattcggaaggtggttcaagtgttctgtttgtttacaaaggcacagaccacgaccatggacacacccagtggaagtaaccacacccggtgtgttcctagaagctcatctgtgacagttcaacaagaacttactattctagaaaagtattacacaaagttatttt

SEQ ID NO: 5554 - DNA, 245 bp, Homo sapiens
ggagtgcgcttcccagggcaccattcgcttaaagtgtgttaatgacttgtccagcaagtttctttaccttcccacacccctcttctcaacgtccccccagagtcctcaggggggccttcgacctgcaaaagcctcacaggagtgcgaggggccccagctcccagggcggccgatggagcctcacacggtcaccttctccatcacgctttcagccacgtggacttcgtctgcctggacggtgacag

SEQ ID NO: 5555 - DNA, 472 bp, Homo sapiens
ctgacgctgacctggactgcctcagtctagaagcaggccagagagcagaggcacgtggcatcccagggcgacctcagacggccagccggttagctagttctgctgttgcttcacgagttctgagcattctctgctagcctatggaagctgcagccctcggaggacagaagtgttgtgcgcccaacagaaccctctgagacgcaagctgctcccttggctagctcatatgtggaaatagccctgtaattcgaggtaactccttccgctcgtgtccacatccctcttgttgagagctcactgaaagtcatgtgcccggggaatgttcctgtgactgttttttgtttttccttttttttttaactttgtttttgtttttttcaattaagctggaactaaagtcaggcccagccattacgctccccacgtgcagccaggtgcagcctgggcccagtcatgcctggctcatagatga

SEQ ID NO: 5556 - DNA, 215 bp, Homo sapiens
ccactgtgggcgtgagcttctttatcacctgcatcaccctggtgtacagcatggctcactctttcggggagagctaccgggtgggcagcacctctggcatccacgccatcaccgtcttctgctcctgggactacaaggtgacgcagaagcgggcctcccgcctccagcaggacaatattcgcacccggctgaaggagctgctggccgagtggcag

SEQ ID NO: 5557 - DNA, 156 bp, Homo sapiens
aaaagataagccatttctatcaccatcccctcagtgcccagaattccagatgggaagtgataccgttttagagttaaaatttccggcctcacgcgtgtaatcccagcactttgggaggccggatcacttgaagtcaggagcgtcagaccagcctgg

SEQ ID NO: 5558 - DNA, 250 bp, Homo sapiens; identical to SEQ ID NO: 2938

SEQ ID NO: 5559 - DNA, 335 bp, Homo sapiens
ttgaagacatgcacattttgttatgtctatgcagccctcagagcagtcacaggaatcagtaaacatgctggaaaagttggttagattatatgctcgaggccacacagtctttctgtacttaaactgtgggagctttctactgtcaatttcattacagaaagaaatgggcactgattccactccattgctaatatccacatcagaaacaacttctttttgctttgggtaattccgagccaactgaacataggtattgaaagaaaagttatgtggagtgctgaagaatgagagtttgtctttgcatgtcgtctttggaagtgacatttgattggcag

SEQ ID NO: 5560 - DNA, 380 bp, Homo sapiens
ctgaggaggttcctgaggatgatccactgctcactgagcgtggtcagggagcgccgctgtcggacgagcatcttcatcaaatgtgctgagaaccctctgcacctctccacgttgcccatgcccatttccttggcaggagttgctagtgctgcgttaagcctggcatgccgtgcaagagagcgataaaaatacttctggcatccatcccatgaagacgagatttctgtaagcagcctagaatcagcctcctgagtgctgctgacgatggacaatgcgctctggagatctaatgggtgaagatgaagcatctcttgagggttttttgaacgggcccaagcaagacctttgcgatacgacaaaccaatttttgcaaggtgttt

SEQ ID NO: 5561 - DNA, 331 bp, Homo sapiens
aaatattgctaagaaagaacttggagagagaagttggtgataccggagacagcaggcaacagacagagtgagaggcccgaagaacaagaggaggagggagtctcttctgggagcagaaggagtgtcgacttaaatattagggagccaaagatgaacctcgcagagaacctgcaaaacccagttgcagaaatacctgcccacacctaaaaactcagtcactgaaagtctgaagtcaaatgattatgtgaaatcttagtagtgggtacatgtggtttcattagattattctttgtatctatatttgtactatcttataagcactataagtttt

SEQ ID NO: 5562 - DNA, 293 bp, Homo sapiens
ccttccagggctgaccagtttgagtatgtaatgtatggaaaagtgtacaggattgagggagatgaaacttctactgaagcagcaacacgcctctctgcgtacgtgtcctatgggggcctgctcatgaggctgcagggggatgccaacaacctgcatggattcgaggtggactccagagtttatctcttgatgaagaagctagccttctgaacctcgcctgaagccagcctctctgccaagtcactcaggtcatgggcattgttcaagcctgagtggcagccgctcttgctcac

SEQ ID NO: 5563 - DNA, 342 bp, Homo sapiens
  misc_feature (1)...(342): n = g, a, c or t
ctgagttcccttcccgaaggtcagctcggggctcccgacgatcatgcagaagtagatgccactgtcttccggcttcacgcttgtgagattgagaatgaaccggcttgcatcccgaaacacagctatcttctcctgttccacctcttcaccgtggatagtcccttttgcggaatcccagagggccaggaactcgtggtgactgtcactgctcggtgcctggcgctgtctcagccagtagatgcgcatgttactgagggagattttagcctcncanggacancatcaccatcttgnnggtttgcacctttatgtangcagggggtctgctgngaggactgagtt

SEQ ID NO: 5564 - DNA, 201 bp, Homo sapiens
ttgaggtttggaaggtggaggtaaacttgaggccaccttcttcactttggccgtcttccgctgccagagctgtggatgagcttgactctcctccctctcacacctgacatggaatctatcagcagatcacgtgtgtgctacccttgaaatcagtatctagaatccaatcacttcccagtgcccctgctgttagcggcctgg

SEQ ID NO: 5565 - DNA, 258 bp, Homo sapiens
ttgagatttcccaggactggctttaatttgaaaaatctgattggggtctcttcccgtatcagagaaggaacagcccaagctatgaccccagggccagggaattcagtccccaccagaccctgtcattccatcactagggggtaattccaggctccccctgccagccctgagacaggaggacggatgtgaagttgcccaggactagattctgtctctccaaagtggcccaagccctgttctctgtactagggaagccag

SEQ ID NO: 5566 - DNA, 348 bp, Homo sapiens
ccaggtgccggccctggccccctctaaggccaaactcccccctgcagggctggatcttcaacgtggttccttggttggtggcgattccggccagtctattcagcgggtttctctctgatcatctcatcaatcagggttacagagccatcacggtgcggaagctcatgcagggcatgggccttggcctctccagcgtctttgctctgtgcctgggccacacctccagcttctgtgagtctgtggtctttgcatcagcctccatcggcctccagaccttcaaccacagtggcatttctgttaacatccaggacttggccccgtcctgcgccggctttctgtttggtgtgg

SEQ ID NO: 5567 - DNA, 383 bp, Homo sapiens
  misc_feature (1)...(383): n = g, a, c or t
gtacaagcttttttnntttttttttttttttttttacagtcttcaaatattttttattggaaggccatgcattgccttcatttattgnatttcaaatcactgtacatttacttttgtgaaaacactgcctgcattttctagtacaaaaaaaacctaaaaattgtttcaggaatgtagagaaatatccaacttaaatagcgaaaaagtgcaccataattactgctgcactgcagtcatttctgcaattcccatgtttcttaaataactatcttgtcagataacacacaatataaagagcaattatgaaaaacagacatttacatatacttctaaagtcttattgggaatatcctgttggcattggataaccaatcataggtgca

SEQ ID NO: 5568 - DNA, 206 bp, Homo sapiens
  misc_feature (1)...(206): n = g, a, c or t
ccagagggaagncccaaganacntctntgaanccaccgttcctgattattcagaggcagggtccacagtgagtgactcggtggggctggaggaacccagggtgacccagagggggctctggagcgggtccctaacatctgaaaaagtnctcccagggaactngganntggaacttccangcagcttcgggggtgacatttgtatcc

SEQ ID NO: 5569 - DNA, 383 bp, Homo sapiens
ccaactgctctttcaactccaagcttttcttctcctaaggaaagtgttccaagaagacatctttcagaaggaacaaattcttatgcgacaagacttctaaataatcatcaagttccacctcagtctgaacctgagagcaacagcttgaaacggagactttctactcgttcctcaattttgaatgcaaagaatcggagattgagtagtcagtttgaaaattcagtttataaaggtgatgatgatgatgaagatgtcatcatcttagaagaaaacagtacccccaaacctgcagtagatcatgatattgacatgaaatcagaacagagtcacgttgagcaaggtggtgttcaggttgagtttgtgggtgacagtgaaccttgtgg

SEQ ID NO: 5570 - DNA, 128 bp, Homo sapiens
ccaagtcccttcaattctctgtgcctcaactttctcatctgtaaaaaactatctcgtcaggaaaataataggttacgaggttggaaaggctcacgggtgtgcgggcactccaaaaaaaagaaaaggac

SEQ ID NO: 5571 - DNA, 251 bp, Homo sapiens
aaactcttaaacctggaactccttaaatggggtaggtgggtgagattatcaaagctgaagctggctttgctgagaagctccctacctccctgcccttctcctccttcctgctggaatgaactaaagcagatgtcaagcaggggctggtgggggtgcctactcccttttccactctatctttagatttcaaaccttaggcttacagcccctcaatatctctctgctaacaccagtgtctctttctagttagg

SEQ ID NO: 5572 - DNA, 111 bp, Homo sapiens
ctggcctgcgtctgtcccagagtcctgcctgcggggccttgtgttagctgtgttgtgcctggggagactgttgctagtggaaggtgcctctggagatggggtggggcccag

SEQ ID NO: 5573 - DNA, 300 bp, Homo sapiens
ctgttgaacactgcagaaatctcccctgatagcaagctgcttgctgctgggtttgacaactcctgtataaaactttggagcttacaatccaggaagttaaaatcagagtcctgtcaagtagacatgtcccgcatccatttggcttgtgatattctggaggaggatgtgtgaataccgttttttcttccctgcacctgccttcctagtttgcttagaatgtccttaccaaacacgacatatcttagaatggacttcctaattttcctcatcatatagctaaagccagactaatgccatgta

SEQ ID NO: 5574 - DNA, 242 bp, Homo sapiens
aaaagcttcctgtattttattagtggtccttgaaaaactgtgaatgtttgggaattggtagaaaggcaaaaagtaggatattttgacctgactggaaagatggttgtgtttttattgccaggtaataagtgtgatcattgttgaacttcagctccagtgtctctccagaataagacattggcattcaaatgtctatatcttgttacttacaaaataaaaaacagattaattagtggcttttt

SEQ ID NO: 5575 - DNA, 170 bp, Homo sapiens
  misc_feature (1)...(170): n = g, a, c or t
gttggtgangctgccagcatgtgcgatgagacgtgcacctacctggagagagagtcaaggaagcagtcagagaaatgaactgctgacctgcccagttgcacgacagccctgctccccacctccccatcaagcacaactagggaagacatggtgggtcacgaaatacagca

SEQ ID NO: 5576 - DNA, 365 bp, Homo sapiens
ctgcaggggcaggcggattcagaactttttttgcattttcccgctggactgtaggtaacccctgaggagactcggtcctgctgacctggtttgcgctggctacagaagtctgcttgggttgtgtctcgcatgctttgctttgggaagctggcatttctggagctccctgtgcatcaacggctacttgactgactgaggggattaaggtgggcaatgctatgttcaagatctggagacctggaatgtgtgcctgaggggcggggctgctttgtgatgaagggtttgcagtcagaacctgcagtccgacagcattcagagccagtcctggtggatggacttgtggggccatatttgtattggctagg

SEQ ID NO: 5577 - DNA, 248 bp, Homo sapiens
ccaagctccagctaatctacttggatgggttgccagctatctggagaaaaagatcttcctcagaagaataggcttgttgttttacagtgttagtgatccattccctttgacgatccctaggtggagatggggcatgaggatcctccaggggaaaagctcactaccactgggcaacaaccctaggtcaggaggttctgtcaagatactttcctggtcccagataggaagttaaagtctcaaaaacaacc

SEQ ID NO: 5578 - DNA, 334 bp, Homo sapiens
ccttcgtgcagtttgcttcacaggaaatagctgaaaaggctctaaagaaacacaaggaaagaatagggcacaggtggggatggatggttggttggatatgtcacttttcttatggtaaacaattaaatccatattctctctgcttaaaagaagaaattaatgttttgtagtcctaggtaattgatgttttgccatgatttccaaacttgtgtcagtcccacgttacacgcaaactaaattttaggtttgaaatttgtccctagttaattggtctgcttgacaattttgtgagtcttattaaccccaatcaatagagttgagagactatggcttt

SEQ ID NO: 5579 - DNA, 168 bp, Homo sapiens
  misc_feature (1)...(168): n = g, a, c or t
ctgattgtcagagccttagacccagcacgccttggattanctctgcagagtgtcttggttgagagaataacctcaccgtacccacatgacacgtgatttggaaagagactanaggccacacttgataaatcatggggaacagatgtgttccacccaacaaatgtgata

SEQ ID NO: 5580 - DNA, 303 bp, Homo sapiens
  misc_feature (1)...(303): n = g, a, c or t
ctgcggcccanacctcagccaccagcaccaatgcaaaccctctctctgccacgagcagcgccctgggagccctcacgagtcccgtggctgcttcaacccccaactccactgctggtgcagccatgaactccttgacctctcttgggactctgcaaggactggctggagccactgttggactgaataatattaatgcactagcagttgctcaaatgctctcaggtatggcggctctgaatggaggacttggcgccacaggcttgacgaatggcacggctggcaccatggacgccctcacccagg

SEQ ID NO: 5581 - DNA, 627 bp, Homo sapiens
  misc_feature (1)...(627): n = g, a, c or t
cctgtgcacgaggtgaagtccaccttggtctgaaagcagaagatggtgactgaaatggataccaccgcagtgatgatcattgcaatgatgacggctttggtttggtacatactggaaatggtgcccgtcatgaagcccatggcaaaagtaaaaagggtcagcagaatgatgttccatgggaaacggcgtctgggtccctggcagcaggcaaggatcaggtaggtgacaacgaaggcagcataggacacgtagtagacagccacatttctcctcacaaaggcgctgacaggttccacaaaggtgaagatagcaatgatggacctgcccgggcggccgcccgggcaggtgtgctcaacattatctgctgcagggcattctcagacacagactgagatattcaggatgggatccgaagcacctagaacctggtagccttagaaagctgggctgacctaagggcagagttggtgtttctgcacgtcatcctcctcgtcatcctcatagtcatcctcatcatctgagtactgctggggtgggcggactggaactcggctgcggnccacacctgccgccaggtctncttcctnctgggacaaagaccanggcagttacaaacaagtgctgctc

SEQ ID NO: 5582 - DNA, 421 bp, Homo sapiens
ctgccgtgttctgggactgtctcatggggcaatgtgtcctcacccccagcagtgccagcccaggtcagaaggcttcattcagaaggggggtgtcacagcacctggctgagcccccatggaggatggagacccacagatacacacaaacacacagagacatctccaaatctctgactcagactcgcacacaggcacacacagacgcacgctcaacacagacacacgcaggcctttattctattacacagagtagggctggggccagggcaggtcattctcaggctgcgtcagaaggtgcagagcgttcgggggacacaggccgaaccccaaagtgataataagttacggggggatttctcaggctgttgtcaggctggagcaagggcaggacgccatgtgaggaccccagagccacttccag

SEQ ID NO: 5583 - DNA, 262 bp, Homo sapiens
gccagggctggggggaagagctaggcttaatgaacagagcttgaggggaggagcctggactggtgggaggagctaggtttgatggacagagcttaagggacagagccaagactgatgataggaggagctaggtttgatggacatagcttaagggaaggagccaagactgataggagctaggcttaatggatagcgcttgaggggaggagccagacctcgtgggaggaactaggcttaatagcgcttgaggggaggagccagg

SEQ ID NO: 5584 - DNA, 301 bp, Homo sapiens
ccagtgattgtagcagctttactcttttgctgcatgatattgtttggtcttggagtgagaaaatggtgtcagtaccaaaaagaaataatggaaagacctccacctttcaagccaccaccacctcccatcaagtacacttgcattcaagagcccaacgaaagtgatctgccttatcatgagatggagaccctctagtctcgtgagactttgccccatggcagaactctgctggaatcctattgagaaggtagacattgtgctttattaatatagtcgctcttcagccatgcctttactgcag

SEQ ID NO: 5585 - DNA, 189 bp, Homo sapiens
ccagagatgggagaaataactaatttagttttattgtctctttttattgtcccaatagttgaaattgcccacaaccacagaaggcagagttatcctcgttgaagcaagctaacacaaatgagttccttttagcaaacttctctgtcttgcccattctttggatcatagcacaagtttttgagagatcag

SEQ ID NO: 5586 - DNA, 395 bp, Homo sapiens
  misc_feature (1)...(395): n = g, a, c or t
ccaacagagcaagaccatgtctcaaaaaaaaaaaaaaaaaaaaaaagtaggcattctattanacgtcagacccatgatcacatcactcattgtacggcctctggaaaactccgagatacactggtgagtgaatgggaatgggaagggcttantattattatgaaaaattctgacccagtgaacctcctaaaagggtcttgagcacccttagggagcctgcagactgcactttgagaaccaccactttagctggctgggtgaatactaaaattagtctagctaattttttgtattttttgtagaggcagagggtttcaccatgttgcccagactggtctcgaactcctgggctcaagtgatccacccaccttggcctcccaaagtaccctctcttt

SEQ ID NO: 5587 - DNA, 174 bp, Homo sapiens
cctttccttgagctgcacgtgaacctgtgtgggcaggcagcgtttgcaggcgtgtttacgggcaggcagcgtttgcaggcgtgtttaccggcaggcagcgtttgcaggcgtgtttacatgcaggcgtagcaccatgtgagaccactggtccagggtttcagaggtcctgctcag

SEQ ID NO: 5588 - DNA, 204 bp, Homo sapiens
  misc_feature (1)...(204): n = g, a, c or t
ctggaggccanctttgccagaactgtcaacaaagaatatccaggacttgcagacccagtgtttcgaaccctggtgtcccaaattctggaccgggctgagcctctgctttcctccagcctgtcctcggaagtcgtcactgttttccagtattacagttacttcaccagccacggcgtcagtgacctggagagttacctgagccag

SEQ ID NO: 5589 - DNA, 155 bp, Homo sapiens
  misc_feature (1)...(155): n = g, a, c or t
cctcagtaggganngccttctctactatgataatgctcctgctcatccttctcatcaaacaagggcaattttgtgagagttttgatggaaaattattggcatcctccttgcagtcctcatttggctccttctgccttctttttatatccttattt

SEQ ID NO: 5590 - DNA, 467 bp, Homo sapiens
ctggtgccggacgtcaacatggaagagaacttggaccctttctttaactgagctcatgccccacggagacttagcaggttccaggagtgagcgagggcagcggaaaggagttcttccgggggacacgaattgcctggctgagtagcaagaaagacacactcttaagtttcttggttcagagcaggaaaaccttcaaggagctgactgaccacgtagcatgggggcaagaggcgtgggatggggattggggtgagatggatgggagcccgctggagcttgtcttccctaacatagcctgggagaccaccccttgccacttgggccacttccgcctaccccacttttcattttgttccaaaatagttgcagatcctgacagaatcaaaactctctgcctcaaacacacatcctggcatcgcactgttagcatttaacttcttgttaggattcagggaaggaacagttgg

SEQ ID NO: 5591 - DNA, 319 bp, Homo sapiens
ctgggggaaagggagaagacaggggtcccctgagagcctccagaaggagccaggcctgccgaccccttggttgagggcctctggcctgcagcactgtaagacagtaggtttctgtggtttaagccattcagtctgtggtcacatgttacagtagccctaggaagctaatgcgggggctgctggtaccctgcccactccttgactggtgcctactggcccagctcccacctgcggctctgctcgaaactgtccccactctgctgtgctcaaaaggtcagagtgccagggaatcaaggcccagccctttctcagggagcag

SEQ ID NO: 5592 - DNA, 278 bp, Homo sapiens
ctgctgagggggagcctggtaggacatgctctcatccatgccggggactgggggctggttcagagtcccttggtgttggggtgcggatggctgctggggtgtggctgagccataggagccggccatcccatactgggaaggggagccatagctctggtacatgctcatgggatagtagtagctgtaggggtaggcatagttgtactgctggtaccactggtagtactgctgctgctgcaaagctgaggcttctgcctgggacacgtactgtgcactgg

SEQ ID NO: 5593 - DNA, 313 bp, Homo sapiens
ctggaaaaaatgtacggacatggatgaagctggaaaccatcatcctcagcaaactatcgcaaggacaaaaaaccaaacaccgcatgttgtcactcagtactgccgtaaccctgatggtgacatcaatggtccctggtgctacagagtgaatccaagaaaactttttgactactgtgatatccctctctgtgcatcctcttcatttgattgtgggaagcctcaagtggagccaaagaaatgtcccagaagcattgtagggggttgtgtggcccacccacattcctggccctggcaagtcagtcttacaacaagg

SEQ ID NO: 5594 - DNA, 382 bp, Homo sapiens
ccatttcattctgttctccatggactaaaatcacatgaggcggtttcaaagcacgaataaattcactggtttgctggtaatccgtgtgagctgagaaagaaatgtaatcaacagacattttcagtggtaacttctgtccagacatagtagtgatttcttcaggttcagacatgatgtgcttggcaagtgtcccttctacacagtatcccgctataatgacaccattcctcttatcagtacaccagctttcaaataattctctggataagccactttgcatcatgcctggggaggccattacaacactgggaccaatgtcatcaaaatgatccatgctctaagagagaaaacagaatgggaaaagtatgttagctaccagcag

SEQ ID NO: 5595 - DNA, 548 bp, Homo sapiens
  misc_feature (1)...(548): n = g, a, c or t
ctgaaaggaggtggatggggacagagcaccaaggggaaggggccctcggcccaaggggggaggaacctagcccccaccccgctacagctccccactgaattcacagcacagagaacacctctcgcccaacaactccacatggaggtataccaagtccaggggtcaaaggagcaggtggatgacagatgggcaggggcagtgaagatgacagcaggctcaggaggggaggtggcagaaacttcctcctacccatgggaggagacgatggggcgactgatattgctgttggtggtcatggcattcagctcccacctgatatcatgaggcaaacaggactggtctaggttatactgaatcacggccagtttgcacagagtcttcagactagggctaaagtccaaaatgtgtaagtcagaatgatctataaggtcaaattcatctcccaggacctgcccgagcggccgcccgggcaggtcctgaangacccanggccctctggctggatgcgtttgcctatcaggacccagaattacttacagacctgttta

SEQ ID NO: 5596 - DNA, 386 bp, Homo sapiens
cctaacttgggtggagagcccagcctgagcaccagaattagttgcttccacttgtgcagcctgctgaagagccggactcaggttgaagcagctttcctcccagtcttcactgatctccacagggagaaaacagaagtccccacaagtaccaagctcttcctgagactgcagccaccacacctcgggaaaggggaggctgggaggagaggagtacactgtcccggtgacccacaccaaggtggctccaagtgtaaacaaagccaataagagtgagcactggccctgagccccactatatgattgggtcaaaaggctcctttaattcaggagagttgggcccacagagtcttgttatcaggattttgctggttggcctgccttccagg

SEQ ID NO: 5597 - DNA, 184 bp, Homo sapiens
  misc_feature (1)...(184): n = g, a, c or t
attctgtnctccatggactaaaatcacatgaggcggtttcaaagcacgaataaattcactggtttgctggtaatccgtgtgagctgagaaagaaatgtaatcaacagacattttcagtggtaacttctgtccagacatagtagtgatttcttcaggttcagacatgatgtgcttggcaagtgtc

SEQ ID NO: 5598 - DNA, 266 bp, Homo sapiens
ctgctccgagggcctatcttcagccaggatgcccacagagagggacgccagtgcggttactgcctccacttcttctttgtcagcccctggcactctaggcacccaggagtctggacaggaggccaggcgctgcatgcagccccagtatttactgtgcacccggatcacggcctccagagagcggatggcattgaggttgggtttctgtttccagccttcttctgaaaggggatccaccctgttacccagaagagcagccacacagg

SEQ ID NO: 5599 - DNA, 237 bp, Homo sapiens
ccacattgacagtgtttccccagatgtcatactgaggttttcgggccccaatcactccagcaatcacaggcccatggtttatgccgacgcggaggcggaaggagttgaaggagtgcctgttgatgccgtccagcttactcatcagggcgatgctgaactccaccatgacaccaatgtgggcatgctgccgctccagctcctggttctcgtgccctgaggcgacgctgagccctgcag

SEQ ID NO: 5600 - DNA, 284 bp, Homo sapiens
cctccagtgtctacaatgttgatggtccccttttgttcagtcaagttttaataaaaataaaactgttctacagttaattgcactttgttcagtgtaaatttccaatgaccaagagcaggttaaacgatgtgtgtggtctattaaactgtggtcactcgtgctaaggcacacttggcctggagtgagttactgtttgggaagccaaagatagatcaagtgcaggagctgatcatacaatgttttctctctaacttacttacctgaactttaaccccaccccattt

SEQ ID NO: 5601 - DNA, 350 bp, Homo sapiens
gggaaaggaggtctcactgagcaccgtcccagcatccggacaccacagcggcccttcgctccacgcagaaaaccacacttctcaaaccttcactcaacacttccttccccaaagccagaagatgcacaaggaggaacatgaggtggctgtgctgggggcaccccccagcaccatccttccaaggtccaccgtgatcaacatccacagcgagacctccgtgcccgaccatgtcgtctggtccctgttcaacaccctcttcttgaactggtgctgtctgggcttcatagcattcgcctactccgtgaagtctagggacaggaagatggttggcgacgtgaccggggcccagg

SEQ ID NO: 5602 - DNA, 191 bp, Homo sapiens
  misc_feature (1)...(191): n = g, a, c or t
ctgcaatccacttaggatttcacacatgatcttcaaacactctgcatcggggatcatagggtcaaactgaccagcaatgtcaaaatcacactggcagaactccctataacggccttggactatggntgggctctctcgccgncacacctttncaacannataacgtttnatnttcttcaccttattcatgg

SEQ ID NO: 5603 - DNA, 343 bp, Homo sapiens
cctttgcactccgctctttccactcacatgtcacctcagggctgtccccggcctctcctttcccatctctcccagtacattatggtccctccttcctagcatctggtgctatctacggtaggcatgtttagctgctggtacgatccctcctccactgaaatatgggcttcatgtctggcccctgtgggactgccagagcctggtcctcagtcatgtttagttgggctagtgaatcaactcttggtcaaagggacaaaagcagatgaggagatgtggcttcaatcaggatcagtgtggaacagtgagacctgcgcatggcactgctaggagggatgggttccac

SEQ ID NO: 5604 - DNA, 115 bp, Homo sapiens
atctaggactgccggctaagtggacacactccttgacctcctaccaggaactttggtaaaagctagctttggggaaggggttgggtgtaaatatgagagggtggagggagaccag

SEQ ID NO: 5605 - DNA, 378 bp, Homo sapiens
ctgagagtagtcgactattacagagccggccatcttgcactgcgctgatatccaagctcattttgggattataagtatgtggataaagagattcaggaagatgtttacactcttgggcacaatctaaaagccagtgctcggaaacaatgtgtactcctctttcttttacagatttatactcccgattagtgtcatttggccgcccttgatagatgaaatgagtcactgtttcatcaaaactccacctgtaatctgctcctagagaggctgcgatcccatttagttcactctgcttcttactgagttttttactaacacataccactacttgtgaagtggctttggggcttcttccttctctgactgggcctctttcgg

SEQ ID NO: 5606 - DNA, 371 bp, Homo sapiens
aaaaggtagtataagaaatgaggaaaaagaggtaatatcagggcttctgctgttttttatttttaacatgttcataattaaaaagtattttccagcagtccaaagatgtaagttatcttacacataaaatgttttattttgttatttggttatgaaaatggaatccttgttcttgcacaactgtaaatgttttgttgctagataatacgatttgagacctgaattggtctttggtttccagtgcatcacagcatattttgtaaaatcatctactactgcacttgagcatgaatgggtagtagccaaactcacaaattggagtgatgaacctgcttatacctaagggcaggggcaagcccctcacaatgcag

SEQ ID NO: 5607 - DNA, 158 bp, Homo sapiens; identical to SEQ ID NO: 3737

SEQ ID NO: 5608 - DNA, 95 bp, Homo sapiens
  misc_feature (1)...(95): n = g, a, c or t
ctgaagacagcggcaatgctgacaaatgctaagaagataattgataaatacatattgatatagatgaggcangctgntacttggcantggaatat

SEQ ID NO: 5609 - DNA, 279 bp, Homo sapiens
  misc_feature (1)...(279): n = g, a, c or t
ctgaattatctatncatcntctttattaatcactattgttccagcagttttcaagtcaaattaataatcttattagggagaaaattcaattgtaaattgaatcagtataaacaaagttactaggtaacttcatattgctgagagaaatatggaacttacattgttcaattagaatagtgttctgcaaaaatatttataaaacttctcaagatactgctactgtaattttatatgaagataagtgtatttttcaataaaacatttataaattaagaagaa

SEQ ID NO: 5610 - DNA, 152 bp, Homo sapiens
aaaaagctattagtatttattaatgaattttactgagacatttcttagaaatatgcacttctatactagcaagctctgtctctaaaatgcaagttggccttttgcttgccacatttctgcattaaacttctatattagcttcaaaggctttt

SEQ ID NO: 5611 - DNA, 273 bp, Homo sapiens
  misc_feature (1)...(273): n = g, a, c or t
gtctgcaattcccattctnnatggtattgtttgtagcagttagagattttaattttgatggtatctaatttatcagtttttcttttttgtggcttgtgattctggctttctaattttacttaacctgggaaacacacacacactccagccaagttaaatacatttttatgtaagattctaaatcctgtgcatacttatttgtatacatattcnnatttttttctgtanaatatgtacctagaagtggaattnctggctcgaagaatgtatttt

SEQ ID NO: 5612 - DNA, 392 bp, Homo sapiens
aaaacttacgaattgtttatttccggaattttccatgtagtattttcagaccacggttgacctcaggtaactgaaacagcgggtaaggggggacaactgtacttccaggttctgcagcctgagaatgagagaagggactgtgcaggctgaaggcgtgggggaagagccagggccctggggagcagacgtcagggactaaactggaaggcaagcaggaagaaccgtgacccactccaaaccgccactgaagattgatcccaactgcaagccggtgccaagccccgcgtccacggaagtcacacagcctatgacgccttcctctccaaatggaagcaaagaggagaagaggctgctggagtcttcaattgcagccgtgagcaatctccaactgg

SEQ ID NO: 5613 - DNA, 354 bp, Homo sapiens
cctccttcgatggcactttcctgtggaagatcaccaatgtcaccaggcggtgccatgagtcggcctgtggcaggaccgtcagcctcttctccccagccttctacactgccaagtatggctacaagttgtgcctgcggctgtacctgaatggagatggcactggaaagagaacccatctgtcgctcttcatcgtgatcatgagaggggagtatgatgcgctgctgccgtggcccttccggaacaaggtcaccttcatgctgctggaccagaacaaccgtgagcacgccattgacgccttccggcctgacctaagctcagcgtccttccagaggccccagagtgaaaccaacgtgg

SEQ ID NO: 5614 - DNA, 266 bp, Homo sapiens
ctgtcaggtggagcctgcaagcctgggagcatctgcatgacccataccacaccctgcccaggagcatatattacctggtctctgggtctaccttaaccatccgatgccgattgcgttgccggtcccaatactcatctagccggtgggacgaaaggtgcatgacatggcaggcgaggcggcttggggtgctggggtccggagtaaccatgatgctgaagcagtgcatctcagcccgcccccccgcagacaccacatgggcagtcagg

SEQ ID NO: 5615 - DNA, 300 bp, Homo sapiens
  misc_feature (1)...(300): n = g, a, c or t
ccagcactggctatgtagtanagccctacaggaagtaccctactttgcttgaggtgctactgaattttctgaagactgagcagaaccagggtacacgcagagaggccatccgtgtgttagggcttttaggggctttggatccttacaagcacaaagtgaacattggcatgatagaccagtcccgggatgcctctgctgtcagcctgtcagaatccaagtcaagtcaggattcctctgactatagcactagtgaaatgctggtcaacatgggaaacttgcctctggatgagttctacccag

SEQ ID NO: 5616 - DNA, 231 bp, Homo sapiens; identical to SEQ ID NO: 257

SEQ ID NO: 5617 - DNA, 240 bp, Homo sapiens
ccagcctacaatggggatgttgtgtttctgttcaccttcgtttactatgcctgtgtcttctccaccacgctggggtctgggaggaatggacagacagaggatgagctctacccagggcctgcagggcctgcctgtagcccactctgctcgccttagcactaccactcctgccaaggaggattccatttggcagagcttcttccaggtgcccagctatacctgtgcctcggcttttctcag

SEQ ID NO: 5618 - DNA, 252 bp, Homo sapiens
ccagtttcttccctgtgcaccggagcccacggaccctcagcgactttcttcttctgaagagactgagagcactcagtgctgcccagggagccctgttgcacagactgaaagtccctgtgatttgtcaagcatagttgaggaggagaatacagaccgttcctgtaggaagaaaaataaaggcgtggaaagaaaaggggaagaggtggagccagcacctattgtggactctggaactgtatctgatcaagacag

SEQ ID NO: 5619 - DNA, 79 bp, Homo sapiens
  misc_feature (1)...(79): n = g, a, c or t
cccccccccctttcctttttttttnnttttttttttnnttttttttttttttttttttttttttttttttttttttttt

SEQ ID NO: 5620 - DNA, 260 bp, Homo sapiens
atcgaggccgagctggggccgatgaagatgacaaggggcctagggcaccccgcccacctcagcctaagaagtccaagaaagcaagtggcagtgggggtggcagtgctgctttaggcccttccggctttggaccttctggaggaagtggcaccaagctccccaaaaaggccacaaagacagccccacctgccctgcctacaggttatgattcagaggaggaggaagagagcaggcccatgagttacgatgagaagcggcag

SEQ ID NO: 5621 - DNA, 269 bp, Homo sapiens
ctgcctcctgagggtgtggggttattagggtctcaatactttctcaaggggctacactccccatcaggcagcatcccaccagcctgcaccacaggctcccctgggaggacgagggaaacgctgatgagacgctgggcatctctcctctgtgacactaggacatctgtccaggaggctgggcggaggtgggcaggatgtgagaggtggggagtactggctgtgcgtggcaggacagaagcactgtaaagggctctccagccgcagctcag

SEQ ID NO: 5622 - DNA, 485 bp, Homo sapiens
ccactgcagtgaagttttacaggtctagtggttaggggcatccaggggtgtcccttccaatgtgaaagacaaactgttgcatcttgcatcctcatgcaaggaaggaagcacactgcctggtgagcctgtttgagttctgacatcacattctacatgtaggtgtattgctttgacccacactctaggtgacataggaggatgccagctttgagtggagcctccacaggaaaggacactgcagcagatccaggccatggcgcagtcaccatccttcagaccccctggtgctgaaagtgccagtggtggggtaagatttggggtggagctgaaccaagcaccagtaggagagtcacagtggagggcctgggattctggagtaaggccatgtcatccacagcacagaaatatgccccatccaaagcagagaaatatgttggaagcaacttttggcatgttactgtaggccctgataagatagaatgctt

SEQ ID NO: 5623 - DNA, 463 bp, Homo sapiens
  misc_feature (1)...(463): n = g, a, c or t
ctgaaaaccataantgtcagcggcaggagatcaatgtccccactcatgcagtgaggcagagagtgaatttcaccttcccctacttttttagtctattcaagccctaatggattgcatgaagcccaccaacactgagaagggcatgtgctttactcagtccatcaactcaaacactaatctcctccagaaacactttcacagacataccccgccatcatgtttaaccagctacctgggcatcccatggcctagtcaagtcgacacataaaattaaccatcacatagtgttccccacatacaatggccccacaaacaggaactaaacaattagcaaagctctatggctcaattctagaattgagggtgttaatctgttttctgttaaggaactctaggctctatgtaaactgaaactgtatcaaaatgctgacactaaaattagaaatgggaagaagtagctttt

SEQ ID NO: 5624 - DNA, 193 bp, Homo sapiens
ccttcatcgacctgcactctgctgggaatatgctgttcaggacgtggatcgccatggcctactgctcccccaagcagggtgtgtccctccaaatggactttggcttggacctggtgacggagcttaaagaaggtggagatgtcactgagctgctggcagccctctgcaggcagatggagcacttccttgacag

SEQ ID NO: 5625 - DNA, 308 bp, Homo sapiens
  misc_feature (1)...(308): n = g, a, c or t
ctgacagttctccnnggcaactcagtcctccagcagacccctgcatacataaaggtgcaaaccaacaagatggtgatgctgtcctgcgaggctaaaatctccctcagtaacatgcgcatctactggctgagacagcgccaggcaccgagcagtgacagtcaccacgagttcctggccctctgggattcnncaaaagggactatccacggtgaagaggtggaacagganaanatancggtgtttcgggatgcaagccggttcattctcaatctcacaagcgtgaagccggaagacagnggcatctactt

SEQ ID NO: 5626 - DNA, 167 bp, Homo sapiens; identical to SEQ ID NO: 5425

SEQ ID NO: 5627 - DNA, 404 bp, Homo sapiens
ccataggaacgcactcaggcaggtggtttgttctggatgcagaaaccagagatctagtttctatccacacagacgggaatgaacagctctctgtgatgcgctactcaatagatggtaccttcctggctgtaggatctcatgacaactttatttacctctatgtagtctctgaaaatggaagaaaatatagcagatatggaaggtgcactggacattccagctacatcacacaccttgactggtccccagacaacaagtatataatgtctaactcgggagactatgaaatattgtactgggacattccaaatggctgcaaactaatcaggaatcgatcggattgtaaggacattgattggacgacatatacctgtgtgctaggatttcaagtatttggtgtctgg

SEQ ID NO: 5628 - DNA, 504 bp, Homo sapiens
  misc_feature (1)...(504): n = g, a, c or t
tgctctttcagctntgaacgtcctttcccattctccatcatccacattcacctatcctgcctgccccagttaaaatcctgtttcttctaggaagtccctcatcccacccgcttaccccagggagactgagcttgttccttctcctagtaagaccctcagcccatggagtcctgtgtgatgttgtgagcgtgggaggacagactgaactgctcggcccgtggagtcctgtgtgatgttgtgagcggggaggacagactgaactgcgtggtgcttcgcacatagacctcaacagggattggcattttgaagctgttggcgggggctgtggactgcttttcttcctttctagctcaacggcagctaaagccactgcatacaatgcaaggactggctcctgtttggccgcgactgattgcagcccctggtgaaatgagaaccctgtgggtcggaacaaagtttggattattttatgttgcaagtaaactaaaatctcaagtgaaactg

SEQ ID NO: 5629 - DNA, 517 bp, Homo sapiens
aaaaaagagccgtttgtccacttccagttcttttctgataatgaaaaacttaatccaatccaaaacagaattgctttgtcacgtatcaggttctgtgtgtgtatcaattcatccttatctcgaataagcagcaggctggattctttggtggaacaatcagctagactgttattccaagggttgacagtgtgagaaaataacaagcatttctctcggagttgctgccaatatattgggcagtttaagagacccggtctctctaaagtaaaaaacagaaataagaaataaatgttatatttctaacctatccctgacacaccacaaccaatcacacacacacaggtcattataaatgctcaaagtttttgattatcactgtgagaacaatgaatttgttataaagttgagatttttgagacctactgttcattctagtaccaagaattgggaattagtgaccagttatcttgagcataaatggaatcataaaatattaaaataggaaaacaccatcaga

SEQ ID NO: 5630 - DNA, 386 bp, Homo sapiens; identical to SEQ ID NO: 5435

SEQ ID NO: 5631 - DNA, 408 bp, Homo sapiens
  misc_feature (1)...(408): n = g, a, c or t
aaacattccacctnnttctcgcatgtgcaggtcaagtgtacagtagtgaaaacaacatgcaatgtcttcactgcagaatcataatacagctaggacattggtgttcttcccctcccaccccaaattaaaaactaattgctaaaaaaaattgcattgccaaacggcactggagtgaaagcttggcggtactctacgataaatgctcantttccagtgcatgaaataaaactatagcaaatgggaggctttggtggcatccaaagaagaaaaaggcaaaccanggggaaagagctgcagtctaaagtttggtctttacctgcccgggcggncgcccgngcaggtnctggtttagaggtgtggtgcttttggcagtgagtattgccttgaattcatggcaatgaattcaat

SEQ ID NO: 5632 - DNA, 374 bp, Homo sapiens
aaaatactgagcggtattgaatacttcgaagcagaacaggcaatgtgcagccctcatttatgagaaaaccctcaggaaactcccagggtgatgcttggagaagctgtgagttgagctgaagctggagaacttcctccagagcaaagggcttaagaaagaaagaagaactctaagctgggtctgctaacatcactccagtttagatggatcttggcagagagacatgcttgttcctctggattggaaagatgatttactctcgggaatcttctctgtcagcctgtacatctaaaggcatgaagcactcaattgggcaattaacattagtgtttgttctctgatggtatctctgagaatactggttgtaggactgg

SEQ ID NO: 5633 - DNA, 231 bp, Homo sapiens
  misc_feature (1)...(231): n = g, a, c or t
ttctctcttgtttcctctctatttcagcctagtatcanaaggccaggcgagactgcaacactgctcatcgccccgcggcgtgatccctgctcttaggtgctgggcagaggggaagggtggtcagggtgaggatggtgagggagggctggtgaggggctcagaggaatacttggaacaacagcagtgttattgtagtgtggcagtttcttttatacataggtgagagttttt

SEQ ID NO: 5634 - DNA, 284 bp, Homo sapiens
ctgtgtcctgccctcccttctggaggctggaggggagaggccaagcccttggaaaatgtagcaaatgtctggatgtcgcataagtgcgtgtatgtgcgggacaggccccgagaagctagtgactcctgcacacccccattgcacaaatgaaatcacagcccaggagggagggtagcttggcactggctgagaaatagagctctctccccgcccctccccctaaccacaagggattgtcctgacaacttgtggggatagaagggctcacagggcaggggtctcag

SEQ ID NO: 5635 - DNA, 279 bp, Homo sapiens
aaaaattaattaacaaatgaagtatacatttccttccccaaaatatcaacaaatgtaaaaaatataaaatatctgaggccatgttttatcatgtcaaggcaattgtcccagaatgtaataaaacatttgaactgaaaacatgcacatattagagttttttttaattaaagaaagaagaacttttacgtagttgtgcatgaacaccaaataataattacaggttgttttaccagatgactattgaataatattgcttataaaatttgttggtacactttt

SEQ ID NO: 5636 - DNA, 433 bp, Homo sapiens
ctgtccagtgagtactctcctagtactggatacaaaggaagaggccacggcccacgatcttctgaactcacaataggtggaggctggggctctggcgccacctctgcggaatcccaagcccgcttcacacagccaagaaaatgttgctccatccctcaagcctcagaccaacgtttgcgctgatcaaggagggagagtctctgcactaccatcagcctgagtatttatgctctgcagagcccgtgggcggaggccagtcagatattaagaaactcagtagtaacaaatgcacgaaaattagtagacaaatgaaaaacgataacattttagagagtacatagaaccaaaacgaaccgtaattccgacagaaaaacatggcgagaaaagaaaccgaaatgaaatgacactaagcaaatcttgaagagaactagcg

SEQ ID NO: 5637 - DNA, 175 bp, Homo sapiens
ctgagtgtggttgatttccttcccaccactccccagcccaccaagaagtccaccctcaagaagagagtgtgccggttacccaggccagagacccagaagggcccactttgtagccccatcacccttggcctgctggtggctggcgtcctggttctgctggtttccctgggagtgg

SEQ ID NO: 5638 - DNA, 315 bp, Homo sapiens
ccaagggtccctccaacgtggctggagaagcggtcagtgtcacgcagaaggagccggagcccctccccacggccatcccagaacaacaggccgatggtcactttgtctgggtcactgagcagcaggagacccgtcttgtccatggtcatcttcaggccgggcatcactgagaatagcgtctccttccacttgtacgcagagcttcttcggttccgagtcaccaccacgtgttcaggggatgcgtgaacccataccagggggttcttgaaggtcacttcgatccatgagaacccagccttctccctctcatactgg

SEQ ID NO: 5639 - DNA, 284 bp, Homo sapiens
aaattatttttgtgttaatagtacactttgagtatctttttccacattaaaaactttctgaattataaatgttttccttacattatttaacaatgtacactgttaaaaataaaaataaaaattcaaactttgggggtttctcagcagccgttaattgtacattttgcactaactctgggtgttgcgcttcttgtaagattgcgctttgtgcttcagtttgttacctttgtagacttatttaatgaaaccattcaaataaaccaaacttgcttttgttaaaaaaa

SEQ ID NO: 5640 - DNA, 342 bp, Homo sapiens
ccacttgtgtgggtcctcacaagcaaagagagcactaaacttgacattgggggtccaccactccaaccttgctttctgaaggttttggtgtacattgagccccagaaggaaaggagagtatctgtgagtgggggcctcccttgacccagtacgaagtctatgccctgaatccccagagtagcccttcctggtgcccaactggcctggggacaaacagcgtccactacatctaggactgccggctaagtggacacacttcttgacctcctaccaggaactttggtaaaagctagctttggggaaggggttgggtgtaaatatgagagggtggagggagaccag

SEQ ID NO: 5641 - DNA, 181 bp, Homo sapiens
ctggttggggagggcagcaaaacccacgtactccttgtccatgactccgccagccatcactgcacctgccgtctctccccacttcctctggtggggcaggaagctgagtgcggcttcaaccctccatccttcacacatctggattccaagtcccactgtagctccatcatcgtggtgagac

SEQ ID NO: 5642 - DNA, 551 bp, Homo sapiens; identical to SEQ ID NO: 258
  misc_feature (1)...(551): n = g, a, c or t

SEQ ID NO: 5643 - DNA, 71 bp, Homo sapiens
  misc_feature (1)...(71): n = g, a, c or t
aggtggaagccacagccattangtgtccccttgttggggggcggcgggagtgctggatttttgccctgtca

SEQ ID NO: 5644 - DNA, 231 bp, Homo sapiens; identical to SEQ ID NO: 259

SEQ ID NO: 5645 - DNA, 406 bp, Homo sapiens; identical to SEQ ID NO: 411

SEQ ID NO: 5646 - DNA, 296 bp, Homo sapiens
ctgggccacagacttgtccaggtcaacccgaaagctctcagcacaagaggttggttcctcaggggaagggtcttcctcttggatcaagtccaaggtcagcatcccatccgaggtagaggtggaagccacagccattaggtgtccccttgttggggggcggcgggagtgctggatttttgccctgtctcgagtgggatgggcaagatagctgtcctcctcaacggtgacctgaagagatgtactgtgaatcatgaatgctcttcagcgactcgctgtcccaacccagcatcccgagg

SEQ ID NO: 5647 - DNA, 238 bp, Homo sapiens
ctggcccctgcttcccctagggcacatgctggaagccctgggccgccaccagaggtcctcagccctcctgcctgggctatggctccttcctggtttgggagccatagtggagctttcctctctaagctcacccagctcaaactgtgacaggagaatcttcttcgactgccaagagcggtccaaggcaatggtcagccactgcagcctcctgagatatttttagagactggacctgagg

SEQ ID NO: 5648 - DNA, 470 bp, Homo sapiens
ctgctcctgcatctgtccaggattggtggctgtcagtgggagagacatgggaagatgctccctccaccttcctgggaccaccttgttgactcagcagccttcctcgccgcccaccatgctatgccttcctggatggaggccctgagggtggcttttggttttcctacccctgtacccctccaagaaagctctggcacactgcagaggccagcaactacttgtcaaatgaatcaaaggaaagtcaagccggagccaagggtcagaagcaggggcttgcttccccgaagtccagcccttctttgggctcccctttcctttttgacacctcctgcttggttggcagtgaggtctcccaggtctgggggatccttgccactgcttctgcacccagccctggctaagcggccttgttctcatcaaagctgccgagacctgcagggtactcagcttctacttccactcctacacag

SEQ ID NO: 5649 - DNA, 448 bp, Homo sapiens
tgcagctcagacacagcaaaagagcctagaacctgggtcctagtttgcacctagaatatgaggtactttgagccttgctaagaccacccagcccatctccatggactcatatgaaggacaagaagtgaacataacctgtagccacaacaacattgctacaaatgattatatcacgtggtaccaacagtttcccagccaaggaccacgatttattattcaaggatacaagacaaaagttacaaacgaagtggcctccctgtttatccctgccgacagaaagtccagcactctgagcctgccccgggtttccctgagcgacactgctgtgtactactgcctcgtgggtgacatggagtcttctggttctgcaaggcaactgacctttggatctgggacacaattgactgttttacctgatatccagaaccctgaccctgccgtgtaccag

SEQ ID NO: 5650 - DNA, 323 bp, Homo sapiens
aaataaccctgaccaccacatgcttgctatatcatgtgcatgatgagggaagccataaactatttcaaaggcaactttctagctatcgggtacgatgtcctctgggagagaccatggtgggtgacagggacagaggacgatccctgaggcaatggtaagtcaggtgttaggtagcaagggaagcagcctgggcatcaggtagagttgtgcaataaagtctgtgttttaagttcccccttcttcatttgccaacacaccaaccaggtgagcccacctttatgagtgactttggagaaagatgcttttcccattgctactgcagg

SEQ ID NO: 5651 - DNA, 163 bp, Homo sapiens; identical to SEQ ID NO: 3801

SEQ ID NO: 5652 - DNA, 165 bp, Homo sapiens
cctcagacaccaggatgttggccgcccgcaggtcgcggtggatggaattcatgcgctcaatgtatgccatcccttcagcaatctgcgccgacatgtcaatcagccttgggagtgacaatctgctcccttcatctgtcttcaggaaatccagcaggcatcctctgg

SEQ ID NO: 5653 - DNA, 561 bp, Homo sapiens
aaaaatgcattattccctcatccaaaagaccaccactttatcttaaagctacttggctttacaaaaaataaaaataaaatagaggattaggggaggaacagacaggaagaaaagaaattaaataaaaaatgaaagaaaaaaaaaggaccaatggaggatgaaggatggagaggaaacgcaggggaaggagagagaacgagatatggaaaggcaccaaatgtccaaatccctggacaggcagatgggctccttggtactgcagattcaccacagctacagacactgcagtgatggcactcagggcacgagccagaggggcagcctcagcagggagcagctcactgagcactgaagctggaatggcactaataacgtggtcagcctccagactgccgtcccttagagataccttccagcgcccttctgcctggaggctgagcccacagaccggctggcctctgagaacactgacccccctactagtcaggtgggtttcaagggcctgaggcaacatctctagacctccacgaagtgaccactggctccagcgctcagccaagg

SEQ ID NO: 5654 - DNA, 404 bp, Homo sapiens
  misc_feature (1)...(404): n = g, a, c or t
aaaaagcatatnccaccttttttattaattattatataaaatgaagcatttaattatagtaataatttgaagtagtttgaagtaccacactgaggtgaggacttaaaaatgataagacgagttccctattttataagaaaaataagccaaaattaaatattcttttggatataaatttcaacagtgagatagctgcctagtggaaatgaataatatcccagccactagtgtacagggtgttttgtggcacaggattatgtaatatggaactgctcaagcaaataactagtcatcacaacagcagttctttgtaataactgaaaaagaatattgtttctcggagaaggatgtcaaaagatcggcccagctcanggagcagtttgccctactagctcctcggacag

SEQ ID NO: 5655 - DNA, 357 bp, Homo sapiens
ccaccacggtctcgtcccaaaggagaacgactacgagagcataagtgacttgcagcaaggcagagatattaccaggctctagcaacccagaagacaaccctgggtagcctgtgatcagtgtctggagacgtttcttctgtggaagagaagaagtgacacaaacctatacttcatatgctgctttagtcacctgaagatggttggagaggccctgtcgactgttctcccagttgttcagtttctgagacagagaggtacggactaggctgcacctgagtgtgcccctgcctgccagatggacaggtacacccaagcacatctccctgctgcaccctcaccacccacaaaagatcccag

SEQ ID NO: 5656 - DNA, 201 bp, Homo sapiens; identical to SEQ ID NO: 5564

SEQ ID NO: 5657 - DNA, 207 bp, Homo sapiens
ccagagggaaggcccaagagacgtctctgaagccaccgttcctgattattcagaggcagggtccacagtgagtgactcggtggggctggaggaacccagggtgacccagagggggctctggagcgggtccctaacatctgaaaaagtcctcccagggaactcggagctggaacttccaggcagcttcgggggtgacatttgtatccg

SEQ ID NO: 5658 - DNA, 265 bp, Homo sapiens
ctgtgaaacagaaggcactttgtgctagaattcagagggtctctcaagagagaacgccacagcagagagacccaatccgcctaagttgcaggcgaccctttagggtggggaggagtatcccccaggaaggcatctgcaaaggaaaaaattgtaatcatgattccaaggcaaaatggctaaagttgggagagaagaaataccaagagagaagacaaaacatggctgtgccaaggactgaggagtgagctttacaaggacttgtcag

SEQ ID NO: 5659 - DNA, 277 bp, Homo sapiens
ccacttgctgcctaaaccaatcacagcttcagttttgttttttgtcaagtgttggagttacaagtagacacctctctgtgcctggtattgctcaggttcagacttggctgggggtgagggggccaggcagaaatcagttaagaaggccattccaggtgtaaatgcctcccggctctacagggggtaatatttactgtcgtcttttcccttcccaggttgattactgacctgtttgttgtgaagatgctgctgcaataagcacaaacagaactcatgg

SEQ ID NO: 5660 - DNA, 269 bp, Homo sapiens
actgtgcagatgctcttggcaggacagcatcgcagggaggtgctgggattctgggcctcactgtctgggtcttggttcctctgaaagagatggatcttgtgcagaccagggttgttgagtgaggggagcgtgggatggggaccgtgggaaagaggacagctcagggagaagtgacctggagaggtcctgtttgcatctgacccatctcaactggcccagcatcccaacttctctgcagcgaaagggtggcgccccgcagcctcgggagg

SEQ ID NO: 5661 - DNA, 247 bp, Homo sapiens; identical to SEQ ID NO: 2583

SEQ ID NO: 5662 - DNA, 244 bp, Homo sapiens
cgcccagccaggagttaagctgaggtcgtctgagccctgcgacagcctggacagcaactcaggatggcatcaggcagggcacgctgcacccgaaaactccggaactgggtggtggagcaagtggagagtgggcagtttcccggagtgtgctgggatgatacagctaagaccatgttccggattccctggaaacatgcaggcaagcaggacttccgggaggaccaggatgctgccttcttcaagg

SEQ ID NO: 5663 - DNA, 448 bp, Homo sapiens; identical to SEQ ID NO: 5649

SEQ ID NO: 5664 - DNA, 365 bp, Homo sapiens
ctacagataacatacatgataatatctgatttcaggacaaaagagtaattctcaatagcaagggaatggagtagggtagacagctagtaattaaactcacttgtatgttaaaaataaattaaggaaaaaaagaaaatgagagaacatattactaaataaagaaagcatacattaaatatttactatagtttcacactaagggaataaaggaaatgcaatagagtggcctgaaagataaaggatgagatgtgtaaagagacagggaaagatgtgtcatttttttactatgagcagcagtctgagaagataaaggaatcgagttatgggcaaacatgatgtttgatcagtgctatttgttttgaagg

SEQ ID NO: 5665 - DNA, 303 bp, Homo sapiens
ctggagatggcagccattgtttgcggagcccaggctgactccggattcaacgttgctggggagagaaaagcagtatagactccaccttccaggatgtccatttcggggagaggagcaggtgggaccctcaagaaaatgacggagaacatcccagacagatgggactcaagcaggatgggtgctatatccaagaagccaagaagggagagtttcgtgcactgtggttaacaggagggctgcctggaggcagtggctgagccagaaagtaacacagagctcatgcttggagagagagagtcttgg

SEQ ID NO: 5666 - DNA, 396 bp, Homo sapiens
aaagctggctcaagactggcccaggcataatactgtcaatctaaaggtaaccggcaacatcaaaaagtacatctcaaaagaatcaggcttaaagataaacaggagaactggaaatatctaagagtaagaagtgtaaacaatagaaaagaggtagggtttagggttctcatcttgggatttccccaggtcttcaagcttctatccttcctgggttctgggtcatgggcctccagattccggccgttagtcttgagatacctttttcgcttgggtcctctatccatctaggtaggctttgtgacaggggccttccatccttgggttgtaggtcttccagctacaaccctgggctaatcttaggtcgttggccttgcgtcacaagtctcagttcttagg

SEQ ID NO: 5667 - DNA, 158 bp, Homo sapiens
ccttctagcatggcatcaattccgatataggttcctgtacgcccaacaccagcactgcagtgcaccacaatgggaccactgaagaaattgctgaaggcattcactctccttctcagtttgaggagcaagtgaggatcctcaggcaccccgtggtctgg

SEQ ID NO: 5668 - DNA, 151 bp, Homo sapiens
acataaaattaaagtgtgtctcaaaaccagacagccatcttgtctgccatcactgagcaaattacagatggactcaatacaaatttgcccacggggcttgcttgcaatactatttcacaaagctgactgtattcttcatcttcataaatgg

SEQ ID NO: 5669 - DNA, 364 bp, Homo sapiens
gtgtatgctcacttccccatcaacgttgttatccaggagaatgggtctcttgttgaaatccgaaatttcttgggtgaaaaatacatccgcagggttcggatgagaccaggtgttgcttgttcagtatctcaagcccagaaagatgaattaatccttgaaggaaatgacattgagcttgtttcaaattcagcggctttgattcagcaagccacaacagttaaaaacaaggatatcaggaaatttttggatggtatctatgtctctgaaaaaggaactgttcagcaggctgatgaataagatctaagagttacctggctacagaaagaagatgccagatgacacttaagacctacttgtgatattt

SEQ ID NO: 5670 - DNA, 115 bp, Homo sapiens
  misc_feature (1)...(115): n = g, a, c or t
aaanccatntataatccaccaccacctgttttttgggggacctgggacacatgaaacacananaggaaatttcatgggtactggatgaaacaaggaaggaaatgtttttgctcac

SEQ ID NO: 5671 - DNA, 587 bp, Homo sapiens
ccacatccctaaatgtcaacggcccctgaaacaaacaaacacaaacacacacacacacacacacatttacacgtgggcaaaatttatcatttgaattaaggtcaaatgagaaagtaaagaaaattcgttctgacttacaggaatgactgaaattatccaacaattttcaacacagaaatattctctaatgtattctctaactctgagagaagagaatggtataagatctacaacaccactgtatatatacttttattaatagtaaagtataaagctaaaggcataaacacaaacatgtacattttttagtgctatatttgccacacaaagaatgagttgtgtatatttttcagacaaaagatatgttgagttagaaggcacctctcaagttttaatgtgaacaataaactggagatcttgtgcagattcttttttcccagaagatctgaaataaactctgagtttctgaatttctaacaagttcactagtaatgccaatgtgtttggcccagaaagaatattttgtcaatatccagtaagtggaagaacctgtgttttactcaatttttctgccctgtaaacaaaga

SEQ ID NO: 5672 - DNA, 334 bp, Homo sapiens
aaagccatagtctctcaactctattgattggggttaataagactcacaaaattgtcaagcagaccaattaactagggacaaatttcaaacctaaaatttagtttgcgtgtaacgtgggactgacacaagtttggaaatcatggcaaaacatcaattacctaggactacaaaacattaatttcttcttttaagcagagagaatatggatttaattgtttaccataagaaaagtgacatatccaaccaaccatccatccccacctgtgccctattctttccttgtgtttctttagagccttttcagctatttcctgtgaagcaaactgcacgaagg

SEQ ID NO: 5673 - DNA, 225 bp, Homo sapiens; identical to SEQ ID NO: 3741

SEQ ID NO: 5674 - DNA, 317 bp, Homo sapiens
cctgtattgccatgaactgagcattaggggcagttctgctgagggatcagaagagaagaccaagggaattctgtcccagttgtggctcaaactgcctcaggtgcagcttaacctgcgtctctggaaggtaaaatgcatctgatccttgaggcaagagctgtgggggcatggctccctcacctggatttcaaagcgtgttaccagcagcctggggacccaggctctgcctctggatttacctgcatcgtatttgcgcttcgtggtcaaagttgttaagaaaggggtgagcttctggctacctaataagttggtcttgg

SEQ ID NO: 5675 - DNA, 548 bp, Homo sapiens
ccagaaaatcaagagctagatcaagattccaaactaatagaaaagtatgtttcatccttaaatagatccttcaggggacagtacaagcgcatgtgcaggtccaagcaggcaagcacacttttctatctgggcaaaaggaagggtctaaacagtattgttcacaaggccaaaatagagcagtactttgataaagcacaaaatacaaattccctctggcacagtggggatgtgtggaaaaaaaatgaagtcaaagacctcctgcgtcgtctaactggtcaggctgaaggcaagctaatctctgtagaatatggaacagaggaaaaaataaaaataccagtaatatctgtttattcaggtccactcagaagtggtaggaacatagaaagagtgtctttctacctaggattttccattgaaggccctctggcatatgatatagaagtaatttaagacaatacatcacctgtagttcaaatatgtttatttatatctttatgattttattctctctctctattctcatggcactttcataacattatggctaa

SEQ ID NO: 5676 - DNA, 357 bp, Homo sapiens; identical to SEQ ID NO: 3776

SEQ ID NO: 5677 - DNA, 175 bp, Homo sapiens
  misc_feature (1)...(175): n = g, a, c or t
ctgagttcccttccccaaggtcagctcggggctcccgacgatcatgcagaagtagatgccactgtcttccggcttcacgcttgtgagattgagaatgaaccggcttgccatcccgaaacacagctatcttctcctgttccacctcttcaccgtggntagtccnttttgnggaatc

SEQ ID NO: 5678 - DNA, 346 bp, Homo sapiens
aaattaaaaagatataaacatgtcaaaggaatgaaacctagatgttttattatgtgtgaattatgagcgcttacctggccttgtgtataacgtataaaccttcacctgttgcatgtcattcagtctctgcagcaacattccttgtgtccatgtgggtgtttctatgtgtgactgtgaatatctgtatgtaaatggcttgtctcttgggtgcatttgtgggggtgggtatccaccgctattatcattgctttctttttcagaaagtgtttccaatctttgcttcattttactcaacagaaatgaggaggttggtttatatttcatgtcttttctctttcagatacag

SEQ ID NO: 5679 - DNA, 416 bp, Homo sapiens
  misc_feature (1)...(416): n = g, a, c or t
gcagaataaaaccancnnagactccttttctcctaaccgtcccggccaccgctgcctcagcctctgcctcccagcctctttctgagggaaaggacaagatgaagtggaaggcgcttttcaccgcggccatcctgcaggcacagttgccgattacagaggcacagagctttggcctgctggatcccaaactctgctacctgctggatggaatcctcttcatctatggtgtcattctcactgccttgttcctgagagtgaagttcagcaggagcgcagacgcccccgcgtaccagcagggccagaaccagctctataacgagctcaatctangacgaagagaggagtacaatgttttggacaagagacgtggccgggaccctgagatggggggaaagccgcgtttagcttttgttgcc

SEQ ID NO: 5680 - DNA, 270 bp, Homo sapiens
aaaaatagctttggcttggaacttcagaagataggaaattttcgttattttatttattcttttttttttttttttttttttgagacagcgtctcactcccttgcccaggttggaatgcagtggcatgatcttggctcactgcaacctccatctcccatgttcaagtaattctcctaccttagcctcccaagtagctgggattacaggcatgcaccaccacgcccagctaatttttgtactttcagcagaaacagggtttcaccatgttgg

SEQ ID NO: 5681 - DNA, 278 bp, Homo sapiens; identical to SEQ ID NO: 260

SEQ ID NO: 5682 - DNA, 312 bp, Homo sapiens
  misc_feature (1)...(371): n = g, a, c or t
aaaatctcttnttcctcaggagtcagcttggctcccttcttgcggcccgggggcagngcatagngggactcgtaccactgtcggtacggnntgctgtcnnatgagcacgatgcantncttcaccagggtcttgnnacgaaccagctcgttattagatgcattgnngacaacatcgatgatccttgttttacgagtacaacactctgagccccaggagaaattccccacgtncaacctcagggcacggtatttcttgttacctccccgcacacggactgtgtggatgcggcggnggccaatcttggtgttggc

SEQ ID NO: 5683 - DNA, 220 bp, Homo sapiens
  misc_feature (1)...(220): n = g, a, c or t
aaaagatactttggattcaattaagaagagttttnnagaacaaaagaggaaggttctggcatggggagcntctgcaacccactgctgggtgccagaagcgagcntgtggagcggaagatgaanatggcaccatgtgtctcntaaaccacaaatggaaccacntgatttctatgtgtatttgcatttgcntgtaatgtgtgggaaatcatgaaggttacac

SEQ ID NO: 5684 - DNA, 209 bp, Homo sapiens
tgagtttcttactcgggagctggctgaagatggctactctggagttgaggtgcgagttacaccaaccaggacagaaatcattatcttagccaccagaacacagaatgttcttggtgagaagggccggcggattcgggaactgactgctgtagttcagaagaggtttggctttccagagggcagtgtagagctttatgctgaaaaggtgg

SEQ ID NO: 5685 - DNA, 201 bp, Homo sapiens
ctgtttgagcgagagttctacagtgagatcctggacaagaagttcacagtgactgtgaccatgcggaccctggacctcatcgatgaggcttatgggctcgacttttacatcctcaagaccccgaaggaggacctgtgctccaagtttgggatggacctgaagcgagggatgctgctgcggcttgcccggcaggacccccag

SEQ ID NO: 5686 - DNA, 379 bp, Homo sapiens
ctgcagggcaaggacggttcaaaagtttgtgcgatttaattgctgtcatagcctgctccgccctgggatcgctggacaaggagcggccaaaggtcctgtgtgactttgtgacacacacatcatcagtcttgactgtgctggaacaagtcctccgcagcagcttatgcgttttggagattccgtcctgctcagatttcagtttggatttgcttttgccacaaccagggggaggataacttggcgacctgcgcaaagtagaaaataaatgcaggggagacttcactttcttctctgacaactttttattgtgcaggcaattggatttttctttgctctgtttccactgctgtgtaacaaatgtctgcatgatttttttcag

SEQ ID NO: 5687 - DNA, 225 bp, Homo sapiens; identical to SEQ ID NO: 3741

SEQ ID NO: 5688 - DNA, 357 bp, Homo sapiens
ctgacagttctccatggcaactcagtcctccagcagacccctgcatacataaaggtgcaaaccaacaagatggtgatgctgtcctgcgaggctaaaatctccctcagtaacatgcgcatctactggctgagacagcgccaggcaccgagcagtgacagtcaccacgagttcctggccctctgggattccgcaaaagggactatccacggtgaagaggtggaacaggagaagatagctgtgtttcgggatgcaagccggttcattctcaatctcacaagcgtgaagccggaagacagtggcatctacttctgcatgatcgtcgggagccccgagctgaccttcgggaagggaactcag

SEQ ID NO: 5689 - DNA, 236 bp, Homo sapiens
aaacagctctaagtgtcagtactcatagtggcatattacaaagtaataaacagtgcacacttgagggcaaaccgcatattgagctatggaagagctcactgtgattaagatgagatcaaacatcatagcagaacattagcaaattttatctgaattctgtaatgaacatccatgctgcaataacattaaaaaagcacgggagcctattccaaaccagcgagaacagttttgtgcaa

SEQ ID NO: 5690 - DNA, 270 bp, Homo sapiens; identical to SEQ ID NO: 2914

SEQ ID NO: 5691 - DNA, 289 bp, Homo sapiens
aaaattacattttatttctctttatgaatatttgctttttgttttttgtaaaaaaaaaaaaggttcattttacatcttcttcaagagtcttgtgcctcctggtaagtgcattggtttgtttcacagtactctccacgaccaaggacggttcttattgctggaaggagtgagtggatgtccacgccagggcggggctggaggacataagaagaatcggggccctggcaggaagcctggggcctgtgctccaacaagagcaaggaggctgaaggagcagaccggggctcag

SEQ ID NO: 5692 - DNA, 226 bp, Homo sapiens
  misc_feature (1)...(226): n = g, a, c or t
ctgggctgctcccgccccagcccggcccagggtgaaggaagaggcacgtgctcctcagagcagccggagggaggggggaggtcggaggtcgtggaggtggtttgtgtatcttactggtctgaagggaccaagtgtgtttgttgttnngttttgtatcttgtttttctgatcggagcatcactactgacctgttgtaggcngctntcttacagacncatgaatgtaa

SEQ ID NO: 5693 - DNA, 219 bp, Homo sapiens
ctgacaagaggcacagtcacagagctatgaggacagtcttatttaggcaaaccattcttatactcatgcataccagaaaaatgtctttgtctcttctgtgacactgctagatgctggagatataacacacatcgctgtccctaccctcacattaggggtagctgtaattatattctggtcaagaactgtgatgctaaatttcaattcttactagctttt

SEQ ID NO: 5694 - DNA, 315 bp, Homo sapiens
ccagagacatcctgatcgaccctattcgagtggtgcagggagatattggagaggcaaatgaagatgtgacacagattgtggagattctccattctggacctagtaaatggaactggcttacccggcgtctggtagaatttacctcttcagggagtgtcctcctctttgttactaaaaaagccaatgctgaagagctagcgaataaccttaaacaggagggtcataatcttgggctgctccatggggatatggatcagagtgagagaaacaaggtcatttcagactttaagaaaaaggacatcccagtcctggtgg

SEQ ID NO: 5695 - DNA, 269 bp, Homo sapiens
ctgcctcctgagggtgtggggttattagggtctcaatactttctcaaggggctacactccccatcaggcagcatcccaccagcctgcaccacaggctcccctgggaggacgagggaaacgctgatgagacgctgggcatctctcctctgtggctctaggacgtctgtccaggaggctgggcggaggtgggcaggatgtgagaggtggggagtactggctgtgcgtggcaggacagaagcactgtaaagggctctccagccgcagctcag

SEQ ID NO: 5696 - DNA, 293 bp, Homo sapiens
  misc_feature (1)...(293): n = g, a, c or t
ccatgttcccccgtttgccctcacaaaaaccttgtgaataatacaagccatatggactctgatttacagtttagaagatgagcagaggtgggtgtgagttgcccagtcatgttgctagttgttgaagaaactaggattgttctcaggtcttgggctcctggcccatanaccagtggctctgtgttctgatggggtannggggaggatntttacaaatgcnnattcctgagattgttcctggaacatctccgagtgggtgtgggttgtggccctgcgtgtgtgattttgcctat

SEQ ID NO: 5697 - DNA, 341 bp, Homo sapiens
aaattccagccctctattatcacataccccctttaagatttatggttctagtcacagcaagctctctgtaacactcattggattaggcaaagattgagtcaatcatcttgcaaatgtgttaatcttcaaaaataggctataaaagtgcaaaaccatgaaaacaaaatctagattatgtacatatggctcagcttgtgaacaggaaaaaaggtcaatagtgtacactttcctgaaacaaagcacttcattgcaatgccaacagactgatctcaaatgagttctcccttgtaacacaggagctaagacttctatcaaggaggacatcttacgttgcataattt

SEQ ID NO: 5698 - DNA, 352 bp, Homo sapiens
ccacacagactcaccaagccacagacttgtcttccacaggcacgttcttaccttagccacgaagtgaccaagccacacgtactaaaggttgaactcaaagatatgtacagggtattaaacaaataccaaggggaacagttaacttcaatacaaggtcaaaatcagcaacaagttctacaatccagtgctgatatcagatacaagcttcaaggacaatttcttttcgaaggcttattccagtttcgtgaggctagcatgaggtgtgtgcatttgccaggggcaaatttctattctcaattaacccatgcagcaaatgctacgcatctgctgagtccgtttagaagcatttgcg

SEQ ID NO: 5699 - DNA, 307 bp, Homo sapiens
aaagttaaaaaaactccactacatgccatattgaaagaaaaggttgtttttttttaactgcagcacctttagacaacaaaagattgcatcctgttcaaccacactatataaattataacgtttgtggaaaatatgtacacacaaacataaagcaagtgctctaacagttaataagtgttgtcttggcaagcagtttccagaaacaatactaacaactggtaataagaactgccaccattttgagttttccgttgctatcttcatcaaacaggaagcctgtaaacataagatgttaaaaaaaaaattt

SEQ ID NO: 5700 - DNA, 555 bp, Homo sapiens
ctgaaaaaggacggctcctctaaccatgtttacaactatcaaccctgtgatcatccacggcagccttgtgacagttcgtgcccttgtgtgatagcacaaaatttttgtgaaaagttttgtcaatgtagttcagagtgtcaaaaccgctttccgggatgccgctgcaaagcacagtgcaacaccaagcagtgcccgtgctacctggctgtccgagagtgtgaccctgacctctgtcttacttgtggagccgctgaccattgggacagtaaaaatgtgtcctgcaagaactgcagtattcagcggggctccaaaaagcatctattgctggcaccatctgacgtggcaggctgggggatttttatcaaagatcctgtgcagaaaaatgaattcatctcagaatactgtggagagattatttctcaagatgaagctgacagaagagggaaagtgtatgataaatacatgtgcagctttctgttcaacttgaacaatgattttgtggtggatgcaacccgcaagggtaacaaaattcgttttgcaaatcattcggtaaat

SEQ ID NO: 5701 - DNA, 373 bp, Homo sapiens
cctgtctcctgaatgatagctgtaattatcaaacttctgaatgaagctttattgcaccatttacaaggattctccattatggtggtcctgagactactggggcatgctgagctatggctgaagcactgatgttatcttaaacaaatgttttccctcttccaagaatgggtgaaatttatcaccagcatggattcagagataaaatactcaaagggaagtgcttactatgtgcctcatattttaatgtgtctctcctttgtgaaccttcagatgagactgcattcatgaagactgagtgaagactttattgcaccatcacatcactaaggtttttctccaacatgaacattctgatgaagtcgaaggcttgagg

SEQ ID NO: 5702 - DNA, 354 bp, Homo sapiens
ccacgttggtttcactctggggcctctggaaggacgctgagcttaggtcgggccggaaggcgtcaatggcgtgctcacggttgttctggtccagcagcatgaaggtgaccttgttccggaagggccacggcagcagcgcatcatactcccctctcatgatcacgatgaagagcgacagatgggttctctttccagtgccatctccattcaggtacagccgcaggcacaacttgtagccatacttggcagtgtagaaggctggggagaagaggctgacggtcctgccacaggccgactcatggcaccgcctggtgacattggtgatcttccacaggaaagtgccatcgaaggagg

SEQ ID NO: 5703 - DNA, 495 bp, Homo sapiens
aaacggaatgaatgtggcttttgggggcaaaagaaaccaagacactacattgtctttattttctcctatcccagtgcatttgagaaccatgcataagggaatgctgtgctacaaagctgtacccaaatatgaaaacaaaataggaaacttaaaaagcaataccccctttagaaagtttttattttcttaaatgtcattgagttgctttgattctattggatttttggcattttttatgggatcatcagttggttccaagtatgttagatcagctaacatctgctactccagtaacagcctcgtacaactgcaggtaggttttctccagaccaattagttttaatagagcaaactaacaacagactgtagtagcatggttatggcaaccagaatcttcagaaaggttaggacattactttttaagctgtcagtggtatcaaataacttacctagttggaggcagataaaggatcccttacgttttttcctataagg

SEQ ID NO: 5704 - DNA, 212 bp, Homo sapiens
  misc_feature (1)...(212): n = g, a, c or t
tttttttttttnnntttttttttttttttttgggtacagnanattatttatttctgttatttnngaataaaatttattttatggcttaggatctatgacccctgccttganaggganaatgggataggggagtgaagggaagctggcggnggatggggcaacanaaaanatgcancaggcagggccctctcatacactggagggccacatgg

SEQ ID NO: 5705 - DNA, 322 bp, Homo sapiens
aaaaagcataatatgcctatagctgaaaaggaaacagggctgtttaagtcactgacttatgagaaagcaaagcactggtacagttatttaacaggcatacacaagcagggaaaagataatccatttagatctttaatgctttggaaatgcgtgtaacagtactgcaataatcacagctctgggaaaaacaacgaaactttcccttgtggagaggagggattttcctgctctatataagcaacatatttttagacattaaaatatatataattttgcaggtaattgttgacttttttaactatattaagtgttaagctgacaa

SEQ ID NO: 5706 - DNA, 270 bp, Homo sapiens; identical to SEQ ID NO: 2914

SEQ ID NO: 5707 - DNA, 274 bp, Homo sapiens
ccagagggaaggcccaagagacgtctctgaagccaccgttcctgattattcagaggcagggtccacagtgagtgactcggtggggctggaggaacccagggtgacccagagggggctctggagcgggtccctaacatctgaaaaagtcctcccagggaactcggagctggaacttccaggcagcttcgggggtgacatttgtatccggccagccgagcggggaaaggagaccttgtgtcctggcaacagggagagccgggactgggatggacct

SEQ ID NO: 5708 - DNA, 291 bp, Homo sapiens
  misc_feature (1)...(291): n = g, a, c or t
aaaattctttanngagagagggatggtttctgaggggttctgaaagtatgattcaatgtgcaacatacaggtaggtcttcagcataagctgaaatatatgcatgtaaaaactttgacatctttttttttaattttccactttcttcttaactttacttctctttttgtccccccccatcttacagaagttgaggccaagggagaatggtaggcacagaagaaacgtggcaaactgctctgtgctttcaaaccaaagtgttccccccaaccccaaatttgtctaagcactgg

SEQ ID NO: 5709 - DNA, 219 bp, Homo sapiens
  misc_feature (1)...(219): n = g, a, c or t
ccatgccacccntgtgcaaacagaggtgtacacacaggagtgcantgatacaggacacanataaacagaatgtacacagccttcaggaaggatctcaagggttccgagtctgaggaagacataaccttgtgcctgcctgcccacctctctctctggtcctgttcatctctcannctctgagacactgaccttcactgctcagntaaaggttccagggat

SEQ ID NO: 5710 - DNA, 284 bp, Homo sapiens; identical to SEQ ID NO: 413

SEQ ID NO: 5711 - DNA, 447 bp, Homo sapiens
  misc_feature (1)...(447): n = g, a, c or t
ccagttctggtagttattaaaccatgcattggaagaccctgctggaatataagatgcagagcacagaaagaaaactaagtgaagaaagaattgtttcggagccttgtaaggaatactcacgtcctccttctccaagctgggctccctgaagttggcaatttcatcaaaacagtatccacttaaaagtacccttaactttttcttccaaagttacacagtagccccaagttctacaatgcccacttcatgttttcctgaggcaccctggagacgccaaaagcatttgagaatgaacgggcctttntttttttttttttttttgagcccaggctggagtgcagtggtncgatctcggctcactgcaacctccaccccctgggttcaggtgatttttctgcctcagcctcccaggtggctgggattgcaggctcccaccaccgtgcgcgg

SEQ ID NO: 5712 - DNA, 325 bp, Homo sapiens
ccaccgctgggaggaggtggatgacttctttacaaaggaaaatggtagcagcttcagtgagaaactgcccttacaaacagtcccttctctgctgtcaatccaatactgctcccaaatcctgttttcagtgttcatttccctcaaggcaggcgctgggctcccacgacccctcaggacagatctggccgtcagccgcgggccgctgggaactccactcggggaactcctttccaagctgacctcagttttctcacaagaacccagttagctgatgttttattgtaattgtcttaatttgctaagaacaagtaataagtaaattttt

SEQ ID NO: 5713 - DNA, 257 bp, Homo sapiens
cctaaaaagcaggggcttcatgcagatgcagcagggacactcccaccaagccatcctgggctttggtcatgggtcccacgccaagcacttggacaagtctgttaggaaagggggtggcacatgctcttccgccatctggaaaaacatggagatccaagggagggcggaaagggtccttgcaactcagtcagcttagagcctcttattgcttatttagtcagaaaagcctggctgggcctagacggcaaaagatttgg

SEQ ID NO: 5714 - DNA, 227 bp, Homo sapiens
cctgccttgggcagctcagtggctctgaactgcacggcttgggtagtctctgggccccactgctccctgccttcagtccagtggctgaaagacgggcttccattgggaattgggggccactacagcctccacgagtactcctgggtcaaggccaacctgtcagaggtgcttgtgtacagtgtcctgggggtcaacgtgaccagcactgaagtctatggggccttcac

SEQ ID NO: 5715 - DNA, 424 bp, Homo sapiens
aaaatgtcatcaccatctctcagatagcaaatattcttttacatcatctgcacacaaacacctgagaacaaagagtacgatgcttttccccatctaacaagaagccaaggtgccacgaagtacagcagaattgcagtcctagtacctcgctgcgacactgctactgtacttgtttccagatggctaagctgaattcaaggccactaccatattgagctgaatgctcgctcagcaactcccaatgaaagcaagaagcatgtatcattgcccccgtctctaagagacacaaattaaggactgcgaccactttacacccactaaaacctacaagatacaacacaacccaattaccaccttcccttgagaaaaacatagaccgttttcattctgccgtttgttacttaccaatgccaaaattcttagg

SEQ ID NO: 5716 - DNA, 474 bp, Homo sapiens
cggaattgctctcccagcccttgcattgcagaggggcccatgaaagaggacaggctacccctttacaaatagaatttgagcatcagtgaggttaaactaaggccctcttgaatctctgaatttgagatacaaacatgttcctgggatcactgatgactttttatactttgtaaagacaattgttggagagcccctcacacagccctggcctctgctcaactagcagatacagggatgaggcagacctgactctcttaaggaggctgagagcccaaactgctgtcccaaacatgcacttccttgcttaaggtatggtacaagcaatgcctgcccattggagagaaaaaacttaagtagataaggaaataagaaccactcataattcttcaccttaggaataatctcctgttaatatggtgtacattcttcctgattattttctacacatacatgtaaaatatgtctttctttttt

SEQ ID NO: 5717 - DNA, 373 bp, Homo sapiens
tttggtcctcctgcagatgctccagtggctttgaccgctatcgccaggagtggatggactatggctgtgcacaggaggcagagggcaggatgtgcgaggacttccaggatgaggaccacgactcagcctcccctgacacttccttcagcccctatgatggagacctcaccactacctcctcctccctcttcatcgacagcctcaccacagaagatgacaccaagttgaatccctatgcaggaggagacggccttcagaacaacctgtcccccaagacaaagggcactcctgtgcacctgggcaccatcgtgggcatcgtgctggcagtcctcctcgtggcggccatcatcctggctggaatttacatcaatgg

SEQ ID NO: 5718 - DNA, 274 bp, Homo sapiens
ctggaagccttgttggcccctaagcctttgtttcatgctacagtactgaggggtatgtgtccccaatgcacagccacccgcacacaactcaatgagcttcctgggaaacactattcccccacctccaccttaggtggctgcctcagttttccaaccacaggaatcagtccctcagctcctgcctctagtctccaccccaaaagttcagtcgtctctgtcttggagggcactgtcggccccctcaggttgaagttcaacactcctcaatgagcag

SEQ ID NO: 5719 - DNA, 198 bp, Homo sapiens
ccagctcttacatagttaggtgaggaaagattagagtactatctttaagatgtaagtctggcattgtggaaagatggttccagtttctatgacctaccttggggaagaggaattcaagtttctgtggcttgccttcagggagaatgaggctgagacaggagggcaggattacatcagagaaaaactttgcttctgagg

SEQ ID NO: 5720 - DNA, 165 bp, Homo sapiens
ctgaagtggttaatcatggtgttacaactagacatttagtcctgcttcaattcttgcagagctgaatcaactcaaggaactaaataaaaagaggaaggcaccgaggtaagggattttttttacctgcccgggcggcgctcgagccctatagtgagtcgtattaga

SEQ ID NO: 5721 - DNA, 252 bp, Homo sapiens
ctgagttttatgaccttgagtaaaagtttaatctccctgggtgttcaagctcttttgccagtaaaatgagacaaatagtacctatctcatagggttgtaagaattacatgagatagttgatgaaaagcacttagaacagggcatagtacaccatatgcctactccattcgtttattgaatgtatctttagaaatgtatctttttcaagggcctgacatgtctcagacattgttttgaaatattgaggtacta

SEQ ID NO: 5722 - DNA, 356 bp, Homo sapiens
ctgagaaacagattaaacatttagagattgaaaagaatgctgaaagtagcaaggctagtagcattaccagagagctccaggggagagagctaaagcttactaaccttcaggaaaatttgagtgaagtcagtcaagtgaaagagactttggaaaaagaacttcagattttgaaagaaaagtttgctgaagcttcagaggaggcagtctctgttcagagaagtatgcaagaaactgtaaataagttacaccaaaaggaggaacagtttaacatgctgtcttctgacttggagaagctgagagaaaacttagcagatatggaggcaaaatttagagagaaagatgagagagaagagcag

SEQ ID NO: 5723 - DNA, 154 bp, Homo sapiens
accacggggtgcctgaggatcctcacttgctcctcaaactgagaaggagagtgaatgccttcagcaatttcttcagtggtcccattgtggtgcactgcagtgctggtgttgggcgcacaggaacctatatcggaattgatgccatgctagaagg

SEQ ID NO: 5724 - DNA, 288 bp, Homo sapiens
  misc_feature (1)...(288): n = g, a, c or t
ccattctttataggaataatcagtttaatcaagatgagctagcattgatggagaaatnncaagaagaaagttcatcagcttgctatgaccgtggtcagtttccatcaggtggattatacctttgaccggaatgtgttatccaggctgttaaatgaatgcagagagatgctgcaccaaatcattcagcgccacctcactgccaagtcacatggacgggttaataatgtgtttgatcatttttcagattgtgaatttttggctgccttgtataatccttttgggaatttt

SEQ ID NO: 5725 - DNA, 357 bp, Homo sapiens; identical to SEQ ID NO: 5688

SEQ ID NO: 5726 - DNA, 409 bp, Homo sapiens
ctgtgcccagaggacagccaggcaggccctgggagggagtttagaaagacagtcctggtgaatgggcttcaagtggtcacaaagagggtggctgtgaggtgaccccagacactgcagaacgatgtgcaccctctgcgttttggatgtccttggaatgtgggagcctagaaataaccctgtggatggaattggggcagcggctgctggagatctgtgtgccttgccttccttcagcaggaccgtctaggtgcgcagccacctatggatgcgtcccagccagccccgtcgctctcgtccatcctcagagacaaagaagagggcagggagtttgggcttggttttgaactttcctttcaatgtagcaaagcattcctagttaaccagagccttggaatctactgcctgctgg

SEQ ID NO: 5727 - DNA, 380 bp, Homo sapiens
ccatgatgtaatctgcaatctgctgtaatgctagtaatccagttgggttgtggcctttcttcatctgttcttgaataaggcattccaagtcttcccgaaaggcaggactttgcaggatctgagtaactcgtttcctctgctccatcatgttgaagtcttgtcgtagatcaggagacatgttcctctccctaatgtattctgggtcattttcattgatgcggtcaaaatatctctctttgtgaggcatgctgggaggaggaggagtggtaatcacgccttggctggcatccgagctcatgttttaagtctgtggattactcttgttataaaaaaattgaagtgctgtacatttcttaagctggtttttgtgtggcaattct

SEQ ID NO: 5728 - DNA, 443 bp, Homo sapiens
ctggtacacggcagggtcagggttctggatatcaggtaaaacagtcaattgtgtcccagatccaaaggtcagttgccttgcagaaccagaagactccatgtcacccacgaggcagtagtacacagcagtgtcgctcagggaaacccggggcaggctcagagtgctggactttctgtcggcagggataaacagggaggccacttcgtttgtaacttttgtcttgtatccttgaataataaatcgtggtccttggctgggaaactgttggtaccacgtgatgtaatcatttgtagcaatgttgttgtggctacaggttatgttcacttcttgtccttcatatgagtccatggagatgggctgggtggtctcagcaaggctcaaagtactcagggtcaggaacacgatcactctcgccacttgcctcatattctaggtgcaaacta

SEQ ID NO: 5729 - DNA, 328 bp, Homo sapiens
ctgagttcccttcccgaaggtcagctcggggctcccgacgatcatgcagaagtagatgccactgtcttccggcttcacgcttgtgagattgagaatgaaccggcttgcatcccgaaacacagctatcttctcctgttccacctcttcaccgtggatagtcccttttgcggaatcccagagggccaggaactcgtggtgactgtcactgctcggtgcctggcgctgtctcagccagtagatgcgcatgttactgagggagattttagcctcgcaggacagcatcaccatcttgttggtttgcacctttatgtatgcaggggtctgctgg

SEQ ID NO: 5730 - DNA, 368 bp, Homo sapiens
ccattgagcgccggggcgtagagattgaggaagggggtgtgaaagtgaagctgacccttgtggacacacctggctttggggactcagtggactgctctgactgctggcttccggtggtgaaattcatcgaggagcaatttgagcagtaccttagggatgagagtggcctgaaccggaagaacatccaggactcccgagtccactgctgcctctacttcatctcacccttcggccgggggctccggcccctagatgtggccttcctccgggcagtacacgagaaagtcaacatcatcccagtcattggcaaagcggatgctctgatgccccaggaaacccaggccctcaagcagaagatccgggatcag

SEQ ID NO: 5731 - DNA, 282 bp, Homo sapiens
  misc_feature (1)...(282): n = g, a, c or t
ctgtcagaactcatncnnatcccaaggttggggaatactcaaacctagaagtaaatgcatcttggacaaaagagagatggaaccaagagtttactaagcaccaggttctcattatgacttgctatgtcgccttgaatgttttgaaaaatggttacttatcactgtcagacattaaccttttggtgtttgatgagtgtcatcttgcaatcctagaccacccctatcgagaaattatgaagctctgtgaaaattgtccatcatgtcctcgcattttgggactaa

SEQ ID NO: 5732 - DNA, 229 bp, Homo sapiens
ctggctaccgactccaccttctccctggaccagcccggtggcacccgggatctgaccctgatccgtgcccgcctccaggagaagttgtcacctccctacagctccccacaggagtttgcccaggatgtgggccgcatgttcaagcaattcaacaagttaactgaggacaaggcagacgtgcagtccatcatcggcctgcagcgcttcttcgagacgcgcatgaacgagg

SEQ ID NO: 5733 - DNA, 358 bp, Homo sapiens
  misc_feature (1)...(358): n = g, a, c or t
ctggaggctcccanncatactctttggtgagaaatgattaattttatattttcattttgatgagaatcttttcttgtttttaccagttataaaaacaaagctttttctttgttgtgatactgtgcactaagacttagtttcttgagctgatgctaaataaaatgagatcaataggaatattccaggaggtcgtgagaagtttttagaaaggatggcatctacatatatatggagctctgaaaactgttggagagtatgacctgggactgaaactgtggagcacatagccagtgtcacaggctccgagagcagagagagtttgctctgggacctggaatgagtgatggagaaatgtttt

SEQ ID NO: 5734 - DNA, 152 bp, Homo sapiens
  misc_feature (1)...(152): n = g, a, c or t
ctgcagcgcgtgggcgctggagtacatttatctctggaacttgtcattggctttgtttggctctggaaacaaagacttgcctgggcctttccgatgtaaacttccagcccttggtgggtgggggagttnnatgaaggtgccgcgtccnggtg

SEQ ID NO: 5735 - DNA, 496 bp, Homo sapiens
cctgtgctgggtgctgaggctacaggggcacagcaaggctcttcccttgagaagccactgatgtcactgggtcactcgaggtaagcatgtttgaaagggctgaatcaaagaacaaggcaggaagtccacaaggccaacggaaggtcccagagaacaagcagagctcagaggctccgaaggcatcgaggaggagggtcagtattggcaagcaggagcagcccctcagctctggcctgccctcaggccacaccctggcccatgggcttcttgcacacccactgatagggggtgtcacaggtcatgtcattccacttctgctgaatttggacacagtcttcagtctgcccattcttgtgccgccagttgtcagactgattcttttcccaaaacccgaagacaacagggctttatactgttagatgaaggcagcatcccttcctggtgctgtggctcctagggagctgacatgggatgagtctagggagctgacttgaga

SEQ ID NO: 5736 - DNA, 117 bp, Homo sapiens
cctttattctattacacagagtagggctggggccagggcaggtcattctcaggctgcgtcagaaggtgcagagcgttcgggggacacaggccgaaccccaaagtgataataagttac

SEQ ID NO: 5737 - DNA, 328 bp, Homo sapiens
ccaggcacagcaacgtgaatctcaccatcttcaccgcccgcctctgctacttctgggatacagattaccaggaggggctctgcagcctgagtcaggaaggggcctccgtgaagatcatgggctacaaagattttgtatcttgttggaaaaactttgtgtacagtgatgatgagccattcaagccttggaagggactacaaaccaactttcgacttctgaaaagaaggctacgggagattctccagtgaggggtctccctgggcctcatggtctgtctcttctagcctcctgctcatgctgcacgggcctcccctccatcctgcaccag

SEQ ID NO: 5738 - DNA, 432 bp, Homo sapiens
ggctgtgccgttggtcctgtgcggtcacttagccaagatgcctgaggaaacccagacccaagaccaaccgatggaggaggaggaggttgagacgttcgcctttcaggcagaaattgcccagttgatgtcattgatcatcaatactttctactcgaacaaagagatctttctgagagagctcatttcaaattcatcagatgcattggacaaaatccggtatgaaagcttgacagatcccagtaaattagactctgggaaagagctgcatattaaccttataccgaacaaacaagatcgaactctcactattgtggatactggaattggaatgaccaaggctgacttgatcaataaccttggtactatcgccaagtctgggaccaaagcgttcatggaagctttgcaggccggtgcagatatctctatgattgg

SEQ ID NO: 5739 - DNA, 359 bp, Homo sapiens
ctgtgtcccctctgagggtggcatggtgaagcctgactcccagattggagagtttgccccatagatctcctcctccagcatggacaggaatctgccatccccagactagtactagcaagttgcttctgggccatgggcaagtctgccaggtagacgcccagatcccaaaaggcccatggagggagaggagggaccaatccaggaagccttcctggaaaaaaggggacaacagggaggatgtgaacttggggccaaatcctggtaggccagaaggagccttacttggggaagtgagtgaggatgagggtcctcttctcgggcaccaatttgtccttctccactcggaacttttccagcag

SEQ ID NO: 5740 - DNA, 263 bp, Homo sapiens
aaaatgcatgtattataatcatataatcataactgttgttaattcttgattatatacctagggacaatgtgtaatgtaagattactaattggttcttcccaatctcctttcagattttattaggaaaaaaaaataaacctcctgatcggagacaatgtattaatcagaagtgtaaactgccagttctatatagcatgaaatgaaaagacagctaatttggtccaacaaacatgactgggtctagggcacccaggctgattcag

SEQ ID NO: 5741 - DNA, 288 bp, Homo sapiens
  misc_feature (1)...(288): n = g, a, c or t
ctgccaaatggtgtcacttaccacactggaacatatcaagaccggttaacaaagctacaggataatcttcgccaactttcagttctcttcaggaagctgagattggtatatgacaaatgcaatgaaaactgtggtgggatggatcccattccagtcgagcaacttattccatatgtggaagaagatggctcaaagaatgatgatcgggctggcccacctngttttgctagtgaagagaggcgagaaattgctgaagtaaataaanaactcaaacagaagantcaacag

SEQ ID NO: 5742 - DNA, 194 bp, Homo sapiens
  misc_feature (1)...(194): n = g, a, c or t
cctctgtgccgcaccattgaactgcaccatgtgctacaggggccagaagatgaacagactgaccttgatgagctgtgcacaaagtggcataaaaaacatgtggttacacagtgtgaataaagtgctgcggagcaagaggaggccgttgattcacttnacgctttcagcgaatgacaaaatcatctttgtgaagg

SEQ ID NO: 5743 - DNA, 198 bp, Homo sapiens
ctgggctaggtccaggtgctgggagcccacggtatcgtgaactcgtgatgtcagggttctggatgtccactgtcgccagccccagggagagcggacccactggagggcctccttggtctccacctggatgcaggggcaggggtgggagccctcctcttctctcttcattggctggtgttggtggtgggggtagctggc

SEQ ID NO: 5744 - DNA, 353 bp, Homo sapiens
  misc_feature (1)...(353): n = g, a, c or t
ccacatccacactgagggcctgtgtgtgaccatgctcaccttgcctcaggtctgggaagatccgaggtatctcctggagaagccatctatgatgtcattggggaaatgccgctagcaggactgtacgaggaaatcatggaggccgaggctgtgctccaagatgaggaggacggaagtgtggtgaaggtggacacagaagccgcagtttcaggggaggtgtctaacctcctggagggacagtctatacgtgcggagggaggacacagcagacctgtttctcagggatatgacgaggctgcgtttcctntggaggagatgacgttgtnaagcaacctgaggatgagatacaccag

SEQ ID NO: 5745 - DNA, 286 bp, Homo sapiens
ctgagggtcctacacctaccattcagccatctgggcccaggtggggccctgagcctggcccaggccctggatggatccccccatttggaagagatcagcttggcggaaaacaacctggctggaggggtcctgcgtttctgtatggagctcccgctgctcagacagatagacctggtttcctgtaagattgacaaccagactgccaagctcctcacctccagcttcacgagctgccctgccctggaagtaatcttgctgtcctggaatctcctcggggatgaggcag

SEQ ID NO: 5746 - DNA, 317 bp, Homo sapiens
ctggtccagaccacacagagctccaaagggcaggagccagaaacattgggtgaatggacagtcacagttgtttatggatgcattttctaaaacaacctctttaccttctttttcttggtccaagtacttctttatgttttccgctctgtccatgtatttggaaattttttctctgagattacatctcttagtattatctttggtacctttcagaacctgcaggagcagatcaatcccctcttggtaacacaccagagcctgcggataccgcgactccgaatctagttctactgcccgctttagcacagtggctgcag

SEQ ID NO: 5747 - DNA, 322 bp, Homo sapiens
ccaaacccctgcacgtggctgccgcctgggttttccaaggagagcacgccggtgtcgcttgctcctgggtttcttttattttttcctgttgttctatttctgggttaaagacagaacattttaagataattttccaggtcaaatacactcatttgatgtttttctttgtgaaggttttagctcagtactacacagtgacagatgagcatcacagatccgaagaggaactcctggtcatctttaacaagaaaatcagcaagaaccctacctttaagttattaaaggacaaagtcaagcttgtgaaatgaacatttgtgtattt

SEQ ID NO: 5748 - DNA, 240 bp, Homo sapiens
aaattaaaattccatttaactaaagatggttaaccccaagaaattgtacagtagttgatttctgctatataatgccagtcctatgccatacaataagaactgcaacattagctgtcacttcctccattgctcttctggaccctaagggatgagggaggggactcagacacaaaacacaacccaaataaactgtgcagtgattcctaatagttataaacccaatctaagttgtccaaacag

SEQ ID NO: 5749 - DNA, 292 bp, Homo sapiens
aaaagaaatgaagtctaaaacctcacttttccttctagccttacaaaaattgcctgacctctcaagacttttaatcacttcagggattcttgtgacattcaactgagatatatgtgaacacaccctatacacagcaaagcactaagtagtagtagcagaagacagtaccaccgacttttcttgttcccacataagcatttccctttagggctctaagatgaggtcatcatcgtttttaatcctgaagaagggctactgagtgagtgcagattattcggtaaacactcttagg

SEQ ID NO: 5750 - DNA, 401 bp, Homo sapiens
  misc_feature (1)...(401): n = g, a, c or t
cgtggggttttggctcaggaggacctcgtgggactgctggagcccatcaacacccgcatcactgatccccagnacttcctggacacgccccagcaggcggcagccatcttacagaaggtaggaagacccaacctccaattacaaatggacatattccactggcagatcatggatgggaacctgacaggaaacatccgggagttcctgcccattgttgggcatgtgcaggtggcacaggtcccaggccgaggggagcccagcagccccggagagctgaatttcccctatctgnttcaactgctggaagatgaangctacaaangcttngngggctgagacacngtagagggcttgagttggctacgttcatnctgggatnngcggggccacccanaggctgg

SEQ ID NO: 5751 - DNA, 408 bp, Homo sapiens
  misc_feature (1)...(408): n = g, a, c or t
ccacagtaaaagagttaaaatttcataagtagaagtttagttatttaggcttgtaatttatggctctgtcacctangaattttaagactttgagtttttaccaacccaacttcacagttccaaaatcccaggatttataggaaaggcttcaaaactaactgtcaattctgatttgctaagcatttaagaatgtaaatattaaatcagcattcattttcatttaacatttaacatggaagtaaaaattctcactttttgcctaacaacaaaactagaaaactaagacatctttcaataagttcttaacactcactggacaatttctactgcaagtcatntcaactaatgggacaaagagatgtgggaaccttcccgtagtccaggataggaaccgctngactccttcac

SEQ ID NO: 5752 - DNA, 380 bp, Homo sapiens
  misc_feature (1)...(380): n = g, a, c or t
ctgatatcaaacaccttgcacaccagctcctctccgctgtgcagatgcacggcacgaaaaacgtggtctccctccagaggttccaacaataagtatttcccgatacaagaaacgcaatgcgacaagttcggagtctcgggcgggctcggggagccgaggttcgggctgaaactctggctgggctccgcggaccttatagacgacaactcttcgaaatcctgggttttgttccgcgatctcccatatctcgctattgtgatgggggtagacctgtgtatgttcatgantgtgaggatcgcncacgacaaacaaaaanaaacccgctggagagatgagtcnctggcgagtgcggctgcaggcgcctcggtgccactgatttt

SEQ ID NO: 5753 - DNA, 156 bp, Homo sapiens
  misc_feature (1)...(156): n = g, a, c or t
tattttattcttaaaacttaagcatggtaaaatgttaagctgttttcatccactgatattattctactataaaaagcccttcttgancagatttgatgataaaaangagaacattnctaaggtataattagagaagctgntgcntganaaatcatg

SEQ ID NO: 5754 - DNA, 339 bp, Homo sapiens
  misc_feature (1)...(339): n = g, a, c or t
ctgcgatatctactccagattccttgtaagtcaaactcctgggctgctggaggaaagctatggcacgaaagccgatgtctttcctataaattgctccctcaaactttatagcagctagtcctttcttggcttcctcaagggctgatatgaaattttcccggatggctgtgactgcaagaactctacccccatgagttactactttgccatttttgagggcagtgcctgcatggaacacctccagtcctagagcttgagcctcaggaaaccctagaagagagcatatttgacacatgattncaaatagcaacagtatttcacaccgtgaagtgatttacg

SEQ ID NO: 5755 - DNA, 186 bp, Homo sapiens
ccttcagcccctctcccggagatggaatcgcggggcagggaggggcagggtgttctagaggtgagaagagggcctggtggagattccctgtcttctgagcccgagcccctcattaccagtgaaggacatgcttgaggggttcgggaagctcctcatctgaggcaactggtcctgggggtgctcagg

SEQ ID NO: 5756 - DNA, 554 bp, Homo sapiens
  misc_feature (1)...(554): n = g, a, c or t
ccggaatgaggggattgatttgacgcacaatcctgagttcaccacctgtgagttctacatggcctatgcagactatcacgatctcatggaaatcacggagaagatggtttcagggatggtgaagcatattacaggcagttacaaggtcacctaccacccagatggcccagagggccaagcctgcgatgttgacttcaccccacccttccggcgaatcaacatggtagaagagcttgagaaagccctggggatgaagctgccagaaacgaacctctttgaaactgaagaaactcgcaaaattcttgatgatatctgtgtggcaaaagctgttgaatgccctccacctcggaccacagccaggctccttgacaagcttgttggggagttcctggaagtgacttgcatcaatcctacattcatctgtgatcacccacagataatgagccctttggctaaatggcaccgctctaaagagggtctgactgagcgctttgagctgtttgtnatgaagaaagagatatgcnaatgcgtntactgagctgaatgatcccatg

SEQ ID NO: 5757 - DNA, 230 bp, Homo sapiens
aaaaagggagattagaaatgtcagtcaagaagatcaacttttagtctagcattctgacatcaagtgaattcagtgtctgtggtcagggtgtgcaaacttatatgtttaggtggaaaatgtttgaatatcaccctgtggaagggctatagtctggaggtatctgaaaaggtctgacaagaacagcaacaatgtctttgcactaaaatctgaaaattcccaatgtaactttt

SEQ ID NO: 5758 - DNA, 217 bp, Homo sapiens
  misc_feature (1)...(217): n = g, a, c or t
cttttttttttttttttttttttttttttttanacaggaagtanaatttattggtgagtnttaanaggggggcancncattggaagccctnatgagtgcagggcccgccacttgtccagagggccacgactggggatgtacttgaccccacagccatctgggatgagccgcttttcanccaccatgtcttcaaattcatnancattgagcttggtga

SEQ ID NO: 5759 - DNA, 357 bp, Homo sapiens; identical to SEQ ID NO: 3776

SEQ ID NO: 5760 - DNA, 405 bp, Homo sapiens
  misc_feature (1)...(405): n = g, a, c or t
ctgtagctcatatttcatgttggggtcatgccgaacacccatgaagttgtagttccacgaggactgggcagggaccatgaagaagccaaggaaacggtccgacagcagcatctgcaccctctcatagtgtgaaggcaggtagcccttggggttgttgcccttgtctgtgttctggcggccccattcgtagccactgggggtcagcttgtaggccgtcagtgtacaggagcctggcgtgaagctgcatgtgatgataatgntcttctcgccatcccaagatgggttgtcagccatgatcttggcatgggtggtgacatcctggggtgataactgcggggactcattgggctgagtgtggatccaacctaagggttccatctncttgaggtactcatgctggggcag

SEQ ID NO: 5761 - DNA, 363 bp, Homo sapiens
  misc_feature (1)...(363): n = g, a, c or t
aaacaaatccaacnngaaattcttgangcaccttctnatataaaacacaagatgaatgcaattatcaatccatctgagaaaagttttnaatctaaatgaacatcattttttccatttaagtatattttacagaactttaataaggcaagacaaatttnnngaaaaaagatgtagatncaaaaatgatgtaaactaataatttatattaaaaaaccccaaagggatancangtggagatggnacanctcaaacaatgcctttttttaacctaaaacaganttgtgcacnagctgaagatgacaaacancttctagactctgcacagttttggttttttttttaacatctttatattacatgttt

SEQ ID NO: 5762 - DNA, 396 bp, Homo sapiens
  misc_feature (1)...(396): n = g, a, c or t
ctgagaaaattgatggagtatttgctgcctgtcagagtggctcttttgacaaactagaagctgtggtcaaggtaaagtcagcttactaactttggggaaaggaatattaagtcatcataccaaaagttttttttattataggatttaatagatgagggtcatgcagcaactcagctcgtcaatcaactccatgatgtggttgtagaaaataacttatctgataaacagaagtctattatcacagaaaaacttgccgtaagtaggtactttgcacatgtcaatggaacatttaactacctgaaggatgctaatttcttaaatttttctcgtaggaagttgacaaatgcctagcanatggtgctgatgaacatttgcaactcatcagcctttgtgcaa

SEQ ID NO: 5763 - DNA, 288 bp, Homo sapiens; identical to SEQ ID NO: 414

SEQ ID NO: 5764 - DNA, 442 bp, Homo sapiens
cctacagtgagattgggatgaaaggcgagcgccggaggggcaaggggcacgatggcctttaccagggtctcagtacagccaccaaggacacctacgacgcccttcacatgcaggccctgccccctcgctaacagccaggggatttcaccactcaaaggccagacctgcagacgcccagattatgagacacaggatgaagcatttacaacccggttcacccttctcagccactgaagtattcccctttatgtacaggatgctttggttatatttagctccaaaccttcacacacagactgttgtccctgcactctttaagggagtgtactcccagggcttacggccctggccttgggccctctggtttgccggtggtgcaggtagacctgtctcctggcggttcctcgttctccctgggaggcgggcgcactgcctctcacag

SEQ ID NO: 5765 - DNA, 382 bp, Homo sapiens
cctgcaaaggctgcgttgtagaggaacacaatgtagaaattgcccagccagttgaagcgtccaaagccacccagcaggtcaaagcgagtgagccccagggttcgagagaagacaggaagtgctgagcttaggaccaggagacagacacagttcccaattatctgcgtcatggcagtgtcgtgccatctgggccgcaggctccggaagagtggagagctatagaagcccacaactgaggacaccattaggtaaaagatgagtacaacctgaatgacggcaccaaaggagcccagcttggagaaggagacctggcctaaggaggtaccctgcatgcctcggggcatggcagcctcatcgatgagcagctccaggatgtggatgg

SEQ ID NO: 5766 - DNA, 259 bp, Homo sapiens
ctgtacaaacagcgagcttcccgccttgtccaaagacgacaagatgatattaaagatgaatcttcggagttttcaagccattcaagtcagtccatcttgaagacaaagctctgatggcaccaaatcttgactcctttggacgcgatcgggcactgtatcaagagcatgcaaaacgtcgcattgcagagcgggaggccaggaggactcgtcgtagacaagccagagaacaaaccggtaagatggcagatcaccttgaagg

SEQ ID NO: 5767 - DNA, 333 bp, Homo sapiens
ctgtggagctaggccctgagaacacgaccaccctccctcttccctcagcctcaagccgctgaagccactgctgcttcgccgcctcgtaagcccaatggtcagagctggaggctagacccttcagtgcttgggttgagggccagggtgttagattggttcttggagaaggaacgagggcccaggattcttcagcttcttagtttttgacaaattgagctgaggccccatagtcctcgggagggacagggttgagtgccataagtcggcaaaccagggtaaaggtgacaggcagctcagccaagctgcagggggtggcatatacagaggacctgg

SEQ ID NO: 5768 - DNA, 261 bp, Homo sapiens
ccagtggaaagtctcttggagagactttgaggtttgtgatgacaaatcatgctatcgttaaagttaaatacatatatatacacacctagaatataagcagaatggaaaagttggcagggatgaattcaagaacattagagtgaatttttttcattacagaattgttagttcctttaggaacttagtctcgtagatgtatatatttaattagcataacttggacagcacaagattaatgctttaacttgtttgcaggagttt

SEQ ID NO: 5769 - DNA, 151 bp, Homo sapiens
  misc_feature (1)...(151): n = g, a, c or t
accacggggtgcctgaggatcctcacttgctcctcaaactganaaggagagtgaatgccttcagcaatttcttcagtggtcccattgtggtgcactgcagtgctggtgttgggcgcacaggaacctatatcggaattgatgccatgctaga

SEQ ID NO: 5770 - DNA, 303 bp, Homo sapiens
  misc_feature (1)...(303): n = g, a, c or t
aaatgattatggaataacataatatttagagcagggcagataaatcagttgaacctgcttattttttatttattgtactctttttcctgttgctgttcctttctgcaggagggaaaacccctgatcctaaaatgaatgctaggacttacatggatgtaatgcgagaacaacacttgactaaagaagaacgagaaattaggcaacagctagcagaaaaagctaaagctggagaactaaaagtcgtcaatggagcancagcgtcccagcctccatcaaaacgaaaacggcgttgggatcaaacag

SEQ ID NO: 5771 - DNA, 357 bp, Homo sapiens
  misc_feature (1)...(357): n = g, a, c or t
ctgagttcccttcccgaaggtcagctcggggctcccgacgatcatgcagaagtagatgccactgtcttccggcttcacgcttgtgagattgagaatgaaccggcttgcatcccgaaacacagctatcttctcctgttccacctcttcaccgtggatagtcccttttgcggaatcccagagggccaggaactcgtggtgactgtcactgctcggtgcctggcgctgtctcagccagtagatgcgcatgttactgagggagattttagcctcgcaggacagcatcaccatcttgttggtttgcacctttatgtatgcaggggtctgctggaggactgagttgccatgganaacagtcag

SEQ ID NO: 5772 - DNA, 207 bp, Homo sapiens
ccaggctgtagtaacaggctcgcatgcgctgctccacggtcaggaagtcggggcgatcctcccacttgtagatccagcagtcactcatgagtgcgtacagttcgggtggacactctggtgggcactccatccgcttgccctgctcgatgaaggccatgacctccggccctttcatcttcttgtagggcttctggccgtaggacaagg

SEQ ID NO: 5773 - DNA, 275 bp, Homo sapiens
  misc_feature (1)...(275): n = g, a, c or t
ctggtggggtcagtggaagttctgtcactggatctggtttcagtgtctcagaccttgccccaccacggaaagcccttttcacctaccccaaaggagctggagagatgttagaagatggctctgagagattcctctgcgaatctgtttttagctatcaagtggcatccacgcttaaacaggtgaaacatgatcagcaagttgctcggatggaaaaactagctgntttngtagaagagctngagactgacgagtggcggtttaagcccatcgagcag

SEQ ID NO: 5774 - DNA, 280 bp, Homo sapiens
ccttcatgcacttttgacagctcagtacctgtgagaacagaagtgatgcagggactttttaacccacaatgcatgaggtatatggaaatgtctgtgaaagaaccaccagcagctagagggaccaggcaaagttttctcacagcaactgctgatgaaggatttcccacaccatcttcttccggaagagaggcatctggtgctgagtaaatgtgataggtttgtccctagaaatataatctgcatatttacaagtaaacattccacaatcactcccattcag

SEQ ID NO: 5775 - DNA, 302 bp, Homo sapiens
  misc_feature (1)...(302): n = g, a, c or t
ctgcccggccccagacccatctcttggattgagggtgtgtgggctggaaccagtgggtcactgtggcagcttcatctgagccgaaggtgtgggtcctctgtggctgtgcgattgacctcgatgggagggagcgttcggcccattttccttgttttcagtgctgcggtatcagtcagtgatctgaggaaatcctgtaggggaaggcaggctgcagtgaaaacaggagctggtgaaaccganccctctgcatctgcgaatgtgccctaggtgctgctgctggggacatggatgccgagcggagg

SEQ ID NO: 5776 - DNA, 129 bp, Homo sapiens
  misc_feature (1)...(129): n = g, a, c or t
aaagtgctattcattgatcttaaatgttccatgaactgttaaatttcttaagttacatanttactacaccacatttatgtgtatgttatgtcttaatagtcaangataggtatntacanttgataatat

SEQ ID NO: 5777 - DNA, 466 bp, Homo sapiens
aaataacaggctagatctgttttcccttaccactcattttgcaaaactcaactggcctaaacatttcgctcaatcttgagttctgcaggttggtccctgagagctaggttggccttgggaatttctgctcaattttaagttctcaagaatctgagggcagccgatttagactgaattagagtcatcctataggtcagaaagaaagaatgctagacaggtcaagagggccagaggttggttctgataatgccatatgacctcaggcacatctttttgagttttagtttccccatctctaaaaacggatgattggacaacagcaagcttaacagactttccaccttgaaaatacggcacttctctgacgcttagaccttaagtcctgaagcgttgttttctcagcaaaaacagtgcaaagtccttacaggaatctaaggtacaagccctgggcaaccatgaaaacttt

SEQ ID NO: 5778 - DNA, 255 bp, Homo sapiens
  misc_feature (1)...(255): n = g, a, c or t
ccatggatctcaaggaccccaaccgcccccggttcaccctgcaggagctgcgggacgtgctgcacgagaggaacgagctcaagtccaaggtgttcttgctgcaggaggagctggcttactataagagtgaagaaatggaagaggaaaaccgaataccccaacccccacccatcgcccacccgaggacgtccnccnagccggagtcgggnatcaagcgactgtttagcttcttctcccgagataagaagcgcctgg

SEQ ID NO: 5779 - DNA, 445 bp, Homo sapiens
ccacagttgtggggcagccaaacactccttcagggaaatgggaagagaactggtggctgctagggggtggggcaagtttcctggcagggaggtgtgtcccagggtcctgcacccatggcagagcccctgctctaatatccccttatcattcttatccctgctggaccccaaactccagagatgcccattaccttgttcaccccatgcccttagcctcagaacaggcactgtgaaggtggagccacagagcagcactggtgcggcggggaccgaggcaggaggagggacagcaggcggccctgggggagcctgtgtgttgttgccagcctactctctatctggccccagccgggaagccactcagaaatccctaagaacaatccaaagggagcctagccagatcccgggtgtcacaggacacagtctgacccagggttacgccagg

SEQ ID NO: 5780 - DNA, 338 bp, Homo sapiens
cctccaagttccggaccacggtcacctttttattagacgctctttgtgctagggtgatgtcaattggacagattctccctttcttcacaatgggctcttgtccgggaagggtcacttgataggcaggctgtaatttttccaaacacctggtcagaagactgtcccatggaagcttcatgactgtatgctgttcatttttctctaagatgcagtcacataggatgggatccaatctcacaagatttttgttgtctgcatcaaccaggtcatttttcttggcgtagttaatgacgatcgttcggacctcactgccctccagaaagctccccttcttgtgg

SEQ ID NO: 5781 - DNA, 508 bp, Homo sapiens
ctgcttgtaaccactgtgtttatgtcaaagcattcattttttttaggatatctggaaaaatgccatataagagaaaactctataaaacatctataattttcgaacccaagtacactcttgcattctatgctttaagttaaatgcaaactcctttttccttcttcctgctgcaagtactatctcatcctgatgctcaagagtgtcagggcctgggtttccaaacagagactaccctaaaattatttggggagtagtactttacacaattgcctctcccccacaaatcataattgtttcagtaaaatggttacttggtttttccaagaaaaaactcgtttttactcacttttggcctgtttgtttatttagaaactaatctggattcactccctctggttgatacccactcaaaaaggacacttctgattaagacggttgaaactagagatggacaggttggtatcttttaaggaaaaaatagggtaatctcagacaggagttgatatat

SEQ ID NO: 5782 - DNA, 188 bp, Homo sapiens
  misc_feature (1)...(188): n = g, a, c or t
ccacagttgtttgatgcattaaaagaaaataaaaaanagaaaaaagagaaaagaaaaaaaaaaagaaanaagttgtaggcnaatcatttgttcaaagctgttggcctctgcaaaggaaataccagntctgggcantcagtgttaccgttcaccagttgccattgngggtttcanagagcctttttcta

SEQ ID NO: 5783 - DNA, 372 bp, Homo sapiens
ctgttccttctgtgttttctccagtgtcctcacatcaaatccaggagaattaggagagaggagagcactgacttcagaaagatagcagatgaaaatgtgattcatttttattatgtgaggatgtagagatgtattctgtaatttgacttgatatcaaatattgtcacagagggtgtgtttcgttatagggataattatgtgctgaaagggaaactcttcaaggctattgctgagttctatgttttctccttcccatagcccttattgccttctaacataccatgtaatctagttatttattgttttttgtttgttaactgtttccccctgctgggatataagtctccagagggcaggaatctttgtcatttt

SEQ ID NO: 5784 - DNA, 330 bp, Homo sapiens
ccagacacacgtttgttgagtacctactatgtgtcagtcacgttccgaggtcactgtgtgtatgagccaccgaaccctcctgacatgccttatgaagtggctatggtgattaacctcactttacagatgagagagggaggggtctgtctatggggatgtgaggcagtggtagaggcgggatgtgaacccacgatgggccccagagctcacattcctaaaatggtctgctgcgggtgctcctgtttctcatgggtgggcccagacctgaacatgtgtatgcacagagaagacacatagttacatgtgcacctagaggctcgcttttggagg

SEQ ID NO: 5785 - DNA, 339 bp, Homo sapiens
ctggaagaagaaaagaaagcaaacaatgagaaacagaaagctgaaagggagctagagggtcaaatccagagattgaacacagagaaaaagaaactaaatacggacctgtatcacatgaaacattctctcagatactttgaagaagagtccaaggatctggccggccgcctgcaacgttcatcgcagcgtataggagagttagagtggtctctctgtgctgtcgccgccacacagaagaagaagccggatgggttctcgagccgcagtaaagcacttctcaagcggcagttagagcagtccatacgggagcagatactgctgaaaggacacgtgacacag

SEQ ID NO: 5786 - DNA, 429 bp, Homo sapiens
  misc_feature (1)...(429): n = g, a, c or t
cctggttgctgttcatcctaaatctgttaatgtggagcaaacagactttcactacaactggcttatctatcacctaaagatgagaacaagcagtatatacttgtatgactgcacagaggtttccccatactgtctcttgttttttggaggtgacatttccatccagaaggataacgatcaggaaactattgctgtagatgagtggattgtatttcagtctccagcaagaattgcccatcttgttaaggaattaagaaaggaactagatattcttctgcaagagaagattgaaagtcctcatcctgtagactggaatgacactaaatccagagactgtgcagnactgtcagctattatagacttgatcaaaacacaggaaaaggcaactcccaggaactttccgccacgattccaggatggatattacag

SEQ ID NO: 5787 - DNA, 141 bp, Homo sapiens
  misc_feature (1)...(141): n = g, a, c or t
ggtncacaattgngccctcagctccatggcccaggacatccttgggacagaaggaaattttcccaactatcaccacgctggtttcctcatctgggacanaatagngaaaaagagattgtttcaaacagatatcacctaaag

SEQ ID NO: 5788 - DNA, 486 bp, Homo sapiens
  misc_feature (1)...(486): n = g, a, c or t
ctgcatttttgaacaccatggaaccccaagcctttcattttgcctgggccacccgttacctccggtccagtgaactctccaggctggagaaggatctccctttggggggccgcagtccccagatcccctccgttcccgtgcctgggtcctctgcatctcctagttcccaggttgggcgctgccactgggtgctaccgctgggtacatgccagtagtaagtacctgcagcatcgtggatcttcctccagccaggaggcaggccagcctccacctccagactgtggtccccccacaagtcatctacaggaacaccgnattagagaggagggagcatatgatttgtgagttcagaataacatgctgtcataatcccctctccatccccaaaatgggtcagttcttaggctgaagatccaggctcctcaatcttgaagacatcacatgtnaagaccgggttcattcnccccctggtccctacacagagag

SEQ ID NO: 5789 - DNA, 323 bp, Homo sapiens
  misc_feature (1)...(323): n = g, a, c or t
ctggagcgagaggaggaagtcacaggccctgtcattgcgcctctcttcccgcngaaacgtgaanagggctggtgggtggtgattggagatgccaagtccaatagcctcatctccatnaagaggcntgaccttgcagcanaaggccaaggtgaagttggactttgtggccccagccgctggtgcccacaactacactctgtacttnatgagtgacgcttacatgggatgtgaccaggagtacaaattcagcgtggatgtgaaagaagctgnnacngacagtgattcagattgagtcctgaggcatttacttnttnggtaaagga

SEQ ID NO: 5790 - DNA, 146 bp, Homo sapiens
  misc_feature (1)...(146): n = g, a, c or t
tctaatcttggggcctcngacaccccaaatctatatattgaccantggaagttgatgaatttgttatcaaaattcnaagcccccatgggaaaccccctttctttcttgtggnagaatttccagntcctttacagntatttgaaant

SEQ ID NO: 5791 - DNA, 255 bp, Homo sapiens
  misc_feature (1)...(255): n = g, a, c or t
aaacattagtgttcatagcttccaagagacatgctgactttcatttcttgaggtactctgcacatacgcaccacatctctatctggcctttgcatggagtgaccatagctccttctctcttacattgaatgtagagaatgtanccattggtagcangcttgtgttgtcacgcttcttcttttgagcaactttcttacactgaagaaaggcagaatgagtgcttcanaatgtgatttcctactaacctgttccttg

SEQ ID NO: 5792 - DNA, 268 bp, Homo sapiens
ctgttcctgagagatgcaatatagtagtcatcgacatcatccttatcaacagcatcatcactcagacagtggtgaaagtctttcttcacaaggaaaaacaaagataaagaaatacatgagcattaatcagaaattttcaaagcttggattctaatgatatgcattatcattagacattcaaatgctatacatcttctgatgaagcctccttgacagcagtctacacttatttcacattagaatgcctagagaaatcctgactgcccag

SEQ ID NO: 5793 - DNA, 482 bp, Homo sapiens
  misc_feature (1)...(482): n = g, a, c or t
ctgcattgaggtgaccccaggggacaggagttggcaccaaatggtagtgagagccctatcctcccaggagtccaagccagagcaccagggcttggcagagcctgagaacgaccagctcccggaggagtaccaacaaccgccaccctttgcccctgggtactgctagagaacaggtccaccctggctctgggactcgctgccaggggctgccacactcctgaatgccttaacatttcttccatggccccacaccatggcatccgggggtcttcgggaacccgggaaatggaataaagatgtttttggggtctgttcctgcactcacccatggggtgagctggttattttagcaacaatcatcagagtgacgctgatggtttggggcaccagctatacatcagccccagtgccagaccttctattcattattttacgcctcanagcaaggccctcagggagggtcatcctccatgttttgaaga

SEQ ID NO: 5794 - DNA, 254 bp, Homo sapiens
cctgccagatatttgtgagaaatctgccattcgatttcacatggaagatgctaaaggacaaattcaacgagtgcggccacatgctgtacgccgacatcaagatggagaatgggaagtccaaggggtgtggtgtggttaagttcgagtcgccagaggtggccgagagagcctgccggatgatgaatggcatgaagctgagtggccgagagattgacgttcgaattgatagaaacgcttaagcagttgcctttttt

SEQ ID NO: 5795 - DNA, 135 bp, Homo sapiens
ctgaagtgtggcttgcgtaaataactgtttattccaaaatatttacatagttactatcagtagttattagactctaaaattggcatatttgaggaccatagtttcttgttaacatatggataactatcttctaat

SEQ ID NO: 5796 - DNA, 205 bp, Homo sapiens
ctgccatcacatcggacatattggaggcccttggaagagacggtcacttcacactctttgctcccaccaatgaggcttttgagaaacttccacgaggtgtcctagaaaggatcatgggagacaaagtggcttccgaagctcttatgaagtaccacatcttaaatactctccagtgttctgagtctattatgggaggagcagtctt

SEQ ID NO: 5797 - DNA, 141 bp, Homo sapiens
  misc_feature (1)...(141): n = g, a, c or t
aaaagtttgaagactctcacaggtaagtgcagctcaggatcctgtgagtgcagcagaaagtcttaagaaatggcaggggctggttgaacccagattttccattggctgancanatatccccagtaggtgtaaaaaatttca

SEQ ID NO: 5798 - DNA, 312 bp, Homo sapiens
  misc_feature (1)...(312): n = g, a, c or t
tttatttggttacagtgaataacctggacaaaatgttgagaagagttgttaaaacaagtttacattaaatatactaacaattacgtttggttacatatttgtaagtgatggttatttagaaaaactgcatagaaatccaaaccttaaatattctgcaaatcaaatcattagcttttctcttctctaataaagtagggtgactagttcttggattaatctanctataacattantgtancactctgattatcttatggaataattctctatctcatntaaccctcacaacaaccctngtaaagtatnatcccc

SEQ ID NO: 5799 - DNA, 131 bp, Homo sapiens
  misc_feature (1)...(131): n = g, a, c or t
ctgctagttgtgcttgctgggataaatcttcgatcttggcttccccaaaaactatgtaagtatctgaagcagggctcttgtagacatctggntttgtgatgacaaagaggatattcttagatttccggata

SEQ ID NO: 5800 - DNA, 504 bp, Homo sapiens
  misc_feature (1)...(504): n = g, a, c or t
aaaagaaattcagaaactaagcggttggagaggagcattggaaatagagggggatgctatgagatgggggttgggagcagagaagaaactgcaggagggcaaagtgtaactagcaatataccttctgtgatgctccagaaacacatgtctgctaagattaacttgattggagtttcttatgaaacaggctgatcatcaagatttttaactcaggtttcagtgaaaaaattggaaacttttacaagaaagatttgagaagtagaaggcaggcagcaaattttccagatattatgcttgcatttcaaattcctgtttcaggcttttcaagtaggcatgcacattcccaaagccatgatatttggctaaatacacaaggaccccagtcgcacaccgccatctcgctgcccggcagaaactgcagttgcagattcctcnacaaggcgggcaatgcccagttcggatccacanancttcccttgacctcttcncccttaacggtttcaa

SEQ ID NO: 5801 - DNA, 252 bp, Homo sapiens
gaaagatggcggctaccttactagctgctcggggagccgggccagcaccggcttgggggccggaggcattcactccagactgggaaagccgagaagtttccactgggaccactatcatggccgtgcagtttgacgggggcgtggttctgggggcggactccagaacaaccactgggtcctacatcgccaatcgagtgactgacaagctgacacctattcacgaccgcattttctgctgtcgctcaggctcag

SEQ ID NO: 5802 - DNA, 420 bp, Homo sapiens
  misc_feature (1)...(420): n = g, a, c or t
ccatgagtgacaggtggcctcttggtgggagaggtggggcagggggaaggcagctcccactagaccagggcagtatttaggggaaggaggcagattggagcagttggctgccaacacctggcctcactcagggagaggggccttgggcctggaagatatctgggtgaggtacccacaccatctgctgcaacctctgtgtatccattatgggctcgcgccattcacaggcatgaattgagcacctagtatgtgggaaaacaggggaaacagagatggcacagacatggtctccatccttcgggggctccagtctanttgggggagatcagagaagttccatttgccactctaggccaagctaggtaagcggnanagccatgaacattgtgggagcttggagganggagttgaccccttgca

SEQ ID NO: 5803 - DNA, 400 bp, Homo sapiens
  misc_feature (1)...(400): n = g, a, c or t
aaactagccacagaccaaactagatctgcattcatccagcgctggaattttatgctaaatactaaggtcctttatcttcttggtcagaagtaggcaacagtaaaagtggtgctttgttgcgccactgaaaccgctccctgggtgggtcttccccgtatcatgtgttggtagcacatgcaaacccctgcttttacggaaaggactgcttggaactttgggacctgtccagggctcatgtgctgtgcctccggataggatgaagctacagatgataaaacagctacgtataaaagcagatggattttgtatagggacatataaataggaaaggtcctggaggaagggacttatgcctgggccccaaagnccagtttacagtcacattcctgaccatacatcg

SEQ ID NO: 5804 - DNA, 265 bp, Homo sapiens
  misc_feature (1)...(265): n = g, a, c or t
aaagatttagtgcttaacattttcccaagtgtgggaacattatttttagattgagtaggtaccttgtagcagtgtgctttgcattttctgatgtattacatgactgtttcttttgtaaagagaatcaactaggtatttaagactgataattatacaatttatatgcttcacatagcatgtcaacttttgactaagaattttgttttacttttttaacatgtgttaaacagagaaagggtccatgaaggaaagtgnatgagttgca

SEQ ID NO: 5805 - DNA, 223 bp, Homo sapiens
  misc_feature (1)...(223): n = g, a, c or t
cctcggtgggtcttgcggggcagcttcttggtgtgccaacgactggtgacccctttgtagcctttgcccttggtcaccccgatgacgtcgatcatctcatcctgcccaaacacttggttcacaggtacctgctgctcaagcctctcgcggcccatccagcttctcggccacagtncctccgttcacctgnatctccatcaggtgggccttcttctggcgcaga

SEQ ID NO: 5806 - DNA, 430 bp, Homo sapiens
  misc_feature (1)...(430): n = g, a, c or t
anaatatttacacttaaagacaaaacatttccacaattattacaattggtttcactaaatcagaagtgactacacattatctctacttttataccagaaaacaaaatgaagaaatcaacaaaatataattactaaaactccactgtggatcagggataaaatgtgtccaatattaactcacactttcccaataagtataaaaatgaatataacattgcttggacaacttgtttcaacagcgaatcctctattactatttgttcaataacatatataaattcaaaactggcaggtatgaaaaaaggttactttgttttttgcagatactgtacttgtaaaataaagccaaataaagcatatgtcacacataccaaagtcttacattttgcctttctaatacaagcaagtgaaatattaacacatagcattt

SEQ ID NO: 5807 - DNA, 518 bp, Homo sapiens
gataaatgctggtcagatgtaagtgtgttgtctgcaattcatcaggattaaattatgtagataacttaagggatatctctgcaaggagaaacacctttttagatcttttagatgctgcttcttcaatgcaaggaaaggaaataaccccagcgaggtactcttcagggacacaggtctagtacaagagaactcttgacggctactaagttcagccagtcttaaaaaactgtgctgtttctacaaaactttaactacagtagtttataaggatgccaacgaaagctgagggtgtagagcaaaatagttctaagcttcagttaaacttctttaggtaagatcttatttacttttcctttcttaattttcctccctaaaagataaactaatactcttaaatggtctttcagtaaagtggttcttacgtagtttaacatagctataaattgagtttaacaatttataaactcaagagaataatttttataaaccctgttttccaatctgtcatttacttaaat

SEQ ID NO: 5808 - DNA, 388 bp, Homo sapiens
ccaagcgctcagatcggcaaggggcaccagtcttgatctgcccagtgcacagccccacaaccaggtcagcgatgaaggtatcttcagtctcccccgaacgatgagacaccatgacgccccaaccattggcctgggccagcttgcacgcctgaagagactcggtcacggagccaatctggttgactttgagcaggaggcagttgcaggacttctcgttcacggccttggcgatcctctttgggttggtcactgtgagatcatcccccactacctggattcctgcactggctgtaaacttctgccaagctccccagtcatcctggtcaaagggatcttcgatagacaccactgggtagtccttgatgaaggacttgtacaggtcagccag

SEQ ID NO: 5809 - DNA, 501 bp, Homo sapiens
cctgtaagcaaaattccttccaaatttccagcctctttcatttcattggtcaacttttcgatgtatctatttaactgagtatcactaaggaatttacaagcaaatgccactctgtcacgtactgcaactttgttttcatacaaaactccatcgtaagatcctgtttcacttgtcagaaatgcaaacatgacacacaaatacgggttatttagctgtaatcgcagtgtgctacacatttctctccaaagggagttcttctcatccgtataacccgataaagccattgctaccacattgagattcagatctcctttttcagaagatgccccttcattcaggatttggattgctcggcgaatatccaagttgaacaatgccacagcagcagctctttcccattccccttcttgtacaagggagttcaaaaatggccccacgtctacatccgttcctttctttatccacccacaaagctgtaaagctaagattctctcttcattt

SEQ ID NO: 5810 - DNA, 404 bp, Homo sapiens
  misc_feature (1)...(404): n = g, a, c or t
aaaaaattaactaataaaagcttttatatttaagaactgcaagtgtttcaaaactatgctgttttgtgttgttatagttgtaacatatttctcaattttcctgtttttcttttagtttattgacaagactacctggtcggcctaaattccattttcattcagtttttgggcatttgagatcaaagagtaagtatggnttctacagttacttcatttttctacttatctttttaagttttttctccaaattttgacttcttttatatgtatcatctatactcagcatgaagtccagttttttctattatatacatgttttcaattcgctccctgaagcanncttttaatttcttcatcttcnaataaatgaccatcaccaccttcaatgaatctggngacccttg

SEQ ID NO: 5811 - DNA, 375 bp, Homo sapiens
  misc_feature (1)...(375): n = g, a, c or t
cctgaggtgggtgtggggagagacagcacgttcccgtactggttctggggcccgcttcctgggggaggcgtcactttgaagaatctggcgggagaagaggaagtgcacggtgagggccgacttggaatggaatggcggacccactcaagattctgtccaggccttcagaagttaaacgtgatcacttgtgctgggacagccaatagaggagtctgagatgatcatttccaaggagttcttcacagaggaggtagctttggagctgggctttgaggttggncagtatttgaaacagtanagacggancaaagaacccctgggcagaggaaacagtaagtgcaaggcataaagtgaacgtggagggtgttaccgccg

SEQ ID NO: 5812 - DNA, 90 bp, Homo sapiens
  misc_feature (1)...(90): n = g, a, c or t
ccaggcacaccantgtggccttttgggtgtgggagatctctgcttctgatggctcaaacacagcgacctcgggtgggaacaccttgttca

SEQ ID NO: 5813 - DNA, 222 bp, Homo sapiens
  misc_feature (1)...(222): n = g, a, c or t
ctgacgcagctctgcctctttccgttttgccttcatctgctctttcagctcctctgtcaagcgctccttcttctctttcaacttgtctactgctttctcatcccagcgccgngccttggccttcaggtcactggccccaccagagatcactcctgacttctggaatagggntccatccagtgccactgtcttgtggcgctggtggtctncaaaggcaatgcg

SEQ ID NO: 5814 - DNA, 419 bp, Homo sapiens
  misc_feature (1)...(419): n = g, a, c or t
cctgttcattttttttgtctttcccaaatcttggtagtctccttatagttgaagataaaatgttgagtgcacttattttagaatatcctagacataactgtctaagtaaaagcgctctattaatctaaaacactacaagagaatttaacaccatctctcaaatgcttttttggagagcttaatgggattctgaatatttgcaatgtggagtttccgccccgatctcacgtcagtgagggtctcctgtctctcaagtgtgtttcctttggctgttccctaatacaaaacacggacatatttttactcgtagcactcaatttagtaacttctagatgctaccgttgacctgagttaaattcatttagtcgtgnacgtaaaaactctccttttagtgngntattttcttggccttccctttt

SEQ ID NO: 5815 - DNA, 306 bp, Homo sapiens
aaaataatgcttatagtatcagtgaaggcttatggtaatgaataaaagaattctcatgagacagaaacaatgccccaatatctattatcatcaatctatctgtatttttttttataaaaatgcaatctacaactaaccaaaactcaacaggctctcaagtttcaatgagcccctttatattatcaattgtacatacctatcattgactattaaaacataacatacacataaatgtggtgtagtaaccatgtaacttaagaaatttaacagttcatggaacatttaagatcaagtgaatagcacttt

SEQ ID NO: 5816 - DNA, 444 bp, Homo sapiens
aaacaagaacttgctaaagaaacctcatcacaacaacgttttagggcctgatcactttaagtccatggggccattaatgaatatcaaccaaatgtctctttataatctgcaagccgtttttcctacaacaagaaggcgtaacatgtttccttgactcaggtgataacattagaaaagaaatcatgatttgtttcttttgctgtaacaggcagacactgcatttcttgctataatcaggaaagatggaacgactgctgcccttctcttgctgctatcaacagtttttcacgcattatctcaatgcttgaatagtccggcaacttaagatagttcacacaagtcattacagagggcaagaagtcatctgggttttctgttgattcaaacgtctttcggacaattgtcaaaggtggattcaaactccggaatcctccaacaggcaat

SEQ ID NO: 5817 - DNA, 314 bp, Homo sapiens
ctgctcggatcaggcagttctggagccataggagcgggatagaaaagccttcctgatgcaggctttgaccaaggttttcatttgaaaggactaagctaccctggacttgttctgcttctgagcccccttcttcttcctcttcgctgcttcctcaggcaggttttcctcttcttccagatcttcctggcaaaaatctttcagggactccgctccatttggcaagatggaggatgccaactttttctgccgtttccttgtacagctcccgccgctcagccaccagccccagagccaagagtttatccactattcgg

SEQ ID NO: 5818 - DNA, 246 bp, Homo sapiens
  misc_feature (1)...(246): n = g, a, c or t
cctggaagtatttcactgttggaagaagtaaacaagaatgacattccagatggaaatagaattctctctcttgcctttgaccaacatggtactaaggggtttcttctttcccaatgtatgtacgtgccctgctgggggccttactttatanaatgagagcatccgagnttccctaatgaatctggctagttcntgtgtctgggctgangatacnggantgggacatccactctcggatccctcaga

SEQ ID NO: 5819 - DNA, 286 bp, Homo sapiens
  misc_feature (1)...(286): n = g, a, c or t
ccacaagatatgttctagagacgtccatgagtcctcttgctgtgtgggagcggcatccacagacttctggaataattggcctgtgaggaagctcatcaaagctgcaaacagtacaatgaatgcaatagagagccagagggccttattagcctttctgatggaggacttgagatttgttgcccaggaagctattgtgtcataaactgaagagacatcccactttgatggattatttttcttttcagaangacttggcttccttgncctttctactgtttcttctcca

SEQ ID NO: 5820 - DNA, 438 bp, Homo sapiens
gttctgaaaccgttcttccaccactgattaagagtggggtggcaggtattagggataatattcatttagccttctgagctttctgggcagacttggtgaccttgccagctccagcagccttcttgtccactgctttgatgacacccaccgcaactgtctgtctcatatcacgaacagcaaagcgacccaaaggtggatagtctgagaagctctcaacacacatgggcttgccaggaaccatatcaacaatggcagcatcaccagacttcaagaatttagggccatcttccagctttttaccagaacggcgatcaatcttttccttcagctcagcaaacttgcatgcaatgtgagccgtgtggcaatccaatacaggggcatagccggcgcttatttggcctggatggttcaggataatcacctgagcagtgaagccag

SEQ ID NO: 5821 - DNA, 341 bp, Homo sapiens
ccttaggacaatgggggctgtggcatgcgtcaggttacctgccttgatatgggatcgtgacaggcccctccctatgtgcaggagacaagcagcccaagaaacaggagaaaaacccagtgttggtgtccccatagtttgtggatgaagctctgtgtgcgtgcgaggagtaccttagcaacttggcccacatggacatcgacaaggacctggaggccccgctgtacctcacccccgagggctggtccctcttcctccagcgctactaccaagtggtccacgaaggggcagaactcaggcacctcgacactcaggtccagcgctgtgaggacatcctgcagcag

SEQ ID NO: 5822 - DNA, 443 bp, Homo sapiens
ccaaaaacttcagcataaaaactatcctgtctgtgtattatatatatttattaccaaatttaataaacaaaaaccacttttgaaccaggtaattttatctagtgtgaaaagaaattaatcacatggtcatatactggctagtgctctctaaaagtagacattaaaatatttcataattggagggaatctttggagattagtggcatctaatcttggggcctcagacacccaaaatctatatattgaccagtggaagttgatgatttgttatcaaatttcaaagcacctaatggaaaccccacttcatctctgtgaagattttcagttcctttacagttatttgaaattatttcaattctgtggagccacttcagaaactccaatgggcctttgcaatattaaaatgtggagaatgcattaatcattatttaatcaatgagttt

SEQ ID NO: 5823 - DNA, 178 bp, Homo sapiens
  misc_feature (1)...(178): n = g, a, c or t
ctggcgctcctcccagcagccactcagggaaagaaagtggtgctgggcaaaaaaggggatacagtggaactgacctgtacagcttcccagaagaagagcatacaattccactggaaaaactccaaccagataaagattctggggaaatcatggctncttcttaactaaaaggtctcat

SEQ ID NO: 5824 - DNA, 502 bp, Homo sapiens
  misc_feature (1)...(502): n = g, a, c or t
ctgttgactcagattcggcattttaattacattgtttccaagtatgatattctgagagtgtctatagcacttagtgtctgcttcatataaactaccagttattatatatttatgatgcaagtagttttccaaatgtggtgaaagtctgagtctttttatccccatgggtaaaatctgaatctggctctctgtgtctctcagtgcttgtttattgctggtcagagagtaaattcttgataaaagctgttgacttggctctcacagtttatgcagacattggagagacaatttggttatttcaaacatcacaggatttgagtaagaagacctggttatgaaacaaggctctcataattactagttatgactgttgacaagttaccttttcttgtttacaagttatttggcctctttgaattacttgtaaaatagagatagggattctttcttgatcatggaacatcaaatgaagntatttgatgaaanactttgtcatctggaa

SEQ ID NO: 5825 - DNA, 503 bp, Homo sapiens
  misc_feature (1)...(503): n = g, a, c or t
ctgaagagtcctgtagagtagagtgatttttgtatctccaaccctcctcccaacttgaaacaaattctcaagcttctctggagcatcttttggtcacatgaccctcgatcatggtaacccttttgctaagacacatgtgacaccaaggtttcctctgacactgcttctctagggttcagatgacagcataaaacatcactggtcaaaaatattagatattaagaatgtgggcgtttatgttcgtaacagcaaatactttgtagggtgtgtcacccaaaggagcatttttgtcatttaatatggnccccggggagttagcccaaaatcatacaaataagcctttttctaaagacaggtcaaagttggttaatttaacagttgaggaaccgtctcatgccaattaaaaaattcttacttcccaactattcaatggtccaaaaagcaattaaatgtgaccattcagttntacacacatgcacacacacacacggagacgcgcacac

SEQ ID NO: 5826 - DNA, 333 bp, Homo sapiens
  misc_feature (1)...(333): n = g, a, c or t
cctggcctcttcagagtaccccccattccactttccctgcctccttccttaaatagctgacaatcaaattcatgctatggtgtgaaagactacctttgacttggtattataagctggagttatatatgtatttgaaaacagagtaaatacttaagaggccaaatagatgaatggaagaattttaggaactgtgagagggggacaaggtgaagctttcctggccctgggaggaagctggctgtggtagcgtagcgctctctctctctgtctgtggcaggaggcaaagagtagggtgtaattgagtgaangaatcctgcgtagagaccattctca

SEQ ID NO: 5827 - DNA, 502 bp, Homo sapiens
  misc_feature (1)...(502): n = g, a, c or t
aaaatagcatcagtaacttttgagctcatgtcaatcaagcattggcagtcagagattttatagggaagactaagtaaatccagtttccaagaacctaaactgattgaggctccaagagtcagaccaacaaaagttttattctgtgttgtttactggtaagaatattattatcttgatactacctctcaagggtattgttacaaaatgccacttatggttaaagagatagatacaaagagttctatttgacagaagcttgaaactctggcatctatctgcccaacgatgggggctttcgttctgtaatttaatcctttgtagatacattatttgtgtgtaattttatacgtgttcatatttttctcattttgcattgtgtaaagtgtacaaaatctcaaagtataaaatactgcttatattgcttgtaatttacagtgtgtaaatattttctaattgtgtacattgatgggggggacaagtgggttattcangtttttttttn

SEQ ID NO: 5828 - DNA, 112 bp, Homo sapiens
  misc_feature (1)...(112): n = g, a, c or t
ctgtgtagtaaagatgccttctggtgaatttgcacgtatatgccgagatctcagccatattggagatgctgttgtaatttcctgtgcanaagacggagtgaaantttctgca

SEQ ID NO: 5829 - DNA, 101 bp, Homo sapiens
  misc_feature (1)...(101): n = g, a, c or t
ttccatttatctttctacagggctgacattgtggcacattcttanagttaccacaccccatgagggaagctctaaatagccaacacccatctgttttttgt

SEQ ID NO: 5830 - DNA, 442 bp, Homo sapiens
  misc_feature (1)...(442): n = g, a, c or t
ccaaggcatcatggtgcgtggtccccttgagagacttgccgttgatggaaagaacctcattgcccttctgaatagtcccttcctgggaggccagcccatttggaaacactctgtgaaccgtaatcaccttgttttctagatctgctcctcctgccaagctgaacccaagaccagcaccttcctccttgtgtaagatggtgacatggatgccgcctaattgctttaatgttgtttcatccagaaccttcacctcctcgatgagtttttttaattcttctgagctcagcagggagataacggactgaccagactgaagggaactgtggtccccatcatcgtcttccttggcttccgtgagaccctctgtatattctctcagctctgaaaggttgagcgagaaccctgtgtccaaggcagatgtttcagnaagaaccatttgcag

SEQ ID NO: 5831 - DNA, 123 bp, Homo sapiens
tacagttgtcctgatttcttattgaatttgttagactagttctcttgtcctgtgatctgtgtacaattttagtcactaagactttcctccaagaactaagccaacttgatgtgaaaagcacag

SEQ ID NO: 5832 - DNA, 285 bp, Homo sapiens; identical to SEQ ID NO: 321

SEQ ID NO: 5833 - DNA, 160 bp, Homo sapiens
catttttaggctcgaacttaacactgttaagaaataactgaaatatgatggtatttacattaatttttgaaattcaatggtgggatagaattaggtcaggaaatggaagttgttccaatggtgtgagaactaggagacaagatgattcactttattattt

SEQ ID NO: 5834 - DNA, 523 bp, Homo sapiens
ctgtgcttttcacatcaagttggcttagttcttggaggaaagtcttagtgactaaaattgtacacagatcacaagacaagagaactagtctaacaaattcaataagaaatcaggacaactgtagactatataaaaactgtcttagaaaattatttacaactttatcatagtgtaaatactctaaatgtaaaataaatctatggattttatacaaaaatactctaaagtacaaatgtaagttaaatgctgaataaaacattttcaccttttccagtggatgctattactaagactataatctaggtgtcaaaacttaaagtgataaccacaaagcaatgttttcttaatcactcataattttacatttgttagtagtcatcacaaggtttagagttccactgaaaaagtctcatttttacaaatgcaactcataccactttccttcatggaccctttctctgtttaacacatgttaaaaaagtaaaacaaaaattcttagtcaaaagttgacatgctatgtgaa

SEQ ID NO: 5835 - DNA, 315 bp, Homo sapiens
aaattgaatttcatcactattctgtgtattctatttatcactattctaaatgactcatggttggctaattgattatcatgtaagcaagctatttgaagaaattgattacatatatttatatatagggggtaactaattaatgattacttgattaaattgctatgtgaactgacaactatttataaatcaatgcaatagactgttgtttgaccaaattattttactgaactgacaagtgggtttttgatttgtcagttgcttggctgaactgatcaagtcgatagttgcttgacaaactcaccaactttagaatgg

SEQ ID NO: 5836 - DNA, 527 bp, Homo sapiens
cctccatgtgggtggctatcctttatcaagatcccccccagggggaggaggattattagtcacattatcaaactcccctccaacccctttctctgcttagaggtatgtgtaatgtgtagtagaaagaccgaatccccacccaaaagtccttactgctactcatgtttttaaccttctgttctttaccctactccctaataatgaccgccatcatttatctactgcttaatggatactaggcactgtgctaagggttttatgttttacttcaatcttttcatcggctttattttgatagtttgttttatagaggaggaaacagacttaggtaagttacaagatgacaaggttactaccttgttcagttagtagtcagcagctagtatatccaaagatagtacgggtcagaactaggattataaactcagggctacctgaaactcacaacttcaggcatctttgatttcttcttttcacccacagccaaattctttcaacctaaaattgtatccattctgttttcaccg

SEQ ID NO: 5837 - DNA, 491 bp, Homo sapiens
cggatcagtacaactcccggtggctgaacgacccgtcgttcatccatgctgagctcattcctgacagtgcggagcgcaatgatgataagctttacttcttcttccgtgagcggtcggcagaggcgccgcagagccccgcggtgtacgcccgcatcgggcgcatttgcctgaacgatgacggtggtcactgttgcctggtcaacaagtggagcacattcctgaaggcgcggctcgtctgctctgtcccgggcgaggatggcattgagactcactttgatgagctccaggacgtgtttgtccagcagacccaggacgtgaggaaccctgtcatttacgctgtctttacctcctctggctccgtgttccgaggctctgccgtgtgtgtctactccatggctgatattcgcatggtcttcaacgggccctttgcccacaaagagggggccccaactaccagtggatgcccttctcagggaagatgccctacccac

SEQ ID NO: 5838 - DNA, 452 bp, Homo sapiens
  misc_feature (1)...(452): n = g, a, c or t
cctggccggcttgatgggactcctggagaaagggcttgggggtcccgagcttctcgatcctcttggaggaatgggggtagtctttcctttgatgctgctgtggccctagcccgggaccgccaaaggactgaggctcaaggagttcggcgaacccagacctgtactgagggtggggattactgcctcatccccagaacctccccttgtagcatgatctctgcccattctcctcggccccttagctgcctggagctcccatctgaaggtgcagaagggtctggatcccggagtcgtcttagtctgccccccananaaccccaggttcctgaccccctgttgtcctctcagcgcaggtcatatgcatttgaaacacaggctaaccctgggaaaggngaaggactgtgattaggaccacagccctgggcaaaagggggacccagcaaagttgtctt

SEQ ID NO: 5839 - DNA, 574 bp, Homo sapiens
ctgggaccataatttgtacagaaacactggatgtgattaatagggagtaggcgagattatagcaaaccagcagaaatggaactctgctaaatgtgcatccgtgaatgctcccttgaatgtggctgtgcaggattcagggtttgcagaaattctcaggacctcagacctctgtcctatgactaatgttactggcagagcaaataatctaaaggttttggttttgtggattaccatctccgtgctgtgcatctgaaggccagtgctgtgctggcaggaaaatagggactgagaaaaagcagatcctatactatagggactgtagtatctatgacgtagccagccattctttgctcccaaggcaagaagaaagagatgacggagtcaatatagggttgccaaatcggattttctaaaatgagtaggaagttggatttttatgtgcaacagtttcttttaatgctttgttgatatgtgattgtcatgcaataattattcatatttggtaagttttgtacatatattatgtacactcagggaaccaataccataatcatgataatgaacgtatccatcc

SEQ ID NO: 5840 - DNA, 577 bp, Homo sapiens
ttggtattgatcttggcaccacctactcttgtgtgggtgttttccagcacggaaaagtcgagataattgccaatgatcagggaaaccgaaccactccaagctatgtcgcctttacggacactgaacggttgatcggtgatgccgcaaagaatcaagttgcaatgaaccccaccaacgcagtttttgatgccaaacgtctgattggacgcagatttgatgatgctgttgtccagtctgatatgaaacattggccctttatggtggtgaatgatgctggcaggcccaaggtccaagtagaatacaagggagagaccaaaagcttctatccagaggaggtgtcttctatggttctgacaaagatgaaggaaattgcagaagcctaccttgggaagactgttaccaatgctgtggtcacagtgccagcttactttaatgactctcagcgtcaggctaccaaagatgctggaactattgctggtctcaatgtacttagaattattaatgagccaactgctgctgctattgcttacggcttagacaaaaaggttggagcagaaagaaacgtgctcatctttga

SEQ ID NO: 5841 - DNA, 560 bp, Homo sapiens
  misc_feature (1)...(560): n = g, a, c or t
taaactgtggcgggatagttttcgggtccttgtccagtgaaacaccctcggccgggaagtcagttcgttctctcctctcctctcttcttgtttgaacatggtgcggactaaagcagacagtgttccaggcacttacagaaaagtggtggctgctcgagcccccagaaaggtgcttggttcttccacctctgccactaattcgacatcagtttcatcgaggaaagctgaaaataaatatgcaggagggaaccccgtttgcgtgcgcccaactcccaagtggcaaaaaggaattggagaattctttaggttgtcccctaaagattctgaaaaagagaatcagattcctgaagaggcaggaagcagtggcttaggaaaagcaaagagaaaagcatgtcctttgcaacctgatcacacaaatgatgaaaaagaatagaactttctcattcatctttgaataacgtctccttgtttaccctggtattctagaatgtaaatttacataaatgtggttgttccaattagctttgttgaacaggcatttaattaaaaaatttangttt

SEQ ID NO: 5842 - DNA, 443 bp, Homo sapiens
ccatcaccatgtcacccacaccagcagcgggaagtctgttcagccgtcccttgatccccttcacggagatgatatacaggtttttggctcctgtgttgtcagcacaattgattacagctcctaccggaagacccaaggaaatccggaatttcgcaccagaggacccaccacgtcctgtggatataaagggaagggaaacaggataaagagatcacaatctagacatggttcggagttccccctcatactcaagctgtaattcaccgcacatgctttgatagactgtacgctatagattagctcgctcggattttacttatgccgtccccgtgtgccacccgattctcacggaaagtagcctatttcttactattaacactctgacatcgaaattaagaaacctagacgactcaacccttgctctaactttcgcaaaacgcaat

SEQ ID NO: 5843 - DNA, 197 bp, Homo sapiens
  misc_feature (1)...(197): n = g, a, c or t
ctgctggggattctngtccatctcctgcttccagagccagctcacattgccggaggcgctgttcatgtagcagtgcattttcaccgtgaagccccgtttcctggctatgaaacgtgggctctgccagatccgcgaacaagcactacctttgggattccggtaccggtcctccgatctggctgctggtactggctcag

SEQ ID NO: 5844 - DNA, 605 bp, Homo sapiens
  misc_feature (1)...(605): n = g, a, c or t
ctgttgactcagattcggcattttaattacattgtttccaagtatgatattctgagagtgtctatagcacttagtgtctgcttcatataaactaccagttattatatatttatgatgcaagtagttttccaaatgtggtgaaagtctgagtctttttatccccatgggtaaaatctgaatctggctctctgtgtctctcagtgcttgtttattgctggtcagagagtaaattcttgataaaagctgttgacttggctctcacagtttatgcagacattggagagacaatttggttatttcaaacatcacaggatttgagtaagaagacctggttatgaaacaaggctctcataattactagttatgactgttgacaagttaccttttcttgtttacaagttatttggcctctttgaattacttgtaaaatagagatagggattctttcttgatcatggaacatcaaatgaagttatttgatgaaatactttgtcatctggaaattataaatataactaaatgttaattattatttgaaatttgggcacctcatggnggcattttctatggncatttttttcttttctcgcataatggctaaaagt

SEQ ID NO: 5845 - DNA, 99 bp, Homo sapiens
ttggagatctaggcagtgggttaagccagacccctaaagtgaccctttcctcttctgccctattcttctcagaccctcagaaagacatccaattttttt

SEQ ID NO: 5846 - DNA, 621 bp, Homo sapiens
  misc_feature (1)...(621): n = g, a, c or t
nctgntggttaacaagnggatcgtcatgttcagtantttatacattatgtgagaagtaacgttctgattctttttcttacacagaattggcagagggggtcgatttgggaggaaaggtgtggctataaactttgttactgaagaagacaagaggattcttcgtgacattgagactttctacaatactacagtggaggagatgcccatgaatgtggctgaccttatttaattcctgggatgagagttttggatgcagtgctcgctgttgctgaataggcgatcacaacgtgcattgtgcttctttctttgggaatatttgaatcttgtctcaatgctcataacggatcagaaatacagattttgatagcaaagcgacgttagtcgtgagctcttgtgaggaaagtcattggctttatcctctttagagttagactgttggggtgggtataaaagatggggtctgtaaaatctttctttcttagaaatttatttcctagttctgtagaaatggttggattagatgttctctatcatttaataatatacttgnggactaaaagatacaagtgctgtataaaatcagccaattatgttaaactagccatatctgcctttattggg

SEQ ID NO: 5847 - DNA, 591 bp, Homo sapiens
  misc_feature (1)...(591): n = g, a, c or t
ctgcatctgtctgaatggtgcgtgaaggctctcagaccttacacaccattttgtaagttatgttttacatgccccgtttttgagactgatctcgatgcaggtggatctccttgagatcctgatagcctgttacaggaatgaagtaaaggtcagtttttttttgtattgattttcacagctttgaggaacatgcataagaaatgtagctgaagtagaggggacgtgagagaagggccaggccggcaggccaaccctcctccaatggaaattcccgtgttgcttcaaactgagacagatgggacttaacaggcaatggggtccacttccccctcttcagcatcccccgtaccccactttctgctgaaagaactgccagcaggtaggaccccagaggcccccaaatgaaagcttgaatttcccctactggctctgcgttttgctgagatctgtaggaaaggatgctccacaaactgaggtagataatgctatgctgtcgttggtatacatcatgaatttttatgtaaattgctctgcaaagcaaaattgatatgtttggataaatttatgtttttaggnaaaataaaaactttt

SEQ ID NO: 5848 - DNA, 643 bp, Homo sapiens
  misc_feature (1)...(643): n = g, a, c or t
agtgagcgctggtggcggagttaaagtcaaagcaggagagtaattatgaatagcgcagcgggattctcacacctagaccgtcgcgagcgggttctcaagttaggggagagtttcgagaagcagccgcgctgcgccttccacactgtgcgctatgacttcaaacctgcttctattgacacttcttctgaaggataccttgaggttggtgaaggtgaacaggtgaccataactctgccaaatatagaaggttcaactccaccagtaactgttttcaaaggttcaaaaaaaccttacttaaaagaatgcattttgattattaaccatgatactggagaatgtcggctagaaaaactcagcagcaacatcactgtaaaaaaaacaagagttgaaggaagcagtaaaattcagtatcgtaaagaacaacagcaacaacaaatgtggaattcagccaggactcccaatcttgtaaaacattctccatctgaagataagatgtccccagcatctccaatagatgatatcgaaagagaactgaaggcagaagctagtctaatggaccagatgagtaagttgtgatagttcatcagattccaaaagttcatcatcttcaagtaggtgganggatagttcttagtggacttca

SEQ ID NO: 5849 - DNA, 313 bp, Homo sapiens
ctgccctacttttcaattcagatatactagtaccttacctagaaataatgttaacctagggtgaagtcactataatctgtagtctattatttgggcatttgctacatgatgagtgctgccagattgtggcaggtaaagagacaatgtaatttgcactccctatgatatttctacatttttagcgaccactagtggaagacattccccaaaattagaaaaaaaggagatagaagatttctgtctatgtaaagttctcaaaatttgttctaaattaataaaactatctttgtgttcttttctgcaacagacgaaa

SEQ ID NO: 5850 - DNA, 354 bp, Homo sapiens
acaatatttaaaatttattgcttgatacttttgacaacaaattaggttttgtacaattgaacttaaataaatgtcattaaaataaataaatgcaatatgtattaatattcattgtataaaaatagaagaatacaaacatatttgttaaatatttacatatgaaatttaatatagctatttttatggaatttttcattgatatgaaaaatatgatattgcatatgcatagttcccatgttaaatcccattcataactttcattaaagcatttactttgaatttctccaatgcttagaatgtttttaccaggaatggatgtcgctaatcataataaaattcaaccattatttataa

SEQ ID NO: 5851 - DNA, 414 bp, Homo sapiens
ccatccattttgagcacctctgccaggctgcagacctggaggcgaagggagtgtggaagaggagggtgtaagggtcgacgcgtgctgaatgggaggtgcaggtcctcggtgcgttggcagaagaggcttctggagtttcgaggccatacctcctttcaagagctttggatttggggcgacttccctgggtctaggggagtgttcctgtcccctgtcaggtcagccctgcggagccactccacccctcttccccttcccctggatttcctgacatagatggtgtgttcatgtgcaggtgtgagtgtgctgtccttctgatctctgttgatcccgctttcctactgagagggtggtggagagggtgtggtctcttctcacctcagtttttctgacacagcgaatcgagggctttgg

SEQ ID NO: 5852 - DNA, 513 bp, Homo sapiens
aaaccataagaaaaacacaacagttttgggctgctgataaattaattcctctctgttgtaaacctaaaactaaacaaaaacaaaaatacccagagcagatggggagagggtgggaggcggaacacacactcatacacacacacacactcacgcacacacacaagcagtacacgttaagctctgcattcccactataggggttggtcctccagccacggagccagatcctactgaaggcaggggggaggcgggaagggatgtgtgtctgtgtgtgggatcttcataaagtctttggtgctaataaaggctgactgaagcagcaagtcctgaagccccagatccagaaagcaactcagggcgaagagagtagtatttttgctcatcctcataggagggggcttgcctcaccccagagctagggtcaaactgacccaggacccagggagtatttaatttgatttcagtacttgcttcattcccataaatcatgagaacatgatgcttttcaaattt

SEQ ID NO: 5853 - DNA, 581 bp, Homo sapiens
  misc_feature (1)...(581): n = g, a, c or t
gtggcctcttggngggagaggtggggcagggggaaggcagctcccactagaccagggcagtatttaggggaaggaggcagattggagcagttggctgccaacacctggcctcactcagggagaggggccttgggcctggaagatatctgggtgaggtacccacaccatctgccgcaacctctgtgtatccattatgggctcacgccattcacaggcatgaattgagcacctagtatgtgggaaaacaggggaaacagagatggcacagacatggtctccatccttcgggggctccagtctagttggggagatcagagaagttccatttgccactctaggccaagctaggtaagcggcagagccatgaagcattgtgggagcttggaggggggagtgagcccttgcagtcagggagaaggagtcagcctggggagacttccagaaagtagccctttgaccctgaggaggtggggatcagtcgtgatgaaagtaatagccattcagtagccccttgtaattcaccctgagccaatgcctggaggcaggagaaagtactcaaggctctggtgcctggaccacaa

SEQ ID NO: 5854 - DNA, 267 bp, Homo sapiens
taatcgtcccattccccagtggattcggatgaaaactggaaataaaatcaggtacaactccaaaaggagacattggagaagaaccaagctgggtctataaggaattgcacatgagatggcacacatatttatgctgtctgaaggtcacgatcatgttaccatatcaagctgaaaatgtcaccactatctggagatttcgacgtgttttcctctctgaatctgttgtgaacacgttggttggctggattcagtaataaatatgtaagg

SEQ ID NO: 5855 - DNA, 615 bp, Homo sapiens
  misc_feature (1)...(615): n = g, a, c or t
acatctctgcttctcatgctgctggncagcagcctctctccagnccaaggtgntctggaggtctattacacaagcttgaggtgtagatgtgtccaagagagctcagtctttatccctanacgcttcattgatcgaattcaaatcttgccccgtgggaatggttgnccaanaaaagaaatcatagtctggaagaagaacaagtcaattgtgtgtgnggaccctcaagctgaatggatacaaagaatgatggaagtattgagaaaaagaagttcttcaactctaccagttccagtgtttaagagaaagattccctgatgctgatatttccactaagaacacctgcattcttcccttatccctgctctggattttagttttgtgcttagttaaatcttttccaggaaaaagaacttccccatacaaataagcatgagactatgtaaaaataaccttgcagaagctgatggggcaaactcaagcttcttcactcacagcaccctatatacacttggaggttgcattcttattcatcagggaggaaagtttctttgaaaatagntattcanttataaggaatacaggattattttgattatatcttggtggttnaaggtt

SEQ ID NO: 5856 - DNA, 396 bp, Homo sapiens
ctgggattcctctgccagcagccctgccgatccctgggcccccggcagctccagcaagtggaactcgagcaataccagtatctttgggaggaggtccctctactgtcattgagaccagattctcccctcgcagcagcaccagaccgaggactcgcttctcttccctttctgcttgtttggagttctttggcttgatctttctgaactcatcacagtcacagaggatcaaattcatgtgcttgtcaaaagccttgaaggtgccaatgaagatccggccgtcctgcaggatgcacctcatcctgtaatcaatatgctgcagcatcttgctgctcttgcccaccgtcatggtggcggttctgatggctctgatacccgccggattcgcctcctcagagg

SEQ ID NO: 5857 - DNA, 361 bp, Homo sapiens
ctgtctgcattgaaaattcatgcatggagaaagggagtaagcaagggagaaacggtgcgattcacatattccgcgagatcatcaagccagcagagaaatccctccatgaaaagttaaaacaagataagcgctttagcaccttcctcagcctacttgaagctgcggacttgaaagagctcctgacacaacctggagactggacattatttgtgccaaccaatgatgcttttaagggaatgactagtgaagaaaaagaaattctgatacgggacaaaaatgctcttcaaaacatcattctttatcacctgacaccaggagttttcattggaaaaggatttgaacctggtgttactaacatttt

SEQ ID NO: 5858 - DNA, 321 bp, Homo sapiens
ctggcttccgagaggcaattctgtccttggaagccaggtttgaccatctgtaatcagccttgtgagaagtctcgtttgagggggccagggatggaacgggagggcgcatatcgtatgaggtatgggcattgtgttaagctgggggaagttgcagcttgtcctgaattacatggagaggaataaagtgggtgagtaggaggagccatttcatctgaaagcctgaggtccctctggtcccctcgataaaccccactggtgtcccaggccacaggtaacaggagaatagacatttaatgtcacagaatgtcagagcaggcaagg

SEQ ID NO: 5859 - DNA, 298 bp, Homo sapiens
  misc_feature (1)...(298): n = g, a, c or t
ctgtggtggcgccttctggagaagagcagagatacacgtgccatgngcagcacgaggggctgccagagcccctcaccctgagatgggagccatcttcccagcccaccatccccatcgtgggcatcgttgctggcctggctgtcctggctgtcctagctgtcctaggagctgtgatggctgttgtgatgtgtaggaggaagagctcaggtggaaaaggagggagctgctctcaggctgcgtccagcaacagtgcccagggctctgatgagtctctcatcgcttgtaaagcctgagacag

SEQ ID NO: 5860 - DNA, 317 bp, Homo sapiens
cctcaatgtcgtgctagaggggccgaagaaggccgtgaacgacgtgaatggcctgaagcaatgtttggcagaattcaagcgggatctggaatgggttgaaaggctcgatgtgacactgggtccggtaccggagatcggtggatctgaggcgccagcacctcagaacaaggaccagaaagctgttgatccagaagacgacttccagcgagagatgagtttctatcgccaagcccaggccgcagtgcttgcagtcttaccccgcctccatcagctcaaagtccctacgaagcgacccactgattattttgcggaaatgg

SEQ ID NO: 5861 - DNA, 551 bp, Homo sapiens
  misc_feature (1)...(551): n = g, a, c or t
ctcagagctcaagtctgaactctacctccagacagaatgaagttcatctcgacatctctgcttctcatgctgctggtcagcagcctctctccagtccaaggtgttctggaggtctattacacaagcttgaggtgtagatgtgtccaagagagctcagtctttatccctagacgcttcattgatcgaattcaaatcttgccccgtgggaatggttgtccaagaaaagaaatcatagtctggaagaagaacaagtcaattgtgtgtgtggaccctcaagctgaatggatacaaagaatgatggaagtattgagaaaaagaagttcttcaactctaccagttccagtgtttaaganaaagattccccgatgctgatatttccactaanaacacctgcattcttcccttatccctgctctggattttagttttgggcttaattaaaatcttttccaggaaaaanaacttccccatacaaataagcatgagactatgtaaaaataccttgcagaagctgatgggggcaaactcaagcttnttcactccaggaccct

SEQ ID NO: 5862 - DNA, 349 bp, Homo sapiens
aaagaatttctttataaaatttactgtctaagattaatagcattcgaagatccccagacttcatagaatactcagggaaagcatttaatcttagacagtaaattttataaagaaattctttaaaagtaggacttaattctcctccgtagtgagtttttaagcagaggatatctactacatggattcctttgcctcttgacaggctcaagttccatctgcctcccaggcagctttttgagtctttcatagaagcctgcttttaatatatgccataattttcttcttaattcaagccacatgttcaaatttaaggcttaaattctcattccattgttttctaagaaatttt

SEQ ID NO: 5863 - DNA, 504 bp, Homo sapiens
cctgaaaataattttcagataaagagactccaaggttggctttagtttgtgagttactcatgtgactatttgaggattttgaaaacatcagatttgctgtggtatgggagaaaaggttatgtacttattattttagctctttctgtaatatttacattttttaccatatgtacatttgtacttttattttacacataagggaaaaaataagaccactttgagcagttgcctggaaggctgggcatttccatcatatagacctctgcccttcagagtagcctcaccattagtggcagcatcatgtaactgagtggactgtgcttgtcaacggatgtgtagcttttcagaaacttaattggggatgaatagaaaacctgtaagctttgatgttctggttacttctagtaaattcctgtcaaaatcaattcagaaattctaacttggagaatttaacattttactcttgtaaatcatagaagatgtatcataacagttcagaatttt

SEQ ID NO: 5864 - DNA, 462 bp, Homo sapiens
  misc_feature (1)...(462): n = g, a, c or t
aaacaaattgcagagaatagagaaaaaaataggttatttacagaaaacaatatctacatatgtacttagaggtacaaatttggtgacagaaaagacttcagtatatgctggcatcttagaagcagttctcaaagagcttagttttattttcttgaattttaagaatgcctaagatccttcttcatcctcgatcttgggagccaagtagtattttaagtgtcccatatccgcaattttatactctacaacaaggggtacatctgcagacatactgagtgtcaccgttgaagagagtggagtggcttttgtaaagaagttcaggtacctcagtgcaaaagttagttgaactggttcattcatctctatggnaacagcttcctcctctttatcgacattacttgtcttgtgacaatttaatgtttccatttccaagttctccacttgcagaaaatttcactccgt

SEQ ID NO: 5865 - DNA, 342 bp, Homo sapiens
cttaattgcctctcctcccagtttgccagtcccgccccccgccccccgggaaaacagccaggccactgttgctgtcacattctggagcctgggccagggccatttcccatcgatgtgagctcttctcatctcacagcattccctgcgctgcttccacccccttctccccttccagatacccagcatcgcagcagggatttcacaatcccatactgtgtcgcctcccatccaagcgccagggagggtggggggtaggagctaagacttcctctggacagatgggcagggcagagttcactgaggtgaaggaagaccacaggttaacaccaaagtattgtacag

SEQ ID NO: 5866 - DNA, 395 bp, Homo sapiens
  misc_feature (1)...(395): n = g, a, c or t
ccatgtgaccctctccccaggcaagctctgaagtccctgcaggtggaggccatgcctgtcttaaactcagttgcatccctggtgcccaaagcaacaccagaaccaagaaggagctccataaatccttcttgggtgaagcctanacaaagccgccaggtcttgtggctccaggcaccagagccttgagtactttctcctgcctccaggcattggctcagggtgaattacaaggggctactgaatggctattactttcatcacgactgatccccacctcctcagggtcaaagggctactttctggaagtctccccaggctgactccttctccctgactgnaagggctcactccctcctccaagctcccacaatgcttcatggntctgcgcttaccta

SEQ ID NO: 5867 - DNA, 494 bp, Homo sapiens
  misc_feature (1)...(494): n = g, a, c or t
aaacgcttcatgacagggtaattcatgtccaacatatcaaaaacatatttatagataactttagaaagaaaatacatactttttttgataatcacaagtagcaatgagattttctatattattttcagtctcactttagaaatgttttaattgtctaaatttaatcaattcatcgattaaaggaaagacaataaaatagtaaaattacatgtgtttatatataagtgtgtgtgtttcaaataacaaaacacaggttgtaaactaaaatcactggaaggcaaattgaagacaaaagtgatgctggtttaagttgtttggttcttcacataaattccagtttccaagttgtggtttacaactctagtaatatccagatagataattcaaccngcacttttttcttctattcctggttttctcttggtcacactgnaattttttgnctttttaccggaactggantaaataaaataaggacttcccagtcttaatac

SEQ ID NO: 5868 - DNA, 366 bp, Homo sapiens
ctggaagagggaacttccgagcccccaggggcggggtaaggcaaaaagggaacagcagtgttgaaagtgggaggccaggactgatggggaggagggttcccaaactccagagcagcctgaccagggctgggggtcttgggcaaatatctgaggctgcccatcctcacccaggacacccccactgagccctgaggatgaggggtgcccgtgggcagaagaagctctggacagcagcttcttggggtctggagaagaactggatttgttgagcgagattctggacagtcttagcgtgggagccaagagcgcaggcagcctgagaccgagccagagtttagactgctggcacagaggagacctggacag

SEQ ID NO: 5869 - DNA, 462 bp, Homo sapiens
ggcctacacgccgccgcttgtgctgcagccatgtctctagtgatccctgaaaagttccagcatattttgcgagtactcaacaccaacatcgatgggcggcggaaaatagcctttgccatcactgccattaagggtgtgggccgaagatatgctcatgtggtgttgaggaaagcagacattgacctcaccaagagggcgggagaactcactgaggatgaggtggaacgtgtgatcaccattatgcagaatccacgccagtacaagatcccagactggttcttgaacagacagaaggatgtaaaggatggaaaatacagccaggtcctagccaatggtctggacaacaagctccgtgaagacctggagcgactgaagaagattcgggcccatagagggctgcgtcacttctggggccttcgtgtccgaggccagcacaccaagaccactggcccgccgtggccg

SEQ ID NO: 5870 - DNA, 518 bp, Homo sapiens
ctggacgctggcctcctccagtccatcccaaagtctccacccgccgggagctgtcacagcccctggctccgctgcctgcccacgccgggctcagagcctggagtttctcgtctctctgccaaggcaccagggctcagcagtattcagaataatcttcctccacgtagttggcagggaaccagccaacccggccatagatctcccctcgccaccagccttgctgtcccttcttgttaaggatcttgatgatgtcaccctccttgagcgacagctctgatcggtctcgggcgcagaagtcatagcgggctttggctgtaccaaaatactttatgcttcccactgctggcctgctgatggttctcttttcaggctccttgaaggggaactgcaaggtggtgtccagagacttgaagcaatcctttagagagttctgctggtaaaactccaccagctccgtaagcccccggaaagcctttttctctgtgatccggtgcagtccttctgctgtcatgatttta

SEQ ID NO: 5871 - DNA, 494 bp, Homo sapiens
ccttttgggttaagccttacattcatgaagaacctcaagggtagatttttgagagcattccaaatgaatggtctctggtcaaatgaatgaatggtcaaatgaataaatctgccctcacagagatacaaaaggaaaaggaatataattcataccatttggtttaagccttacattcatgaagtacctcaagggtagatttttgagatcattccaaatgaagtcgaatctgccctcacagagacacaagaaaggaatataattcatacactattgcatttttaataaatcttttgaaatttgcagaattagattgtattgtgtattttcggttaaatgataattgaatgtaaatatttagatgcagcaccatattttataacccagctttagcatttcttcatattttaaggaaaccccccacctccttcttttaagggcgcttcttgctctctgaaatgccctgctaaatgcttctcttaattatttgaataagg

SEQ ID NO: 5872 - DNA, 418 bp, Homo sapiens
  misc_feature (1)...(418): n = g, a, c or t
ctgccttgtgtgggactgagaggcaagagttgttcctgcccttccctttgtgacttgaagaaccctgactttgtttctgcaaaggcacctgcatgtgtctgtgttcatgtaggcataatgtgaggaggtggggagaccaccccacccccatgtccaccatgaccctcttcccacgctgacctgtgctccctccccaatcatctttcctgttgcagagaggtggggctgaggtgtctccatctctgtctcaacttcatggtgcactgagctgtaacttcttccttccctattaaaattagaacctgagtataaatttactttctcaaattcttgccatgagaggttgatgagttaattaaaggagaagattcctaaaatttgagagacaaaataaatggaacacatgagaaccttcnaa

SEQ ID NO: 5873 - DNA, 225 bp, Homo sapiens
ctgagccgctgagcgggcggctacttctggctctgttgagttttggaagacctttgagaaatcaacagcatcaccgggcaggtcctgagtccatggcctgatatgttaggatcacctgtgggctgctaaaagcccacagtcctagccccatctgcagagttagttggcttctgaaggctgggagaagccctagaacctgcatttctaaagctgctcaaatccagg

SEQ ID NO: 5874 - DNA, 340 bp, Homo sapiens
  misc_feature (1)...(340): n = g, a, c or t
ctggggggtccgggaaaggggttgggccatgagccaggcagctccgaagcagtcactgaggccagggagcctgcacccaggtcatggggcgacctggctctcactcctggcctgggtgctcacctacagaccacttcacttcccctgtccgcagcgtcactatgtcctcataggtggctgtctggtcaatgtccaggccctcgtaggcgtgatcttcctccatgccagccttgctgtcatccttgtccagcagcaggaagataggcacgatgatgaagaggatgatcagcancgtctggatcatgatgataccatccttcagcgtgntcctctgcttcag

SEQ ID NO: 5875 - DNA, 592 bp, Homo sapiens
  misc_feature (1)...(592): n = g, a, c or t
ctgttgactcagattcggcattttaattacattgtttccaagtatgatattctgagagtgtctatagcacttagtgtctgcttcatataaactaccagttattatatatttatgatgcaagtagttttccaaatgtggtgaaagtctgagtctttttatccccatgggtaaaatctgaatctggctctctgtgtctctcagtgcttgtttattgctggtcagagagtaaattcttgataaaagctgttgacttggctctcacagtttatgcagacattggagagacaatttggttatttcaaacatcacaggatttgagtaagaagacctggttatgaaacaaggctctcataattactagttatgactgttgacaagttaccttttcttgtttacaagttatttggcctctttgaattacttgtaaaatagagatagggattctttcttgatcatggaacatcaaatgaagttatttgatgaaatactttgtcatctggaaattataaatataactaaatgntaattattatttgaaatttgggcacctcatggnggcattttctatggncatttttttcttttctccata

SEQ ID NO: 5876 - DNA, 392 bp, Homo sapiens; identical to SEQ ID NO: 67
  misc_feature (1)...(392): n = g, a, c or t

SEQ ID NO: 5877 - DNA, 118 bp, Homo sapiens; identical to SEQ ID NO: 311
  misc_feature (1)...(118): n = g, a, c or t

SEQ ID NO: 5878 - DNA, 496 bp, Homo sapiens
  misc_feature (1)...(496): n = g, a, c or t
atgggaagcccganaattggttcctatanacccggttcctgatgaattcccaggccaaaagaaccaccctgacaaattttgggttctgaaagtcttattattggacaagtatttgcatagcntagaagaaggaaaagggatttactcatcctgtagggcagcttagttgtcttgggcaaaagctgtataatggtaccacaaaaacagttacatggtggagttccaattacacagaaaaaaatccattcagtaaatttccaaagttgcagactgtttgggcccacccagaattgcactgggactggacngcccccactgggttatactggatatgtggacacagagcttatgctaagctgcctgatcagtggacaggtagctgtgtaattggcaccattaagccatctttnttcttagtgcccataaaaacaggnaaacttctgggcttcccagtctgtgcttcctgtgaaaaatgaagcatagccatnggtgattg

SEQ ID NO: 5879 - DNA, 310 bp, Homo sapiens; identical to SEQ ID NO: 462
  misc_feature (1)...(310): n = g, a, c or t

SEQ ID NO: 5880 - DNA, 356 bp, Homo sapiens
  misc_feature (1)...(356): n = g, a, c or t
gtagcaggtggtcagtatgcgtccacagaggtctcggggatcctggggggtgtagctgatctggttcacgatggtgcggacatcagccagcacttcctcatttccactcctcacngcttngnagacctggcagcacatggagtagatgaggcaggcggtggctgcgctgtccaccccgccactcaagggcagcaaaaaccctgcctgttgacttcntcttaaaaaatcccagagccagcaggnaggtccaaggcttatctcctcctcagggctgtggtatttccactcgatgggctcagagatgggtgccagcaagtcctcgtggnaccganagggcaaagtccaccttcactctg

SEQ ID NO: 5881 - DNA, 368 bp, Homo sapiens
  misc_feature (1)...(368): n = g, a, c or t
ttcagtagatgggactttcccggcagagccaatgaaaggccctattgctatgcaatctggtccaaaaccactcttcaggaggatgtcttcactggtgggccccacgcaaangtttnttcatngaggggaatctaagactttgggggctgtccagattatgaatgggctcttccacattgccctggggggtcttctgatgatcccagcagggatctatncacccatctgtgtnactgtgtggtaccctctctggngaggcattatgtatattatttccggatcactcctggcagcaacggagaaaaactccangaagtgtttggncaaangaaaaatgataatganttcattgagcctctttgctggca

SEQ ID NO: 5882 - DNA, 454 bp, Homo sapiens
  misc_feature (1)...(454): n = g, a, c or t
ccttgcctcagatccaaggtcactcggaagaggccatgtctaccctcaatgacactcatggagggaatgctgagagaagcattcagatgcatgacacaaggtaagactgccaaaaatctttgtcttgctctcctcattttgttatttgttttatttttaggagttttgagagcaaaatgacaacacccagaaattcagtaaatgggactttcccggcagagccaatgaaaggccctattgctatgcaatctggtccaaaaccactcttcaggaggatgtcttcactggtgggccccacgcaaagcttcttcatgagggaatctaagactttgggggctgtccagattatgaatgggctcttccacattgccctggggggtcttctgatgatcccagcagggatctatgcacccatctgtgtgactgtgnggtaccctctctggggaggcattat

SEQ ID NO: 5883 - DNA, 221 bp, Homo sapiens; identical to SEQ ID NO: 310
  misc_feature (1)...(221): n = g, a, c or t

SEQ ID NO: 5884 - DNA, 294 bp, Homo sapiens; identical to SEQ ID NO: 3020

SEQ ID NO: 5885 - DNA, 412 bp, Homo sapiens
ctggggcttccattcacgactttctggtccctggcaggacagagcgggatgccaccagcttgtccaaagggaagttccaggagctcctggtgggcatcgttgtggagaatgacgcttgccccgggcgagatcaacgagttgaagcaggtggaaggggaggcttcgtgcagcagccgcaaaggaaagctgattttcttctatgagtggaacatcaaactgggctggaaaggcatcgttaaagaatctggagtgaagcacaagggattgattgaaatacccaatctttctgaggaaaatgaagtagatgacactgagaatttacaacgggaatgattttaccaacgaaagctatggcaacccaggaattgactgccaaaagaaaactgagtggggaataccctgcaggttcagg

SEQ ID NO: 5886 - DNA, 127 bp, Homo sapiens
  misc_feature (1)...(127): n = g, a, c or t
ccttgcctgtgaagctcattgggatgaattgcactctaatgaagcaatacattgagtttgtggcagacagacttatgctggaactgggttttaccaaggttttcanagtacagaacccattttgnct

SEQ ID NO: 5887 - DNA, 464 bp, Homo sapiens
ctgcatacaaaaggaaatggcaacaattgaactggtagcccaggacaaccatgagcgggccaggcgcctgatgaaggagctcaaccagatgcagtatgagtacacggagctcaagaaacagatggcaaaccaaaaagatttggagagaagacaaatggaaatcagtgatgcaatgaggacacttaaatctgaggtgaaggatgaaatcagaaccagcttgaagaatcttaatcagtttcttccagaactaccagcagatctagaagctattttggaaagaaacgaaaacctagaaggagaattggaaagcttgaaagagaaccttccatttaccatgaatgagggaccttttgaagaaaaactgaacttttcccaagttcacataatggatgaacactggcgtggagaaagcactccgggagaaactgcgcaccgggaagaccgactcaagggccaacttccga

SEQ ID NO: 5888 - DNA, 410 bp, Homo sapiens
  misc_feature (1)...(410): n = g, a, c or t
ctgccaccaactcaggactcaggggctcaattctcttctttggagcatattctgtagctcttcgaagcctgccaagtgtagcttccaaacttttaagtggtcttcttttggggggctttggttgntcgtacatttactgtgcttaattcaactttcatgcccttaataatgcctaacaagtctttttcgtattttccttttcactgtcttggctctctgaagtctccttggaagtctcctcagttcgaacagactgcttatctttcttgctacagatcacactgttagtgccaaaatatctttggatgttattttttgtccgggccaacancnctnaactgcggtacctgactgttccgtgccgaacagtgagtagcataatcgcagccgctgatgtctccgggcttcca

SEQ ID NO: 5889 - DNA, 262 bp, Homo sapiens
  misc_feature (1)...(262): n = g, a, c or t
aactggatgatggtcttcagcctctttctgtcccttctgtccctcacagcactagtatttcatgttgcacacccactcagctccgtgaacttgtgagaacacagccgattcacctgagcangacctcttgaaccctnggaccagnggtctcacatggtgctacgcctgcatgtaaacacgcctgcaaacgctgcctgccggtaaacacgcctgcaaacgctgcctgcccgtaaacacgcctgcaaacgctnctgcccacacn

SEQ ID NO: 5890 - DNA, 446 bp, Homo sapiens; identical to SEQ ID NO: 68
  misc_feature (1)...(446): n = g, a, c or t

SEQ ID NO: 5891 - DNA, 544 bp, Homo sapiens; identical to SEQ ID NO: 633
  misc_feature (1)...(544): n = g, a, c or t

SEQ ID NO: 5892 - DNA, 106 bp, Homo sapiens
  misc_feature (1)...(106): n = g, a, c or t
aaagtaagaaaatagttgctaccgatagggactttgccaantccaattatcttctaggattgaaaggtgcattttccccataaaaaaggcnaggaaaacccactgn

SEQ ID NO: 5893 - DNA, 270 bp, Homo sapiens
  misc_feature (1)...(270): n = g, a, c or t
atgcccgaatttcagtttggcacttacagcgaatctgagaggaaaaccgaggagtacgatactcaggccatgaagtacttgtcatacctgctgtaccctctctgtgtcgggggtctgtctattcactcctgaatatcaaatataagagctggtactcctggttaatcaacagcttcgtcaacggggtntatgcctttggtttcctnttcatgctgccccagctntttgtgaactacaagttgaagtcagtggcacatctgccctggaagg

SEQ ID NO: 5894 - DNA, 130 bp, Homo sapiens
  misc_feature (1)...(130): n = g, a, c or t
ctggagagagatcaatatgctgaacaaataaaaggagagagggcccagtggcagcagaggatgaggaaaatgtcgcaggagggccctttccccctgtgctttgggcangtnctgccattgaaaggangga

SEQ ID NO: 5895 - DNA, 329 bp, Homo sapiens
  misc_feature (1)...(329): n = g, a, c or t
cctacgtaggccaggaggcaccaagtgagtatgtgtatgtcggctgattaaaaatgaanacagcggctgagcacagtggctcacagcagcactttgggaggccgagctgggtgggtcacctgaaggtcaggagtttgagaccagcctgggcagcactggtggtgcctcagccatggcctggaccgttctcctcctcggcctcctctctcactgcacagattctgtgacttcctatgtgttgactcanacaccctcagtgtcantggcccccaggaaagacngccaagattacctgtgggggaaacaatattgggagtaacaatgtacac

SEQ ID NO: 5896 - DNA, 240 bp, Homo sapiens
  misc_feature (1)...(240): n = g, a, c or t
ccagcctacaatggggatgttgtgtttctgttcaccttcgtttactatgcctgtgtcttctccaccacgctggggtctgggaggaatggacagacagaggatgagctctacccagggcctgcaggacctgcctgtaacccactctgctcgccttagcactaccactcctgccaaggaggattccatttggcagagcttcttccaggtgcccagctatacctgtgcctcggcttttctcan

SEQ ID NO: 5897 - DNA, 278 bp, Homo sapiens
  misc_feature (1)...(278): n = g, a, c or t
aaatatgctgcatagactactggaccatattttgtagccattaaattttcaaaagactgggcccactgtaatacttcctccaaagtaaggtttgaagggggcctcttagattcatctctgnacattttacaactccaacaattccgcctgctcatttttctctaaaatgagaagagaaaaggcagcgntagaatatcatcaagcttcaaataaacaatgatcatttttttctcatgttggtggtataatatgtggaaacattccattgacaaatatat

SEQ ID NO: 5898 - DNA, 307 bp, Homo sapiens
  misc_feature (1)...(307): n = g, a, c or t
tgggaaattttaatattaagtatgtccatgattgaaagaatcattccaggaagtgtttggtcaaaggaaaaatgataatgaattcattgaccaaacacttcctggagtttttctccnntgctgccaggagtgatccggaaataatatacataatgcctccccagagagggtaccacacagncacacagatgggngcatagatccctgctgggatcatcagaagaccccccanggcaatgnggaagagcccattcataatctggacagcccccaaaggcttagattccctcatgaagaactttgcgtg

SEQ ID NO: 5899 - DNA, 400 bp, Homo sapiens
  misc_feature (1)...(400): n = g, a, c or t
ccactcggatcagctcctcgctcacctgaagccaagagaagaaggagagaagcaccaagaatcagctaacctcagaaaggtctgttttggagacacaggaggtactatttccagcagtcagnaggaagtgcacagcaccaatgcgaggaagaaaaacaatcccacttgcgcccaccagctaagggaccagggtctatgaagccccacagtggctccgacccaccatcatggcctgctggaccagggtgttgctgtgctcacacatgttcttcagaatcttgttggctgcattgtgccgggctgtcgtggtagacttagaagccactgtcagtgggtagatgagggcctgggggtggtacccgaccaatgtctgtgagaagctggngaatgaaacgtccca

SEQ ID NO: 5900 - DNA, 297 bp, Homo sapiens
  misc_feature (1)...(297): n = g, a, c or t
ccataggaaaaggatacagagtagagtttcatgaacctgaaacttggtggaaatttgatcctgaagaattagaaaagaggaataaacatggtgtgtctcgaaagaagattgctcagatgtttggatcgttatgaatatcaaatgtccatttctattgtaatgaattcagtggaaccatcacacaaaagcacacaaagacctcctcctccacaggggagacagaggtggggaggctctcttggctcacataatcgtgtctgngtcacaaataatcattaaattagctattttcagcta

SEQ ID NO: 5901 - DNA, 180 bp, Homo sapiens; identical to SEQ ID NO: 69
  misc_feature (1)...(180): n = g, a, c or t

SEQ ID NO: 5902 - DNA, 113 bp, Homo sapiens
  misc_feature (1)...(113): n = g, a, c or t
ccaccctaagcccgacagtggagctccttttccagattcagagctggnatcggagcggggagacctgggatagcaagttcagcaccatcgcctccagctacnaagagngcggc

SEQ ID NO: 5903 - DNA, 113 bp, Homo sapiens
  misc_feature (1)...(113): n = g, a, c or t
cctgaggctggctcatcggaggcgtgagtgttcggccctgccatgcctcacatccccaggatgccgcggcgggaactgggctgtggctttcctgccctggcactgcttgttan

SEQ ID NO: 5904 - DNA, 117 bp, Homo sapiens; identical to SEQ ID NO: 71
  misc_feature (1)...(117): n = g, a, c or t

SEQ ID NO: 5905 - DNA, 278 bp, Homo sapiens
  misc_feature (1)...(278): n = g, a, c or t
tctgagagtagacacttgtggtatgtggagtacagataagccaggggcaggccacggcacgctccatgaaagctaggagggagtgaaatatcagtgatcatcgnaaggaangaggcncacangagnaaggcccaccctgactcttaggactancagtcagaaccaggaggaaaggttttattgctatgcgggtaggnaanaacagattttacttacatccatatagttacttaaagcccagntttctgntaaacatttntcttaatatattgagccaa

SEQ ID NO: 5906 - DNA, 113 bp, Homo sapiens; identical to SEQ ID NO: 70
  misc_feature (1)...(113): n = g, a, c or t

SEQ ID NO: 5907 - DNA, 372 bp, Homo sapiens
  misc_feature (1)...(372): n = g, a, c or t
ccaggccgcaccccttgctgtctcagcagatgggatataggaagctcctgggcttagctgtgggaagccaagtaccctcaccggcatgggacatgaggggcagctagacttcacccccttcccgcagacctgcctccagagcaaggagaattctgccttaatctgttgggctccagtctccgggttgaattccagtgtatcccactgggagtgaatggatcatgaggtgggatggccccatctggatgttctgcagatccccacatgggaggagattcccaagtagaggcagccagaattctgactccctggcagcagcagggntttcaggcaccagtgtctgtgtngttagaactcanaggaagaggcang

SEQ ID NO: 5908 - DNA, 247 bp, Homo sapiens; identical to SEQ ID NO: 72

SEQ ID NO: 5909 - DNA, 222 bp, Homo sapiens
  misc_feature (1)...(222): n = g, a, c or t
aaagaccaatttgttctacctagcattttaactagtttttctgccggctatgttgaatgcacaaattctgtcacgcatgttcattcattgctacataatttggttcttctggaatatttttatgaagctctttggagtacagctatgaaaattaacaactgttaaaggaaataccttttttttttgtaattttttccttgaanaaccaaagtnttttttcaa

SEQ ID NO: 5910 - DNA, 442 bp, Homo sapiens
cctcagcatcgcctggacctgttcttgcttggggcatcccgtcggtcaccaaccatgacagcgaggcgggcctggcctgtgctccaccggagggggcttcttgcacagatgacctgctcatttcaaccccctccagaatcttctggcaggcgcagagcaacaggacgtccattttacagacgaggaaaccgagacacagggaaggttgccatctgcaacccagcccggtttttatcttgtttttctgtgttttaactttttatttagacttacagtttgaaacagtgctagaatcggaagcatgtaaagaaacctgtggaccttttatgcagatacacttaagtttttaacccatgtgccttatcactggggacctcttgcactctctctcatgatttttttcccgaactagatgaggatattgacaaagattcttgcttgg

SEQ ID NO: 5911 - DNA, 133 bp, Homo sapiens; identical to SEQ ID NO: 312
  misc_feature (1)...(133): n = g, a, c or t

SEQ ID NO: 5912 - DNA, 303 bp, Homo sapiens; identical to SEQ ID NO: 631
  misc_feature (1)...(303): n = g, a, c or t

SEQ ID NO: 5913 - DNA, 165 bp, Homo sapiens
  misc_feature (1)...(165): n = g, a, c or t
aggaaaaatcagcagancacaagatccatgggtcttacagaagtctccctggagaagggaaatttgagctggcatgaagaatgggcagaatttggtgatttggaggtcaaggaagntctaaaaaaaccaaaaggaagaaagaggagngggtcactgggaagctca

SEQ ID NO: 5914 - DNA, 150 bp, Homo sapiens
ctgtgttttgggaaaggtgcaacgagctccaggacatagagaagattatggctcagattgaaaggggagaggcgagaattcaaagaagaataagcatcaagaaagcacttgacacaaagaatggaccggtacaaagcaccttttcatcag

SEQ ID NO: 5915 - DNA, 290 bp, Homo sapiens
  misc_feature (1)...(290): n = g, a, c or t
ccacttacctgcacacctgtcctcttgagactgactcagatcctccagaaccttcaaaatggcctgctgctccagcccctatcagctctccttcccctgtgacccttttgtggaaaggagtgcttccttcctgatttcatatttgngaatctttactcttccctgctgaggtgacagaaagaatcagaatgtctcgagtgcctgtgctgtgtcatcacccacagtggggagagacaggcaggaaaacaagctccgacatccccggtagccatgggatggcgatgcacagg

SEQ ID NO: 5916 - DNA, 438 bp, Homo sapiens
aaaactctcacatggcaacaatcatggattattacgttttatatctcctcaggaaaacatagcaccaaacattaggagtgctatggcttcctatagagaacttccatctttggtcacagcgttaagagctctgggtttcacagcctcataagccctctttgaaatgacccatacaaatgtcttttctaatgcatacatacctttttaatgaaactgatccagttgtcctgtcagccctacataacaatagtataaaagtaaattttacatttccagagatgagtgtacagtgagtgaacatgaatgagtccctagaacgagcctgagttaactctactacaaactgcttggttattagcaacccacaagggttacaatataaaggcaaagcaaatttgcatgattcaagaagatctaggagaattttcaaatcttcac

SEQ ID NO: 5917 - DNA, 373 bp, Homo sapiens; identical to SEQ ID NO: 6

SEQ ID NO: 5918 - DNA, 361 bp, Homo sapiens
atcatggccgcagccgctctggggcagatctgggcacgaaagcttctctctgtcccttggcttctgtgtggtcccagaagatatgcctcctccagtttcaaggctgcagacctgcagccttcacttgggttcatgtaggaacaccaagtccctttcaaagcaccacatcttcctctaatcaatatttcttggagtccctagggaatgtcttacatgcattcaaacaatcaccatttctggagatacactacagggtcaccataaactctgctacccttaggttccatcactatggaagctgagtttcaccagaaggcacttttgtcctccattacgaccagcaaagccagctaagccacag

SEQ ID NO: 5919 - DNA, 203 bp, Homo sapiens
ctgctccaggaactgctcctgaggaggcccctgggcctctgcctccgccgccaaccccatcttctgaggatccaggcttttcttctcctctggggatgccagatcctcatctgtatcaccagatgggcctttcttctcaaacacatgcaggatgtgagagtcctcctcggtcacctgctcatggagttgagggaattatctgg

SEQ ID NO: 5920 - DNA, 425 bp, Homo sapiens
aaaataggtgatcttgggcatgtaacaaggatctccagtccacaagttgaagagggcgatagtcgttttcttgcaaatgaagttttacaggagaattatacccatctaccaaaagcagatatttttgcgcttgccctcacagtggtatgtgctgctggtgctgaacctcttccgagaaatggagatcaatggcatgaaatcagacagggtagattacctcggataccacaagtgctttcccaagaatttacagagttgctaaaagttatgattcatccagatccagagagaagaccttcagcaatggcactggtaaagcattcagtattgctgtcccgcttctagaaagagtgcagaacaattacgaatagaattgaatgcccgaaaagttcaaaaattcctttacaaaaagaactcaagaaaca

SEQ ID NO: 5921 - DNA, 399 bp, Homo sapiens
  misc_feature (1)...(399): n = g, a, c or t
aaaagcatcagcagtttatctcatgcccactaaactatcctgcctcggtaccctttgttcatactttctgctctgtgtggaatgcccttctttcttcccctgttctttctcttagacccaaggggttctcagccttatttctgcctctcccatctctgatttactttcattttctgtatcgatttctcaaaaaatactttcttgattctttcatcatcccttttcccaccctacccccggttcctctttccacattataatctatgactgcctctctcacctaactgccagtattagcttttcaggacaggaactggttttacacattttggtattccagcatctagcataatgcctgacacttagctgaataaagggagtaaataaaacanatttggt

SEQ ID NO: 5922 - DNA, 334 bp, Homo sapiens
  misc_feature (1)...(334): n = g, a, c or t
ctgctgccagtggaatgctgggataaccccagtgtcgggggtcctggggcagcctgtgtactgctggatgcttgctttcaagtactctgctggggtaagactctggggcagtttccatccctttcttgggcttnagcttgctggactggccctgagaactgggaggggatggcttcatgaagtcattttgatgggggatgagnnatagttgctgtagaggaagaggatgagagagctgcttggcctctggaaggtgggaggagctgtcgcaggctgcacaggggctctgaggtcgagttcgtttagttcattgattaagcagtctaccaggtgg

SEQ ID NO: 5923 - DNA, 177 bp, Homo sapiens
cctccccaaccacgtggaactgttcagccggaacttgaggcactggacaactgtctcgatgtcagtgacgagccgggccagatggatatacagccggtcacccatgggaaagatcttctggaaagtccgtggtcaccatctgggcctggatcccgaagcgcctgtctgcagcgatgg

SEQ ID NO: 5924 - DNA, 372 bp, Homo sapiens
  misc_feature (1)...(372): n = g, a, c or t
cgcgggttcctcttgtgcaaaacggggtggcactccaatcgcctgcttggtgattgtggcccccacacacctgtttctacagcgcttaggttcgaacagtaaccctgtaaactaggcactgcttgtcccccgctttactggtgggaaacgggctcggagagaataaatgagctgccctaagcgactgggacagaaccacagttctcagccgggctttctgagcccacgctgccgccccagcagggatcaaatcacacagtgtgagataagcctcaagagcgggtggccttatgctgccactgagaactgattgggttcagttgcctcatcaaaatccctaagcatggttttgttttgtttttgnttttgttt

SEQ ID NO: 5925 - DNA, 424 bp, Homo sapiens
ccttttcaggagagtttagaatctcatagtaaaagactgagaaatttagtgccagaccaagacgaattgggtgtgtaggctgcatttctttcttactaatttcaaatgcttcctggtaagcctgctgggagttcgacacagtggtttgtttgttgtctccagatgccacttcagaaagatacctaaaataatctcctttcattttcaagtagaacaccttactttctggttgtgtagcattgggaataagatatttgtccaacagctccagaacatcattgcagatgtcctgcagttctgcctctatcttctcacggtactctttgcccatctgctgcttcttctcattcctctctgttttctgctcaatgctggagatgacacgccaggaagagcggcgggcgcctaccacattcttgtaggc

SEQ ID NO: 5926 - DNA, 371 bp, Homo sapiens; identical to SEQ ID NO: 74

SEQ ID NO: 5927 - DNA, 314 bp, Homo sapiens
  misc_feature (1)...(314): n = g, a, c or t
aaaaaaggaaacagaaaacagaagaaatcacttaaggagagctgtcattttctattggtgaggattcctgatcttggggaggttctggaaagttcgtctctgtttcttcttcttcctcttcttggattggnaataattncaatgcttcttcattctttggttgggaagatgtttcagttagcccaaccacttcttcttttatttcaatagtctgttcttttttttcttctgctgacagganaactatgntagatttgggtctggancacgttcttttccattcattctcaacgatgccagctattncaanttcc

SEQ ID NO: 5928 - DNA, 310 bp, Homo sapiens
  misc_feature (1)...(310): n = g, a, c or t
gaaaaagccagagaggagagctggggtccacctcgagaatcaaggccatcagaagaacgtgaatgggacagagaaaaagaaagggacagagataatcaagatcgggaggagaatgacaaggnaccctgagagagaangggacagagagagagatgtggatcgagaggatcgcttcagaagacctaggtgtgatgctctaattaaattatttgtagaggccgggcgcagtggctcatgcctgtaatcccagcactttgggagggcanatcacctgagctcaggagttcgagaccagcctggacctccgccn

SEQ ID NO: 5929 - DNA, 352 bp, Homo sapiens
ccatggtcacctgggtggcagcactgttacctggaaactgccactgcctgctcttctgtccctttgcccctttcgtggagcttttctgccagacgccactgagacagatcacaaggtattagaaaggtcatacccaaaggtaggccatatgcatctagaacttcagcccagattttgtggatgggtggaagtgtttcttcctgtgctgaggctagctattgcagagattcttttccacttgccccacgtctctgcctctggacttactgttcagggccagggtgggaggcaggggcacgtgggaaagcactgttccggttttgttctcatgccgagtctgagcacgtgccag

SEQ ID NO: 5930 - DNA, 315 bp, Homo sapiens
aaaaaaccatcatcagagatcagtgtattctagattaagtaaatctggaaagagatgagccctttctaagagagaagaatctcatagctgctttgattgctaggggcatggtggaaaaaggagtgaacctaccatgaaagaggtaatgagaagccagtctatttattaatgaacttttcaaggctacatgtggactgtcatgacaggccagaatttggaagccctaattagtcataggagagtctgtacgcacccactaactcttcccatggacctgcaccgagtgtacctgggcactgtcctaaaaaggtgtgg

SEQ ID NO: 5931 - DNA, 293 bp, Homo sapiens; identical to SEQ ID NO: 75

SEQ ID NO: 5932 - DNA, 162 bp, Homo sapiens
  misc_feature (1)...(162): n = g, a, c or t
ctgacataatggtaaccagtcagaggagggcataactatgaaactggacaccttggttgtcaggttagaaggatggggtgtagggttggtaagaaaagaattcanggaagagcatcnatcaggattatgaagaatttcgncttgagaaattacagaggattt

SEQ ID NO: 5933 - DNA, 157 bp, Homo sapiens
aaattagtattggttaacagatttaacgtagaaaatggacatataaagaatacaaggataaatgtctacatgtaataatggatggtagtgatataatgcatttttgtcatcccatgctgaattcagtaaaaaataaagctaatgacttggagctttt

SEQ ID NO: 5934 - DNA, 228 bp, Homo sapiens
cttgaagcaagtggagactataaatattcaggaagagatagtttgatttttttggttgatgcctccaaggctatgtttgaatctcagagtgaagatgagttgacaccttttgacatgagcatccagtgtatccaaagtgtgtacatcagtaagatcataagcagtgatcgagatctcttggctgtggtgttctatggtaccgagaaagacaaaaattcagtgaatttt

SEQ ID NO: 5935 - DNA, 354 bp, Homo sapiens
ctggcactgactgctcgacttttccggccacggctcatcatagctggcaccagcgcctatgctcgcctcattgactacgcccgcatgagagaggtgtgtgatgaagtcaaagcacacctgctggcagacatggcccacatcagtggcctggtggctgccaaggtgattccctcgcctttcaagcacgcggacatcgtcaccaccactactcacaagactcttcgaggggccaggtcagggctcatcttctaccggaaaggggtgaaggctgtggaccccaagactggccgggagatcccttacacatttgaggaccgaatcaactttgccgtgttcccatccctgcaggggggc

SEQ ID NO: 5936 - DNA, 265 bp, Homo sapiens
  misc_feature (1)...(265): n = g, a, c or t
ngtccacgctggtctcaagcaatcccgcccaccttggcctcccagagtgcttggattacaggcgagagccaccacgcctggcccccacctttcttttaggtcttaaagccatttgtataggcagtgagcctgttcccatcatcacacagtattttgcatggatggtggcacagagcctttataggaatatggatttttttttgnttttttgttccctcagcataggagtcatttgggaacctggcattatacgtaatgatttttt

SEQ ID NO: 5937 - DNA, 132 bp, Homo sapiens
ccatatgtgtaacctgtaccaaactaagctgttttaaatttacagactacaagcaactgaacccaaatgtctaaatgtacattcttttctgtactacatttcagctaatattgcagaactaatgacaatttt

SEQ ID NO: 5938 - DNA, 244 bp, Homo sapiens
cctgcagagccatggtgaccaaagtcttcccgcttctgccacgtcccttctgcctaccccacctccccatcaagtccctcaaaaagaagtgctcactggggtagcatgctccttgctgtccaggacagtcaccgtggcttcacagcactcttcctgggaggccctggctgaaccatcccgaataaccccagcaggggccacctgccgatggggctgggctgccaggagcagtgagacaggtcag

SEQ ID NO: 5939 - DNA, 339 bp, Homo sapiens
  misc_feature (1)...(339): n = g, a, c or t
ntttttctttaagagacagggtctcactctgttgctcaggctggagtgtagtggcgcgatcatagctcgctgcagcctcaaactcctgggctncagtgatcctccctcaccctcccgagtagctgggactacagtcacctgctaccacacccagctaatttttgtattttttgtagagacggggttcaccacattgcccggctggttgcaaactcctgggctcaaaccatctgcctggcttggcctccaaaggctaggattacaggcatgagccactgtgcctggccataaagcattatactttgtacctatactaaaaggcatctgagatactttcac

SEQ ID NO: 5940 - DNA, 111 bp, Homo sapiens; identical to SEQ ID NO: 630
  misc_feature (1)...(111): n = g, a, c or t

SEQ ID NO: 5941 - DNA, 195 bp, Homo sapiens
  misc_feature (1)...(195): n = g, a, c or t
aaacttttgagttgtagtcagaactgttgttggactgcatagttntcaaaagttttggtacatttctgactttagaaatctggggtaggaatccctttcatatgcatatagactatnttctgagcttttcaacatgttaagtggttctaatgtctgtatagntctttgccactgcatgtattgaaaggantacat

SEQ ID NO: 5942 - DNA, 374 bp, Homo sapiens
  misc_feature (1)...(374): n = g, a, c or t
nggccgatgtctgcaccaacaaaaacctgtccaaggtgcctgggaaccttttcagactgattaagagactggacctgagttataacagaattgggcttctggattctgagtggattccagtatcggttgcaaagctgaacaccctaattcttcgtcataacaacatcaccagcatttccacgggcagtttttccacaactccaaatttgaagtgtcttgacttatcgtncaataagctgaagacggtgaaaaatgctgtattccaagagttgaaggnctggaagtgcttctgctntacaacaatcacatatcctatctcgatccttcagcgtttggagggtcttccagttgcagaactctacttaagtggaaat

SEQ ID NO: 5943 - DNA, 274 bp, Homo sapiens; identical to SEQ ID NO: 313
  misc_feature (1)...(274): n = g, a, c or t

SEQ ID NO: 5944 - DNA, 425 bp, Homo sapiens
  misc_feature (1)...(425): n = g, a, c or t
aaagcagtaagtcttangtatacttacagtatgtctgtaagtcttatatactcagagaactccagccctgcctccttctagctgtgtgaccttgggcaagtgtctcaaattctctgtgcctcgaattatctgtgtctcaaattatctactctgtgagataaggagaataccacctaactcccagcatgttgggaggattaaagctttcttacatgctctactgcatgaacagggcccagaagggcatctgtgttaggccccatccaagtgtttctgatctggntgacccccagaccccactgagaagcaccacagtgtgctatcaggtacctgtctaaaccagggcagaggaacgagcacacccctaccacagncatcaaagggagcggcgactgaagnaagaagcatcttctagagactgatat

SEQ ID NO: 5945 - DNA, 359 bp, Homo sapiens
  misc_feature (1)...(359): n = g, a, c or t
ctggaagaggtgggagcccgcacggtcacaatacatgcagacacagagcagcaatacgaaacagaacagctcagagcggtcagctcctcagcagaagctgcgtgggccgccacttcccctttctgcaatcaccccatgatgtctccaccccacctcacatncagatggggctggatggcagagcagatgaagcctgctctgtggcggggcagcctaactgaaatgcacacctttatgggggaagtggacggacacctcacctcctcatgtttcacaccgtggactgcacttgagtnccagctcttcaccacatccctaggagtcttaagaggaaatcagtctgatttcttcagacagga

SEQ ID NO: 5946 - DNA, 179 bp, Homo sapiens
cctccagggtatctgcggtttccaattcacagcactacccacaccgtgggagtgggggtgtgcaccagtaccgactccagccactgcaagggtcaggagtcaagactcagacgggactttcctagggcttctggatttgggcaaacagaactgaatgagcccatagctgcttcttccag

SEQ ID NO: 5947 - DNA, 175 bp, Homo sapiens
  misc_feature (1)...(175): n = g, a, c or t
ccagtgagctggacctcatgccctacacacccccacagtctaccctaaagtctgccaaaggcagtgcaaagaaggaaggctccaaacgganaatcaacatgagtggctacatcctgttcagcagtgagatgagggtgtgattaagcccaacacccacactctcttcggggagcta

SEQ ID NO: 5948 - DNA, 300 bp, Homo sapiens
  misc_feature (1)...(300): n = g, a, c or t
aaaacaacacaagaagaagaagtcacaaagcaattgaaatgggagcatccgcttggagaattaagacagggtgctcctgagacagacttccaagacagcttctttgaagtgctgtgtgggggtaaatattcttcagcanaaganggcacaggtaagggccccgtgaaacacagttcttaatatcatctttatcttcccttaggataatataccccaanatactttgcatctataagatgtatacatcactgcagttcacgaaacacagtctgctgccaatacatatncatgttgcatggc

SEQ ID NO: 5949 - DNA, 256 bp, Homo sapiens
  misc_feature (1)...(256): n = g, a, c or t
tcgatgtaaaatgctcaagtttctgatgtttgacatggggctgcggaaacagtatcggccagacatgattattttacagatccagatgtaccagctctcgaggttgcttcatgattaccacagagacctctacaatcacctggaggagcacgagatcggcccacctctacgctgcccctggncctcacctggtgctacagtccctggatcgaccaagcttattattttttagacaagattactgcgcgcntactng

SEQ ID NO: 5950 - DNA, 179 bp, Homo sapiens
cctcctttgggagcacacgaggctaccatggctgcagcaagaagccctggtcttcctgtttacgttcttgtcagaactcgtgccttttgagtctccccggtacctgcaggtgcacattcttcacccacccctggttcccggcaagtaccgctccctcctcacagactacatctcattgg

SEQ ID NO: 5951 - DNA, 246 bp, Homo sapiens; identical to SEQ ID NO: 632
  misc_feature (1)...(246): n = g, a, c or t

SEQ ID NO: 5952 - DNA, 308 bp, Homo sapiens
  misc_feature (1)...(308): n = g, a, c or t
aaacagctctaaatgtcagtactcacagtggcatattacaaagtaataaacagtgcacacttgagggcaaaccgcatattgagctatagaagagctcactgtgattaagatgagatcaaacatcatagcagaacattagcaaattttatctgaattctgtaatggacatccatgctgcaataacattagaaaagcacgggagcctattccaaaccagcgagaacagttttgtgcaaagagtgggtctttgtgtgnttgaactcccaccacgtaagggcaaactcgatatgcatgctaatgacctacaa

SEQ ID NO: 5953 - DNA, 263 bp, Homo sapiens
  misc_feature (1)...(263): n = g, a, c or t
ccacaaagtcttctcaagtgaaagtaggggagaagcggaaagctgctgatgagacgctgtgccaaacaaaggtattgctggacatcttcactggggtgcggctttacttgccaccctccacaccagacttcactcgtctcaaacgctactttgtggcattcgacngggacctggtacangaatttgatatgacttcgnccccacgtgctgggtagcagggacaagaaccctgnggccagaggntccagatgatttggnatnat

SEQ ID NO: 5954 - DNA, 194 bp, Homo sapiens
  misc_feature (1)...(194): n = g, a, c or t
aaaggagcatctcagttacgtgtggcggacaaaaaaaaggagcagattgtgacagaccattcccatcggccaagtggtcgaacccgacatccaagacccagcgagcagccaagctcagcgcaacctccggcttctcgctctgactncaaaagggtgagcacgtcgccctcgcgcacgggccttttacattgcgg

SEQ ID NO: 5955 - DNA, 274 bp, Homo sapiens
  misc_feature (1)...(274): n = g, a, c or t
nncgaggtctggcttgcctgctggcctgcttcctggagataggatgctcagacccaccgctgctcttcaggggtcgtggaaggaattaatgcacttccttctgtcccccaatctctgtcctttacgtgtctctggagctgagcangtattctttttctttcttcatctcagtagagcttttacttttatccagcatttcttagctcggttggcaaactggatatttatgcacctgcatttcacaatccatctccaccgattattcctggacctg

SEQ ID NO: 5956 - DNA, 184 bp, Homo sapiens
gtccaggaaagaaagcaatggagtgctcactcttatgatgcaggcaaaactgaaaatgtgtttttcttctcagggaagtgataagcctctcctgaacttctgcaattctgtgtttgcatgggcttggtatgcctgagctatttctacagcggttaaagtcctgatatgtcaagttgcctctttc

SEQ ID NO: 5957 - DNA, 201 bp, Homo sapiens
  misc_feature (1)...(201): n = g, a, c or t
ccaatttggggtatggtcctgtatgtttttgtaatgtcataatgggagctgcagtgttgtgcaggtatcaaagagcttcccagttttcatgttantaaacttggaaataattntctcatgcacctgatttttagcttctatnttaacaccgattattcttnaactntatgggagtaaatacccatctgtcattaactaaaa

SEQ ID NO: 5958 - DNA, 192 bp, Homo sapiens
gtctggggcccgtggggtcagagccaagcttccatgatcatttgatgacttccaggcaggtgggggtcggagatctccagtaatgagtgacacgtctggggtttccacagctctgactcaggtggtgggagagccacgtggaagggagagccaggcaataagtccgcataatgtgtgaggtggggagccagg

SEQ ID NO: 5959 - DNA, 272 bp, Homo sapiens
  misc_feature (1)...(272): n = g, a, c or t
nggccgangtctgactctagcccaaaagggaacaggagattctggagctgaggggagacccagcaaaggaacaacctggaagccttaccccacagccacaaaacctccccaatggaggaacaatctctaaaacttgattctttagagcccangctgcagcgggagctggacnggctacaggcagccctganacagacagaagccagggagattgagnggagggagaaggccangacttggactctcctagcgcagaccaagccagtgcagag

SEQ ID NO: 5960 - DNA, 235 bp, Homo sapiens
  misc_feature (1)...(235): n = g, a, c or t
gtctggagcagcagatagaagggacagggttgcacttataacaccactatcctcccagccctggttttatcatcatcatcgagaaaaatacaantaatcagcagtgatcaaaggtaagctaaacattccatttaactaacttaaatgngacctggcgtgccgtgccatnctataaatgacataacagaataagactcacttttaattccacctctggncaattcaagaanaaaac

SEQ ID NO: 5961 - DNA, 278 bp, Homo sapiens
  misc_feature (1)...(278): n = g, a, c or t
ctggcggtagaagcgcccggttctcctcggtgttctcggtgccaatggactgcagcccgcttggcaatgctcccagtggactcatctgcagccaggatgcccttgccaggtgccacgatgcggtgagcgatgtcagacagctncttcttctgctccggggtcagtgctggatattggtagggcatggtgctggtagtagcaagttccggtgcttcagaggaaattcttcttggaaatccagacggagnccttggttgtcaagagaaataaatctttgg

SEQ ID NO: 5962 - DNA, 268 bp, Homo sapiens; identical to SEQ ID NO: 314
  misc_feature (1)...(268): n = g, a, c or t

SEQ ID NO: 5963 - DNA, 212 bp, Homo sapiens
cctcctcatcaggacacattccccatcccagaggggggtcggcactcacgattgtgatgttggctacatccttgacaaagccgatggcctttccaggttggaacttgcaataaccatccttgccctggtaggggtaggtgtcttcacccatgatccccttgttgtacaggatatactcgaaagcctggctggggagacccccttggcagccg

SEQ ID NO: 5964 - DNA, 207 bp, Homo sapiens
  misc_feature (1)...(207): n = g, a, c or t
ctgagggtctaggctgaggactggatgccaatccagcctgggagggccacacggcctggtgacacagaggtcaccccaaggggagaccaatggagggcacagagagggctctgggtctaggctgcagctctgtggcctgtgctgggtcatgaggacatggggacacagagggacgggtgaactgggtgangtgccanaatccaccct

SEQ ID NO: 5965 - DNA, 221 bp, Homo sapiens
aaacttttgagttgtagtcagaaactgttgttggactgcatagttttcaaaagtttttggtacatttctgactttagaaatctggggtaggaatccctttccatatgcatatagactattttctgagcttcttcaaaacatgtttcagtgggttcctgaatgttcctgatgatagtctctcttgtcgaactgtcaatgttaatctctctaggggactggtg

SEQ ID NO: 5966 - DNA, 211 bp, Homo sapiens
ccaccagaagcctgggaccacaaaggctactgctgaatagaagtaaacagttcatccatgatctcacttaaccaccccaataaatccgattctttattttctcttcctgtcctgcacatatgcataagtacttttacaagttgtcccagtgttttgttagaataatgtagttaggtgagtgtaaataaatttatataaagtgagaattaaa

SEQ ID NO: 5967 - DNA, 206 bp, Homo sapiens
  misc_feature (1)...(206): n = g, a, c or t
ctaggctgccatcgggccggtgcagatacggggttgctcttttgctcataagaggggcttcgctggcagtctgaacggcaagcttgagtcaggacccttaattaagatcctcaattggctggagggcagatctcgcgagtagggtacaaggcactatgaaatgatctantttcgtgggtgaggggctgaagggcctatgatgcacg

SEQ ID NO: 5968 - DNA, 212 bp, Homo sapiens
cctgggatgcagggagaaaggctgaccacaagttgagacaagatacagaaacaaacaaaaacagcagaaagtccgatcgatggtgtaagtgttgtgttcactgcttagggtgcaggtgagcttgatcgaggctcccagtaaggcagatgtagacgggggctgagtcagcacaggcagagcacagagacctgtggagaaaatgaagggcaata

SEQ ID NO: 5969 - DNA, 224 bp, Homo sapiens; identical to SEQ ID NO: 635
  misc_feature (1)...(224): n = g, a, c or t

SEQ ID NO: 5970 - DNA, 209 bp, Homo sapiens; identical to SEQ ID NO: 76

SEQ ID NO: 5971 - DNA, 220 bp, Homo sapiens; identical to SEQ ID NO: 634

SEQ ID NO: 5972 - DNA, 202 bp, Homo sapiens
  misc_feature (1)...(202): n = g, a, c or t
gaaggaggggaggaaagggagagaggaagagggagagtgaaggaggggaggaaagggagagaggcagagagggggaaggagagagggaaggaaggagagattgagagacaganaaattcctaaggggagctgtcaggtgggctggacatgggccccaggctgcactgctttatccctttgctgtaggaaagtcaagccagtt

SEQ ID NO: 5973 - DNA, 200 bp, Homo sapiens
  misc_feature (1)...(200): n = g, a, c or t
ccacccagttgctggtggacctggcagagggctgccacacacaccacttcaacagcctgctggacatcatcgagaaggtgagagccgttgtacccggggccgggtgctagcgtgccanagctccgtgggcagcaatggcctctgggccctctgtcctcctcttcgagtgaccggatggctgtgttcgtangtgaggctnc

SEQ ID NO: 5974 - DNA, 200 bp, Homo sapiens
ccatgtcattgtcccacttataccgggatggggaaggccgcattgatgatgatgatgacgagcgggagaactttgagatcactgactgggatctccagaatgagttcaaccccaaccgacagcgccactggcagaccaaggaagaagccacctacggggtgtgggcagagcgagactcggatgatgagaggcccagcttt

SEQ ID NO: 5975 - DNA, 181 bp, Homo sapiens
  misc_feature (1)...(181): n = g, a, c or t
aaacagtgtttctgaaattggatggctggctaatagacactgaatcacccggagtgcttatcttaaaattgcagatttagggagcctgccaatttaacagtctcatcaggtgattcttttcaacagtaatgtttgagaattactgggttaaattgtgggaaagggtccagattttacctcn

SEQ ID NO: 5976 - DNA, 213 bp, Homo sapiens
  misc_feature (1)...(213): n = g, a, c or t
ccaggctggtcttgaacttctgacctcaggtgatcccaccttggcctcccaaagtgctgggattacaggcatgagccactgtgcccagcttaagatctctgttttaatgttaatgctggtcagttgtgtctggattccagagggaggaaggtagaatgaggcatgttgacacctccccttcccatcatggcctaagctggtctttttangtta

SEQ ID NO: 5977 - DNA, 105 bp, Homo sapiens
  misc_feature (1)...(105): n = g, a, c or t
aagagaaccaaacatcangggaaccaaagggtcacaatccccgtggcactggagaatacaaatatctttattagaccaccgataggaccctgagaaaacccttcc

SEQ ID NO: 5978 - DNA, 217 bp, Homo sapiens
  misc_feature (1)...(217): n = g, a, c or t
ttccgcgccgccacaatggtgcgcatgaatgtcctggcagatgctctcaagagtatcaacaatgccgaaaagagaggcaaacgccaggtgcttattaggccgngctccaaagtcatcgtccggtttctcactgtgatgatgaagcatggttacattggcgaatttgaaatcattgatgaccacagagctgggaaaattgttgtgaacctccaagcag

SEQ ID NO: 5979 - DNA, 226 bp, Homo sapiens
aaagaacttgcccaacatctcagaacaaatggaggaatcactattgaaacctaggcaatctgactcaggaggccacagtcttatatactgcattagaaagctttagagagccttttctttttctttgagaccgagtctcactctgttacccaggctggaatgcagtggcatgatctcagctcactgcaacctctgcctcctgggttcaagcaaattttctgcctta

SEQ ID NO: 5980 - DNA, 201 bp, Homo sapiens; identical to SEQ ID NO: 315

SEQ ID NO: 5981 - DNA, 396 bp, Homo sapiens; identical to SEQ ID NO: 77
  misc_feature (1)...(396): n = g, a, c or t

SEQ ID NO: 5982 - DNA, 202 bp, Homo sapiens; identical to SEQ ID NO: 78
  misc_feature (1)...(202): n = g, a, c or t

SEQ ID NO: 5983 - DNA, 183 bp, Homo sapiens
  misc_feature (1)...(183): n = g, a, c or t
ctgatttctgttgaaaaagtaaaaggtgatccctctaagaaagaaatgaagaaagaaaatgatgaaaagagtagttcaagaagttctggagataaaaaaaatacgagtgatagaagtagcaagacacaagcctctgtcaaaaaagaagagaaaagatcgncctganaaatctgaaaaaanaag

SEQ ID NO: 5984 - DNA, 219 bp, Homo sapiens
  misc_feature (1)...(219): n = g, a, c or t
ctgccagacccgccaacgatcacagcgtccccctgctgcaacactgtggtgctgcccagtggcactccttctccaggacccacaacgtctgtgaactctgtgtcaaccagacctccgggggcatgaagccgagctcggtcagcgtgccacagtgcagcttttttgaaatggcagcagctctggattctttctacctcaaggagcnaaacttttattaat

SEQ ID NO: 5985 - DNA, 202 bp, Homo sapiens
  misc_feature (1)...(202): n = g, a, c or t
cctaacacccaagctcttccttgcagaagagctgagatgctaaggagaccatctggagtgtcataataagcccttgggatttgctgagctcccacatggctttcttcaaccacctggcccactttcttcaaccacattccactttggaatgcggtgtctttaaggcaccaagtgatcttaanaatgggctctgtttttgaat

SEQ ID NO: 5986 - DNA, 220 bp, Homo sapiens
  misc_feature (1)...(220): n = g, a, c or t
aaatttcccctttcctactacttccacagtgactctgaccttcccgtcgtaagttctctcagccgggctaaatttggcagtttctggttccatttcaagcaattctcgcacaggggaacggggtacatttgcagaaaacttttctattagtggccgcatcatgggatagtacacctgccagactgtctccagtgacatcccactatccatgtaatggnac

SEQ ID NO: 5987 - DNA, 209 bp, Homo sapiens
  misc_feature (1)...(209): n = g, a, c or t
ctggaaaagaaacctatctcagggatatatgacattatgccgagaccgggttcatgcactgattgatttgacaggtgaactgctccatgttgtgggaccagggatgtgaagcaagtacatcaaccttgaaacgcgcgcagttggtttgggagagccggcctgaggaagcccctgccccaaggctgcccacagagggaangattgtgtgt

SEQ ID NO: 5988 - DNA, 118 bp, Homo sapiens
aaaaaaataattcgtaaatgttacagtgttggtgttaaaacacaatatattatgatactcaagtaagaactcagtacctgaaaacaatgacaaaacatgccatgggatgtttatgctt

SEQ ID NO: 5989 - DNA, 182 bp, Homo sapiens; identical to SEQ ID NO: 317
  misc_feature (1)...(182): n = g, a, c or t

SEQ ID NO: 5990 - DNA, 127 bp, Homo sapiens
ctgtcaccttattgggggaaaaatgcctgaaaattagggggcacttcaagtagatagcttctatttcctatatttgtcttatatacaagtatttgcttttatcaaaataattccaataaagcatttt

SEQ ID NO: 5991 - DNA, 241 bp, Homo sapiens
  misc_feature (1)...(241): n = g, a, c or t
aaaaaattaattacttatttttggtggagaccagggtcttgctttgttgcccaggctggttttaactcatggcttcaagtgatccgatcctcctgcctgggcctccaaagcgttgggattacaggcaaaggcccagcccctaaggtcatgtacttaccaggtctggctcctggtctcaggagcccgagctgttctcttcctccccttccccgtcttcactctcagnctgaggccacgcccc

SEQ ID NO: 5992 - DNA, 356 bp, Homo sapiens; identical to SEQ ID NO: 79
  misc_feature (1)...(356): n = g, a, c or t

SEQ ID NO: 5993 - DNA, 149 bp, Homo sapiens; identical to SEQ ID NO: 80
  misc_feature (1)...(149): n = g, a, c or t

SEQ ID NO: 5994 - DNA, 140 bp, Homo sapiens
  misc_feature (1)...(140): n = g, a, c or t
aaatacacattacagtgttttatattatgtaatgctaagttgtaattcagcttttaacaaatctttttttaggtagtaaaaaaaaaaatactcaacaactaataggcccanagtttatttccaaatgagacactaaattt

SEQ ID NO: 5995 - DNA, 292 bp, Homo sapiens; identical to SEQ ID NO: 81
  misc_feature (1)...(292): n = g, a, c or t

SEQ ID NO: 5996 - DNA, 218 bp, Homo sapiens
  misc_feature (1)...(218): n = g, a, c or t
ccacagcccatgcgaaggcccgcatgagcaagactgtggacctgcaggatgcagaggaagctgtggagttggtccagtatgcttactttaagaaggttctggagaaggagaagaaacgtaagaagcgaagtgaggatgaatcagagacagaaaatgaagangagaaaanncaagaggaccaggagcataagaggangagaaggaagactcgccagnca

SEQ ID NO: 5997 - DNA, 110 bp, Homo sapiens
  misc_feature (1)...(110): n = g, a, c or t
ccaagaggtaccatggttgccattagtcagatatggaactgtggaggatttgcttgcttttgcaaaccatatatccaacactgcanagcattnttatggacaaagacnac

SEQ ID NO: 5998 - DNA, 240 bp, Homo sapiens; identical to SEQ ID NO: 319
  misc_feature (1)...(240): n = g, a, c or t

SEQ ID NO: 5999 - DNA, 215 bp, Homo sapiens
  misc_feature (1)...(215): n = g, a, c or t
cctcgagctcccttcagcgaggcaccttacgcatggaataggaggtttcacccacctgaaaccttctaaatacaatatcaatggtgaaaaaccaaaaacaagagagaaaataaaaacaagatcattagtaaaagttcaacaaagcaattgaaattctttggatgtctattacatatgggaatgaggacagtctcaagtctntaatatgggaaaca

SEQ ID NO: 6000 - DNA, 630 bp, Homo sapiens
  misc_feature (1)...(630): n = g, a, c or t
ctggccgatttacaccttgataacaagaagcttggagagatgcgcctgaaggaggcaggcacagtggggagaggaggtgggcaggaggaacggccctttgtggcccggtttggatttgacgtggtgacgtgctgtggatacctcccccaggtgaatgactggcaggaggactgggtcgtgttctatgcccggcagcgcattcagccccagatggacatggtggagaaggagtctggggacagggaggccctccactttggtctgctctgcagttaaagatcctgacctgttccgtgacctggagatcatcccagccttactccacggggacctctggggtggaaacgtagcagaggattcctctgggccggtgatttttgacccacttctttctacggccactcggaatatgagctggcaatagctggcatgtttgggggctttacagcttcttttactccnctaccacggcaaaatcccaagccccaggattcgaaacgcttcagtgatagctnttactcttgaaccntgaatatttgatcgggtcaaagactcctgactatgagaattggcaatacggctnttgaagngactcgcgaccctaggnatcaccattggctctatgntcac

SEQ ID NO: 6001 - DNA, 341 bp, Homo sapiens
aaaaaaatctcaaaacatgttcaaacacattcagtagcaaagatccaccattggcacacacattaagaaagcacacacactaggcttctagttgggctaattaaaatctctatggctggaaaggtggttggttgtacttaattaagcttttttgaagtgcaaagctatgcataacagatgagcttgaaagctgcagagtttaagatagacttaatttttcatgattttcccaaagccaggtgatgatatttatttaatttgtggcttcagggtgcacctggaagaaacataagatacagaggcagagaccttaatgtaacttagtcagaaatacatttttt

SEQ ID NO: 6002 - DNA, 212 bp, Homo sapiens
aaaacacatcaattctatgaggtaggtattaaccctttcttacagaagaaggaactgaaccccatgaaggctacacataataagtggcagaggtgaaatttgaacccagatctaccaactccaagtttcttttcaatttgactataactgcatttgtgattgcttgtgacataagacatacgagagagtagatttgaattatgtataagcag

SEQ ID NO: 6003 - DNA, 335 bp, Homo sapiens
ccaggtacatgggccggatggcaaagagtgggaaggtgtgcaccttgatcatgatggtcatgaaggccatgtacagcagaaccttgatgaagcctgaggggaggggatgcagaaagcagcaggtcacagggccaggaggcagagtggaggatgctggtccagatcaggagaggcccaggcccctctcacctgtaaacagctctgtgtagagcatgtacacagccttgttgtcccaggggttctcactcttggaggtccacggagtgcagcacatacttgatgaagatggtgagcaccatcgtcatcaggatggcatactcaaagccaaacaccag

SEQ ID NO: 6004 - DNA, 247 bp, Homo sapiens
  misc_feature (1)...(247): n = g, a, c or t
ccaggatggtcttgatctcctggcctcgtgatccgcccgcctcagcctcccaaagtactgggattacaggcgtgagccaccgtgcccaaccatttgtcattttttattgtgggtacactagtgggtgttaagtcatatctgcttgtggttttgattttgcattttcttgatggcttgtgatgttangcttttcttcaaacacttattggatgctcttatatctttcnttacaaaaaggttattttcc

SEQ ID NO: 6005 - DNA, 187 bp, Homo sapiens; identical to SEQ ID NO: 545
  misc_feature (1)...(187): n = g, a, c or t

SEQ ID NO: 6006 - DNA, 367 bp, Homo sapiens
  misc_feature (1)...(367): n = g, a, c or t
ccaacaggacccgcaaaaaaccctgaaaattgagtgcctctgtatgacaggatgggaggtgagacaggtctccttataccctctcccacacattcatgtaaaaatagatagaatggaaaaacagactgcttgtgacaagaagatactaacttacaaacaaaacctaaggccacgcaaggcaaaagtaaagtcacgcctcaaaattcataatatctagagaaacaggtctgttttcttggntggnatggaatcaaagtgcagatagcagacccccttccttnctacctcctccaaactttanncaaactttcacactctcaaccagacctgnccgggcggccgcttcgaagggngaaattccanccac

SEQ ID NO: 6007 - DNA, 496 bp, Homo sapiens
ccagtgcagaatgctccagagccttaatgacagaggcataggagtctgagaacttcgtgtatttgcccacaagggcaatagagcaggtctccagcaagcgatcatatctgtcagccatctctttccatttcatcagcatttttcttggctgcctctcaataggaaggtcaagtcttcgaagaaaataatctacaaccccttgctcctctaacaacaaggggactcggtagatggatgaaacatcgtggacacagatcactttgttcaggctcaacatggcagaacattgatattttctccttcactgatgtgtcaagtggatttgagcacctgcatacaaccagatctggggaaagcccaagtcctctaagttcccgaacactattctgggtaggtttagtcttctgttcccctgttgaacttggctggggaactagactgacgtggatgttacaaaagttctctcttttgaccttgaattggaactgacggaagg

SEQ ID NO: 6008 - DNA, 264 bp, Homo sapiens
ctgtgacactactgagtataatttgcctaattcagcatactggtatttgattggaggacctggaccttcatctaaagacacaagcataaaagtagcaggtacactcaatttcagaagctgtgtcttctctgccacacctaaattggcatacattacaaacaggttgaaatactgctgtaaatgacgcccatgctctgaaacttcccttctcaagagatttagtactgctcttaataaagtggatcactcaagctttaagttgtc

SEQ ID NO: 6009 - DNA, 101 bp, Homo sapiens
tgaaaaaggaactgttcagcaggctgatgaataagatctaagagttacctggctacagaaagaagatgccagatgacacttaagacctacttgtgatattt

SEQ ID NO: 6010 - DNA, 227 bp, Homo sapiens
  misc_feature (1)...(227): n = g, a, c or t
ccagaggaagcacctggngctgaactaggcttgccctgctgtgaacttgcacttggagccctgacgctgctgttctccccgaagaacccgaccgacctccgcgatctccgtcccgcccccagggagacacagcagtgactcanagctggtcgcacactgtgcctccctcctcaccgcccatngtaatgaattattttgaaaattaattcccccatnctttcaaaatc

SEQ ID NO: 6011 - DNA, 132 bp, Homo sapiens
cctgaacaaggacctctgccctccctattcagacccttcgttgcctcacctggtcaatacaaccacttcacctctgaccgcaggggcaggggactagatagaatgacctactgagcctcgtctgtctgtctg

SEQ ID NO: 6012 - DNA, 181 bp, Homo sapiens; identical to SEQ ID NO: 3071

SEQ ID NO: 6013 - DNA, 166 bp, Homo sapiens
  misc_feature (1)...(166): n = g, a, c or t
aaaaggcccacttgccgtaacctcttttggtntattttgcttcccattcagnccanagtttatatgataaaggngttnacttttacttcccagtctccaagtgctaacacataaacacatacatgtctgactgttgcagaactgttcgagctcctaattcagtgtt

SEQ ID NO: 6014 - DNA, 219 bp, Homo sapiens
aaaggaggttatgggctgagagtagattgctgaaagtcatgatttaggaagtgtaaggttactggtaatgacacaccgcaagtgcagctaagggagttgacagttgggatgagtgaaagaaaagattattagtatgaggatttcaaggaatcgagaaagtagggctttggatgagttgtttttgtagaagtcaccaatgatgacaatgggatgctgata

SEQ ID NO: 6015 - DNA, 244 bp, Homo sapiens
  misc_feature (1)...(244): n = g, a, c or t
ccttcagaagttaaacgtgatcacttgtgctgggacagccaatagaggagtctgagatgatcatttccaaggagttcttcacagaggaggtagctttggagctgggctttgaggttgggcagtatttgaaacagtagagacggagcaaagaacccctcctggtggggtcagtcattcgctttcttttcctcctcaggaccanggctctttgaagaagaaaaaaggcccacaaggggaccccagg

SEQ ID NO: 6016 - DNA, 102 bp, Homo sapiens
ctatagggctcgagcggccgcccgggcaggtctgtggcagcgcattagttttggcgcaagcgagcctatgctgcagggtcacttttggctggtcagagaagg

SEQ ID NO: 6017 - DNA, 475 bp, Homo sapiens
  misc_feature (1)...(475): n = g, a, c or t
aaaaaaggtgacttggattaaagtatgcaaactcaaggagtagtacgagcccacttgagtcaagttagcttagttgctaaagagcttgataccaaaattacttttgtttacttgatgaatgggatagttgttgcacagggccactgatctagattactgtcttatttgtcaagtacttatagttgtagaagtagcagtgtgaaaattatcggaatgganaaagggccaatgataaaccaatttattttcaggtaccagcaacttcaaggtttctgccacccactgttgtatacacttattgagaaaacaatgcaaaatgtgaagcatccggttactggacaatttctatatcaggacagcaactgggccagcaaagttgagaaactcactttagacaatgctgctttccctttccttgcatattctggaatcccagcagtttctttctgtttttgcgangtaagtctgttcattt

SEQ ID NO: 6018 - DNA, 270 bp, Homo sapiens
ccttgcctcagatccaaggtcactcggaagaggccatgtctaccctcaatgacactcatggaggaaatgctgagagaagcattcagatgcatgacacaaggtaagactgccaaaaatcttgttcttgctctcctcattttgttatttgttttatttttaggagttttgagagcaaaatgacaacacccagaaattcagtaaatgggacttttcccgcaaaagccaatgaaaggccctattgctatgcaatctggtccaaaaccactcttc

SEQ ID NO: 6019 - DNA, 224 bp, Homo sapiens
  misc_feature (1)...(224): n = g, a, c or t
aaaacagatttcatctagagcttcatttccctgttgagctttcttaaagagttctcttaggactgactgtcggaactggacaggtaaactcaaggttaagttgtcttcaatgaaaatctgtattacctcctgatagttgccagatctcaaacaaatatggacttgactatatggagtcaactgttgagatgtactatcagaagaaggtcnaaaacattccctgc

SEQ ID NO: 6020 - DNA, 214 bp, Homo sapiens
ctgcactgggagagctgagagcctccatgacagaccccagccagcgtgatgttatatcggcacaggtggcagtgatttctgaaagactgagggctgtcctgggccacaatgaggatgacagcagcgttgagatatcaaagattcagctcagcatcaacacgccgagactggagccacgggaacacatggctgtggacctcctgcttacgtcttt

SEQ ID NO: 6021 - DNA, 173 bp, Homo sapiens; identical to SEQ ID NO: 3082

SEQ ID NO: 6022 - DNA, 391 bp, Homo sapiens
cctcctccctcacacacacgtcgccctgtcagaaggccaggcacactactgcagccaggatgctgggatagcaaggggataggtgctccaaccttcaccttccagaaaggcagggtgatctgaagtgacgtgtagctgagagctggatggggagaatttcactttcccagttgatccagaaaggaaagaaaccccagagcattctcttggaagaacttaaactggctttgggctccagtgcgagcgaatgacttgtggaaaggggcaccatgatgagaggccggggccggtgggtgttgctgtctgggtgaacatctcgtcatctgtctgttctttctccccggcatcatatcccttatagtctggctccaggtaaacagtgtctctgcca

SEQ ID NO: 6023 - DNA, 582 bp, Homo sapiens
  misc_feature (1)...(582): n = g, a, c or t
aaaacagcaaatagcagatttacgggaagatttgaaaagaaaggaaaccaaatggtcaagtacacacagccgtctcagaagccagatacaaatgttagtcagagagaacacagacctccgggaagaaataaaagtgatggaaagattccgactggatgcctggaagagagcagaagccatagagagcagcctcgaggtggagaanaaagacaagcttgcgaacacatctgttcgatttcaaaacagtcagatttcttcnggaacccaggtagaaaaatacaagaaaaattatcttccaatgcaaggcaatccacctcgaagatccaagtctgcacctcctcgtgatttaggcaatttggataagggacaagctgctctcccagggagccacttgaaccactgaacttcccagatcctgaatataaagaggaggaggaagaccaagacatacagggagaaatcagtcatcctgatggaaaggtggaaaaggttataagaatgggtgccgtgttatctgtttcccaatggactcgaaaggaatgattgcagatgggaagacatcctgtccttttttatggtgac

SEQ ID NO: 6024 - DNA, 284 bp, Homo sapiens; identical to SEQ ID NO: 82
  misc_feature (1)...(284): n = g, a, c or t

SEQ ID NO: 6025 - DNA, 190 bp, Homo sapiens; identical to SEQ ID NO: 3088

SEQ ID NO: 6026 - DNA, 184 bp, Homo sapiens; identical to SEQ ID NO: 3690

SEQ ID NO: 6027 - DNA, 138 bp, Homo sapiens
cctcaggcacttggcctttgttttcacaccaacttgatgggttctactataagatgctaaaaaggtgggttgtgtgtggttcagattggttgatttgtaaccctagttgtgcataagaattgcccagatatttttttt

SEQ ID NO: 6028 - DNA, 434 bp, Homo sapiens
aaacatctggctcgcaagctgactcacggtgttatgaataaggagctgaagtactgtaagaatcctgaggacctggagtgcaatgagaatgtgaaacacaaaaccaaggagtacattaagaagtacatgcagaagtttggggctgtttacaaacccaaagaggacactgaattagagtgactgttgggccagggtgggaggatgggtggtcaaggtaaagacagactctagggagaggaaatcctgtgggcctttctgtcccacccctgtcagcactgtgctactgatgatacatcaccctggggaattcaaccctgcagatgtcaactgaaggccacaaaaatgagctccatctacaagtgattacctagttgtgagctgttggcatgtggttagaagccatcagaggtgcaagggcttagaaaagaccctgg

SEQ ID NO: 6029 - DNA, 130 bp, Homo sapiens
aaaagtcgacctgttttgcagaaagtctgctgtttttgtactaaaggctttggaatttggcatttagctaggaatgcacattctttcacctcattcatactttaagaaccacagaagtgactctgcttgg

SEQ ID NO: 6030 - DNA, 232 bp, Homo sapiens
ctggcaagatctggaccctgcaaaccagtagcccctctggaccccccagtgaatgctgagatggagctgacagcaccgtccctcatccagcccctgggaatggttcccctgatccccagccccttgtcatcagcagtgcccctgatcctacctcaggccccttcaggcccatcctatgccatctacctgcagcccactcaagcccaccaaaagtgggaacgccaccccaagg

SEQ ID NO: 6031 - DNA, 214 bp, Homo sapiens
  misc_feature (1)...(214): n = g, a, c or t
ccttgcgggaagacctcatgggacgcaaggactccctgggcagagggtgggcccctggtcctggaggcacagaatcctcgacccacacgactatgtgacctctttataactggggaagacttcgatgatgatgtgtgatctgggactggcaggttattaatcgagatacacttgttaggagggacagggttcccctaaggcacttttacctcgn

SEQ ID NO: 6032 - DNA, 212 bp, Homo sapiens
  misc_feature (1)...(212): n = g, a, c or t
ccatgggaagcccgagaattggttcctatagacccggttcctgatgaattcccaggccaaaagaaccaccctgacaaattttgggttctgaaagtcttattattggacagtattgcatagctagagaaggaaaaggatttactcatcctgtagggcagcttanttgtcttgggcaaaagctgtataatggtaccacaaaaacagnnacatgg

SEQ ID NO: 6033 - DNA, 181 bp, Homo sapiens
  misc_feature (1)...(181): n = g, a, c or t
aaaaaaaaaanccttcaaaaataaaaataanagttatttanccttgtgaatattttgaagtaaagtttcttgaatttccgtgatgaactcttcaagcaattcaacttctcagagtcatcactcaaaagttcctttgacatgggacctatcccacggngacaaagcggnttccccctttgtt

SEQ ID NO: 6034 - DNA, 252 bp, Homo sapiens
aaagctcaaacttacagagtctgttgtaaggttaatacatagaatgctagctttttagtcacctgagaatcaggaaattcacatgaacataattccctatactgacaaagaactatagctacctatgggcttgtcaagttcctacgcttcattcagcatgaaattgcacttttcttgatatgtataaattaaaatctatgcaactgtctgtgcttggggttgcctcatatcacatctataaaaacagcattt

SEQ ID NO: 6035 - DNA, 398 bp, Homo sapiens
gaagagaaagacagctctcagtctgagtaaaaccgtattgagagaagaaaagaggttgaaagaatcttaaagacaaattcagattacatgtaacattggtcaaattgaccagaaaatattcttccaaagaagttcttctctaaacaccaaaagtgcacagctactctcagcatgagaaatacaagtattatgagaaagagggcttattctgacaagaaattcctctctgctgctctcccatctgccggccgttggattgggaatctatactggaacacacctgacaacctccaccagcactttttgatgaagaattggaattcactctattcacatagtagaattatatcagagattgcaagatagctaactgaagagctactatgattcttgggtgg

SEQ ID NO: 6036 - DNA, 226 bp, Homo sapiens
gtggaattggtgattctgaattgtcctttactaatggtgttgagttgctctgtccctattatttgccctaggctttctcctaatgaaggttttcatttgccattcatgtcctgtaatacttcacctccaggaactgtcatggatgtccaaatggctttgcagaaaggaaatgagatgacagtatttaatcgcagcagtagcaaacttttcacatgctaatgtgcag

SEQ ID NO: 6037 - DNA, 157 bp, Homo sapiens
ggtatgttgtctggttctgattggtatcacatgagctgctgagctgaaatcacagtggtttatttggtgtcttgcaggacccagcctttatatgttaatgtttttccctcattggtatgggatacctacaggatgaagttcagacttcatagcaagg

SEQ ID NO: 6038 - DNA, 375 bp, Homo sapiens
  misc_feature (1)...(375): n = g, a, c or t
cctgaaggacccagggccctctggctggatgcgtttgcctatcaggacccagaattacttacagacctgtttagggctaggcttggcctctttcttgagctcatctggaggggtgtggcaacactcattcttcatccttattctccctggctgtgggcaacactggtcctcagtgtcaccagatggtcctcctctgtgcccatgacccctcancaaccaaggctggncctgcagaataaatgtgtgtgcccatgatcacacccaggggcacaggccacatacgtttccctgaaaccttgggctccacctccatcccgtccatgtgggagggaacttgggtcccagcagtgtgtctttcagcaccaagtcatgttt

SEQ ID NO: 6039 - DNA, 298 bp, Homo sapiens
caggtcctccatcctgtggaacgtgggaaaactatcttgagtgttggcgtgttctaagtatgacataatagtttaatgtatgataaatcatgggtgtttagacgaaagatttacacatataaattggaggctttagcggtcttagtgtaactaacttttcgtccccttaacccttgatgcctgttctatgggtctctagagcggaaggagcattatactccggaaacattgctggaaaggggttatgagaaattcctctctgtatgctaactccgtaatacaagcgtttgtgtatttt

SEQ ID NO: 6040 - DNA, 216 bp, Homo sapiens
agtgacccgagacccacgtgcccaagactcccggggtctgaacctaaactttgtacacgttactaacataccagttcgcttacctaaaagggctaggtcatatcttaccacgtagacaaacatttcctctagaaaaaaggagcagcagtgatcctcttggcttccttcagccagtgctttaggacatgcaagtccctgtagtaagggaagtctatg

SEQ ID NO: 6041 - DNA, 224 bp, Homo sapiens
  misc_feature (1)...(224): n = g, a, c or t
gttgttgcctgggctggacgtggttttgtctgctgcgcccgctcttcgcgctctcgtttcattttctgcagcgcgccagcaggatggcccacaagcagatctactactcggacaagtacttngacgaacactacgagtaccggcatgttatgttacccagagaactttccaaacaagtacctaaaactcatcngatgtctgaagaagagtggaggagacttgnc

SEQ ID NO: 6042 - DNA, 558 bp, Homo sapiens; identical to SEQ ID NO: 546
  misc_feature (1)...(558): n = g, a, c or t

SEQ ID NO: 6043 - DNA, 374 bp, Homo sapiens; identical to SEQ ID NO: 83

SEQ ID NO: 6044 - DNA, 307 bp, Homo sapiens
  misc_feature (1)...(307): n = g, a, c or t
ccatttaccagactccgacacaatgggccaccaccagtgtgacagcaggacatcctaatatatggatcttgatttttaagtttcagtatctgaacttcctaaattantaacttttagctgggaaagtatagcatgaaaccagaggttctcagaatgactgtaagatagcttacatttcctctttttgcctttatctccccaactaaaatcaatggggaagaantctgcctatgatctttgaatgagctttttaaggaagaaatattatatattgtttgttaaagnttattgaaataaagaatcattt

SEQ ID NO: 6045 - DNA, 223 bp, Homo sapiens
  misc_feature (1)...(223): n = g, a, c or t
ctgaacgtctgtgggtgagccggggtcccctgggagggtcttcttgcactctgactgcagtcggtaggcactggacgtcagtaaacgaagggaagtcctcaccatatcagacttgggttttttggggaataatgctgccatttctgtaacagctacgtgtatcctctctgagcagggaatataactgtcatgtttattttcttgggctgctcttaaaanctcc

SEQ ID NO: 6046 - DNA, 329 bp, Homo sapiens
  misc_feature (1)...(329): n = g, a, c or t
ccttgcctcagatccaaggtcactcggaagaggccatgtntaccctcaatgacactcatggaggaaatgctgagagaagcattcagatgcatgacacaaggtaagactgccaaanaatcttgntcttgctctcctcattttgttattnggttttatttttaggagttttgagagcaaaatgacaacacccagaaattcantaaatgggactttcccggcagagccaatgaaaggccctattgctatgcaatctgntccaaaaccactcttcaggangatgtcttcactggtnggccccacgcaaagcttcttntgacggantctaagac

SEQ ID NO: 6047 - DNA, 357 bp, Homo sapiens; identical to SEQ ID NO: 84

SEQ ID NO: 6048 - DNA, 202 bp, Homo sapiens
  misc_feature (1)...(202): n = g, a, c or t
aaaatcagattttctaaactacaattgttttagaacactgtatgaagaacttatctagtcatagttatttgtagtcaggattttaacagcttgcaacaggtaatgttttgaatataaatatctttccaaagngttactaatggcaaagagataannttctaggctnctattcttgctgcttgaantcagaactgntgatgga

SEQ ID NO: 6049 - DNA, 437 bp, Homo sapiens
  misc_feature (1)...(437): n = g, a, c or t
ccatgagtgacaggtggcctcttggtgggagaggtggggcagggggaaggcagctcccactagaccagggcagtatttaggggaaggaggcagattggagcagttggctgccaacacctggcctcactcagggagaggggccttgggcctggaagatatctgggtgaggtacccacaccatctgctgcaacctctgttgtatccattatgggctcacgccattcacaggcatgaattgagcacctagtatgtgggaaaacaggggaaacaganatggtacagacatggtctccatccttcgggggctccagtctagttgggggagatcagagaagttccatttgccactctangccaagctaggtaagcggcanagccatnaagcattgtgggagctttcaaggaggnagtgagcccttgcattcacggaagaagga

SEQ ID NO: 6050 - DNA, 130 bp, Homo sapiens
  misc_feature (1)...(130): n = g, a, c or t
aaaatcttgagggattgatctcgcctcatgacagcaagttcaatgtttttgccacctgactgaaccacttccaggagtgccttgatcaccagcttaatggncagatcatctgtttcaatggcttcgtcag

SEQ ID NO: 6051 - DNA, 355 bp, Homo sapiens
  misc_feature (1)...(355): n = g, a, c or t
aaagtcaataaattgttattcgaggaattccatgttgtgatttcttccactgtccatcaaggtcactttagatcctctaaagagctggagtcaaaagatttatcttcaagtttgccctttttaatgaaactgatccagttgtcctgtcagcccataattactttggcttctgcatctcgttttaatatggatatactgatgaagacttcaaaattcaccaagaatntttgggatctaatttcttcaaccaatttacttnaggggcctttttactgtaggtggtggggatctacctggttctcaattttgacncccctctcaacatgaatgagtgtcaaatnacattcattcctaa

SEQ ID NO: 6052 - DNA, 129 bp, Homo sapiens
  misc_feature (1)...(129): n = g, a, c or t
ccttgccgtccttctcgtggaacccttcgggaccaaagaaggctccacactgtgcacataagaagtgttcagggtgccacgtccggtcaagggctgtcnccactttattccaaagatggggccgntgna

SEQ ID NO: 6053 - DNA, 102 bp, Homo sapiens
  misc_feature (1)...(102): n = g, a, c or t
ccagcccgaagtcgatgatgtggatggcatgctgccgcttggtccccgggcggcccaccaggaagttctcgggcttcacgtcccggtngattaggctcttgg

SEQ ID NO: 6054 - DNA, 118 bp, Homo sapiens
  misc_feature (1)...(118): n = g, a, c or t
ctgttgatctacctcctgaatttattcacctttatatatcaaattgcatctctacttgtgaacagattaaggataaatatatgcagaatcggttggtgcgtctngtntgtgagtctct

SEQ ID NO: 6055 - DNA, 372 bp, Homo sapiens; identical to SEQ ID NO: 85

SEQ ID NO: 6056 - DNA, 268 bp, Homo sapiens
aataagtagaaaccaaagcacagctaaaaattccactgctcagtttatacactaacagttctagcgtttgcagtgttaaatactttaggctccagatattatcacctttgatataatcgccttggatgattagttttctgttggagaaacttagtatcttttactcttcattactctgtattgctgaattgaatcctatcctttgtgctcaacttttgtgtgatcttaaagtgagctttatcattctaaacgaatctgtgtctacttt

SEQ ID NO: 6057 - DNA, 202 bp, Homo sapiens
ccttctttagctctggaaagaataaggctgccttggaggccatcgagcgtgccgctttcttcgtggccctggatgaggaatcctactcctatgaccccgaagatgaggccagcctcagcctctatggcaaggccctgctacatggcaactgctacaacaggtggtttgacaaatccttcactctcatttccttcaagaatgg

SEQ ID NO: 6058 - DNA, 125 bp, Homo sapiens
cctcaatgcctacctggaaggttcatggcatgaagctttgctgtattatgttttagcagcagaaactggaattgaagtgtcacagacaaatttagcacacatctgtgaggagaggccagacctgg

SEQ ID NO: 6059 - DNA, 250 bp, Homo sapiens
  misc_feature (1)...(250): n = g, a, c or t
ccttccttgccaggacctcgagtttgttcagttccaccccacaggcacatatggtgctggttgtctcattacggaaggatgtcgtggagagggaggcattctcattaacagtcaaggcgaaaggtttatggagcgatacgcccccaccgcgaaggacctggcgtctagagatgtggngtctcggtggatgactctggagatccgcgaaggaagaggctgtggncctgagaaagatcacgtctacctgcag

SEQ ID NO: 6060 - DNA, 116 bp, Homo sapiens
  misc_feature (1)...(116): n = g, a, c or t
ncgcggncgaggtccagccgcacatactgtcatgaactaggtagatctgccccaagggagatggctgcatttgaaattttctgtaacaccctaatgcttagcccattaaaanctca

SEQ ID NO: 6061 - DNA, 129 bp, Homo sapiens
  misc_feature (1)...(129): n = g, a, c or t
gcgccngggnaggncctgcatggctgccagccgggctccgtgtctgnggataagaagggctacatctttctgacccttcgagaagtcaacaaggnggngatcctggacccgaaggggnccctccttgga

SEQ ID NO: 6062 - DNA, 111 bp, Homo sapiens; identical to SEQ ID NO: 86
  misc_feature (1)...(111): n = g, a, c or t

SEQ ID NO: 6063 - DNA, 419 bp, Homo sapiens
aaattattatcttcttaacagtttagtcccacctcttacttcctgcctcagtctgctttctctactgtctggattaattaggcagcctgctataaagttaaagtcacacatttctattttgcaaacactgtgattactctttgctttgtagtttgctttgctttgtagggttctgcttttaagtttttctctttttcagacaaattactgataaaaatgatattgctctatatgtaatatatcctgaaagcattattttttgttgaataggaaataaaattaatgaagacagaggctagaaagcatccattaattaatgagacacacttaactacttatctctaaaccatctatgtgaatatttgtaaaaataatgaatggactcatcttagttctgtatataaatatattttctttct

SEQ ID NO: 6064 - DNA, 228 bp, Homo sapiens
  misc_feature (1)...(228): n = g, a, c or t
aaaatttcttagaaaacaatggaatgagaatttaagcctcaaatttgaacatgtggcttgaattaagaagaaaattatggcatatattaaaagcaggcttctatgaaagactcaaaaagctgcctgggaggcagatggaacttgagcctgtcaagaggcaaaggaatccatgtagtagatatcctctgcttaaaaactcactacggaggagaattaagncctactttt

SEQ ID NO: 6065 - DNA, 193 bp, Homo sapiens
ccaactggagacttactttaccttaaccatgtaaagtatccttaccgtattttttatgtgtacagtgttgtagaatatcagccacctcttaaaagtatcaatcttaaaaagagccatggaaggtaaaagtatgaaaatcttgataacaaaagctttcaatacaaaaacacttattgtacacttatttttattt

SEQ ID NO: 6066 - DNA, 298 bp, Homo sapiens
ctgagacttgaaccttcctttcaccgcgggactgggccaactctgtctgtccgagggtgagtagcacaggacagcactcttccatctgtgcacggccgggaactgatgggggtcgacgtctgcacattcaagagcggccaaaacatcctgatcgagttttgatggctcctctccaaaaaggaagagccgcctggccggttccctggtgacctcgagctgatcctcgtgcctggggctgctgggactcaaggacattttagcgatcctggctgacatttcactttctgtcctcctgtgg

SEQ ID NO: 6067 - DNA, 167 bp, Homo sapiens
aaagatgctcccttgctttttataattcctaactgtaaaatataattttagtacagaacaaacaaattctccttggttggtcacatcattcattattgaaagggaaacttagtatcaaaagaaacaaaacactgaaataaataactaagtaatttactgaaaggcag

SEQ ID NO: 6068 - DNA, 241 bp, Homo sapiens
  misc_feature (1)...(241): n = g, a, c or t
ccttaaaaattatgcacgaccaaaaagaatgatttggtgagagatgtgtagctgattgacaattttagtgtgaattcatattcatttaacccagcagcaatctacataagctatgctttttcccgcctgtatttatgtttcttagcttataaagnnccaatatattatatcttttgttgctttggcagntttaatttagagctctgcgttcacanagatnccacctatagcaaaaactatc

SEQ ID NO: 6069 - DNA, 364 bp, Homo sapiens
ttgatgtatctgagcaggttgctccacaggtagctctaggagggctggcgacttagaggtggggagcagagaattctcttatccaacatcaacatcttggtcagatttgaactcttcaatctcttgcactcaaagcttgttaagatagttaagcgtgcataagttaacttccaatttacatactctgcttagaatttgggggaaaatttagaaatataattgacaggattattggaaatttgttataatgaatgaaacattttgtcatataagattcatatttacttcttatacatttgataaagtaaggcatggttgtggttaatctggtttatttttgttccacaagttaaataaatcataa

SEQ ID NO: 6070 - DNA, 178 bp, Homo sapiens
  misc_feature (1)...(178): n = g, a, c or t
aaaatgtttaattattttgaaatgtatagggtattaaatacaagcttctaaaattttcagtatctatattggctttctctaacagctctacagcaaagtttgacatgttttttgtgngtgtcatgtatngnaagctgtaatatctgtaggagtgagtcggacattctaaattancagt

SEQ ID NO: 6071 - DNA, 320 bp, Homo sapiens
  misc_feature (1)...(320): n = g, a, c or t
ccttattgccaggagggagggttttggttgctggcgcttgtgtataaaggggcaagagcagctcctttggactattcctgggaggactctgatgcagggcgtctgttgctcccctgggtcacctcctccctgctcgctgacatctggggctttgaccctttcttttttaatctacttttgctaagatgcatttaataaaaaaaaanananagagagagaggtgtgagggacaaaatgcanacccatttcccttgcctcataggcttctgggatgtcatcacctccagtttgttggttttgtttccaactgttaataaagc

SEQ ID NO: 6072 - DNA, 362 bp, Homo sapiens
aaaaatgttttcccgtgggtaattttctattatatattttcatatgggcaaagggaaaaaatgataaatcctctgtaatcacaaaccccaatttcgttttgtttattcagcttctaaaatattgaacacccagacttttaattcaacctttaagaaccttatcatttatgtttcagtagatatcaaagtaatccatgtttgtgtcaaatgatcatagaaaataaatagaagagacagtgaagcaagtaaaaagaaaagcattgttttaatttgtttgcattaatttttttcatttgtcaaaatgcttcttttgttgccacagtaaagaacagtttttattgttttgtaagtaaaattacgta

SEQ ID NO: 6073 - DNA, 385 bp, Homo sapiens
  misc_feature (1)...(385): n = g, a, c or t
ccattacatcctctttttaatttacataatacagatacttgagaaagttgttgtggtgttgtatgccaagaaaattctttttattggtgcctatattgtaacaattatttttaatgcattgtattttgaagtaacggttcagttaaatttttcacctgctgtgtaactgaaacacaattacagtttataatcatctgtagaagtctggagataattttgcaactcatgttatgggttaaatgaatatttttgtaaaagtaaaagcaacaaatttataaattgattatttgaaactttacaacacaattgcatcccaaatacaaattgtattgcttattcattatagctattcgncctgtaatctgtttctaggtgaagcatactc

SEQ ID NO: 6074 - DNA, 357 bp, Homo sapiens
aaattagcacagaatttataattacccaatcagcattgacatagatgccatcaggtatgcaaagattaacaaaattctattaccaaccttagaggaaaaaaacttaatgacatacagaaatactggcaaatttaagctagaattagctccaggacattttatcttattttcacattaaaagaatagattactagatatcagcagaaatgctgttaaagctattttttactaatagttgttcatattaatgaaacaaaagatcaatagtctctgagctaaatttcacaaaatgaaatcagtgtcttctgatttaactttcaggagtaagaaagggcaaaacccaagcaccatactttc

SEQ ID NO: 6075 - DNA, 226 bp, Homo sapiens
aaataacaaactatacaaataaaaaggagcagaaataatatggaatgtttttgacgaaaacaaacttatggattcaataaataatataaaatgcctttgtgctaaaatagaactcttgtttcttatatatatatagttcagtgatctttatgctatccagaaaaagccagatctattataattaaacatagaaaaataccatttaacaataaaactaaaaaaatgg

SEQ ID NO: 6076 - DNA, 254 bp, Homo sapiens; identical to SEQ ID NO: 4835

SEQ ID NO: 6077 - DNA, 410 bp, Homo sapiens
aaagtatttacccaaagaactcataaaaaggtcaatttggtaaaaggacgttttgacccaagagcatctaatatttaagcttattttattggataagcatatctcttgtccatcacaagttatagaaaagttatatacgactaaaagaaaaagttatctactgtaattataggaagttgtcacaacaggaattcagctcaagaacttcttgcaattactgctacaacgtctataaatgggaaaagcaagcattaaaatagattaataaaatataaaattaagactggaaaatccagagacaagctgtatccttagaagaataaatagttaaaattattcagtaagctgacgtatttaaccattactgggcctgtaaaaaatgcattaaaattacattacaaatagttttt

SEQ ID NO: 6078 - DNA, 143 bp, Homo sapiens
  misc_feature (1)...(143): n = g, a, c or t
aaaatgtgtctttctttgggagagaatcattttgttctttactaacaataatttgaaaattggtaatttaatatcttgtgaatatgaaaatattatggtatagatcagcttctaggagaagttaagngtagcatgatttcttg

SEQ ID NO: 6079 - DNA, 101 bp, Homo sapiens
  misc_feature (1)...(101): n = g, a, c or t
aaatctataatctggttcaagtgcaaatcaggtgctttctgttagtccttccaaaaaaggcatttttaatatttttggcacaaatgaaatgtnatnatgcc

SEQ ID NO: 6080 - DNA, 399 bp, Homo sapiens
  misc_feature (1)...(399): n = g, a, c or t
ccaaaatgatggatcctagggttcttcatcacatgggtggtatggcaggacttcagtcaatgatgaggcagtttcaacagggtgctgctggcaacatgaaaggcatgatgggattcaataatatgtaaagaaaatgccttaatataaactgactcagttgaatacctaatttgctgagacctcagcgtttcccttctttttgcgaattggggggaaagngtatttttcttgcttatcatgcactctttccttttcttctcgcccgcttttcccctccttttctttttccttccttctttcctccctttaatataagggagaaatacatggttttttgtggaaatcattatatgnttgctttagattttcttctgtntttaccatcataacacttaagtt

SEQ ID NO: 6081 - DNA, 260 bp, Homo sapiens
  misc_feature (1)...(260): n = g, a, c or t
ccttttatctacttctttgcatgtaaagggtataagagaaaggttatgaggatgctgaaacggcaagtcagtgtatcgatttctagtgctgtgaagtcagcccctgaagaaaattcacgtgaaatgacagaaacgcagatgatgatacattccaagtcttcaaatggaaagngaaatggattgtattttggtttatagtgacgtaaactgtatgacaaactttgcaggacttcccttataaagcaaaataattgntcagc

SEQ ID NO: 6082 - DNA, 352 bp, Homo sapiens
  misc_feature (1)...(352): n = g, a, c or t
nctgaantgnggcttgcataaataactgtttattccaaaatatttacatagttactatcagtagttattagactctaaaattggcatatttgaggaccatagtttcttgttaacatatggataactatttctaatatgaaatatgcttatattggctataagcacttggaattgtactgggttttctgtaaagttttagaaactagctacataagtactttgatactgctcatgctgacttaaaacactagcagtaaaacgctgtaaactgtaacattaaattgaatgaccattacttttattaatgatctttcttaaatattctatattttaatggatctactgacattag

SEQ ID NO: 6083 - DNA, 213 bp, Homo sapiens
  misc_feature (1)...(213): n = g, a, c or t
cctagataggggattgtgcggtgtgtgatgctagggtagaatccgagtatgttggagaaataaaatgtgcatagtggggattttattttaagtttgttggttaggtagttgaggtctagggctgttanaagtcctatgaaagtgacagcgagggctgtgagttttaggtagagggngattgttgtttggaagggggatgctgggggaaatgtt

SEQ ID NO: 6084 - DNA, 359 bp, Homo sapiens
  misc_feature (1)...(359): n = g, a, c or t
aaataactttcttaaccccgcccattaagatcacagtaaacatacaataatttttattatggaaattaatctttacatacaaaatcagctacgtaattttacttacaaaacaataaaaactgttctttactgtggcaacaaaagaagcattttgacaaatgaaaaaaattaatgcaaacaaattaaaacaatgcttttctttttacttgcttcactgtctcttctatttattttccatgatcatttgacacaaacatggattactttgatatctactgaaacataaatgataaggttcttaaaggttgaattaaaagtctgggtgcncaatattttacaagctgaataaacaaaacgaa

SEQ ID NO: 6085 - DNA, 275 bp, Homo sapiens
aaatagaaaacagtatattgaaagtggtgggtttgatctttttatttagaaacccacaaaatcagaaacacagtacaaataaaacagaaatcaaactataagttgacctttagttcctaaaaagaaacatatttcaaaagcaatggaatctagaattcttataacatgaataacaaaatgtacagcaagcctatgtagttcaattaatatataaggaaaagggaagggtctttctttatgaaaccaagcattataaagtttttactgtaggtagt

SEQ ID NO: 6086 - DNA, 310 bp, Homo sapiens
  misc_feature (1)...(310): n = g, a, c or t
ctgtgcaagaaaaattaaatgaaatagtagatcagataaaaactagaagagaagaagaaaagaaacaaaaagaaaaagaagcagaagaagctgaaaagcaattattccatggtactccagttacaattgagaatttcttaaattggaaagccaagtttgatgcagaactcttggaaattaaaangaaaaggatgaaagaanaagaacatgcangaanaaataggattagtgtgggaaactctatttgaaacagatcatantcttgacacatctgatatccngttcttggaggatgctggaaacaacgngg

SEQ ID NO: 6087 - DNA, 332 bp, Homo sapiens
  misc_feature (1)...(332): n = g, a, c or t
aaaaaaagaaaaataaaataaagtgttttgattatttagggctgacttacatttcagtatgtgacaaaaattcaaacccaaatgcatctagctcactcagtttcagacaggtcctatgttcagcccctaaacgaatggcacaatgccaccaattttgggattcctgagtttggttcccttaagttctcagagttttcccaactctcaaaaccaaagcatcatgggagtgacagggccactggcaagactttttgccagtcagcctagttcttcttttaagatgcagtagtctcaaagcttaaagtcagaaaatcttgcaataccagantaac

SEQ ID NO: 6088 - DNA, 459 bp, Homo sapiens
aaatgcattcttcacaagtaattcagcatatatttttatatcatgtttacttatgcttaagaattaaagcaagtatatttattactctgatggaaatatgggaaatctctcattcatgcaatatacagggataatattcaagcgaagggaaaattcccgctttttatttttgtaaatgtatccatatataatcatcgacatgacagatgaggaaacccatgaagtttcccactagtcagatatacattttcacttcatcagaagcacctgatatctacagctaatttataattagatactgtttcaatgaaaccaaaatgagccctacaagttcctataaacaaaagcttccaatgtactaggacagtcagtaattaatgcatcattcagaggattatggctgttccttaagaagtgcaagttcaaactgtcaacaccagaggtaatcattttatatta

SEQ ID NO: 6089 - DNA, 242 bp, Homo sapiens
  misc_feature (1)...(242): n = g, a, c or t
cccaacttgcccttcaagttctacttcagtttgataaggctataaatgcagcactggctcagagggtcaggaacagagtcaatttcaggggctctctaaatacgtacagattctgcgataatgtgtggacttttgtactgaatgatgttgaattcagagaggtgacagaacttattaaagtggataaagtgaaaattgtagcctgngatggtaaaaatactgggctccnatactacagaatg

SEQ ID NO: 6090 - DNA, 204 bp, Homo sapiens
  misc_feature (1)...(204): n = g, a, c or t
aaataaataaatagctagactggcgactgattcttcagcaaaaatattttatgatccagcagattattcactgatttgacatagtctggctgtacccaggaatggagcctgcacggtgaatggctttgtatagaacctctttgtctacaccattatgtgcgctgataagcgttcatggaacgcgttgaaatngtaatnatncct

SEQ ID NO: 6091 - DNA, 342 bp, Homo sapiens
gtatcactctaatataatatggatcagagcatttattttggggaggaaaacagtggtgattaccggcattttattaaacttaaaactttgtagaaagcaaacaaaattgttcttgggagaaaatcaacttttagattaaaaaaattttaagtatctaggagtatttaaatccttttcccataaataaaagtacagttttcttggtggcagaatgaaaatcagcaacttctagcatatagactatataatcagattgacagcatatagaatatattatcagacaagatgaggaggtcaaaagttactattgctcataatgacttacaggctaaaattagtttt

SEQ ID NO: 6092 - DNA, 294 bp, Homo sapiens
  misc_feature (1)...(294): n = g, a, c or t
gtacaaaactttttatatcaaaaggctttgcacatttctatatgagtgggtttactggtaaattatgttattttttacaactaattttgtactctcagaatgtttgtcatatgcttcttgcaatgcatattttttaatctcaaacgtttcaataaaaccatttttcagatataaagagaattacttcaaattgagtaattcagaaaaactcaagatttaagttaaaaagnggtttggacttgggaacaggactttatacctcttttactgtaacaagtactcattaaaggaaat

SEQ ID NO: 6093 - DNA, 232 bp, Homo sapiens
  misc_feature (1)...(232): n = g, a, c or t
caggtaaagtaattcgtttaataatagatgtgtttttagaggaaatgctgttacttggaattaattttccagttatacagtcttctataacttactaataatattctatatgtactttatgtaatttccctaaaaagaatgaactaccactacactatggtgttaaaccnaaatatacggaaaataaacactaactgctgcttatggataaatgctgcaactacttgtnatg

SEQ ID NO: 6094 - DNA, 295 bp, Homo sapiens
  misc_feature (1)...(295): n = g, a, c or t
ctgtaaggaggcggcagacggctaccagtgctgtatgatggcgcagtacaaccggcacgacagccccgaagatgtgaagcgacgagccatggccgaccctgaggtgcagcagatcatgagtgacccagtcatgcgccttatcctggaacagatgcagaaggacccccaggcactcagcgaacacttaaagaatcctgtaatagcacagaagatccanaagctgatggatgtggnnctgattgcaattcggtgatgacttgttcatccccccttcccttcgccctcatgtggaaag

SEQ ID NO: 6095 - DNA, 234 bp, Homo sapiens
  misc_feature (1)...(234): n = g, a, c or t
aaaaaattaactaataaaagcttttatatttaagaactgcaagtgtttcaaaactatgctgttttgtgttgttatagttgtaacatatttctcaattttcctgtttttcttttagtttattgacaagactacctggtcggcctaaattcacattttcattcagtttttgggcatttgagatcaaagagtaagtatggtttctacaagntacttcatttttctacttatcttttt

SEQ ID NO: 6096 - DNA, 396 bp, Homo sapiens
ctgcgctgcacagcctgggcagcaggctgagtatgggctcctcactcccacctcctggccttcaaggccctacttgttgccccagacagccatctttgagaacacaggtcttgggaggaagcggctggacttcatgtaggcagagatcttctccaagccctcaaagcgggagatgaagtccttcagatttgggaaggcgtccaagcagttgggctcaaatatacggtggaggtcaaggacatcatagacgagaaaatctacaaaagtgatcttgtttcctgcaaaccatggccgcttccccagaaactctgagtagagctttagcttttcagggagttcctccaagtactttggcttcagtttctcaaattctggattgtagcagatcatgcccag

SEQ ID NO: 6097 - DNA, 147 bp, Homo sapiens
  misc_feature (1)...(147): n = g, a, c or t
aaaaaaattaaatagtattaatttactaaatatttaggagataacagtgcattaagggttttttttttttatataatncatncatatcncccctttgcagggatagcataaaaaagtaagtntggccttaggtccancncgtttttt

SEQ ID NO: 6098 - DNA, 198 bp, Homo sapiens
  misc_feature (1)...(198): n = g, a, c or t
ccatttaccagactccgacacaatgggccaccaccagtgtgacagcaggacatcctaatatatggatcttgatttttaagtttcagtatctgaacttcgtaaattagtaacttttagctgggaaagtatagcatgaaaccagaggttctcagaatgactgtaagatagcttacatttcctctttttgcctttntctcc

SEQ ID NO: 6099 - DNA, 162 bp, Homo sapiens
  misc_feature (1)...(162): n = g, a, c or t
aaagaaaccaccaccaacaacaaaacaaccaaaaaccatgttttatgtcaaagctctgtagcacagagaatgtggtgtcacagatacatcgccgagagaggtttctttctttcttttttttttttganacanagtntggttttgtttcccaggntgnagtgc

SEQ ID NO: 6100 - DNA, 271 bp, Homo sapiens
  misc_feature (1)...(271): n = g, a, c or t
aaacttgtgataggcatatctatgaaacctttgtaaatttagtttattgctttaccattattttactaggtaaaattagagaacagattttgttctctaatttttaagccttatttacatatgcagaaacagcttaaatattttgactagattagacaaacagttaatagatccaccattaggaatcaatatattatgcataataaacatcctttttctttcctgaaatttnttttagaaataancttatttttgcttgntatgttctgaa

SEQ ID NO: 6101 - DNA, 169 bp, Homo sapiens
gaggttgaggttgcagtgaaccatgatcacaccactgcattctagcctgggtgacagagtgagaccctctccctcctaaaaaaatccttaagaaatatattgatgcttggttcctttggtcagaattttgatttaaggtgttgggagtgtagcacagatgttggaataa

SEQ ID NO: 6102 - DNA, 265 bp, Homo sapiens
aaaggttattcactatatgaaaacagaaagggaacaattacaacaatgaaattgttttaacttttttaaatctgattctaatgtgtattgacatatatttaattatataaaagactgtgggaaaggggcattaacagtactctagaagagtaaaggataaaaatccctctttttcccctagcttccagtttgacaagagggaatacttaatcgaatcctgtccacaaaaacagctaacagtactgtgctttgaaaaaaaaaaaaa

SEQ ID NO: 6103 - DNA, 317 bp, Homo sapiens
ccaaggaatagaagctctagacctcccttatttctatcgtgaaaacagaggtatatccaagtgagggactacaacagtaataaagggaaaaaagtatttaattccaaaataaaattgaaaataacctcctgtctcagcctctttttgggaatatctagaaggagtggaaaaccatctctggctatgagacttgtatcactacccctttctccctggggcgacaggtagaggctgttgtaaccattttgaaccttgtcctggagtagcttgttgcttttcagttaaagagcttgagtgagcctgtctgggcctctggc

SEQ ID NO: 6104 - DNA, 381 bp, Homo sapiens
  misc_feature (1)...(381): n = g, a, c or t
ccacttgtgtgggtcctcacaagcaaagagagcactaaacttgacattgggggtccaccactccaactttgctttctgaaggttttggtgtacattgagccccagaaggaaaggagagtatctgtgagtgggggcctcccttgaccccagtacgaagtctatgccctgaatccccagagtagcccttcctggtgcccaactggcctggggacaaacagcgtccactacatctaggactgccggctaagtggacacacttcttgacctcctaccangaactttggtaaaagctagctttggggaaggggntgggtgtaaatatgagagggnggagggagaccatacctgcccgggcgggncaagggcgaattccacacactg

SEQ ID NO: 6105 - DNA, 212 bp, Homo sapiens; identical to SEQ ID NO: 4977

SEQ ID NO: 6106 - DNA, 183 bp, Homo sapiens
  misc_feature (1)...(183): n = g, a, c or t
ccattattccatgtgcttaaatgataatttccttattcagtttcagaagaaaaagaatgaaattgggtaactgtcattgcgttagctttatgttgaattgggaaattgtggcataaagcttaaattcgtgtttatcaaatgtgaaccatagtagtataatgctgctttgtatataatgnnagn

SEQ ID NO: 6107 - DNA, 262 bp, Homo sapiens
ccactgtctgcagcatgggcagaaagtgctcaaagtccagcaccttcacattcatctcatcactcttggggttccccaggaccttgagcacctcggcgttggtagggttctggcccagggccctcatcacatccccacactggctgtacaggatcttgccatcacctgttcggtcaaacagctggaagcctccttgaactctgcggtctggtcttcggtgaagtcacacatcttgactgctcagctctccgggaccttttcc

SEQ ID NO: 6108 - DNA, 243 bp, Homo sapiens
ccatcttgttgctgcttggttagatcatatagctaatgaattaggcaggggagctattttttgaagatgatgaactaaatgttgaagacaagtttgagatctgtaaaatgtgattttttacttccacttataatacttgtgattggggaggtttgtggaaattcaattatgatgaaaaacctatcttttttgtaatgttggcatacttggggaatttagtgggcaaatacattccccagcagg

SEQ ID NO: 6109 - DNA, 362 bp, Homo sapiens
  misc_feature (1)...(362): n = g, a, c or t
aaatatatgcttttctagaatttgatgtttgaccatttatgacttaattaccagagagccagtaaattaggacagtgtttcaacaagcctaggctatctcgtaagttgaaaaatatcccactatagttgcttcatgagtatgaagtaagatggcctctgatttacactggttcaatttacaaattttcaactttatgataggtttatcagggtactaaatgcatttcaacttgatagtttcaacttatgataggtttaccaggatgtagtcccactgttgaggagcatctatttaggggttaattactttagtaataagtggaaagtaagataccttgagtaatgtttgcctataaaattgn

SEQ ID NO: 6110 - DNA, 134 bp, Homo sapiens
  misc_feature (1)...(134): n = g, a, c or t
aaaaattactaaaaggtttactttgntcattaataaaacatttaacaattcaaattatatgcaccttttacctagttgaaaaaaatacacattcctggtttcacattataccaactgantaanctgantcctgt

SEQ ID NO: 6111 - DNA, 362 bp, Homo sapiens
ctgttctcatacagaaagtaaatcaagacgaaatatggaaaacatttatttcctttccttcaaaatttaacttacattccactttaatagctgttgaaggttaattaaaatgcagcaaagtataactacgttacgcaagtgacttcagttattttaatgtgagaaaaatcagactatggtatcttacgagtcattatagaaatgttcatcattaaaaagcatttattaggcactgaactgcatgatgttaccttaagtcatttacaaaagaattcctggtccatgtgatgtgaatgggcttggcactttctccataaattttgtagatgactatttgtaagattatacacttaataggtttt

SEQ ID NO: 6112 - DNA, 443 bp, Homo sapiens
  misc_feature (1)...(443): n = g, a, c or t
cctccgtggcagcagaagatcttttcgtccactatggccgcgatgggcaggcagttgaagcagtcagtgaaggttttccacagtttgatgttgtagcgtctcttgcactcatcgtagaaaccatagatgcggttgatgctggcacactcgtggttcccacggagcaggaagaagttctcggggtacttgatcttataggccagcagcaggcagatggtctccaaggactgcttgcccctgtccacatagtcccccagaaagaggtagttgctctcgggagggaaaccgccatactcaaatagtcgcanaaggtcgtagtactggccgtgtatgtcaccgcanatcttgaggggtgcctccanctccagaagaatgggctgnctcacaaaaatctcccgggatttcaggcacagaccgcggatctcgttntctgtagacctcng

SEQ ID NO: 6113 - DNA, 466 bp, Homo sapiens
  misc_feature (1)...(466): n = g, a, c or t
ctgctgacagttctttggtggaaaagtaagttgcgtacttacccaagctgcccaaatgattatcaagccaagtttgtttttcaaaaataggttttaagatacaccaaagaaactatacaatacaaaaatttaacaatgaagttaaagtatatagcaaaagccaaatatgacaacacacatgtataatgtagaaaagaatcctttcagtcctagaaaactaaaatggggagaacttactgaagggtaacatacataaaatgagtactaatagcaaggaataatcctaaacattttcccaataaactgactaagcctcaaaaggacagcttaggaaaatgattaacatgcagtttttctttttttnctagccaattcagttctacttagataaatctgggttgccaatcaatacatatataaattaatttttttctgctcaattctaccattttttctttttnacctt

SEQ ID NO: 6114 - DNA, 231 bp, Homo sapiens
ctgcttgcctgcaaagatgagcctctgctggtcgggggggatgccttctttatcttggatcttggccttcacattttcgatggtgtcactgggctccacctccagagtgatggtcttgccggtcagggtcttcacgaagatctgcataccacctctcagacgcaggaccaggtgcaggggtcgactccttcttggatgttgtaagtcagaaagagtgcggccatcttccag

SEQ ID NO: 6115 - DNA, 296 bp, Homo sapiens
  misc_feature (1)...(296): n = g, a, c or t
aaattttctcacttaggacttttcaaagccatctcaaaggagcttcctcaaaacatttaatgttggcatcaccccacaagtactcagaaataagtgttaaaatagaaatccaatccagtaatgggaaactgacttagattatcttatttgtttgtatatttatttggcatctatctctcttattcactgccctattttcaacatctacaatagtgcttagtaatgaatacacatgcagtacacaaaggtgctaacacaatacatgactaatgatgagggctatgcacatttntaca

SEQ ID NO: 6116 - DNA, 357 bp, Homo sapiens; identical to SEQ ID NO: 5688

SEQ ID NO: 6117 - DNA, 413 bp, Homo sapiens
  misc_feature (1)...(413): n = g, a, c or t
gatcaaaacccaccatgccccaggctcagcagggagctgctggatgagaaagggcctgaagtcttgcaggactcactggatagatgttattcaactccttcaggttgtcttgaactgactgactcatgccagccctacagaagtgccttttacatattggagcaacagtgtgttggcttggctgttgacatggatgaaattgaaaagtaccaagaagtggaagaagaccaggacccatcatgccccangctcagcagggagctgctggctgagaaagagcctgaagtcttgcaggacccactggatagatgttattcgactccttcaggttatcttgaactgcccgacttaggccagccctacagcagtgcttgtttactcattggaggaacagtaccttggcttggctcttg

SEQ ID NO: 6118 - DNA, 403 bp, Homo sapiens
  misc_feature (1)...(403): n = g, a, c or t
gatatctgngntaccagccttgtctcggncacctcaaggataatcactaaattctgccnaaaggactgaggaacggtgcctggaaaagggcaagaatatcacngcatgggcatgagnagcttgaaactgctgaagnatgtnctgtntttcttcaacttgctcttttggatctgnggctgctgcattttgggctttgggatctacctgctgatccacaacaacttcngagtgctcttccataacctcccctccctcacnctgggcaatgtgntngtcatcgtgggctctattatcatggtagatgccttcccgggctgcatgggctctatcaaggaaaacaagagtctgcttatgtcgctcttcatcctgctgctgattatcctccctgctgaggtgaccttgg

SEQ ID NO: 6119 - DNA, 294 bp, Homo sapiens
aagctgctccacatctaccaacaatcccggaaggacaactccaattccctgcaggtgaaaacgtaccacctggtcaggtactggatctccgccttcccagcggagtttgacttgaacccggagttggctgagcagatcaaggagctgaaggctctgctagaccaagaagggaaccgacggcacagcagcctaatcgacatagacagcgtccctacctacaagtggaagcggcaggtgactcagcggaaccctgtgggacagaaaaagcgcaagatgtccctgttgtttgaccac

SEQ ID NO: 6120 - DNA, 297 bp, Homo sapiens
ctgcgaatggctgggctccaggcgcttgaagacattatcaagaagtttgcgtctgtgcctgagccagaatttccaggtcatgtgatactggagcagtatcaggctaatgtgggagctgctctaagaccagccttttcacaagatacaccatcagatataatagcgaaagcttgccaggtatgtagtacatggataggaagtggagttgtcagtgatctcaatgatctccgtcgagtacacaatcttcttgtttcttctctggacaaagttcaggctggaaaaggatcttccagccag

SEQ ID NO: 6121 - DNA, 173 bp, Homo sapiens
ctggcttgcctgctggcctgcttcctggagataggatgctcagacccaccgctgctcttcaggggtcgtgggaggaattaatgcacttccttctgtcccccaatctctgtccctttacgtgtctctggagctgagcaggtattctttttctttcttcatctcagtagagctgg

SEQ ID NO: 6122 - DNA, 309 bp, Homo sapiens
tttttttgttctaattttaatagggaaggaagaagttacagctcagtgcaccatgaagttgagacagagatggagacacctcagccccacctctctgcaacaggaaagatgattggggagggagcacaggtcagcgtgggaagagggtcatggtggacatgggggtggggtggtctccccacctcctcacattatgcctacatgaacacagacacatgcaggtgcctttgcagaaacaaagtcagggttcttcaagtcacaaagggaagggcaggaacaactcttgcctctcagtcccacacaaggcag

SEQ ID NO: 6123 - DNA, 235 bp, Homo sapiens
cctcagggggcaggtacacaccatcaccaactcggtacaggatgccgttcttagtggctgagtagtagaggacccggctatccaggtcctcgagctgctccaggaccctggggatttctttttgcctcatctcagccagacgggcacagctcacacagaatttgaacttgttgtcctctgttggctgggtttttggaggggactcgaatctcgcgtagtcttgatcataccacag

SEQ ID NO: 6124 - DNA, 348 bp, Homo sapiens
gaggtctggagaggatgcctgatgacttcctgccaggagaagccaaagccaggacatagtcaaccaaaataactccaggttggtgagggaagggacaaggaaaagaaacactgggaaattcaaagaaaggcaatctcagacactaaaagagcagagagagaaagcgacatgggggacttaaagaggctccttccagggcgctgggcttctcttccagcacagaaggctgcaaaagtggaactggcccccagttcccagaggatcacaaggccaaggatccaatgggcacaccatgaggacccaaggaaaggacagagaaaggaacggctctgggaaagccaaacctgg

SEQ ID NO: 6125 - DNA, 440 bp, Homo sapiens
aaaataaaattccagttagccctaattaactacaaccattcctgaactctccctaatgcttctttacctgttagaaaaaagcagtaggacaaaaacatgtaataaacatgcaacctaatcaaatagcctgtgctttctaaactaaatgctcaaatttgaagattaataggaacaacagtttccctttctaatattctatttactagtgtcctctaaggtttactgattctataaattactgtaacaatactaactactttaccatgcaatctctaaatagttaaatgtcttctgcctagtgatacaaaatatatgaaatattaaaaaattgaaaaagaggaaaaaataggaattaaaaaggcatacatggcctgttaacagatttctttatttttcttgggcaattctctaccatcattttggagtttgggcagacctcg

SEQ ID NO: 6126 - DNA, 280 bp, Homo sapiens
ccagatttcataaaactatgttaagggatcaggactttatctcacaggtatagagaattaaggagatattgaaataaagggagatacatgatacaaggagtactttagaattattagattcattttgacatagtgaaaacattcatattacttattttactacaaaatgtcacttgagttgagggggagttaagggaaagaaggcgaggcaaaaaggaagggctatttgaacaaaaatactcactgttaagctgtattggtgacagccttctcttactgg

SEQ ID NO: 6127 - DNA, 212 bp, Homo sapiens
ccaacacgcttatcaatgttatcgtgcctctagcaaaaagggtggacaagttccggcagttcatgcagaatttcagggagatgtgcattgagcaggatgggagagtccatctcactgttgtttactttgggaaagaagaaataaatgaagtcaaaggaatacttgaaaacacttccaaagctgccaacttcaggaactttaccttcatccag

SEQ ID NO: 6128 - DNA, 285 bp, Homo sapiens
aaaaccatttgacctctataatggctttctgtgggctttatatatcgctgtactagtaattaataggcatactttgtttaatattacttaattgatcttttttacaaagcttgtattgatgaattttatccatcattcctttctcccctgttactctttctttttttcttaaagaacatcgatatattgaactcttcttgaattctactcctggaggcggctctggcatgggaggttctggaatgggaggctacggaagagatggaatgggtatgtaaagttttt

SEQ ID NO: 6129 - DNA, 415 bp, Homo sapiens
cctaccctgtcaagagcaaacaataacatgtaacttgcttattcatttgtacaattaaatactagcttttgctcagagacaatgctataaagtattttaatgtcagtaacaatatacactacgaagtgcacttccattacaaattaacatggtgatatacagatgaacaccaccacccaaaacaaaccataaatgagcaacagttaaaacattaaatttataaatagcaaaaccacaaaataaagtatatacattttatagatttacccttgaacaaatatatagtgtatctgggaaagccaaaaaaaatgtgttttatcacataacatctgaataccagaaatgaagatctgataatattctaaaagccttgtaggctttctcccacttaatattcctttaactgtcgtccttt

SEQ ID NO: 6130 - DNA, 300 bp, Homo sapiens
ctgaagatgacatggttgttgccccagtcacccatgtgtccgtcacattagatgggattcctgaagtgatggaaacacagcaggtgcaagaaaaatatgcagactcaccgggagcctcatcaccagaacagcctaagaggaaaaaaggtaggtgggttactttgtttagggcgcatagtcaagtcttggtgtgaaatctagatatcacttttattctacatagttctttcctgctgcagttaaaacttatgtaagaaaaacattgaaggcacaaaatggaaattatgagttatttcttgg

SEQ ID NO: 6131 - DNA, 282 bp, Homo sapiens
aaatttcttctttatttcttgttctttcttttctttctctttctgttcctttttctccagctctaacctcttcttttcttccttttcccttttcttctctctttctttggatgcttctctgtgagtaaaaattgttaggttgttttcacatctgcaggtgttgatgcgtcggaactccctacctagaagtttctactcacaacagaaaaggtggtatctgaagtacagttgaaggtaaaaagcgaaaggttgtcaaaatccggaatgtgtgagattattttt

SEQ ID NO: 6132 - DNA, 286 bp, Homo sapiens
ccacttcaagtcacacaggtagataaaaacaggtccttttaggggccaaaggagaggttatcacagcagcagtttggttctcagcagaaatgcccagggcccctgttccacatcaaagctacaagcactgttgtcagggcatggagagcgacgggaccagagccctcctcgtctcagggcagcctgcctggcttcaaggtggagatcacagcgtcctctggggtcataggttcccccactgttccacaggagggaactggtccacctcgcccacctctgtgctcag

SEQ ID NO: 6133 - DNA, 196 bp, Homo sapiens
ccttagccctgctcctctctattccatcctgtagaggtcaggagtcaggagtcgctggcaggagacagcatgtcacccaggactctgccggtgcagaatatgaacaatgccatgttcttgcagaaaacgcttggcctgagtttcataggaggtaatcaccagacaactgcagaatgtggaacactgagcaggacag

SEQ ID NO: 6134 - DNA, 150 bp, Homo sapiens
ccatgctggatgttctgctgcttagacctgatctgctgccaattaccaggggcgggtcaaggatgaccttcttggatccaggaacgctaacatagatctagaaaggaagatggcagtttattacaccagaggtctggagaaacaagacag

SEQ ID NO: 6135 - DNA, 286 bp, Homo sapiens
ccagcagggattcagccggatcaacatctaccacaacactgccagcaacaccttcagagtcgttggagtcaagttgcaggatcagcgggttgtgatcaattattcaatcgtgaaagggctgaagtacaatcaggccacgccaaccttccaccagtggcgagatgcccgccaggtctacggcttaaactttgcaagtaaagaagaggcaaccacgttctccaatgcaatgctgtttgccctgaacaccatgaattcccaagaaggaggcccctccagccagcgtcag

SEQ ID NO: 6136 - DNA, 305 bp, Homo sapiens
ccacctacagcaaaatatcaaaatgggtaagtccttccttcctcttcctcctgattatatacaacatatctcctttcaagactattatttccatcatgcttattccttcacaaatctaaaccttgaggtgatatgaaggaaaccaacatcaagaaaagaaaactcaattcagaaatgaagaaaactggcaggtatacaatacacccccagagcatctcaatatccctggcacagtacaattcagtgtactgctacagcccatagataaatattggcagcttgaataagctcattttttccctcag

SEQ ID NO: 6137 - DNA, 255 bp, Homo sapiens
ccattgcagaagttttcggaaggatcggagctggttttgtcctcaacagggagcccattcgtaagatttacattgagctcatctgcgtcatcttattgactgtgtctctgtttgcctttacttttgctactgaattctggggtctaatgtcatgcagcatattttttgggtttatggttggaacaataggagggactcacattccactgcttgctgaggatgatgtcgtgggcattgagaagatgtcttctgcag

SEQ ID NO: 6138 - DNA, 309 bp, Homo sapiens
ccagtaggtgtgggtgcttttgatgtttgcttctgttggttgaaagaagcgcagggaagagactgggtgtagagtgatgtaccccaaggctgcagctaagatcaaattcttctggagagctgtgtgagctggatgctgatgcagaggagggtgggggagctggtgagaccaaggctgggctctgtgcccatcccactgggtgtgaaggaaggaaatgaccacagacagccatgttctgggtcggccgtctgcaagccaggctgactcctcctctcccccagagttcaggatggtcaacggcagcagcag

SEQ ID NO: 6139 - DNA, 306 bp, Homo sapiens; identical to SEQ ID NO: 2659

SEQ ID NO: 6140 - DNA, 331 bp, Homo sapiens
ctgccgtagcccatccagggttagttctggctgacgtaaatcaagctgctcagaaggtcgatcctggaacactggtggagcgcctgggccagcttccccaccgtggctccctttatgccttccctcatcacccacttttggagcatctggtaaaccttttctttcagtccatctcgctcatagtcatggtcaatttcatcaatctgagactgtgtgaagcccagtttacgggcacagtttttccagtgctttcccagattttccctgattgggtccaggtgtttatccgtcagactagtggtattatcaaagatagcttggtacttagcag

SEQ ID NO: 6141 - DNA, 255 bp, Homo sapiens
ctggcctgtgggtgatcccagctcttactaggagagggagctgaggtcctggtgccaggggcccaggccctccaaccataaacagtccaggatggaacctggttcacccttcataccagctccaagccccagaccatgggagctgtctgggatgttgatccttgagaacttggccctgtgctttagacccaaggacccgattcctgggctaggaaagagagaacaagcaagccggggctacctgcccccaggtgg

SEQ ID NO: 6142 - DNA, 263 bp, Homo sapiens
ctgaatcagcctgggtgccctagacccagtcatgtttgttggaccaaattagctgtcttttcatttcatgctatatagaactggcagtttacacttctgattaatacattgtctccgatcaggaggtttatttttttttcctaataaaatctgaaaggagattgggcagaaccaattagtaatcttacattacacattgtccctaggtatataatcaagaattaacagcagttatgattatatgattataatacatgcatttt

SEQ ID NO: 6143 - DNA, 206 bp, Homo sapiens
caggattcctttctccacattcctaaaactgggtaccacggtccgcaataatagtcaccagacccatcatcacaggctatgtcactaaaactgaccgaagcgttttccagttcacattttcctaaagattttataatgtgacaacccttctctccttagaaagttatacttctggcacttgaaatgctggatttgttgtccagttt

SEQ ID NO: 6144 - DNA, 284 bp, Homo sapiens
ctgctttggcaagagaatgagaggctccagaccatggtacagaacaccaaagccgaactcacgcactcccgggagaaggtccgtcaattggaatccaatcttcttcccaagcaccaaaaacatctaaacccatcaggtaccatgaatcccacagagcaagaaaagttgagcttaaagagagagtgtgatcagtttcagaaagaacaatctcctgctaacaggaaggtcagtcagatgaattcccttgaacaagaattagaaacaattcatttggaaaatgaagg

SEQ ID NO: 6145 - DNA, 366 bp, Homo sapiens
cgcagtgtgcactaaggggcccggccagccatgtctgcatttcggtggctggtcaagctcctcctccctgcatctgaccagcagcgcctttcccaactctagctgggggtgggccaggctgatgggacagaattggatacatacgccagcattccttttgaacgcccccccccacccctgggggctctcatgttttcaactgccaaaatgctctagtgccttctaaaggtgttgtcccttctagggttattgcatttggattggggtccctctaaaatttaatgcatgatagacacatatgagggggaatagtctagatggctcctctcagtactttggaggctcctatgtagtccgtgctgacag

SEQ ID NO: 6146 - DNA, 311 bp, Homo sapiens
ctccaaccagcctcacaagaacatcaacatcacatttgaggaagacaaagtcaactcaactctggttgtagacagagaatcctctcatgatgaatgtcaggatgctgtaaacattctcccagtccctggccccacctcttctgccacaaacgtcagcatggtggtatcagccggccctttgtccagcgagaaggcagagatgaacattctagaaatcaacgagaaattgcatccccagctggcagagaagaaacagcagttcagaagcctcaaagagaaatgttttgtaactcaactggccggcttcctgg

SEQ ID NO: 6147 - DNA, 348 bp, Homo sapiens
  misc_feature (1)...(348): n = g, a, c or t
aaaggtaaaaggatgggagaaaagtacacagaaagatattctggagaaaaggcacagagtgagccaaggcacaaggtaaaatgtttgactggttagagacgctagattattttgtgtggctaagacaaaacaaagctggtggggagtggcaggaggtaagtctanaatggcacaatggggccagactgcgaatggcaaactgaagtatgtgatcttttattctaaagaaaatgtagtatgattagcacaaaaaaagaaaaattattggccgggcgcagtggcccatgcctgtaatcccagcactttgggaggccgaggagggtggatcatgaggtcaggagatcaaga

SEQ ID NO: 6148 - DNA, 419 bp, Homo sapiens
ccagtggaagaatgaaacttataacagtcacccacttttagtaaaagttaaagctcaaacaatagacagagccaaatatatcatgaagcgcctaaccaaggaaaatgtgaagccttctggaagacaaattgggaagttgagccacagcaatccaaccattttgtttgattatatcttgtcacaactacagaagtatgataacttaataacacctgtagtagattcattgaaatacctcacttcactgaattatgatgtcttggcctattgtatcattgaagctttagctaatccagaaaaggaaagaatgaaacatgatgacacgaccatctcaagctggcttcagacagccagttccttttctttcaacttattgtatctgatagccggaatcttgcagtggctccccattgtccttt

SEQ ID NO: 6149 - DNA, 270 bp, Homo sapiens; identical to SEQ ID NO: 2914

SEQ ID NO: 6150 - DNA, 224 bp, Homo sapiens
cctctggacctttgatggaaggggctgccatgaagacctgtgacatgccctggagacattttccccattgtcttggggattcacatttgactcctcgttacttaaacaaacttctgcagccagatcgaatttttcttgagaaaatgggattttcttttctattgcattgtcaggctgcagattttccaaactttcatgctctgcttccctcataaaactgaagg

SEQ ID NO: 6151 - DNA, 389 bp, Homo sapiens
ctgtcaggggcggcgtgcctggtgatgcggcatcttaccttcatccccatctcagaatgggcagccagtctcagattcaaggaggaggaatcctgaggtgtggcgttcagtcctgaggtagacctgaggtcccctggaaattgtgttgatgctgagatggatgaggggtgctcattctctcaggtagacagtgaggagtcctggttcagccgagcctccatgtctgcatggatggttatgaccctgattgtttttggaaacagccaagctctctaggtgtactcagcaaatgcaaggtatagtgggtcctgcatacccagggtattatttgagccatggaagcaaaacagagactgcttagcctccctaagagtagttggtgggagtgg

SEQ ID NO: 6152 - DNA, 212 bp, Homo sapiens
ctgacactagaaaaccttcagatgctgccagagagtgaggatggggagagctatgacacagagtcagagttcacggagttcacagaggacgagctgccctatgatgactgtgtgtttggaggccagcgtctgacgttatgagcgcaaaggggctgaaagaacatggacttgtatatttgtacaaaaaaaaagttttatttttctaaaaaaaa

SEQ ID NO: 6153 - DNA, 351 bp, Homo sapiens
  misc_feature (1)...(351): n = g, a, c or t
cctctggaggctcgggactggaggcaaagcccaggagaggtgggagacaggagctcccgactgtcagaggcatggaaatggaggctgagtcctggagaaactccagagcggagtctgagactagcagagtctcgagagcaaagccccaggagaaaagaggtggaaagtagactgagcccaggggaatctgcctaccagaagttgggcctgacagaggcccataaatggagacctgactccagagagtctcaggaacagagtttggtacaactggaggcaacagagtggaggctgaggtcangagaagaaagacaagactactcngaagaatgtgggagaaaagaagagtgg

SEQ ID NO: 6154 - DNA, 410 bp, Homo sapiens
  misc_feature (1)...(410): n = g, a, c or t
gtgaatcanaaaactgatttattctggggcgtgatcctaatcttgacttgcacaagtgtaacttgacctagctcaccaatttcagtaacattgttctgttctcagttcctggcatgggatattccaaattcctgtgtctggagggaaatgatagcttttgtcttgccatcctgagtgaccagtcacaaagcagttgaagggggctggaagccaccctatgaggacacgccattagtatgtaagcagaatgtgtgtctacctgtcaaagtaatttccagtaacctgagttcacaattctggtcctaggtgagtttttctaggagtgaaaatgcagaaaaggatgttgaaagctattggctaatgtatcatttgaactgctgataacctgagaaggggctcaggcatggttt

SEQ ID NO: 6155 - DNA, 571 bp, Homo sapiens
  misc_feature (1)...(571): n = g, a, c or t
cctacagcccagagaagacattttttcttcatttacattagcttatgaaaaataaagggaaaacaaccctcttcaatacaaaaacaaaaaaacaaaacaaagcaattccattacaataaaaatgaaagcaataacaatttggagatcaaagctgcctagctcttggcaataatgagctatctggatttcacatcttccgctagcatggttctgcccggctttggtaacaccacatgtgggtaaaacggtataaagaattgaagaactgtgggcacagaatcacccttactgcagattctcattcttaatatttccctttaacagcattttgctgttctcaagtctcagaaactttatgtggtgggatgggagggaaccaccataaccgcctgcctgcctttttttttcttaactgttattgntcataatagagatggggctcactatgttacccaggttggtctcaaactnctgagctcaacaatcctcccccttggctccaaagtgctaggatacaggngtgagccaccgcgcccggcatctgcttttgccacctaagagagtgctcaac

SEQ ID NO: 6156 - DNA, 577 bp, Homo sapiens
  misc_feature (1)...(577): n = g, a, c or t
ccatggagagcaggcgggtttgtgtatggctgatgttgaagccctggatgtgcagctccaaggggacgggacgcacattgggatggaagttgaaggtggaggtggcactgcagcccagccagtgggccacatccttggcattggagagcgaagagctgagtgccacaatgcgaatgggccgctcaatctgggaggagatgtagcgcattcgggagcagatcacttctaagacaggcccattctcgcccccgataaggtggacctcatccaccacgaagaggttgatgttctgcacgttcttgcgctgcttccatcgccgggaaagtatgtcccacttctcaggggtgctgatgataatgttccctttgcccagcagcttcaggtctgtgctggtctcgcctgtcaggagtaccaccttcttgttgagcctgtcctggaacttctcgtaccagtccatgtatacctgctctgccagggccttcatgggggtgatgtacacacagcgcccttccanctctgcagcagcattccangaagggaaactctgcacaatagtcttccccttgcccgnggggcc

SEQ ID NO: 6157 - DNA, 233 bp, Homo sapiens
aaatgccgattcacattactctgttcaagctgcgttgagatgttaaactggcttactatagacttcgtaaaaatggctccagaagagtaacaaactgaaatctttgagatcacacaggttggaaatatgtacataactgcacaaggtgtcaattctgctctacagtgcagttttagtcagttttagttgcataggtttccattgtatttatagtctgtttatgctaaatctgg

SEQ ID NO: 6158 - DNA, 376 bp, Homo sapiens
aaacatgacttggtgctgaaagacacactgctgggacccaagttccctcccacatggacgggatggaggctggagcccaaggtttcagggaaacgtatgtggcctgtgcccctgggtgtgatcatgggcacacacatttatctggcagggccagccttggctgctgaggggtcatgggcacagaggaggaccatctggtgacactgaggaccagtgttgcccacagccagggagaataaggatgaagaatgagtgttgccacacccctccagatgagctcaagaaagaggccaagcctagccctaaacaggtctgtaagtaattctgggtcctgataggcaaacgcatccagccagagggccctgggtccttcagg

SEQ ID NO: 6159 - DNA, 499 bp, Homo sapiens
ccaaggggatgatgccctgtagcactttgctttgcaggaagggaacaactgtgctgtgaataccaggatccaggagggagggagggtatatctgtgtcccccagctagggacaaggcttccttaaccttaggtcctcatgcttatattagttcttctccaacaaagtttgactttgagaagaagctggcacatggctgaaatgcgctcacgcggttgggggaagagtgttcttccagtcctcctccccacagggcctcctgcttctcctaagtacctgtcatcaaaggagatgaagatgaatcccccttcagcccccacacctcaatgagttgtcaagtactctccctcccacttgaataggaagcaggagcagcaggccaggttgcaggttgaggaagtcagaagttaacttgagctgagtttgcagctctggagagattgaggagcagacttttctcttgtcactttggaaggaaaggattgtgaggctgccccttt

SEQ ID NO: 6160 - DNA, 359 bp, Homo sapiens
ctgtcgccgccgctctcagggtgaagagggaacagaaatctttgccccctgactttggaaatctcgtttaaccttcaaactggccatgtcaagggttccaagtcctccacctccggcagaaatgtcgagtggcccgtagctgagagttggtgctacacacagatcaaggtagtgaaattctcctacatgtggaccatcaataactttagcttttgccgggaggaaatgggtgaagtcattaaaagttctacattttcatcaggagcaaatgataaactgaaatggtgtttgcgagtaaaccccaaagggttagatgaagaaagcaaagattacctgtcactttacctgttactggtcag

SEQ ID NO: 6161 - DNA, 201 bp, Homo sapiens
acgcacacgagaacatgcctgtgagtgctttggcccaggtttcggcggagatctcgctgttctgtccgaactctcccctcacgctgatttcggatcgtagagggtcctcatttaccctctgcacttcttaggacattaactccagggaccgcagcggcccacgggccacccgcatagacgggagcggagaggagataagat

SEQ ID NO: 6162 - DNA, 231 bp, Homo sapiens
ccaaaagaagtaagacagcttgctgaagatttcctgaaagactatattcatataaacattggtgcacttgaactgagtgcaaaccacaacattcttcagattgtggatgtgtgtcatgacgtagaaaaggatgaaaagtaagttttattaactctgttatatttgcttcctaacaactttgctgtaaaattgagggatcattgtttggtgagttgttttaggttatttcag

SEQ ID NO: 6163 - DNA, 343 bp, Homo sapiens
aaatcaactaacagggaattcatatccaacaattcactgatattttcttggtatgttcttaagaacaaaacaaaacaaaaatctcaatttgaactaacagtgggtggcatacagagagcttgcatacaatactcttacaagaattacgtactatactgaacttctatgaaattatttacctggtccgtaatgttattcagggcaacccatcccaaaaagagcaaattctgcaaccctcaatggcaaaaacgctgcccagcattgcttcccaaaaatgtccttgcaaagtttcccattgtaagtatacaatgtggcaaaagttcaaagatcagaaaaagtcttt

SEQ ID NO: 6164 - DNA, 334 bp, Homo sapiens; identical to SEQ ID NO: 5578

SEQ ID NO: 6165 - DNA, 308 bp, Homo sapiens
cctggataacagtatcaccatccttatttacagaagggtaaaactgactcttaatgagaaaagctttataagttcaagggctgtaaaatatgaactacttagggtcgtttgccttccatgggaacttggctagacttagaaaaagctgtttgttgtgctaatgtaaaagtgtcatacaatttagaagatttttgaagatggtaaacttagaagaattctatgttctgaaatgcacacttttagaatgtttttctttgaaaacaggctaatagttttttctttttttgacaaagtttcagctcctcttt

SEQ ID NO: 6166 - DNA, 383 bp, Homo sapiens
  misc_feature (1)...(383): n = g, a, c or t
aaaaatagccatctttgtacttttttgcaagtttctctataagcttgaaatagtcatgtgatacttcgacaaacatcatatgccttgcagtttttctcggtcgtgttctcagggttgagtagtccccttagctacctaactttactttcaatacaaagcacaaaaaagaatatcttcaaataaaagtttgcctgcagaacctggcaaaatgacccattaggagagtttagatgttttaattttatgtgctcccagctactctggagtctgaggtgggaggatcacttgaggcagaggttgcagtaagctgagattacactactgcactccagcccatgcgacagaggaatgagagccagtctcaaaaaaaaaaaannaaaaan

SEQ ID NO: 6167 - DNA, 217 bp, Homo sapiens
gggtgtttctggttttgccttagcaatgcatcggtctctgaggtgacactctggagcggttgaagggccacaaggtgcagggttaatactcttgccagttttgaaatatagatgctatggttcagattgtttttaatagaaaactaaaggggcaggggaagtgaaaggaaagatggaggttttgtgcggctcgatggggcatttggaacttcttttt

SEQ ID NO: 6168 - DNA, 263 bp, Homo sapiens
ccactcacccactgtgaggtcctctaggaaaatacacaaagagaggaccagaccaggcagaggaacattttgtttcatatgaactgtggctttgacccccaaactgcaaggaggaacttgctgggccaagctgcagcggcgctgtcttgctggagtggggacctagagtcagagaaaacccacaggctcctctgcccattctcctccatctgcacacgtctcagcctcggaccctcaccactccatggtgaggaaggccatgg

SEQ ID NO: 6169 - DNA, 330 bp, Homo sapiens
ccttgcccacgttctccttgtaggagacgaagttgtggaaggtgaggtccaccatgtccgggccggacaccaccgtgagtgtcttcagcaggaaactgttatcaggaaagtccatgttgaagacgtcccggagcttctggctcttgggcatcttggcaaacttcccaaagcgagtatcccggatgctggtgatatccagaaactccatctccttactttgatacgtccagtataagtagtagcccttaggatccacacggaggataactggagaggcaactgtagtttcatcatcccatttgatgaagcgctccccttggctcagatagg

SEQ ID NO: 6170 - DNA, 488 bp, Homo sapiens
  misc_feature (1)...(488): n = g, a, c or t
ccanaggcagagattactatcctggcactccagtgacccactgggtgactcactgatgccacagcacccgctaggaagctctgctgaaccttagtatttggtcctaaattttatgactccatggagttcccgtagtccatggctagttaggaagaaaggaggtgggataagggtcaggcccaggtgacccctaagaaccagganatggntaaaagtttttttttatattctgcttttatgatntntgagtacctgtttgtctccaggccaaacctttgggcttaaatatctttttcctagacaggtttttgctagtgttgaattttcttcttcctctggcctccttctgtgcccctttccccaagcccaagactgcttaacttccaaagcaaattctagatagacactgtatttattggtatgggagtgggctctatggggtggtctgcacccatctgggactctttttcctaaatcctgcaccaaat

SEQ ID NO: 6171 - DNA, 278 bp, Homo sapiens
  misc_feature (1)...(278): n = g, a, c or t
gaggnccaacaccttaagcctgtgtccacgggttaaaaaggtggatctcaggtccctgcaccatgcaactttgcacttcagatccaacgaggaggaggaaggcgtgtgctgtggtctctcagcaaacctgctgggcgacagcggactcagatgccttctggaatgtctgccgcaggtgcccatctccggtttgcttgatctgagtcacaacagcatttctcaggaaagtgccctgtacctgctggagacactgccctcctgcccacgtgtccgggagg

SEQ ID NO: 6172 - DNA, 177 bp, Homo sapiens
ccaggctggtcttgaactcctgacctcaagtgatccgcctgggtcagcctcccaaagtgctgagattacaggcatgagccaccgtgtcggtcctgttttgtgtaactttagtttggctacatcttttcttgcacctctccttagacaaactgtacactaattggaaatgtaaacttt

SEQ ID NO: 6173 - DNA, 459 bp, Homo sapiens
aaaaacaactaagaaagcagcactgaaaattgggaggctaacaaaaatcaaaagaccctttctttctctaccaccgagctcatgctctaattttaacgtgaagaaatttttacagttcattatggacaaatgttaaaatagtatacacattctatctatccacagaaatttccaccaaggccagaactaggcttttactagaacaattttatctgaatcctagagtttgggaaattacttggtcctggatattacaagaaaaaatggctttgggacttaggtagaggcagaaggggaagatgacactgggcagaatgacaaagggcagtaattttcaaaaggggtgtgtgtgtgagtggttgtgttcatcagaatcacgtgttacttttaataagtgtggtaactgaggctaataagcaccactgagacctgttgagtacaacaagggcatcttcgttt

SEQ ID NO: 6174 - DNA, 286 bp, Homo sapiens
aaactgtcttgcaaagagaagatatcttctgatatcatcgagggaatagacacgatcaattgattcctcaattcttgaatgcaaatctactatgcgcctggcaatggcataatctgtaacctaattcaaaacaaaaaaatcactttgatagtcacagcaatatcttctccagactatcccaggcaataagaaatgatttatcgccaaaaacaagctctaatataccacttaaagaagtattaatgggtaccaagtttctgatgaaagtttgggaacaggtggattt

SEQ ID NO: 6175 - DNA, 336 bp, Homo sapiens
cctctggtgcggaaactgagtcacagccagacctcagggcacggcctagacgcttacgagccaaagttaggggtagagagcagagacctccggggggtctcagggagtagggggcttcagggcctcccagtctagagcccggattggcgagttagacgcttgtagatccaaggttggattggggtggggtctctgggacgttggatcgctacgcaaggattggggggattcaagtgcttagagatcgaagtctgccctgggtagggggagtcagacaattggaaagcctaggtagttatttggggaggggtctctacgccttggcgaagcgcacag

SEQ ID NO: 6176 - DNA, 199 bp, Homo sapiens
aaaccagctttaagacaaaaaatcgtcaccaagttccatatgacaaaaaagggtctttcagtttgaattactttccatttctatttgatcaaataaaccaaaatattactaaggaagagcatccaatgatttgtaaagctgataaaactgccctgtttcaaggaaagctctttaatagatacaagtcaagctctcgttt

SEQ ID NO: 6177 - DNA, 384 bp, Homo sapiens
aaatttactggaggacttttttgttctcttcttttttctttttttaatagcatcccgctcttatttcagaataaaaaaatttttaaggtatgttgagtaagaatctatagagcaatgaaaatgcaagagcaatagctatgggcaccaaatggtcaatcttcttatcataatgttgagtggaagaagccaggtccaccagacacatgctgctcatttatgcaaagtttggacacaggcaaaacaaaactagtttgatcgtgatgggaaacattagagaaatgcaaagacatgaccatcataattgttaggagaaggcattggttaggattgggaagcggcaagcagaagcatttagggattggctggcaatgttttacttctcag

SEQ ID NO: 6178 - DNA, 606 bp, Homo sapiens
  misc_feature (1)...(606): n = g, a, c or t
ctggcctctcctgacgtgttcctctttaggagcaacaggtgaaaaaatgatacggttctggggcaggcccatgttttgtgcatactgttgaatattaggttctcctactgctggaaaacgcaacagtcagagtacactattggggaacacgcttcagaatgtttgcccacatctgcaaagtagaagggtcaattttatacaactgattaaagttacagtatacgatggcatcttctggtaacccgtactgagaacgggtggttacaataatggtacggggaacctcctctccagttgcagccttattgttgatctgagtagttgccagtccattgctaatactgaatccattaattgttatttgaatctgtcctcggttaatcatttcaataactgcttctgcaatagtattcataggaataacaggcatattaagagctgtgttactgctatctgcattgtctcctccatcaggacacttcatcttgacaattttcacatctggtangactatcaagaaatgctttgaggtcgatgcccttcagaactatccgattgtcataaatgtgcccattggactcaaaatcgatgactgcttttttnttt

SEQ ID NO: 6179 - DNA, 253 bp, Homo sapiens
cctggacatacctgcggatatggacgggaaatccatcctcaagctgctggacacggagcggccggtgaatcggtttcacttgaaaaagaagatgagggtctggcgggactccttcttggtggagaagaggcaaagctgctacacaagagagacaatgacaagggtggacgcccaggaggagaactttctgcccaagtaccagcgtgtgaaggacctgtgtcagcgtgctgagtaccagacggcgtgtgagcag

SEQ ID NO: 6180 - DNA, 600 bp, Homo sapiens
  misc_feature (1)...(600): n = g, a, c or t
aaacttacttttcttgcccttgccaccaacactaatttcaggagtctcaaggttcagctctgcctcaggaacagtgacatccagtgaaggtgacttgatgtcagctttggggctttttgccccaaatccaaacttgggtttcttaaattgggggattttaacatctggcccttcgatgttaatatctgggctgtccatgtgtacatctaagcttggagcttcaactttgggtcccttgaggtccacttcaccaccttctaacttcggacctgaaaatccaatttttggtgccttgagatgcaaatcaacatcaggagcagctactttaggagcagatatctccagcgatggcatcttcaaagatgggccactgagtttggcatcagggccttcgaaatccagacgtggacctttaagatctacttctgggcctttcaaagtcccttcaaccttanggacagacacatcaaaatctcctttactttgggtcctttcaaatccacgggaacatcaggtattggagatcttggggagctntgattttatttcaggcatcttggaacntgggggcccttcaattttgcggcctggaccttcnna

SEQ ID NO: 6181 - DNA, 326 bp, Homo sapiens
ctgaatacacgtcttttgtggaaaatttcttcctgctgagaaaattttgggattaagaactgtattaaagactgttacggcaaagacaagaacatcaattttatttatacgatactgttaaagaagaacagttaaagagtttggtttttgtttttttcaaatcccagtctgccctcaaaagctgggaaaattctttgtggctctatatataaactatcctgaggtcctctcagaacgcaaagactcctgtttttccaatccactgggtactgtcaagataatatcagaaagagtgagtataaaaaaatgaatgggagtaaattttt

SEQ ID NO: 6182 - DNA, 507 bp, Homo sapiens
  misc_feature (1)...(507): n = g, a, c or t
ctgtcatatgaataattgaatgagtatcagtaaagtgcttcagtgcgtgcttgtagctttatggttgtgattggttgctgtggagggggaggccctcagctctgagctgggcagggagaagcagagaaaagttacttcagcctgaggctccccactttcgttagctaagcccggggttactggtgtctctagggaatgatcagcactcggtcagaattggaggaactctcttcttcttttcacgctggacaaatagtcagggccgtgggctccaaggtcaaaattctgaaaacaggatatagagcctcagagaaggagacgtccaggaaagtatgaatatgcgatccatccacagcattgtagaatgagatatctccagtctcatagtccaggaagacccccactttcttagggggcttaggaagtttcaggttggttctgggctcagttagagtcccgatacttattcccatcagtcanncccatagtccagaatccattcttcag

SEQ ID NO: 6183 - DNA, 271 bp, Homo sapiens
  misc_feature (1)...(271): n = g, a, c or t
ccagcctacaatggggatgttgtgtttctgttcaccttcgtttactatgcctgtgtcttctccaccacgctggggtctgggaggaatggacagacagaggatgagctctacccagggcctgcaggacctgcctgtancccactctgctcgccttagcactaccactcctgccaaggaggattccatttggcagagcttcttccaggtgcccagctatactagtgccgngagggacagaagggacagaaagaggctgaagaccatcatccag

SEQ ID NO: 6184 - DNA, 389 bp, Homo sapiens
ctgagagactctaaatccagtgacaagtctgtctgcctattcaccgattttgattctcaaacaaatgtgtcacaaagtaaggattctgatgtgtatatcacagacaaaactgtgctagacatgaggtctatggacttcaagagcaacagtgctgtggcctggagcaacaaatctgactttgcatgtgcaaacgccttcaacaacagcattattccagaagacaccttcttccccagcccagaaagttcctgtgatgtcaagctggtcgagaaaagctttgaaacagatacgaacctaaactttcaaaacctgtcagtgattgggttccgaatcctcctcctgaaagtggccgggtttaatctgctcatgacgctgcggctgtggtccag

SEQ ID NO: 6185 - DNA, 262 bp, Homo sapiens
ctgaaggagtatcacatcaagcacaacattctctacttcctcacctacgccgacgaggtttctccaaggacatcaaggtgcccaagagccgctacctgggctacatcaaggactacgagggagcgacgctgatggagtgtgagctgaatccccgcatcccctacacggagctgtcccacatcatcaagaagcagaaagagatcatcaagaagctgattgagcgcaaacaggcccagatccgcaaggtctacccggggctcag

SEQ ID NO: 6186 - DNA, 261 bp, Homo sapiens
ctggacataccaattggtatcaaatagaataaaatcaaatataaatgtttgagtcttaggttaaaaaggaaggttatttgtatagtttatagataatgaaggaaaaatttctttttcattgcaggaaatcttgtttactggaagatagagtcactcttttcatataagacaaatagtgctttaatgccaacttctttttatctcaacatttcaggatcatgctaggcacactgcccccttgaatagacattatatgcacag

SEQ ID NO: 6187 - DNA, 247 bp, Homo sapiens; identical to SEQ ID NO: 2583

SEQ ID NO: 6188 - DNA, 337 bp, Homo sapiens
ttggtgaaaattactgatggctctccttccaaagaggatttgttggtattgaggaaaacggtgaaatcctttttggctgtttgccagcagtgcctgtctaatgttaatactccagtgaaagaacaggctttcatgttactctgtgatcttctgatgattttcagccaccaattaatgacaggtggcagagagggccttcagcctttggtgttcaatccagatactggactccaatctgaactcctcagttttgtgatggatcacgtttttattgaccaagacgaggagaaccagagcatggagggtgatgaagaagatgaagctaataaaattgagg

SEQ ID NO: 6189 - DNA, 181 bp, Homo sapiens
gaggtctgggtttttctgagaaataacaccagacatctttctcaccccctgcagaatgagtccctggaacgccagatgcgtgaaatggaagagaactttgccgttgaagctgctaactaccaagacactattggccgcctgcaggatgagattcagaatatgaaggaggaaatggctcgtc

SEQ ID NO: 6190 - DNA, 327 bp, Homo sapiens
cctgcggctgctgctgccgccttctggaatatctaaagtgctttcacttggctcatcagggtctggaggattactgagtagattgtgaacatctcctcgacgacgttgtctgtgcctcctccgatactgaaattcagcatattcctctggtgatgcaaatcctaaatattcccaatcccatgttccaccagcaaagctgcgccttggagcttctggtgagtctgcaggagctactccccgagccacagatgccaggaattcttgcctcttctgctgtacaaggcatgctgctttgatgatcttgtggcggggtgtgcgaaggtaagg

SEQ ID NO: 6191 - DNA, 337 bp, Homo sapiens
ctggctgatgtctgcttggacactccactctgtaatgggcacaccacagggatggatgtcctctgggcagggacccccatggtgactatgccaggagagactcttgcttctcgagttgcagcatcccagctcacttgcttaggttgtcttgagcttattgctaaaaacagacaagaatatgaagacatagctgtgaagctgggaactgatctagaatacctgaagaaagttcgtggcaaagtctggaagcaaagaatatctagccctctgttcaacaccaaacaatacacaatggaactagagcggctctatctacagatgtgggagcattatgcag

SEQ ID NO: 6192 - DNA, 349 bp, Homo sapiens
ctgaatccctgggccagttactactcttccatttgaactccaagtctgctttacagaggattagtgtagctttggtaatctgtgaatgggctgctttacaaaaggagtgtaaagctgttaccttagctgtgcagccgcgtttacttgatatcctttcagaacatttatattatgacgaaattgccgttccattcacacgaatgcagaatgaatgtaaacaacttatatcatcattagctgatgtacatattgaagttggtaatcgagtaaacaacaatgttttaacaatagatcaagctagtgacttggtcactactgtttttaatgaagccacatcatctttcgattt

SEQ ID NO: 6193 - DNA, 441 bp, Homo sapiens
aaatgtaaataaattggcaccacctttaatcagactgatgtcctgacttgcacaggaaacacgcacctaacctcaccaacctcaagccctccctcctcaagtctccatgcaaagactgtgccagtcagagtggagctgtccccccgacgagcccccagaagcgcccggccggccacggctgtcattttgagggcggaaaataactggatttctggttaattggtgacatcctcaagagctgtggcaagccatgtctcggccgcgtgatggggcagacatggtgggtcctggcggccttgtcttcaccaagtgctcctaactctcagcaaacttggggttcatgaccgtcgtggtggcgctcttgaaaaggggattatcattgttccactgggacttgagcttctccttctcaaagcgcctgtactcccggaggtcgctcag

SEQ ID NO: 6194 - DNA, 207 bp, Homo sapiens; identical to SEQ ID NO: 5458

SEQ ID NO: 6195 - DNA, 311 bp, Homo sapiens
cctccacgaagaatatttttggccgatactcttcacagcggatgaaggattggcaggagattatagctctgtatgagaaggacaacacctacttaggtaaagtggcccggcctgggagccctggtatccatggggaagcccactctcagagttctgagataccaggcttataggaggcacagtctgtgagtgggaagagactggagtgtagatgttgcccatttgtaggtggtaaaatcaattgtttttgatggaattgattttccctgagtggagtgctgggggaaggaggaggtccaggccggtagtgg

SEQ ID NO: 6196 - DNA, 373 bp, Homo sapiens
  misc_feature (1)...(373): n = g, a, c or t
cctactgtatttattttagtaatgtgctacattagagtagaaaaaataagaacgtgaagaagaaatagcaaaaggagaaaattaccacagatttacagaacaatatgttttaagagagacgttgagaaagattcacgtggccgtcctcagcgtctcaaactcctttgaagggagatttgagcttaggctgttgatgacataagatgcaaagcaaaataatatactctctttattacccagaaaatcaagttgccagtcaaaactgagaaatgagaaagaaaatcagatttctttattcatctctgttgaagcctanaaaaccaaaacaagctggttgtggttcagcatcatggtttaggaatcaagctgtcag

SEQ ID NO: 6197 - DNA, 290 bp, Homo sapiens
  misc_feature (1)...(290): n = g, a, c or t
gaggtcctttccttgagctgcacgtgaacctgtgtgggcaggcancgtttgcaggcgtgtttacgggcaggcagcgtttgcaggcgtgtttaccggcaggcagcgtttgcaggcgtgtttacatgcaggcgtagcaccatgtgagaccactggtccagggtttcagaggtcctgctcaggtgaatcggctgtgttctcacaagttcacggagctgagtgggtgtgcaacatgaaatactagtgctgtgagggacagaagggacagaaagaggctgaagaccatcatccag

SEQ ID NO: 6198 - DNA, 303 bp, Homo sapiens
  misc_feature (1)...(303): n = g, a, c or t
nangtaaaancatggaagaganggaaaaaaaaccagcttangaanaatnaactgataaactgcaagaaaaaatgcaacttacatcacaaaagctaattgctttattatttagagagtacttaaaaattaaagaccaaacttctctccacccaacaaaaatgggcaaaggacatacagctaggtcaccaagaaagaagggcaaataggtggtgagtatatgtaaagatacttgataggacttttgcttanttgaatctttagcaaatctcttttatttcttgggattttgaagaagtaattttt

SEQ ID NO: 6199 - DNA, 446 bp, Homo sapiens
cctgtccatcatgtattgtctgaggctgcttcctgctgtcatgggagaaacttttgggcggatgctgctgggagccggtcagactgggcagactggatgagaacaggaggatgagaatgagcaaaggcacccacgaggagaacaggaggaaaacccacgcgtttgggggcgactagaaatgcgcagtgagccttggggtcccctgtgctgccctcaggctgcgtttgccttgagtgaaatattttctccaaaaggcagaggagaggacaaagcccctgtgcatctccattctccacagcatccccaggatggcaggaggaggtccccgagaactgcacaagctgtgtttgacccaaggggactttttcctcttgaggaggtttgctgggtcatgtcagtgatgaggtttaaggacagagcccaggaccctcacagcctggatatgg

SEQ ID NO: 6200 - DNA, 376 bp, Homo sapiens
cctcaacctaatatgccccaaagttgatacaaattttattagaaaaacaaactttttgtaagtctaacaggtaaaggaacaaagaatcagatctatttttcttatagcttccttactcttcccttccctcttttattctttatcacctaaaagcttggtcaccagtaagttgaaaaggttaaaatatggctatgaaagtagaaaatatagaaaaatatttaagatgttcaacagtaatttttagagtaaagttagttaagcactagagtttatgcaacactgtaaaatacaagtattttactaactacactggaaaaaacacctacttgcaattttaattaatcattataattcaaaaacaggtttatataactgg

SEQ ID NO: 6201 - DNA, 435 bp, Homo sapiens
ccaggtggccctccgtgtgaggtcatggtcacagcatagtttggagctagggagggactgtcagcctggaggtttggagactcattctggaatctagtgtgggtcaagccaacttcagggagaggctgagccagggtaggagtcacaggagcagacgaggatgtggggtgccgtgcacagagctccatgaccagcttgggaagttagaaggaaggggaggcaggaggctgcttagtctgctgccatgatgggccccatgaatggtggctctcaagcttctgtgctacacaggggtgtgtggttgggcgagtgtccttgttaattgatacctaattggccttggttgggaacatagccatgagtgcccctcgtgggtggggcgccagtctgtcattgacctcattgtgtcagcaccttccccccaaggaggctgac

SEQ ID NO: 6202 - DNA, 158 bp, Homo sapiens
  misc_feature (1)...(158): n = g, a, c or t
gtccctgaacgctcncttgtctnctggacaacccatactaggactncacnttgacactaaggtgagctcgcagntgtgtacgctgggacctgtaggtgaaccantnccatgcttgcacttgccctttcttncgactgcctgctttaacagactctgcg

SEQ ID NO: 6203 - DNA, 135 bp, Homo sapiens
  misc_feature (1)...(135): n = g, a, c or t
tctnaaatagtctcacctctggctctgatactcacgcttacacggttgatatctcacaggacaacaactcggacgagctcggacttacgtaagtggggactcacccangcctctggatagcgcagaacctngggg

SEQ ID NO: 6204 - DNA, 221 bp, Homo sapiens
agagtggggagccacagcagcacaagcggccacctgccaccacggccacacaggtctcccagcagctctgcctcatccaggtggtgggtggagaggatcagccgtgcgaccttctcggtatttgagcagcagctcccaaataccgcggcgggaagcaggatccacgccagccgtaggctcgtccaggataacaacttgggagccgcccacaaaggcaatgg

SEQ ID NO: 6205 - DNA, 190 bp, Homo sapiens
  misc_feature (1)...(190): n = g, a, c or t
agctgggnactgcagggcagatgccatgcattcgcttgttgaangccaccangatttgtgtgacgggcaaaancaacttccanntctanacacctccgccaccaccacnctnagggngaattccaccacactggcggccnntactagnggatacctagctcggnaccaatcttggcgtaatcatngtcat

SEQ ID NO: 6206 - DNA, 35 bp, Homo sapiens
  misc_feature (1)...(35): n = g, a, c or t
cctggacacctgtnaagacnactnttatgacncat

SEQ ID NO: 6207 - DNA, 393 bp, Homo sapiens
  misc_feature (1)...(393): n = g, a, c or t
aaaccctgccttgctcaactccggagttggtgggtttttttctctttagaaatagcgtctctgtctgtaaggctgtgagggtgtagtgcagtggcacaatcacagttcactgcagcctagaattccttcgcttaggcgatgctcccaccccagcctcctgagtagctgggagtacaggtgcatgccacacctggctaattaaaaaaaagnttnttagagatacggtctctgtatgttgcccaangctgatctcaaactcctgtcctcaagnaatcctcctgcctttgcctcccaaagtgcttgggatcacaagtatgagccaccacatccaacccagagttcgtgctcttaaccaggggatgacatgttgcaacttcactcntcacanntgtg

SEQ ID NO: 6208 - DNA, 395 bp, Homo sapiens
  misc_feature (1)...(395): n = g, a, c or t
aaacctggtcaagtggtaatgttctgatgaatttgtttctctgcaagaacaaggaagaaaacattactttgaccaggtattcaacatgatttgatccaaagctacttttagatgctacatttacctgataaaaagagggataacattatgcccaaatggatgcattgtaaagaaaatccagaacagttaacaactacagaaacaaaagagatatcttccgcttactttatttacttgttttacaaaggcagtgaacaccaaaggatatcaccaacaactaaaaggagttcaaaatgcaggggaaggaaaactagctgaaacttgagtaaaggctcctgtgcggngtgagcccttgggcccttttcctccacccatcattgagtatataaaggcgc

SEQ ID NO: 6209 - DNA, 461 bp, Homo sapiens
  misc_feature (1)...(461): n = g, a, c or t
ccaggaggctgaaggctgagtctgcttcttctgggttcacgccacagtcacgtgtggtggctgctgtagcctgcagccaggtgccattcttcctcatgccctctgtgagtggcttcattccactctggggtctggcatggccctccccatcgttatcctctctgcattcatgacagggtgttggcaactcgcttgcacccttcaggtctgccgtcttggttcctaggttgctaggaaaggaccacgagggggcccgctgcagagaacggaagagcagccaggaccagtcggctccatacaccagcgagtcgggcaatgtgtgagatgtcaggaccgtcgcctcctgcctctcctccattgccttttggcagttgaggatcttaaagccacttgtgcatgcaggcggccangagcangtggtggtggaaanggtgccacttgattctccataccccacccct

SEQ ID NO: 6210 - DNA, 205 bp, Homo sapiens
  misc_feature (1)...(205): n = g, a, c or t
ctgttaccgacccacgtcctgctgtctctgtgtggtcctacaaaaactgtccattcccacccctttgctttgccatttgcaagagtctggaattgtcaggtctcagcttcnaaaagtcctggttccactgacaggacacattctttagtggggaattaagacctacaaagtctagtttgtatgtagggtatgaagggaatttttt

SEQ ID NO: 6211 - DNA, 178 bp, Homo sapiens
  misc_feature (1)...(178): n = g, a, c or t
ctgagagtagacacttgtggtatgtggagtacagataagccaggggcatagccacggctcgctccatgaaagctaggagggagtgaaatatcagtgatcatcgcaaggaaggaggcagacaagagtaaggcacacctgactcttaggactagcagtcagaaccaggaggaacccccnc

SEQ ID NO: 6212 - DNA, 328 bp, Homo sapiens
cctatgcctttgctgtcatgtgattctgcagtaccacaggaataaccaccttcctcttcttctgtcgcctggtctcctgaattgttgccactgtctctgatgtaatagccttttaatcccaaattgtacaattttcgatcctccacaaatgccctggagcaaaggcacagtatcttacaatcctcccgctcctcagtgaagagaaacatttccgccacgcggctccacttctcgcagcacattttaccacttcggaggcagctctgacgtacgcagcccgggtcgcgcctgccgggcctccgctcggttactggagacttaaaacagg

SEQ ID NO: 6213 - DNA, 361 bp, Homo sapiens
  misc_feature (1)...(361): n = g, a, c or t
ccacagatttccagaatgaaagtgcagcagccctggctgctgcagccactcgacatttacaagaagctgagcaaaccaaaaacagtggcactgagcactggtggaagatccatgaggcatgcatgcttgccctaggctcagtgaaggccatcatcactgacangtgtgaaaaaatggcaggattnattttggcatgcatgggtncctgaccaatgtnatccttgcngacctcaacctctnagtgtctcctttcctcttgggccngggcactttgggctgccagtngagttcactngttgctattgtcccctgaactgatccangcagttccttacaggcnanagttagtggtctttcactc

SEQ ID NO: 6214 - DNA, 323 bp, Homo sapiens
  misc_feature (1)...(323): n = g, a, c or t
ccatgtgttacgggatcacgcagcaccgtggttccagggctcatccacactggagtctttccttcatatggctgagtgacatcccacggtacagacagtgcattgcatctgcccgtttgtccactgatggacgtttggggtgtttccgcctttggccgtcttgagtcacgctgctgtgtaaggatgagtttgcaggggatggatgctttcattcctctggggcagatgcctaggagtgtcatggctgggttttgggctcaccatgtctagtcggttgaagaactactttccagacttttctacggtggctgcacgcgttnnnn

SEQ ID NO: 6215 - DNA, 155 bp, Homo sapiens
ccattaaatgctggagttgctgaaagcttggccctgtccttgtctcgcctagcacgttccttctctgggtgatcttacccacatctggagctttatgactcagacatttatgtttccaacctagattgcttctgagtcatggtgcagagggtcag

SEQ ID NO: 6216 - DNA, 252 bp, Homo sapiens
attttcctcacagcaaatataacaggatggaacagttagtgttttgttttcacaagtgtccaccactccatctgccctgcatggagagggctctctcactgctagatctaggctgagccatctggaaggatcaaagggtgtgggagtatcaccccctctcaggctgcagaaggtctcgagggtggcgtcacagcaggatttccgccttctgcattgcactgcacagccccatggaacatgaggcacttgagg

SEQ ID NO: 6217 - DNA, 390 bp, Homo sapiens
  misc_feature (1)...(390): n = g, a, c or t
aaaattctgataaaaatttactcaattacattttatacattaatatttagtgaatttgtccaaaaaggctatgtttaatttatgtgtaaaaataacaaaagatgtatcagtcagtctctgggcaataagaaaggaagaaagccttgctanaaataataaataatctcacgcaaaaggccaggtgacataagaatactacaataatcaatatgttttctttgnatttacaataaaatccatctgttaacactgngatagaaaaaanaatcagtccacatcatgtaataaaaacaggctttgaggatgattatacctcttataatanaaacatacaanggatttctccagctaaaggctnttcaacttgngacaacttgatgaccagncntg

SEQ ID NO: 6218 - DNA, 316 bp, Homo sapiens
aaaacaacagaatgttgctatcagtttgtcttacgttaaaacagttcttaaaccacctactatattaaatacattctaatttggtcactgatgataaagatttttacctagacgttttgcacttaaaaaatgctattaaaagtctttggcaaagccacggtcggggagaaacacgtcgggtgccgcttcccactcgtgtgccctcaccacccacgtggcccgcggagagccaggtcgctgtaaaccacagatgcctgttcctgctcaactcctagggacagtcccagccctgagcagaagggtcaggtcatcgcgg

SEQ ID NO: 6219 - DNA, 97 bp, Homo sapiens
  misc_feature (1)...(97): n = g, a, c or t
tggaccttactcatgcaggngaagatggaatttttgatnctgganattttggtacctttcctagtgaatatctanggttctcttccctagtnntgna

SEQ ID NO: 6220 - DNA, 318 bp, Homo sapiens
  misc_feature (1)...(318): n = g, a, c or t
tngaggtaaagtcatttatataaccaattgnaaagctttgnttaaaaagaaagataacagggtttactggcaagaacaatgaatctttncatgaacttctacccctcccttttctttactgttgtttctagaagcagggagatcacttgtttagtaaggacacctnttactgaaaatnatncnaaaagagagccagttaagaagatgactgtgaataactagagataattagctcttcccgaacgtggggatgctggttntgaaaacagtnttangatgttnagtgggaggnctcccccccccccccccccccgactt

SEQ ID NO: 6221 - DNA, 95 bp, Homo sapiens
aaaaaaatatgtcaaatgacacagataagacaagcagaaaggaaaaaactacatttgttctttcagcattacatatatgagtacttgctccttgg

SEQ ID NO: 6222 - DNA, 397 bp, Homo sapiens
  misc_feature (1)...(397): n = g, a, c or t
ctngtgctgntnagcctggncgcactgagcangancgccnaacccnganagncgancgtncaatgngnctttgaaactgggccatctccacannggatgctacnacntgatctaatncctggnagacttgagggacctccnacncaacctgttacaactagtgtngaaacaggggactattnnatnatgatgaatgtaagctgggnactgcagggcagatgccatgcattcgcttgttgaangccaccangatttgtgtgacgggcaaaancaacttccanntctanacacctccgccaccaccacnctnagggngaattccaccacactggcggccnntactagnggatacctagctcggnaccaatcttggcgtaatcatngtcatagcttgctc

SEQ ID NO: 6223 - DNA, 418 bp, Homo sapiens
  misc_feature (1)...(418): n = g, a, c or t
ncgaggtctggagaagggtgaccgactcagcgctgagatcaatcggcccgactatctcgactttgccgagtctgggcaggtctactttgggatcattgccctgtgaggaggacgaacatccaaccttcccaaacgcctcccctgccccaatccctttattaccccctccttcagacaccctcaacctcttctggctcaaaaagagaattgggggcttagggtcggaacccaagctttagaactttaagcaacaagaccaccacttcgaaacctggggattcaggaatgtgtggccttgcacagtgaagtgcttggcaaccactaagaattcaaactgggggcttccagactcactggggcctacagctttgatcctgcatctgaatctggagccaggagctttggttttgactgccgg

SEQ ID NO: 6224 - DNA, 162 bp, Homo sapiens
  misc_feature (1)...(162): n = g, a, c or t
ncgaggtccacaccctcacccctgagcagcccggggggccacagcaagaggtacacatgctgtggacaccagcacccccagacctgacccttggggaaggtgaggaggctaggacgtgggacttcctgacagccgtgggcggcngccacgctgaggctcagg

SEQ ID NO: 6225 - DNA, 326 bp, Homo sapiens
  misc_feature (1)...(326): n = g, a, c or t
naggtctgcagttgctccctcatcatgtcactctgtgggctagtagttacagatgttttcatcacaggttcaatagtgtgagaaagagacactagantctgaggaagatanaggggaagggaagttaaatccctaaatgctcctgagtcttcagacaaccattgntgaagctgatcttcaaacctcttggtctcttctttctccagcagcagactgctcgacaaacactgcgccaagagctcctcngcagaanctcctcgcatcagatctctctgtgctgngaatactcccctcttgagcacactctgtgctcctcttcccgttnc

SEQ ID NO: 6226 - DNA, 351 bp, Homo sapiens
  misc_feature (1)...(351): n = g, a, c or t
aaaacttgcctattactgccctcttttccagaaagaaaaggcaagttcaggcttgcagcttaatatatttcatgttctactatttgtcttaagtggnggaagattcactggctcgggatggactggaatggcttaaattgttaagttgcatggcttatggattgtcattctgttccaatggtgcactgccacgttaaatccataagttgaacgaacaaaacttatttgaaggaataagtgcagtataaggatttttagnttggaggtcttcaagtttactatattcaagaagcatctttttcaacttcatggctggacctggggcatgcctgcctcangttttggcttttt

SEQ ID NO: 6227 - DNA, 493 bp, Homo sapiens
  misc_feature (1)...(493): n = g, a, c or t
aaatttgtgttaagaaagggaaaaaaatcacaggtttgtctaactcagtagaaaaatcgacaaagcatttgcagacaacttggcaagggtacagagaaacggatgtactgtttttcantatttggggagggtggtttgagcagcatttattgacaatttcattagtggggatgtttctattgaaaacagagttaggaagtcataaaatgttcctgcaatataaggtaataataccaccagcgtttatcttactgttttcatgttctaagngcatgcatctgagtaaaaggatctgggctgcagtccantctgagagatgccagcaaaggcttcctaggccagttcangtccagtaaatccctcttcgatcttctcttccacacagacagcaagtgatgagcatgcccatgaactcacatgattattttggggaaaaatgaaagagntgtattctttttgaggnaggaatttccctttcnggggccaatacatt

SEQ ID NO: 6228 - DNA, 187 bp, Homo sapiens
gcgaggtcctttgagaagctaagcttggttaaaaggagttttaggatggaattgaaaactgagtctagttctgtttgaagggggcagctttttactcagctttgtgcactttggggtgctcgctcggggtgtccgcatttctcagaccttggtttggttccctgcacagtaagtactaatggttagg

SEQ ID NO: 6229 - DNA, 474 bp, Homo sapiens
  misc_feature (1)...(474): n = g, a, c or t
gngaggtaaaaaacaagttttcctaaaaagtcattgtatttggggcatgtttctcttaaaataacacatgtagtttcaaactaaattttaagaaaggaatatatctgactgaaataaatgctctcgaaataatgcctacgcattttactaaatgcagttttcatctaatactttgaggcatttctgtactagtatattgttttggttcacatgaaaataacttgggaaaaactacaagtaattccctatattaacaataaaagaagaactattaagaataaaagaagaaacactaaagagatacatttactgcttaataaacatttattgagaaactattttgtggtactcancaagaagtgagagttggatgggctcaaatatcngcctataacttacttttctatcctccnattactataaaagcccaagaaactcttctatggctttctttcttttcttttcttttttttt

SEQ ID NO: 6230 - DNA, 277 bp, Homo sapiens
gcgaggtccagagggaaggcccaagagacgtctctgaagccaccgttcctgattattcagaggcagggtccacagtgagtgactcggtggggctggaggaacccagggtgacccagagggggctctggagcgggtccctaacatctgaaaaagtcctcccagggaactcggagctggaacttccaggcagcttcgggggtgacatttgtatccggccagccgagcggggaaaggagaccttgtgtcctggcaacagggagggccgggactgggatgg

SEQ ID NO: 6231 - DNA, 290 bp, Homo sapiens
  misc_feature (1)...(290): n = g, a, c or t
gaggtaaacttggctgtattgngtacaactattataccatcttttataaacacagttttttaagaaatttctttttgtaagttacaacattccactggatccttatattgcctgtagtggaagagggtcttgtgtgtctgccccttctagttttcactcatgcagaagcaacataaccttctgatatgcacaataaattacatatatttagcaggatttttatttgccgtgatatataggataatttagtctttggcatgtggcattatatttattttggtttttttttt

SEQ ID NO: 6232 - DNA, 271 bp, Homo sapiens
gcgaggtcctgcaagaccccccaaagccagcagtcagcctacttcctgttaacactgtttagagaggtggctattttgtacagatcccacaatgcaagcctccaccccacgccagagcaatgtgaagctgtgagcaaattcattggcgaatgcaagatcctttcacctcctgatatcagccgttttgcaacatcgctcgtggacaattctgtgccattgttgagggcggggcctagtgacagcaaccttgatggaacggtgacagaaatgg

SEQ ID NO: 6233 - DNA, 302 bp, Homo sapiens
ccatgggggtcttagtgggcccccccttcgggagtgtgctctatgagtttgtggggaagacggccccgttcctggtgctggccgccctggtactcttggatggagctattcagctctttgtgctccagccgtcccgggtgcagccagagagtcagaaggggacacccctaaccacgctgctgaaggacccgtacatcctcattgctgcaggctccatctgctttgcaaacatgggcatcgccatgctggagccagccctgcccatctggatgatggagaccatgtgttcccgaaagtggcag

SEQ ID NO: 6234 - DNA, 187 bp, Homo sapiens
gcgaggtccagtactcgggacagactaagggcgcttgtcccatcctggacttttcctctcatgtctttgctgcagaactgaagagactaggcgctggggctcagcttccctcttaagctaagactgatgtcagaggccccatggcgaggccccttggggccactgcctgaggctcacggtacagagg

SEQ ID NO: 6235 - DNA, 378 bp, Homo sapiens
  misc_feature (1)...(378): n = g, a, c or t
gcgaggtaaaagatactttggattcaattaagaagagtttttaagaaaaaagaggaaggttctggcatggggagctctgcaacccactgctgggtgccagaagcgagctgtggaacggaagatgaagatggcaccatgtgtctctaaaccacaaatggaaccactgatttctatgtgtatttgcatttgctgtaatgtgtgggaaatctgaaggttacacagcacaactgtccacagcagatggccctcgaaggggatgaggtttagagccaggcagggcctggaaggactggattttacatggacatggaggacattgcaagagaaaggcatncaaggtgttctcacgaaatccactacaattgtacaagaaaatga

SEQ ID NO: 6236 - DNA, 366 bp, Homo sapiens
ctggtttccatgtattctaggccaggtaggcaacacagagccaaggcgggtgctggaagccagacggaacagtgttggggcaggaaggtggatgctgttgtcatggagctgtgggagttggcactctgtctgctggtggccctctcggctcacatgttcacagtgcagctcctggcagacttgggttttctctttggtggtttctaaagtgccttatctgcaaacaacttcttttctccttcaggaactgtgaatggctagaagaaggagctcagtaaactagaagtccagggttgcttggtttactggtttataagaaatctgaaagcacctctgacattccttttattaactcacctctcagac

SEQ ID NO: 6237 - DNA, 219 bp, Homo sapiens
ctgggaatcgtggcttcatcgacatcatggacatgcctaacaccaacaagtactcctttgatggagccaaccctgtgtggctggatcccttctgtcggaacctggagccggccgcccaggcggagcatgaggatgacctaccggagaacctgagtgagatcgccgacctgtggaacagccccacgcgcacccatggaacttttgggcgtgagccagcag

SEQ ID NO: 6238 - DNA, 201 bp, Homo sapiens; identical to SEQ ID NO: 5066

SEQ ID NO: 6239 - DNA, 333 bp, Homo sapiens
aaaaaagaacagtgaccaccttacaaaccagaaattccaggcaacaccttattcctttaagtaatccaaactattttctatctcctaaatgcagtcttttcccctgactagatactgtgtgcgtttagcacgaggcagaagggtgggggtttcacagtgacgcacacaaagaggcaggagctttgctaggtaccagggaaggggcagcatcttcaagtgcacatgtctgcgtctctgtgaagtcacttcaaagactttatgaagctcagatctgattctgttgaaatcaattggctcctttcccaccaaaattgtattcgagatgttcttcag

SEQ ID NO: 6240 - DNA, 166 bp, Homo sapiens
ctgaggcactttccagagcgtggggaggggcctccaccaaggcgagaagggctgcaggtccagatcaccagcgtttgtagacagtagtgtggcgcttggagtttacctgagggccagtggagctccagggacctatcaggacggggacctgtggggactgggaagg

SEQ ID NO: 6241 - DNA, 170 bp, Homo sapiens
aaaaagatttaacaagttaacataaaattaaagtgtgtctcaaaaccagacagccatcttgtctgccatcactgagcaaattacagatggactcaatacaaatttgcccacggggcttgcttgcaatactatttcacaaagctgactgtattcttcatcttcataaatgg

SEQ ID NO: 6242 - DNA, 236 bp, Homo sapiens
gcgaggtcctctgccttccttcactgtgcaccctgggctcatgcaccaaggcagagaacaggaagaagtgaggggacaagaagaaggcagaatgtccagatggaggataagaccaaagagccagcacctacaggacttgggctgcttcaggctgaacgctgggagaccacttcctgtgctgacacacagagctcccatctccatgaagaccgcacagcgcgtgtaagccagcccag

SEQ ID NO: 6243 - DNA, 158 bp, Homo sapiens
  misc_feature (1)...(158): n = g, a, c or t
ncgaggtgattttgaaggcagtgttcccttctctccattgactatgagagagttgggggacacacatgcagaagaagcccgtggggagaaggtggattcctggtgtgctggctggtttttcagggctgttagaggttttttttttctttttttttttt

SEQ ID NO: 6244 - DNA, 212 bp, Homo sapiens
cctccacggcacccacggcggtggcttctgtggggtcgctggtaatgggcgccaggcggcggagttcctcaaataattgcaagtggtagatggcagcctctgcctcacgggcaatctaggggagcaacatccgtccagagggacgagagggggacagagctttgtcagagctttgtcacaaaaggagagggaggggaagagtcaccggacag

SEQ ID NO: 6245 - DNA, 262 bp, Homo sapiens
  misc_feature (1)...(262): n = g, a, c or t
gcgaggtaaaatcaaccagtaaataaagcatgaaaaagtcaattacggttatagaaaaggatgctaatgtactagattatgcaaagaaaaagttggtaatggaaattaggaagtagaagcagcagagggaacagtggtagaatgaagggttaaattgcttatgtccttatttctagcagatcaagaaatagtatttggaatggcacaaagaaagacttgttattttttaattataaaaggcgagtgaaataatttttttncn

SEQ ID NO: 6246 - DNA, 370 bp, Homo sapiens
  misc_feature (1)...(370): n = g, a, c or t
ctgagaagaaccataccataccaggcttccagcaggcttcataatcctcggttccccagactcaccggacaccatctcctatgccttggagaccttctgtcacttggctcccttcttaccaccaccaagactgtcccactgggcctgacccacctatgagggaagaagtcccacctgggccagagggagttcatgtgttactcataacatgcatttcaataaaaacatctctgcggtgggccttgggtaggagagatgaacccttccggngccaagctagtcccctctggtgtcctcgactgccctgctccctgtgtatctggcaaacctctgttctcccttctccattcatcaggaagggatctgctgt

SEQ ID NO: 6247 - DNA, 377 bp, Homo sapiens
ggcgaggtaaaggcttctggagtgaatggagtccaagttattacttcagaactccagagatcaataatagctcaggtaaggaatggtggtagagtttttgttccctcagagtgctttgcatgtcaaagtgtgggagcaagtgagaggaagattgttgaaactaacctgcaaaacaggacacccttggagggcactcttacactttctttggagaatgacttgcctgctgtctttgcgccttttgtgaagaacaaggaagcagagggagtggggtccttattagctgagaattagtacaagccatctgtattcctggaagctgccatacattttgaacaaaatccccacccactacgtccagttaaccaatttagccc

SEQ ID NO: 6248 - DNA, 264 bp, Homo sapiens
gcgaggtcaatatcaaaaagccttgttagtctatctggatcatatcaaggaaactaagataaatatatttgcttatatttgctatagttttgtgtgtgtgtgtttgcttacttgtggaaaccataatgaccaatattataccatggctgagagtgtagatttggaggttttaatttctgatccctcagttcattgactttgtgacactgattatctaatagttctctgtctcaatttcattagataagttgggaaggctttcag

SEQ ID NO: 6249 - DNA, 371 bp, Homo sapiens
aaagcaaatcctggctggcaggaaattctgaggaatatagctcttaggcttccagcctctaccatgcaggagagaacacagaaggactgatgtatgttggtggatccatgtatgtgtccagcacagcggcctgctggactctgagaactgggaaagatcagagcaagccttgcctcttatcttcgggaaaccagaatatgtttggggtggtaggagccacacagactcttctgagccccctcactcacttccttccccctgtgcctttcctttgagagtgaaggtgggtggagttgaccagagaaaggggagagaattcgggaaagacccaaagtgtttgtaattcttctttgtccttttacctacagaaa

SEQ ID NO: 6250 - DNA, 259 bp, Homo sapiens
ccaaacccagcccttacgcccctgctgacaagggagacaagctgccccgctgaactccaacaacctctgggtgggctcagcagcccctaggaagttaagcgagagctacagggcaggggggctccctgagggagtttgcacagaccaggaggggccaaggggtagccccaagggagcagaggaaggagaagggcaggaaaaggtccagggcacagggcaagcaacagtgccagagggtgcctggtcacaggaagcccag

SEQ ID NO: 6251 - DNA, 375 bp, Homo sapiens
cctgaaggccctgggcttttacgtagtaaaatcattcttaacagactattccagtgctttggttttgaataggatgtagcagaagactcagggctagagatcttcatacatatcaaactgtatgattgccagaagcgtaaagtcacagacgaaatacacacccacgttgggattagcagtgacctgtggggaagctggaggccaggagaggacctcccctcatcactcagccagacagaaaaggatgcagctctttcccagccgctctgttcctctctgtccacaatgctggagcatgggcagatcaaacaaaactcctccctgtgcctaagcatcgaggcgtacgtggaagacgggagtgagtgggtgtgtgcc

SEQ ID NO: 6252 - DNA, 275 bp, Homo sapiens
  misc_feature (1)...(275): n = g, a, c or t
ncgaggtaaacattgacccaacatattaccaaactaattcctgtgaaatacaaaaagaataatatatcatgataaaggtaagtttgtttaacccatggttaatttaacatatgaaaatcaatcatctatcatcttaatagatacaaaaaagaatttgataaaagtcaacacttatgataaaaagcaaaacccttaacaaattaggtatagactgggctttccttgatctgataaatagcatctacaaaactgaacatcaaatattatatttcata

SEQ ID NO: 6253 - DNA, 364 bp, Homo sapiens
gcgaggtctgagttcccttcccgaaggtcagctcggggctcccgacgatcatgcagaagtagatgccactgtcttccggcttcacgcttgtgagattgagaatgaaccggcttgcatcccgaaacacagctatcttctcctgttccacctcttcaccgtggatagtcccttttgcggaatcccagagggccaggaactcgtggtgactgtcactgctcggtgcctggcgctgtctcagccagtagatgcgcatgttactgagggagattttagcctcgcaggacagcatcaccatcttgttggtttgcacctttatgtatgcaggggtctgctggaggactgagttgccatggagaactgtcag

SEQ ID NO: 6254 - DNA, 345 bp, Homo sapiens
gcgaggtctgcttcacaacaggatcacagtctttctgtccacatggaacaaactgaggagatcgcttgagacgaacggtgagatcaacctacccaaagactactgcagcactgacttggatctggacactgagtttgagatcctcttgccacgccgacggggcctgggcctctgtgctaccgctctcgtcagctacttgattcgcctacacaatgaaattgtctacgccgtggaaaaactctccaaggaaaacaacagctattccgtggatgccgccgaggtcactgaactgcatgtcatcagttatgaagtggagcgggacctgactccactgattctctccaa

SEQ ID NO: 6255 - DNA, 345 bp, Homo sapiens
aaaaaagaaagacatattttacatgtatgtgtagaaaataatcaggaagaatgtacaccatattaacaggagattattcctaaggtgaagaattatgagtggttcttatttccttatctacttaagttttttctctccaatgggcaggcattgcttgtaccataccttaagcaaggaagtgcatgtttgggacagcagtttgggctctcagcctccttaagagagtcaggtctgcctcatccctgtatctgctagttgagcagaggccagggctgtgtgaggggctctccaacaattgtctttacaaagtataaaaagtcatcagtgatcccaggaacatgtttg

SEQ ID NO: 6256 - DNA, 252 bp, Homo sapiens
  misc_feature (1)...(252): n = g, a, c or t
ctgttaaacaggttcgttcttggcgccacataaaaacaagccaatcacatcgaataaatcatggctttttttttctttatcacaattcactaagtgatgttaattatggnccttgtcaaacacgtttggtaaaggctatttacagtgtacatggntgagcatgcactatttatagttacaaanatacctgccagtttattacaatagaattacacagngcctgaaaatggngaaacatctcacacatcattt

SEQ ID NO: 6257 - DNA, 356 bp, Homo sapiens
gcgaggtctggtatatttttatgcgactgcaccagattctctgcctgaggctgctacggatttgttcccaagccgaacggcaaattgaagaagaaaaccgagagagagaatgggaacgggaagtgctgggcataaagcgagacaagagtgacagccctgccattcagctacgtctcaaagaacctatggatgttgatgtagaagattattacccagctttcctggacatggtgcggagcctgctggatggcaacatagactcatcacagtatgaagattcactgagagagatgttcaccattcatgcctacattgcctttaccatggacaaactgatccagagcattgtcagacag

SEQ ID NO: 6258 - DNA, 197 bp, Homo sapiens
gcgaggtctgagagccagcgaagaactgaattccgccaacaacctgaatgaacttagaagcagattcttccccagagcctccatgaaggaatgttgtcctgccaacccttatttcagcctttaagaccctgagcagagaatccagccacactgtgccagactcatgagctacagaactgctatgggtattgtttttt

SEQ ID NO: 6259 - DNA, 164 bp, Homo sapiens
aaagaattttaatacaaacttaatataaactatttcagtccctcttaacatgtaagacactgactcaaaatacttttataccgtttttttcaagtattgcacaatataggtacaaaattaatatttacgattacatttttcttccataatatatagcaaaaatc

SEQ ID NO: 6260 - DNA, 364 bp, Homo sapiens
aaaaggagtttttagaagaaaatagaaacaatgggggaagatggttaaaaattaataataactttccagacttgaagaaaaaaaactgaatcttcacattacagaagcacactatgtctagggcaggataaataacaaatctacactaggacacatcctgatctgcaacacactgaagataaagagagaacagtaaaaatatagattactacctgtaagattactacctacaaactaagagggctcagactaacagcagattttttcattagttaacactgaggcaaggagacaatagaacagtatcttcaaggcacagcagacagtactaaacaactcaactcggtcaaacctaactttctgg

SEQ ID NO: 6261 - DNA, 334 bp, Homo sapiens
cgaggtccttggcatagccaggctgctccagcactgtgagctgggagtctcctcttgcagaagatgggtgtgaacctgacacgcagcaacaaggagacggtgaagcacagcgacgtcctgtttctggctgtgaagccacatatcatccccttcatcctggatgagattggggccgacgtgcaagccagacacatcgtggtctcctgtgcggctggtatcaccatcagctctgtggagaaggtgcccatctcagccctgatgccccttgtgtgaggggagggttgacccacgaatggcagctaatgggtgggtgctggtgggagccgtgccctgg

SEQ ID NO: 6262 - DNA, 297 bp, Homo sapiens
  misc_feature (1)...(297): n = g, a, c or t
cctgcaggggatggaaccttccagaagtgggcggctgtggtggtgccttctggacaggagcagagatacacctgccatgtgcagcatgagggtttgcccaagcccctcaccctgagatgggagccgtcttcccagcccaccatccccatcgtgggcatcattgctggcctggntctctttggagctgtgatcactggagctgtggtcgctgctgtgatgnggaggaggaagagctcagatagaaaaggagggagctactctnaggctgcaaagcaggtgacagtgcccacggctctg

SEQ ID NO: 6263 - DNA, 206 bp, Homo sapiens
  misc_feature (1)...(206): n = g, a, c or t
ncgaggtaaataattaggccacttaatttttattacaccaagagtcagaaaatgattgcagactacatccttttacacaaaacacatttgtagggtttctaaaaagctacatacataaaggaaaaattttagaataatatcctactttcagtgtgtcagggaaatttgctaatatgttttaaggttatgttagtttttattttttt

SEQ ID NO: 6264 - DNA, 177 bp, Homo sapiens
gctgacagttctccatggcaactcagtcctccagcagacccctgcatacataaaggtgcaaaccaacaagatggtgatgctgtcctgcgaggctaaaatctccctcagtaacatgcgcatctactggctgagacagcgccaggcaccgagcagtgacagtcaccacgagttcctggc

SEQ ID NO: 6265 - DNA, 442 bp, Homo sapiens
gggtaaactgtttactggagaaaatcctcgctcatgtccatttattgttttttctgtactgtgatttgtttcaagcttaggaaaactagtatattagagtatgttctaggaaattaaaggatctggttagagtaaaaagttctttttaaggttcttaactaattttttcacaactaagaaaataaatgaagtattcttaggctgaaattcatcttattttatcataaattagattgtaggggcagcctacatttttgtgtatgtgtttttatttcttaaatgattgtgtgagcctggtgacattttatggttcttgtgatctaaactgtttttccaattcacatcttttgtcgtgaagtgatattatactagagtactgtttgcattgtaaaaatgctttgctggtgctctggcattttgtctttatctcatcacctaattt

SEQ ID NO: 6266 - DNA, 306 bp, Homo sapiens
  misc_feature (1)...(306): n = g, a, c or t
gccactggaccgtcttcccagtcccatcaagagaaaaccacagactctgggctcactgaagtcttcccaagggattgttgaanaaacttctgaagagggaaactctgtacctgcttcacaaagtgttgctgctttgacagtaagagaagcttagtccttatgccagagaagttctgcagaagaaatcactgtttgtcctgagacccagctaagttcctctgaaacttttgaccttgaaagagaagtctctccangtagcaggagatatcttggatggggtcagaataataatggcagataaggagg

SEQ ID NO: 6267 - DNA, 229 bp, Homo sapiens
ccaatgcccttctagtatgtttggtgaaggtcttgaaggcaccatttcccccatccaccctggggagaaattgagtccctaaagtcaacgacaaggcttattgaggctgagtttgcaacagatccgatctgggaggtagaaacaaaaatgactgaacatctttttatcccccaatcgttacaaagcctaaataactctaaacgggatgggagggcaaattttaggtcag

SEQ ID NO: 6268 - DNA, 292 bp, Homo sapiens
  misc_feature (1)...(292): n = g, a, c or t
nggtaaatcaacttgtctgatgccagggttcagagagacacctacagtcagttgaaaggcaagaagagacaaggtacaggaaagttgctctttagataacatggtagactaggaggaacattaatatggtttgcttatataatctgactgtgtaaatctgaatctatgtaacattaaggttgcaaatttgagcgtttatattaggaagttaaaattttaagtgtctccaaaataatttttactcattgcacgtgttctgttttagaaaagcctaatgattgtgttttgattt

SEQ ID NO: 6269 - DNA, 418 bp, Homo sapiens
  misc_feature (1)...(418): n = g, a, c or t
nctgttgaattgacagaaaaaattgctcagcttttcagcatttccccttgccagatcagccagatttacaagcaggggccaacaggaattcatgtgctcatcagtgatgagatgatacagaactttcaggaagaagcatgttttattctggacacaatgaaagcagaaaccaatgatagctatcatatcatactgaagtaggagtgcggcgtttcgtgcccagtggctgctccttccttcacctctgaaaacggccctcttgaagggggatatgaatggagatttgaaggtctgcaagaacctgactcgtctgactgtgtgtggaggagtccaggccatggaggcagaatcctggccctctgtgttggcccaactcttgtggtacacacagattactgnccaatatgcagttctgcag

SEQ ID NO: 6270 - DNA, 320 bp, Homo sapiens
  misc_feature (1)...(320): n = g, a, c or t
nctgctccctgagaaagggctgggccttgattccctggcactntgaccttttgagcacagcagagtggggacagtttcgagcagagctgcaggtgggagctgggccagtaggcaccagtcaaggagtgggcagggtaccagcagcccccgcattagcttcctagggctactgtaacatgtgaccacagactgaatggcttaaaccacagaaacctactgtcttacagtgctgcaggccagaggccctcaaccaaggggtcggcaggcttggctccttctggaggctctcaggggacccctgtcttctccctttcccccag

SEQ ID NO: 6271 - DNA, 282 bp, Homo sapiens
ctgggctattggattaagtgtggctgatcttattgaatccatgttgaaaaatctatccaggattcatcccgtgtcaacaatggtaaaggggatgtatggcattgagaatgaagtcttcctgagccttccatgtatcctcaatgcccggggattaaccagcgttatcaaccaaagctaaaggatgatgaggttgctcagctcaagaaaagtgcagataccctgtgggacatccagaaggacctaaaagacctgtgactagtgagctctaggctgtagaaattt

SEQ ID NO: 6272 - DNA, 297 bp, Homo sapiens
ctgcagataccttagtgacaaagtttaatcagcttcctgttgagctaaaaaaggaagtagagatgaaaggtgtgtggagcatgccatcaaaatactctgaagaaggagtttataacgttcagtacagtttcattaaagaagctgaacatcactgcttgttacatagcccaattcctgtgaactgccccataagattgctccatggcatgaagggcgaattccagcacactggcggcccgttactagtggatccgagctcggtaccaagcttggcgtaatcatggtcatagctgtttt

SEQ ID NO: 6273 - DNA, 178 bp, Homo sapiens
  misc_feature (1)...(178): n = g, a, c or t
nctgaaggccatagagccccagaaggaggaagctgatgagaactataactccgtcaacacaagaatgagaaaaacccagcatggggtcctgtcccagcaattcgtggagctcatcaacaagtgcaattcaatgcagtccgaataccgggagaagaacgtggagcggattcggaggcag

SEQ ID NO: 6274 - DNA, 418 bp, Homo sapiens
ccattgcccacccaggtaccagcagcagaagactatctgacttggaaagaatgggggtttacaggagtccaggaggtcctttccgctctcctaagagccagtatgttcgcatctttccttttcccttcatttccacatccccccgaagctctagctggaagcatcctagctcatctagggcatccttggtggtagaggagacatggatcttcagcgcttgaccattagactccattcgagaagcagtgttcactgtgtctccaaaaagacaataacggggcatcttcaggccaacaaccccagcacagactggcctttgagaagaaacaggttgggagagtctgggaaaggtggagactagggctggagtgagagtcagccttaccagtatggaccctatgcgtagcctcagacctcg

SEQ ID NO: 6275 - DNA, 216 bp, Homo sapiens
  misc_feature (1)...(216): n = g, a, c or t
gggnccacagatttgggaatcaggattcttcagcctaaagaggttgacagctttcacactttttctgtttgctggaatgacttgtataagacaagaagtaactgtttctttttttctttttgagacagggtctcactctgacacccaggctgaagtgcaagtggtgcagtcacagctcactgtagtctcaatttctcaggcttaggccatcctccc

SEQ ID NO: 6276 - DNA, 155 bp, Homo sapiens
  misc_feature (1)...(155): n = g, a, c or t
aaccataccataccaggcttccggcaggcttcataatcctcggttccccagactcaccggacaccatctcctatgccttggagacctnctgtcacttggctcccttcttaccaccaccaaaactgtcccactgggcctgacccacctatgaggga

SEQ ID NO: 6277 - DNA, 451 bp, Homo sapiens
  misc_feature (1)...(451): n = g, a, c or t
ngtggtgtcgggcactgtcatagtccacgagtttccgaccccgcttggcaattctctccttaatttcactgaactgggcaacatagatttccatggtccttacagcctggtcagccagtttctcctcgtagtcttcccaaaggagatcattattctgtaggatagagtcagaggctggtgaaggctccacttcccaacaacaactgcctaccagggaaatacccaaattctccctgcaaaaaccttttttgtagcaccgtatttagaataccatgttggattctggggactagtcagaggaagaaaagagacagcccctaccccaaggaactgctctatgggagtctgaacatacattcagagattaagaacagggcacaaggtcaaagccttggattccagagcttagatgggaaagtttaagagtgtataactgcatgaagtttgtttt

SEQ ID NO: 6278 - DNA, 257 bp, Homo sapiens
aaattaatttttagttgttcaaagttgaaaactttaactgaaaatacttctgatcatagtgtgacatgaagttaatatttttacctatgaaagtggttacgtatatatatatacacatatatgtatagactgttacagataattgtataaatttgctcgtggagctagtctatatttgaagttatttgtctctgatttctgattttcaaagcttaatgagagttcttctagaaataacccagcccccattttttttt

SEQ ID NO: 6279 - DNA, 377 bp, Homo sapiens
  misc_feature (1)...(377): n = g, a, c or t
nggtctgtacatggtgcaccatctttggggtatctgtttttcccttttcgagttactgggatttaagagttcattactaagttgtactgggaagtagagcacatcttgagtcagtaaccttaaccactacagcaaatccgacgtcacagagggacagtctgtacggggctgtctggactagcgaggtcaacagtgaaagnccatagattgatggcattagtgagctgaaagtgagtanggatgatggggaaaggaataagggggtaaagcaagcagccatggaagaaggaggccagggaagtcaagagtgccttccacagaagtgggtcccagcctttctttgtagactgactgcttactttcctcgacagangcag

SEQ ID NO: 6280 - DNA, 159 bp, Homo sapiens
  misc_feature (1)...(159): n = g, a, c or t
nccttctagcatggcatcaattccgatataggttcctgtgcgcccaacaccagcactgcagtgcaccacaatgggaccactgaagaaattgctgaaggcattcactctccttctcagtttgaggagcaagtgaggatcctcaggcaccccgtggtctgg

SEQ ID NO: 6281 - DNA, 139 bp, Homo sapiens
  misc_feature (1)...(139): n = g, a, c or t
agggttctgtggaacaccatttctcaaaggggcatcctgcanacgttccagccccaggggaggccccgagatgctggctggcctgcctggagggtgcttccanaaacaacggagatggnggtgaanaaggctcngggct

SEQ ID NO: 6282 - DNA, 152 bp, Homo sapiens
  misc_feature (1)...(152): n = g, a, c or t
caattaagaagagtttttaagaaaaaagaggaaggttctggcatggggagctctgcaacccactgctgggtgccacnaagcgagctgtggagcggaagatgaagatggcaccatgtgtctctaaaccacaaatggaaccactgantcctatg

SEQ ID NO: 6283 - DNA, 269 bp, Homo sapiens
gcctagagaacgagctgctcatcatgtttctaatataatttctggggtgaaatgaatgatttccttactggcttagagaaaaccaaggtcaataaaatgcagattgacttaactattagaaaagatgggatgacttctgggaaccacttaactcttcaaatgactgttgaaagagaaaaagcaaaactgaaatcccaccagaccattttgtgtgcctgtttctaatcgatacaaagttaagcatgagctaaaatcagacaaagcacttt

SEQ ID NO: 6284 - DNA, 317 bp, Homo sapiens
  misc_feature (1)...(317): n = g, a, c or t
nnggtctgagccgacttaggaatctcccatccccgccccaggaaaaagaaccaagagaaaagaaccgtttgtgctaacagtcatcgccaactgccgtgagtacaaactccggttaagtactgctgctgcgccagcgccctggcaggcatgatcacctcccattggtagggccacagctccattctgggaatggaaggggactagacccactgggcctccactcatcccactcctggacctcggcgcaccacctaaggggaattcacacactgcggcgtctatgatcgantcggaccaacttgcgatatggcatantg

SEQ ID NO: 6285 - DNA, 307 bp, Homo sapiens
  misc_feature (1)...(307): n = g, a, c or t
nggtcctgggtgagggcgtccatggtgccagccgtgccattcgtcaagcctgtggcgccaagtcctccattcagagccgccatacctgagagcatttgagcaactgctagtgcattaatattattcagtccaacagtggctccagccagtccttgcagagtcccaagagaggtcaaggagttcatggctgcaccagcagtggagttgggggttgaagcagccacgggactcgtgagggctcccagggcgctgctcgtggtagagagagggtttgcattggtgctggtggctgaggtctgggccgcag

SEQ ID NO: 6286 - DNA, 297 bp, Homo sapiens
  misc_feature (1)...(297): n = g, a, c or t
nggtctggctcgcaggcgtcgggggtaacctggtactgactctacccgcaggccctggggtgggtcagggcgcactaagggcatcaagacacaaagtcagggtaggctatgggtctccatcacttccccaccacttcccaaagtgtgtgtttaaaggagccttagccagacactcctgagaggggaggggaaatcttaaacttgatcatccattagactcagaccggtcatctgtattatgaaatgggctgaggccgcgtgtggtggctcatgcctgtaatctcagcactctggaag

SEQ ID NO: 6287 - DNA, 399 bp, Homo sapiens
gccaggatggtctcggctgcctgacctcgcgatccatccgcctcagcctcccaaagtgctgggattacaggcgtgagccaccatgcccggcctgtgtatcttctttatgtttaccctaccaagagcagacctgagcattttgctggccgtagaggtatataaaagaactctaagcttaggcatgcagaataggcactggatgaatgtagtgaggctattaggagtcttgttggctccctgatgtccttatcatgtcttcttcgcagactgtggatgcacacaagacagctaaaaccttgggcatcatttgaaaatgtttggctgcctgctacaatctcaggagagagaatccttcatacttatattggactggatatattgtcaatcaaattctttttt

SEQ ID NO: 6288 - DNA, 287 bp, Homo sapiens
gaaatgactaggacattaaagggattgtttcagaagaactatcagcaccttttttatgtgtcatgttcatccagactatccatccagataattgctttatttctgatatgtcttccaaggttgttaccccgtgtgggataggcaatgaatttaactgtcttttgtccctaaaagttttataagtttttatctaacatattcatgtagtggaaaaaaactcacaaaagtgctttcaagcattcacagtggtgtctaagccactattaattgaaaaagctgctgtattt

SEQ ID NO: 6289 - DNA, 212 bp, Homo sapiens
  misc_feature (1)...(212): n = g, a, c or t
gggnaaagcgaattctctactgaaaggtctgctctgcttaaggagctacaaactgctctcaaaagaatgaaatactgagttccaattcagtgaggcacagtgttggactatggcacatttagttggagtcggggggaggtcaggaatatgatcagataatggattttataccttagagcaaaatctattagtctctctcagtttatcaattt

SEQ ID NO: 6290 - DNA, 519 bp, Homo sapiens
  misc_feature (1)...(519): n = g, a, c or t
naaaaaattagtcatgagacttattcatctttccagggaacatactgattggtcttaaaagactagacagttaagtaaaaggtggctggaacatctatttttctacaaaactggaaaaatgaacctggttctagaagaatgtacaccaaaataaaacatgtgaagcagtattgattctttattgggagtacatttttttaggtctcttaaactttaatttcacacagtaaattttgaatctcataaggaagcatatttgaacctagtcaatttaatcttagtgttcccttgaaaacttttttccctacaaaattttaaggtgaaaaatacaatagtaaattaagattacactggggaaaaaaatgcaggtatcactttactccattggtatctgacctagagcttaattaaggttttagaaatatgtaataccttccatcattccatcatccttaaattctggtaccaaataatggctaatggtacaaaaaggtatcctccaganacccaagcttgaca

SEQ ID NO: 6291 - DNA, 429 bp, Homo sapiens
gactttgtaagtttcttgatctctttagtatgatgttaaaaacagaagggactgaagatttctggcattgaagaaagctattttatgaacattctgcactgagcaggtaaaaacccaataatgcacaccaaaagtaccccagaaaatggggtagtcccatgtagtggagccccaaaggtaggtgctttctgcctaagtggagctcaaggtagcaaaaaataatggggatgagccatggcaccttgtcaggctgtgctataaagccatatgtactgttatttacaccccatagacttaatagtctgtccaagatcgctgaacactagaacatagcatggctctgtgggtttgtctcttgctacattgtaccgtgctcctggggttaagtggaagcaagcattggggagaaatgtgtgagatttagcccca

SEQ ID NO: 6292 - DNA, 457 bp, Homo sapiens
  misc_feature (1)...(457): n = g, a, c or t
nggtctgtatggactagaaaagttttgggcttatttgaaatattctcaatctaagacacagtctattgacccaaaacttcaggaatacctctgtagttttaagaggttagaagacttccgtgttgatccccctattagtgatgaatttggaagaaaaagacattcctctacttctggtgaggagagtaatcgtcatagacttccacctaattcctctacaaagccaccaaatgctgctaaacctacatctaccagtgagcttcaggtaccaataaactctcccagaaggaatatttcaccggagtccagtgacaattcacattaaacagtgctgcctgtgtcctgtggtctcaagaaatggtgaaatgcctgagaaatanactcttatgaaagttctttgtccttgaagtcacatttacatcagtatttatttggggaaaatcttctggggttaatt

SEQ ID NO: 6293 - DNA, 302 bp, Homo sapiens
gcctatttatttgttttggccctggatcttttctaatcacaattatatttctttatttttgcctttgagcagtttcatttatctttgtgggcagggaagattaaatatgaaattcagtccagtcattttgctactggttagctttagtttgaggcaagtaaaaatttttgattaaaattagtttcttaaaattatgcccttgctttaccaaataatcaaattgactaaaaaataagggtatgtaactttgcattttgaagaacaaaccaataatttttcatgagccctactcgatcttcttt

SEQ ID NO: 6294 - DNA, 336 bp, Homo sapiens
gggtctgcaggcattcgccctttgtgtgttaacactgtagctctaatcgtgcctggtgttctgaagcaggctcctcttccctgctgctgtgctgccatcccctgctcactccgcactcgcatgcattgcggattcagcacttaagccctagtgtgtaaatgacttggatctccctcctggcaggctgtgaccctcagcacaggggctctgtcttagtcagctctgtggcctggtacacaattggtgctcattaaacacgtgttggattactggctgaggtggtgcagtggctgcctaccagcaagtctttgtttcccattctgtcaggagcagagg

SEQ ID NO: 6295 - DNA, 278 bp, Homo sapiens
  misc_feature (1)...(278): n = g, a, c or t
naggtccttccaattcaggccacatgtacctccagatactatgtggctggctgcctctgcctttttgggcaatctcagttccaaatattctatcatgttgtcatgccagcttttggcttgggaaatatggtcagtatgtctgtggggaaactgattctgtgtgccggccgcagaggaaggactctgggctggaggaaaggggtagggctcagcgccagtgctaggactggttgaactgtagggtgcagccctggctagtgaccacaccccatgtccag

SEQ ID NO: 6296 - DNA, 378 bp, Homo sapiens
  misc_feature (1)...(378): n = g, a, c or t
nctgctctttcagctttgaacgtcctttcccattctccatcatccacattcacctatcctgcctgccccagttaaaatcctgtttcttctaggaagtccctcatcccacccgcttaccccagggagactgagcttgttccttctcctagtaagaccctcagcccatggagtcctgtgtgatgtngtgaagcgtgggaggacagactgaactgctcggaccgtggagtcctgtgtgatgttgcgagcggggaggacagactgaactgcgtggtgcttcgcacatagacctcaacagggattgggattttgaagctgntggcgggggctgaggactgcttttcttcctttctagctcaaccggcagntaaagccactgnn

SEQ ID NO: 6297 - DNA, 413 bp, Homo sapiens
  misc_feature (1)...(413): n = g, a, c or t
gaggtccaatgatttaatgaattatgcctacataatgaagcctccggaaatctacaaaagaactgggttcaaagagcttctggatagctgaacacatgggggctcctagaaagtggcatgcccacagagagcagggaagctccatgccccttcccatgtaccttgccctctgcacctcttccatctggntcgcatctgtcccctttgtaatatcctttataataaactggtaaaagtattttcctgggntctgtgagctgctctagcaaattaatcaaaccccaantgagggggtcatgggaacacttatttataactggttggcgagaagcacangnaaaacatctgggacttgtgattgtcactggaagttggggagaggnttangactcaactctcaaccttgtggaatc

SEQ ID NO: 6298 - DNA, 245 bp, Homo sapiens
aaactgctggagggtacttgctataatggaaagctcatttggaaggtgacagattacaagatgaagaagagagaggcggtggatgggcacacagtgtccatcttcagccagtccttctacaccagccgctgtggctaccggctctgtgctagagcatacctgaatggggatgggtcagggagggggtcacacctgtccctatactttgtggcatgcgaggagagtttgactcactgttgcagtgg

SEQ ID NO: 6299 - DNA, 247 bp, Homo sapiens
  misc_feature (1)...(247): n = g, a, c or t
cctggaaggtgtgcaggagtttggtagaggagtgatctaggtgaggggaatggaaggtgcagagaccagagctgagagggcctgaggcactttccagagcgtggggaggggcctccaccaaggcgagaagggctgcangtccagatcaccagcgtttgtagacagtagtgtggcgcttggagtttacctgagggccagtggagctccagggacctatcangacggggacctgtggggactgggaagg

SEQ ID NO: 6300 - DNA, 341 bp, Homo sapiens
attttttctttatttttctttataaagtgaagagtaggtagcatgaattcctcttgccctttgctatttcagtctggcatcagtagcaattgttgctatgtccagttttcattcatggatttttctgggattgaagatgagttcaatgttgattatttaattgggcagtataagtaaattcattggctctccttccagtttagtgaatactaaatatcatccatgatattttatacttcttacacttctggaatctaacctgaaaatagaagttgtaagtcagggacggtggtatgtgcctctagtctcagctagttgggaggctgaggcttgagcccagg

SEQ ID NO: 6301 - DNA, 438 bp, Homo sapiens
  misc_feature (1)...(438): n = g, a, c or t
gcgaggtgagaggaccagcggccagagcctcagtgactgccaccctggaggacagggcacaacaaccgtttctggagagaatgggaggattccagaggggcaaatatggaactatggctgaaggtagatcagaagataacttgtctgcaacaccaccggcattgaggattatcctagtgggcaaaacaggctgcgggaaaagtgccacagggaacagcatccttggccagcccgtgtttgagtccaagctgagggcccagtcagtgaccaggacgtgccaggtgaaaacaggaacatggaacgggaggaaagtcctggtggttgacacgccctccatctttgagtcacaggctgatacccaagagcttgtacaagaacatcggggactgctacctgctctctgccccggggccccacgtcctgcttctggtgatccan

SEQ ID NO: 6302 - DNA, 248 bp, Homo sapiens
  misc_feature (1)...(248): n = g, a, c or t
gngaggtcctcatttagaaagaaaatcccctcagaaggctgtctggcacccagtgtcctagccaggccaagtatatgagaaaggtaagtccattttccccttcaggtcctcagtggattacttaaccactgctgtccctcggtccctttttcctaaacgggtttagttctgtcttttttctccttttttctaaatgctggtaaatatttacattcagccagggaagaggaggccagaggtcgggccag

SEQ ID NO: 6303 - DNA, 345 bp, Homo sapiens
  misc_feature (1)...(345): n = g, a, c or t
gaggtccaagccgtagtggggtctgatatcaccagcataaccgagcggtataggatatattctgttaaagatggaaaaaatggaaaatctctgccatttatgttgtgtgacactatggggctagatggggcagaaggagcaggactgtgcatggatgacattccccacatcttaaaaggttgtatgccagacagatatcagtttaattcccgtaaaccaattacacctgagcattctacttttatcacctctccatctctgaaggacaggattcctgtggtggcttatgtcttaaacatnaactctattgacaatctctactctaaaatgttggcaaaaagtgaa

SEQ ID NO: 6304 - DNA, 205 bp, Homo sapiens
aaatggtagagggttagtggaagtgcacacgttgtttttagcccaggggtagtaacaaactcttactagccaactagaaaattattttgttgacgagatgtcccttttaggagggcttgtttcctgaaagaatgccaactttttttgttgttctttcagtattggcttgagtgacctgttctcctgagtgctctagtgtctccag

SEQ ID NO: 6305 - DNA, 347 bp, Homo sapiens
  misc_feature (1)...(347): n = g, a, c or t
gcgaggtctgtgttggcatgcacctgcagtctcagctacttgggaggctgagacaggaggatcactcaagctcagaaggtcgaggttacagtgagctatgatcatgacactgcactccaacctgggcagcagagcaagaccccgactcaaaaaaaacatatgaaaagaaaaaagtatggagcatagttggggaaaagcaaatagccctatctgagcacagtcgactcatgatgctctcttctactataactgcctttacttttctcataaaagttgaaaaataccattctgccatttgtgcattaatttgctagagttgtagcaataaagtagcaganactggaagg

SEQ ID NO: 6306 - DNA, 348 bp, Homo sapiens
aggtaatttatgtacagactgtgacagattccttcaccttcatcgaagaaccaaaactcatcaaagacaggtcttcaaagaagaagaagaagctataaaggttgaccttcatgaaggttgtggtagaaccaaattgttctggttgatggcactggcagattctaaaacaatgaaggcaatggtggaattccgagaacacacaggcaaacccaccacgagtagctcagaagcatgtcgcttctgtggttccaggagtggaacagagttatctgctgttggcagtgtttgttctgatgcagattgccaggaatacgctaagatagcctgtagtaagacgcaaccttgtgg

SEQ ID NO: 6307 - DNA, 177 bp, Homo sapiens
catggtccttgcggagaaccgaccggctgtgaaggccgcgcagaacgagatctggcagactttcttcaggggccgctacctgctcctgcttatgggcctgttctccatctacaccggcttcatctacaacgagtgcttcagtcgcgccaccagcatcttcccctcgggctggagtgt

SEQ ID NO: 6308 - DNA, 201 bp, Homo sapiens
cctacggccagaagccctacaagaagatgaaagggccggaggtcatggccttcatcgagcagggcaagcggatggagtgcccaccagagtgtccacccgaactgtacgcactcatgagtgactgctggatctacaagtgggaggatcgccccgacttcctgaccgtggagcagcgcatgcgagcctgttactacagcctgg

SEQ ID NO: 6309 - DNA, 340 bp, Homo sapiens
  misc_feature (1)...(340): n = g, a, c or t
cataggaacgcactcaggcaggtggtttgttctggatgcagaaaccagagatctagtttctatccacacagacgggaatgaacagcttntctgtgatncgctnctcaatagatgganccttcctgnctgtaggatctcatgacacctttatttacctctatgtagcctctgaaaagggaagaaaatatagcagatntggaaggtgnactggacattccagcttacatcacacaccttgactgggcccccagacaacaagtatataatgnctacctcggganactatgaanattgacctgggacattccaaatggctgcaaactaatcaggaatcgatccg

SEQ ID NO: 6310 - DNA, 195 bp, Homo sapiens
  misc_feature (1)...(195): n = g, a, c or t
natcatttaatggaaatctgcacttcaaaacagcacttgaaggaccagccattggccctccaatgtaaatacttctcatttcacattatcagagaacagtgcagtttactaaccactccttccttataagaaattcagtactgtaaaattttttttcagtttcaaaacatttcaatcttattaattccaaagatc

SEQ ID NO: 6311 - DNA, 309 bp, Homo sapiens
  misc_feature (1)...(309): n = g, a, c or t
aggtccagggtgcttttggaaacatgtgtcgtggaggccgaatgtttgcaccaaccaaaacctggcgccgttggcatcgtagagtgaacacaacccaaaaacgatacgccatctgttctgccctggctgcctcagccctaccagcactggcatgtctaaaggcatcgtattgaggaagttcctgaacttcctttggtagtttgaagataaagttgaaggctacaagaagaccaaggaagctgttttgctccttaagaaacttaaagcctgggaatgatatcaaaaaggtctatgcctctcancgaaatg

SEQ ID NO: 6312 - DNA, 186 bp, Homo sapiens
aggtctggagatgttgggctgggaggccctgtggtcactcatactgcaggagagagaagaagggtacaggtgccagcttctccctgcccttaagcgaggtcagctccaccaggctcacgcactccaggacctcagcctgcaggcggcccagcagctcacaggcagcgttcatggttccaccagtgg

SEQ ID NO: 6313 - DNA, 172 bp, Homo sapiens
gaggtaaaaaacaaattgttgctatttcctagaagtttctggtttttaagatgaacataaaagtgtcagtatgcttcttttatgaggtgtactttatactttgatgaaggctaaggtgtacctaacagctttttatagtatattcatttatggagttagctgtatttttttt

SEQ ID NO: 6314 - DNA, 194 bp, Homo sapiens
  misc_feature (1)...(194): n = g, a, c or t
aaaagctatttacacgctacattctatgaaaaatatgcttcaggaaatacatctaaaattaaaatacangattgcctgagaaacaaatccancccctccgtgtcgatggtggncacaccatccaggtacgacccatgcaggcgacaccacacgctgacacgggagaacagagaanngccgaccgnaagtcctcg

SEQ ID NO: 6315 - DNA, 289 bp, Homo sapiens
  misc_feature (1)...(289): n = g, a, c or t
atggtacctatggaattgcttntattttagngaanatggaataaattncacccatccccattgtcaagnaatnaaaatatgcctctttttctactgntgaatgattcaaaatcaggtatttctggaaatactcagaaagggtaggaagggaaggagaaggtcaataggtgcatcagaaaaaggtataaaaatcatctaccnttaatcataagggtggatggattgcacttttccacttatttcaacacataatttttctaactagtatgaatgattgcaaccattttgg

SEQ ID NO: 6316 - DNA, 297 bp, Homo sapiens
  misc_feature (1)...(297): n = g, a, c or t
ctgacatggcgggagtttcagataccatacaagtcactggtctctctggaacaacttcatgttcttctgctactactgcagactctacaggtgttaacgtaattgaagattctggctcttgggggggggtctngaacagncacagcagcctctgatactaaaactganggatctgatgctnacactgaataatcagnaggcactgctgaaggctccgaaatctcactttgactcacaggaggctcaggctgcgatacagactcttcagatggtaatgatggcacctctgtaggccaa

SEQ ID NO: 6317 - DNA, 129 bp, Homo sapiens
  misc_feature (1)...(129): n = g, a, c or t
ctgaaggaccaacaagggaaacggngatgagagagactgcccattataactttcaaaaccccgtctttggggaagaatcatctagggngacattcctttgaagtaaaatccccaggagaancttnggcc

SEQ ID NO: 6318 - DNA, 370 bp, Homo sapiens
  misc_feature (1)...(370): n = g, a, c or t
ctggaggagtggcaggccaagtggagcgtggagaagcaccaaaagtggtctgaagtcagagaagttggtggaacagctcactgaatacagcacagacaaggacgagcctccaaaggacgtcttttgatgaattatttaagctggctccggagaaagtgaacgcagtgaaagaggccatcgtgaactttgtcaaccagaagctggaccgcctgggcctgtctgtgcagaatctggacacccagtttgcagatggggtcatnttactcttgctgattggacaacttgaaggcttcttcctgcacttaaaggaattttacctnactccgaactctcctgnagaaattgctgcacaacntcaccctggcgcttg

SEQ ID NO: 6319 - DNA, 120 bp, Homo sapiens
  misc_feature (1)...(120): n = g, a, c or t
ccaaaggtgtgggtacttgtattcatcaatgaatccagaggaaaatgggctgctctgaaataaaggatctggaaatgaaggaaaatgtgcatgagtatgcnagtgtgtgtgtgtgtgngt

SEQ ID NO: 6320 - DNA, 113 bp, Homo sapiens
aaatgttctcacaacaacaaaaaatgataagtatgtaagattcttaaccacagttgatgtacctcacaggaagagcttctctttcaagatgtgtagctgcccgatgggttctt

SEQ ID NO: 6321 - DNA, 280 bp, Homo sapiens
ctgttctgtcctaggggagggggacatagccctagcaggagctcccagcccctcttggcactctgacacacaagtacacccatctggggcccgctttgccacgaagagctgggcaggcctgcagggtgtggggaaggaggacacaacctcaagaaaggaagcgtgaaccccagggaacagcgggtcccttccctcctcagacacaagccacctcagcttgtggctcttggcccccagccccaccaacccacctgttcatttattcaacagacaatgacag

SEQ ID NO: 6322 - DNA, 277 bp, Homo sapiens
  misc_feature (1)...(277): n = g, a, c or t
ccagagggaaggcccaagagacgtctctgaagccaccgttcctgattattcagaggcagggtccacagtgagtgactcggtggggctggaggaacccagggtgacccagagggggctccggagccgggtccctaacatctgaaaaagtcctcccagggaactcngagcttggaacttccaggcagcttcgggggtgacatttntatccggccagccgagcggggaaaggagaccttgtgttctggcaacagggagagccgggactgggatggacctn

SEQ ID NO: 6323 - DNA, 120 bp, Homo sapiens
ttgcgcatgacaggcaaatgcagccaagttaccgtccttgccgaaaggttacaggtttggatgcaagatgctctgggaagtgcacgcagatatggggggagaaaagctgctcagaccttt

SEQ ID NO: 6324 - DNA, 101 bp, Homo sapiens
  misc_feature (1)...(101): n = g, a, c or t
acantattctgtggtcctgtgaactcagacttaaagcctgggggaggaggtcctgctgagttggtgaatctctggtaacggtgggaaaatggaggatactc

SEQ ID NO: 6325 - DNA, 227 bp, Homo sapiens
  misc_feature (1)...(227): n = g, a, c or t
aaaaagacaacaaaaacagaaacagacttgcattagaagacacacactcacctgcctgggtggtcagacacttgcccatagttcagcccctacacatgcagtgtgggcaagagccnggggaaatgataaagcctggncagttttttaccnggaggcacaacnatggggaatgatgggagatgaactcaaaccatgctntgaagtnagtgccagggacaaattttagg

SEQ ID NO: 6326 - DNA, 115 bp, Homo sapiens
  misc_feature (1)...(115): n = g, a, c or t
ngtttcagaanactcttggtggcaagcagcctgtgtatgataccacaattagaactggcagagcactgaaagaaaagactttgcttcccgaagatagtcanaaacttgacaattt

SEQ ID NO: 6327 - DNA, 183 bp, Homo sapiens
aaatgtaggacctatttcatgggtacctactacagacaaagaagaacaagacttttttgtgtgtattctaaggcacaacaagtgcaggaaggaaatgacctctttcccgtaaaagtccctggcagtagttggttgctgcataagagtgtcatgggcccggagggagctgggcccagatgcagg

SEQ ID NO: 6328 - DNA, 118 bp, Homo sapiens
  misc_feature (1)...(118): n = g, a, c or t
ctgctttccggcaaanatcaacctctgctggtcaggaggaatgccttccttgtcttggatctttgctttgacgntctcgatagtgacactgggctcgacctcaagggtgatggtcttg

SEQ ID NO: 6329 - DNA, 213 bp, Homo sapiens
aaatgtgtctttgatgcatactttagaagcacactggctcgcggtttccatccctcttgccttgggacactcctgaggctggcagccctcctgcaatgagttgctctcagttccttctgtttggatcttgctcaacatctccagtttctctgctctgaaaaatgggaaaaactgctaaacatcccagagatttgcaatcttctagctctccag

SEQ ID NO: 6330 - DNA, 224 bp, Homo sapiens
aaaaatgtattatgctatgtttatttcctataggaattaaggataacctagacgacataaagaggataattaaagccagagagcacagaaataggcttctagcagacatcagagactataggccctatgcagacttggtttccagaaattcgtattcttttggtgggtccagttgggtctggaaagtccagttttttcaattcagtcaagtctatttttcatgg

SEQ ID NO: 6331 - DNA, 353 bp, Homo sapiens
  misc_feature (1)...(353): n = g, a, c or t
ntgcagccactgtgctaaagcgggcagtagaactagattcggagtcgcggtatccgcaggctctggtgtgttaccaagaggggattgatctgctcctgcaggttctgaaaggnnccaaagataatacctaagagatgnaatctcagagaaaaaatttccaaatacatggacagagcggaaaacataaagaagtacttggaccaagaaaaagaagaagctaaagaaactcctgggatttctctcagattttgttgggaatcaaaacacctcaggagttaagcattcctaatgattagagggcagatggaaaatatcacacgccnattaaaatagaaagagaatgcnacccgggt

SEQ ID NO: 6332 - DNA, 250 bp, Homo sapiens
ctgctgctccaggcggagggagggagagagaaatggagagtgtgcgctgctgatcagcgcgaggcccaggggggtgaggtccgctccagggctctgctctgctctgatcagggagctcactttccagaaacgaagtcccagagcaccagaaaaggaaccaaacccagaacctcactttctaagtagtgctggtgagagaataaaactgtccatcagtcaacgatgaattcacatagagcaaggctgacaa

SEQ ID NO: 6333 - DNA, 171 bp, Homo sapiens
  misc_feature (1)...(171): n = g, a, c or t
ctggtgcttgtctggctgggtgaagtgctaggtgtcattggggactgtccagagctagttcagcgctccttcctggtggctagtgttctgcctggccccnatggcaacattaactcacctacaagaaatgctgacatgcaggaggagctaattgcctccctagaggagcaa

SEQ ID NO: 6334 - DNA, 341 bp, Homo sapiens
  misc_feature (1)...(341): n = g, a, c or t
nggccnangtctgttacagccctcaacagtgaaagtaactttgcccgagcatatgcacagggtatcagccgaaccaagtactgggagttgatttatgaagactctatggatctaatcgcaaagctaccttgtgttgcagcaaagatctacccgaaatctctacagagaaggcancggtattggggccattgactctaacctggactggnctcacaatttcaccaacatgttagggctatactcgatcatcagttnactgagctcacgcgcctgtacctcaccatccacagtgaccatgagggtggcaatgtaagtgcccataccagccntttggtgggcag

SEQ ID NO: 6335 - DNA, 129 bp, Homo sapiens
  misc_feature (1)...(129): n = g, a, c or t
ctgagagactctaaatccantgacaagtctgtctgcctattcaccgattttgattctnaaacaaatgtgtcacaaagnanggattctgatgtgtatatcacanacaaaactgtgcnatacatgaagnct

SEQ ID NO: 6336 - DNA, 187 bp, Homo sapiens
  misc_feature (1)...(187): n = g, a, c or t
ccaccggncagcagccctctgtgatgtgtgtgcagagtgaacagaggactcaggtttcatagcanctagtgcggggcatcctcatcctgtacctatagagttcntgcactcccccatccatgctacctacctccccgtttnctgnttcagttttaaacaatgaaancagcatttcnctgctttcatt

SEQ ID NO: 6337 - DNA, 154 bp, Homo sapiens
  misc_feature (1)...(154): n = g, a, c or t
ctgagctctgaatcanagagcagtgagacctaagggtccctgatctcanagggtccctcctgtctcagggtgaggacctgaanggtgtgggtcccngggagggtgaggaggccattgttggaaatttactgagntgggatcgggatnccccana

SEQ ID NO: 6338 - DNA, 314 bp, Homo sapiens
  misc_feature (1)...(314): n = g, a, c or t
ccttttgccatacagtcctgggtttgaatgcagccccctcctcacaaactggctatgtgatcatgaacaaattaaccggccagctccaatttgcttcttaatgttgtgaagtgtaaatgangccatgactggcangcggtacctggaaaaaggggctttgtttttactaaaaagctgtctgaactttcaaattaaggcanagttcaaaataagtgatagntacttagttggaaaatgaaacctatccaacatacaggnngaggggtccttctagagatgtggcattgagacaatgttggaacattntatacann

SEQ ID NO: 6339 - DNA, 294 bp, Homo sapiens
cctgacaggatgatgattttagaaactagaaagagttcaacgggtctggcacaaaagtggcatctgtgggtgtgctggagaatttcgctggagagatgacagggtccaagtcagaaaggaccttgactatctcaaccaagaatctggcatttttctgcaggcaatgaaaacaacattgagagattattagcagtggaagagaaagttcttaatgtgatttagaaagatggcaccaagagccgcgtgaagaatgagaagcagtggctgagagagaaagcagagactggttagagg

SEQ ID NO: 6340 - DNA, 337 bp, Homo sapiens
  misc_feature (1)...(337): n = g, a, c or t
ctgtcaccaccaagcatgaactttcactgattacccataacctactggaaatcttcagccttgctgtcagcatagaccactgtgagaaacagtacattccattccagtttgccctgctttttgaagatctaaatgccattccatgttttctgttacatattgaagtttcttggctgccaaagaaaaacggactntgctgaacttgtggacagaacaaccccaaggttggaagaacaatgaaaaataatctatacttgaacatttcaaaanttaaanattttcaacagtagtttnaacacactggaagcttaaaatacatcgacactgaaatggtnaa

SEQ ID NO: 6341 - DNA, 100 bp, Homo sapiens
  misc_feature (1)...(100): n = g, a, c or t
gggggccgangtaaacatgactnggtgctgaaagacacactgctgggacccaagttccctcccacatggacgggatggatgctggaacccaangtttcaa

SEQ ID NO: 6342 - DNA, 113 bp, Homo sapiens
  misc_feature (1)...(113): n = g, a, c or t
ctggcctgtgggtgatcccagctcttactaggagagggagctgaggtcctggcgccangggcccangcccttcaaccataaacagntcangatggaaccttggttcacccttt

SEQ ID NO: 6343 - DNA, 201 bp, Homo sapiens
  misc_feature (1)...(201): n = g, a, c or t
ctgaatcagcctgggtgccctagacccagtcatgtttgttggaccaaattagctgtcttttcatttcatgctatatagaactggcagtttacacttctgattaatacattgtctccgatcaggaggtttattttttttttcctaataaaanctgaaaggagattggnaagaaccaattantaattttacattacacnttgt

SEQ ID NO: 6344 - DNA, 145 bp, Homo sapiens
  misc_feature (1)...(145): n = g, a, c or t
ctgaatcaccagctccttttatgatatttgtgtttgtttcacaatttctcaaggactaaagcagctcagtttgcattgctttctgctggtaanggcgggaaaagtggtggtggtnacccccacaggagtgatggtaganaaggna

SEQ ID NO: 6345 - DNA, 267 bp, Homo sapiens
  misc_feature (1)...(267): n = g, a, c or t
ttggctgacttccacacctagcatctcatgagtgccaagcaaaaggagagaaganagaaatagcctgcgctgttttttagtttgggggttttgctgtttccttttatgagacccattcctattttnttatagtcaatgnttcttttatcaccatnttattaagtaanaaaacatcactgaaatgctagctgcaagtgacatctctttgatgtcatatggaanagttaaaacaggtggagaaattccttgattcacaatgaaatgctc

SEQ ID NO: 6346 - DNA, 222 bp, Homo sapiens
  misc_feature (1)...(222): n = g, a, c or t
cctcatcagcagggatgagatcacagcctacttcatgagagccagctcaatctattccaagctgggcctgggctttcctcacaacttccaagagaccacctacctgaagcccactttttgtgacaactgtgcttggatttctctggggagtgatcaaacaaggatatcgatgtaaagactgcgggatgaacttgtcacaaaacaatgcaaaagatctggtgn

SEQ ID NO: 6347 - DNA, 175 bp, Homo sapiens
ccttagcagtagcctgagctgcccccagggctgtgagctgctgaatcttctgactcatcatttccatgacggcctgttttcatggcgtgcttctcctgaagagctggttggattttctccatctgcttggttagaaaatctatcttcctcttgaagaagtccttggcatcctcag

SEQ ID NO: 6348 - DNA, 252 bp, Homo sapiens
  misc_feature (1)...(252): n = g, a, c or t
ccaccagcatcaaaagaagaaatccttgagggtactgggtgagttggtgggcaagcgctgccaccttcagtgccagcacaatctggggtcagcaaagaggggtagcaagtgtgccttanagatgaagaaatggctaaggaggaaagcactgtaaaggtgacttggggaatcctcctgagacctaagatttgaaactaattgtccaagtcccagcctctgctctgggaggctccaggggccaaggtaagcagg

SEQ ID NO: 6349 - DNA, 196 bp, Homo sapiens
  misc_feature (1)...(196): n = g, a, c or t
ccttagccctgctcctctctattccatcctgtagaggtcgggagtcaggagtcgctggcaggagacagcatgtcacccaggactctgccggtgcagaatatgaacaatgccatgttcttgcagaaaacgcttggcctgagtttcataggaggtaatcaccanacaactgcagaatgtggaacactgagcaggacag

SEQ ID NO: 6350 - DNA, 301 bp, Homo sapiens
  misc_feature (1)...(301): n = g, a, c or t
ctgaaagggacgttgttggaagcgttctcggaaaggttcatgtggttctgcaccacgatgtaggccatctcacctttatgtctttcattattcatcacaagaggaatgttcagaagcatcgtgtcactgaaaataaacatccaaagatctcttgcccagggcggagtatctggcctggtcagnaactctaggntgccgtctctgtcgatgaatgatatcatgctcgccagcagaggggtgacagcaccttggacccgctttcagagggtgtgcctgaatgtgcccncctnctggagagcnt

SEQ ID NO: 6351 - DNA, 350 bp, Homo sapiens
  misc_feature (1)...(350): n = g, a, c or t
cctacaagtagggagggagggtaataaaaaaacgaatcccaggaagagcaccacgaaagcgggaagcctgaagtcacccacaaagggcactgcagacaccgcaccaggaatgtttcttaagagctggcagtcctctccagggagagagcanaggaggggaacagccgcagggactatagagtttctaggactccacgatgtgccggcacagcatgctgccatcacacacgctgacctccttgtcctgtgcaattacatgactaggacctgccttcgacaagcgtctgatggtctatgagcacattccgcttaccttcccaataaaataacaaagaaatacaaaacaaaac

SEQ ID NO: 6352 - DNA, 238 bp, Homo sapiens
  misc_feature (1)...(238): n = g, a, c or t
gncgngcaggtctgatttctgaggagctggattcaatgtgggaggtgcagcagagctggaagcaccctgcactctgatctctagctgggggctctgtttccaaacttggttgtcctcagtggctgcctcacaccagtatgacccggagtgatcttctgaagctgtggggatctggaattctgaggagagccccctgctttgcactatccttccatccttgtagaaggagaagaggagg

SEQ ID NO: 6353 - DNA, 101 bp, Homo sapiens
  misc_feature (1)...(101): n = g, a, c or t
tgggggaggggacctaaaataaatagactttaacatttcccttgggtgctaatcatagttggaagttgaatttaaggngattatttgggtgacaattaaaa

SEQ ID NO: 6354 - DNA, 123 bp, Homo sapiens
  misc_feature (1)...(123): n = g, a, c or t
ctggagagagatcaatatgctgaacaaataaaaggagagagggcccagtggcagcanaggatgaggaaaatgtcgcaggaggtttgcacattgaaggaggagaanaaacatgatcncatcggg

SEQ ID NO: 6355 - DNA, 423 bp, Homo sapiens
aaaagtttagagaaggaaagtatagtgttaaaggggttcggggagatttcatcaatggaacggcacagggaaacggctttcaaggagaagaaatatttcacaaaatgaagagacaaaaagggccaacaaattcagcataagacaatatattaatggaggaaaagtcaccatgtttgggaaatgtggagttcaggttagtgaagggctggatctttgtaggcagagataaaatgggcaaggaacatttgcatgaagtaattttatttaattaggagcattatgaggaatcacagcaattttttgaaagagtaatgatatgatcaaagttaattaaagttatgatcttcagaaaaattaatctggccactgtgtacaagaatagattggaatcaaaaggaacctggaggtgggaacaccactttg

SEQ ID NO: 6356 - DNA, 129 bp, Homo sapiens
  misc_feature (1)...(129): n = g, a, c or t
gtgacccangtagaggaagatatggtgatggtgttgatggatggctctgtgaagctggtgaccccggaggggnccccagtccggggacttctcacacctgaaatccccatgaccgaaacggtggagccn

SEQ ID NO: 6357 - DNA, 248 bp, Homo sapiens
  misc_feature (1)...(248): n = g, a, c or t
ctgatcagactcctggtgccactcccaaaaaactatcaagttgggatcaggcagagacccctgggcatactccttccttaagatgggatgagacaccacgtcntgcaaagggaagcgagactcctggagcaaccccaggctcaaaaatatgggatcctacacctagccacacaccagctggagcttgcttactcctggacgaggtgatacaccaggccatgcgacaccaggccatggaggtgcaactt

SEQ ID NO: 6358 - DNA, 351 bp, Homo sapiens
  misc_feature (1)...(351): n = g, a, c or t
aaattctgcacagaaaaaggagaaagggtattaagatggcaccagagagacacaccatcaaatgttcagttcaggagtaggtctatagagttttctgacagggaatgtcacagaattgccagcatgttcctcaatggactctttgcttcttggagcttctgagacacttcaagacttgaagtgaccactggctgtgncctccagccccagggagcccagaagttctgagatgtgtatcttatttcagttccctactgcagctagggtcttaggagggaccctagttacaggatgaatcaaataccaaaaggtgaggttcaactgttccttgtcctggaatatcattcttgg

SEQ ID NO: 6359 - DNA, 122 bp, Homo sapiens
  misc_feature (1)...(122): n = g, a, c or t
cacacgcctgttcccagcaagtgctgaaactcactagacccgctgcctgtttcgaaatggggaaagccntgcgtgcgcgttatttatttaaatgcncctgtgtgcgcgggtgtgggaacaca

SEQ ID NO: 6360 - DNA, 131 bp, Homo sapiens
ctgtgagaggcagtgcgcccgcctcccagggagaacgaggaaccgccaggagacaggtctacctgcaccaccggcaaaccagagggcccaaggccagggccgtaagccctgggagtacactcccttaaaga

SEQ ID NO: 6361 - DNA, 401 bp, Homo sapiens
  misc_feature (1)...(401): n = g, a, c or t
cctaagcatagggccattttgaaacacatgtggctcatcacaaaccacacaatattcatttaatacagggatccgctgttcagcaaactcaattgtctgcaccaggaagccacggtctcgtactggaatgcattttgcaccatttggagcaagctgagaagatgaagatgaagatggtgttaggataccaataagccctgaggtaagagagagcctcctgccctctgcgttaggttccttgaaaagctcagttttggatgacttgggggcactggagtaggacttgctgagcaatttgtgatttttcagtccatataattcttccattctgagattactagagtaagacctgcttaacagtttatggggnttcaagtttgtgttgtgctcacatcgtggat

SEQ ID NO: 6362 - DNA, 107 bp, Homo sapiens
  misc_feature (1)...(107): n = g, a, c or t
aaanctggctcaanactggcccangcataatactgtcaatctaaaggtaaccggcnacatcaaaaantacatctcaanagaatcangnttaaanatcaacaggagaa

SEQ ID NO: 6363 - DNA, 322 bp, Homo sapiens
aaatcaatagtgattattgcgagcggcagccccagctacacacgtcgctgggagctgattactgctacatctcaccgcagcgtagagtttagtcacagcttctccccacaatattgcaagtttaagtggtggagagtcgcaaagaaaaaacacaagaaaccccaaataataataacaacaaaaacaacaataacaactgtaataataataataataataataaaaaccctaagggatgtatgaactggttttaactaagtaggccaagggatcattggttctgatttgcattcatctctacagtaaataaaacctcgttttt

SEQ ID NO: 6364 - DNA, 254 bp, Homo sapiens
cctgccagatatttgtgagaaatctgccattcgatttcacatggaagatgctaaaggacaaattcaacgagtgcggccacgtgctgtacgccgacatcaagatggagaatgggaagtccaaggggtgtggtgtggttaagttcgagtcgccagaggtggccgagagagcctgccggatgatgaatggcatgaagctgagtggccgagagattgacgttcgaattgatagaaacgcttaagcagttgcctttttt

SEQ ID NO: 6365 - DNA, 388 bp, Homo sapiens
  misc_feature (1)...(388): n = g, a, c or t
aaagttgctttgaagctcgtctataaatggcttcaagcaacatgactggttggttgtgagaattaaagggtcattaactgaataactccaaagtcattaacatgaccaaggtaaggatacnagaaataggaaaaggaaaatcctattccaagttggagggccatgccatcaaccacagtggtctgtgccagagcaacactattcgctagtggttctatactgacttctttactggctttccatctttgtatttattccctctgcaatccgtttcattttcagtagaagccagtgtcgaataggaataaagaatctgtgtattgcggtcagacagatttgggctagaataccanctctagactttctagtttccatcactttggggcag

SEQ ID NO: 6366 - DNA, 217 bp, Homo sapiens
aaatcaaggttcataggaaaagacataaatgaggaaactccaaacctcctgttagctgttatttctatttttgtagaagtaggaagtgaaaataggtatacagtggattaattaaatgcagcgaaccaatatttgtagaagggttatattttactactgtggaaaaatatttaagatagttttgccagaacagtttgtacagacgtatgcttgtttt

SEQ ID NO: 6367 - DNA, 343 bp, Homo sapiens
ccacctgcttgagccagggtggcctcctggaagacctggacaacctcatcctggaggacctgaaggaggaggaggaggaagaggaggaggtggaggacgaggagggcgggcccagggagtgacccctgccaggtgcagatacaaaccagacacggtctgtggctactttgtgttattataagatatgagctcaaaccgagatatgaatgaccttggggagccatctgaggccaagatattgacgggggggattcctgggtcccattttcagcgcccagggtcacagatccacagtgggaagttctgtgggacacattggcactgagccacaaagaaggtgtgg

SEQ ID NO: 6368 - DNA, 100 bp, Homo sapiens
  misc_feature (1)...(100): n = g, a, c or t
ccttggtgctcagtggggagactcaggaacgggagcgaatcctctaccagttctccanacgcttccaccattgnaatccggggatcttcccctcantacn

SEQ ID NO: 6369 - DNA, 362 bp, Homo sapiens
ccagcagggattcagccggatcagcatctaccacaacactgccagcaacaccttcagagtcgttggagtcaagttgcaggatcagcaggttgtgatcaattattcaatcgtgaaagggctgaagtacaatcaggccacgccaaccttccaccagtggcgagatgcccgccaggtctacggcttaaactttgcaagtaaagaagaggcaaccacgttctccaatgcaatgctgtttgccctgaacatcatgaattcccaagaaggaggtgcgtgcatcctctaatgacaaagcaaccttgtatttccttccacaaatgaatggaggcagcctaacgtcatgtggcccctccagccagcgtcag

SEQ ID NO: 6370 - DNA, 324 bp, Homo sapiens
aaaaaagggaggaagaatctctgttttaatgtagtttgcttctacaccatctgtcccacaacactgttttaccaccttcagcacaatttttttcatttcctcatcaggagactggaattctcgaataagggattaacatcacttctctagtatagtagttggcatattctgcatccataagaggaataagatacccaatagccttcaagaaagcagccaaaccctttcctctgtgttggcggatacccttccataaaggctttaacacagaatcaaaagattcgataccataaggagttgctgcttcagccaaggcagcaatgg

SEQ ID NO: 6371 - DNA, 121 bp, Homo sapiens
  misc_feature (1)...(121): n = g, a, c or t
nctgcancttctgatgatgccccctaccctgtctgtaccgngcggtacttccctagcacagncnatcacaccctgcagtgggcccggcatgagtttgaanaactctaccgactgncngcag

SEQ ID NO: 6372 - DNA, 338 bp, Homo sapiens
aaaattacactttttcttaacctgtctagctgtcggaaaaggtaacagaagatggaactcgaaatcccaatgaaaaacctacccagcaaagaagcatagcttttagctctaataattctgtagcaaaaccaatacaaaaatcagctaaagctgccacagaagaggcatcttcaagatcaccaaaaatagatcagaaaaaaagtccatatggactgtggatacctatctaaaagaagaaaactgatggctaagtttgcatgaaaactgcactttattgcaagttagtgtttctagcattatcccatccctttgagccattcaggggtacttgtgcattt

SEQ ID NO: 6373 - DNA, 348 bp, Homo sapiens; identical to SEQ ID NO: 415
  misc_feature (1)...(348): n = g, a, c or t

SEQ ID NO: 6374 - DNA, 274 bp, Homo sapiens
ccttccaattcaggccacatgtacctccagatactatgtggctggctgcctctgcctttttgggcaatctcagttccaaatattctatcatgttgtcatgccagcttttggcttgggaaatatgggtcagtatgtctgtggggaaactgattctgtgtgccggccgcagaggaaggactctgggctggaggaaaggggtagggctcagcgccagtgctaggactggttgaactgtagggtgcagccctggctagtgaccacaccccatgtccag

SEQ ID NO: 6375 - DNA, 299 bp, Homo sapiens
ctgctgcggctgcacaaagagccatttggggaaatcagttcaaggtacaaagcggatctgagcccggaaaatgctaagctcctcagcacattcctaaatcagactggcctagacgccttcctgctagagctgcacgaaatgataatcttgaaactaaagaacccccaaacccaaaccgaggagcgcttccgccctcagtggagcctgagagacactctcgtaagttacatgcaaactaaagaaagtgaaattcttcctgaaatggcatctcagttcccagaagagatactgctcgccag

SEQ ID NO: 6376 - DNA, 395 bp, Homo sapiens
  misc_feature (1)...(395): n = g, a, c or t
ctgagagactctaaatccagtgacaagtctgtctgcctattcaccgattttgattttcaaacaaatgtgtcacaaagtaaggattctgatgtgtatatcacagacaaaactgtgctagacatgaggtctatggacttcaagagcaacagtgctgtggcctggagcaacaaatctgactttgcatgtgcaaacgccttcaacaacagcattattccagaagacaccttcttccccagcccagaaagttcctgtgatgtcaagctggtcgagaaaagctttgaaacagatacgaacctaaactttcaaaacctgtcagagattgggttccgaatcctcctcctgaaagtggccgggtttaatctgctcatgacgctgcggctgtggnccagacctct

SEQ ID NO: 6377 - DNA, 204 bp, Homo sapiens
  misc_feature (1)...(204): n = g, a, c or t
aaaaatgttagcagttttcaaaatcacctgaacatccaagtaggatccacccaggagagatctttaatggagngaccctcacactctataaaactgacaggggcaacgaattgaaccttgacttaacaaaaacacatcctggtattcataagtctctgttaggaagtccgtggaggtaggtgggagccggaagttagggctcag

SEQ ID NO: 6378 - DNA, 289 bp, Homo sapiens
ctgatcgaaatggcattgctgtctctaggttattcacatagctctgctgcccaggccaaagggctagtccaggttggaaagtggaatccagttccactgtcttacgtgacagatgcccctgatgctacagtagcagatatgcttcaagatgtgtatcatgtggtcacattgaaaattcagttacacagttgccccaaactagaagacttgcctcccgaacaatggtcgcacaccacagtgaggaatgctctgaaggacttactgaaagatatgaatcagagttcattgg

SEQ ID NO: 6379 - DNA, 223 bp, Homo sapiens
  misc_feature (1)...(223): n = g, a, c or t
cctggaaggtgtgcaggagtttggtagaggagtgatctaggtgaggggaatggaaggtgcagagaccanagctgagagggcctgaggcactttccagagcgtggggaggggcctccaccaaggcnagaagggctgcaggtccanatcaccagcgtttgtanacagtagtgnggctcttggantttacctgagggccantggagctccagggacctattacgac

SEQ ID NO: 6380 - DNA, 306 bp, Homo sapiens
  misc_feature (1)...(306): n = g, a, c or t
ctgttcagaaagctcattggacctggttttgaaaataaaacaaagttaaaaccctgggaggagttattgtgcagtgtggagtactcaggctttcttataaagaaaaaaaaaagttatctggtaccaaagtgtgcaacctacagaccctcaggnactgccctgngacttctntgtatgacatcacaaggctgccaagtgcctgtttttntaaaactaggagttggngaggtttggctantgctgaaaccatgcataggattggtttactaaattaaaaccttattacgnacgtcctccaaaanacan

SEQ ID NO: 6381 - DNA, 191 bp, Homo sapiens
  misc_feature (1)...(191): n = g, a, c or t
nccatttaactggtcangcaattaagtcaagggaaaatccatttgggatttctgagaaagctttgctttccctcataaaaggngatatatatagctggnacaggcccatttccatttttttctttcctggccttcacnatggaccncggcccgcngaccaccctaagggggaatttcancacnctggcggg

SEQ ID NO: 6382 - DNA, 116 bp, Homo sapiens
  misc_feature (1)...(116): n = g, a, c or t
aggtcgatgggcctatttgtttggtgctggcaccaactcgggaactggcccaacaggtgcagcaagtagctgctgaatattgtagaacatgtcgcttgaaatctactttnattcta

SEQ ID NO: 6383 - DNA, 249 bp, Homo sapiens
  misc_feature (1)...(249): n = g, a, c or t
ggaggaggctgattgcactccacaaacaggactgnctggaccaacggaaactggcangagggaggtgggaaaggaaaaaggcaaacntttggcttttataaagcaaaggacgtttatttnctgaggncatgacacacgaagtggaatcctagccacggctgcggagctctcgtgatgaangccggagtgctgactgacatgccgggtggaccangagctggagtctgttatcttacacnaatgctcatg

SEQ ID NO: 6384 - DNA, 112 bp, Homo sapiens
  misc_feature (1)...(112): n = g, a, c or t
ccatcccagtcccggctctccctnttgccanganacaagggctcctttccccnctcggntggccggatacnaatgtcacccccnaagctgcctggaagttccacctccnant

SEQ ID NO: 6385 - DNA, 204 bp, Homo sapiens
ccaaaagatttccccagacacggttctgcacttgatccttcctgagagccctggcagccacgaggagtcacgagagtactctttagaggaggtgaaggagcttttgaacaagttgatgctgatgtctggcaagaaaggatcgtaacaacacggaagtggagaggttttcagaggtcttctgcagtgtgcagaggctcagccagg

SEQ ID NO: 6386 - DNA, 230 bp, Homo sapiens
  misc_feature (1)...(230): n = g, a, c or t
ncctgcgtgtgtctgtgttgagcgtgcgtctgtgtgtgcctgtgtgcgagtctgagtcagagatttggagatgtctctgtgtgtttgtgtgtatctgtgggtctccatcctccatgggggctcaaccaggtgctgtgacaccccccttctgaatgaagccttntgacctgggctggcactgctgggggtgaggacacattgccccatgagacagtcccagaacacggcag

SEQ ID NO: 6387 - DNA, 242 bp, Homo sapiens
  misc_feature (1)...(242): n = g, a, c or t
ngnctgcagccccttgaacaggtgaaagctggaatagaagctcattcggaagccaaaaccagtggactcctgtgggctggattggcactgctgtccattcagggnggggcactggcctggctcacgtggggggngtactcctgggatatcatggagccaggttacattcttcatcacatttgcaaattctatggtcttttttgcatactttatagtcactcgacaggattatacttactcag

SEQ ID NO: 6388 - DNA, 156 bp, Homo sapiens
  misc_feature (1)...(156): n = g, a, c or t
atttcatttcngtttcttttctcgccatgtttttctgtcggaattacngttcgttttggttctatgtactctctaaaatgttatcgtttttcatttgtctactaattttcntgcatttngttactacctgagtatnttaanatctgactggctcca

SEQ ID NO: 6389 - DNA, 261 bp, Homo sapiens
  misc_feature (1)...(261): n = g, a, c or t
ctgcgtcaccacctcctgggtggcagggagacgatacatatttcctaatgaccgggatggttttattaggattggcaagcgggacttcttagcctctctgttggtaataccagggagggaaaggaagggcagnctgccacccaggcaccccgtgcaggttctctggccgatgctctgcgctgagtgcagtgttgatcggtttctcttcccaagcctctcttgttgcttcatgcttgaatctcagcaggtcgccctccgtgg

SEQ ID NO: 6390 - DNA, 153 bp, Homo sapiens
cctcaggtttttgtgttctctgaagctcaggggacaggaactaagtccccattctcgctttggcttcctgctctgggactcagtttcccccgtgcagcagggggcttgggcaagtccaaggagaggtgggggtacccacctgtgacatgaagg

SEQ ID NO: 6391 - DNA, 284 bp, Homo sapiens; identical to SEQ ID NO: 416
  misc_feature (1)...(284): n = g, a, c or t

SEQ ID NO: 6392 - DNA, 248 bp, Homo sapiens
ctggcgttggcagggaggaatggagagcttgtggaaggtgcgggaagggagggctgtgcttggcctgagagcaggaggacaccgggaacagcacgatgggctatgcccgctctcaaagagcttgatcaggccggagggacctggatggggccagttatacataagacaggccaaaacacacgccctgagagagatggaaaatgaccacaccagagaaaggacagcaccacgtgcctcgaggggcttgg

SEQ ID NO: 6393 - DNA, 175 bp, Homo sapiens
  misc_feature (1)...(175): n = g, a, c or t
gatagcggcagcgaggggctcggagaggtgctcggattctcgtagctgtgccgggacttaaccaccaccatgtcgagcaaaagaacaaagaccaagaccaagaagcgccctcagcgtgcaacatccaatgtgtttgctatgtttgaccanccacagattcaggagttcaaagagg

SEQ ID NO: 6394 - DNA, 252 bp, Homo sapiens
  misc_feature (1)...(252): n = g, a, c or t
aaacatgacttggtgctgaaagacacactgctgggacccaagttccctcccacatggacgggatggaggctggagcccaaggtttcagggaaacgtatgtggcctgtgccccctgggngtnatcatggggcacacacattttatntgncagggccagccttggctgttgaggggtcatgggcacacaggaggaccatctgntgacactgaagaccagntgttgnccacagccatggacaataaggaanaata

SEQ ID NO: 6395 - DNA, 338 bp, Homo sapiens
  misc_feature (1)...(338): n = g, a, c or t
aaacttactagctgccaagtagcacacttatgctgctgtgtcccaatccattctgtggtgagtataagtcacaagagtctgcataaaacactatcagcaatcaggatggctatggggcaaggaccgtttanaatgttaccaagtcacaggaccagcaggaaaatggaataatggaagaatgtgaaataaatctgatttgtttgagtagaaggcagctttgattcaggcataaatgcatctcccagattatcatgtaaataaagacctcagaagttgacacttccctcccagtccaccacttaaaacaggacacatgctcagttttcccaatctgtttt

SEQ ID NO: 6396 - DNA, 273 bp, Homo sapiens
caccacacatgatcataactaagccttgacggcatcactgtcccacctactggaacttgtccgtgaaaatccacacagatgctgcacatccccttatcccctacaaggaggctggagatcttccacaatgcaggctgcagcctgcttcttcatttgttaggagcagggaaggaaatgcagaagctgagaaatgagggccaagaaagccaggcagtaggatggagacccaagggacatcagggcagaaacaaaatagtacaaaggagaagagtg

SEQ ID NO: 6397 - DNA, 119 bp, Homo sapiens
  misc_feature (1)...(119): n = g, a, c or t
aaaatcagtggcaccgaggcgcctgcagccgcactcgccagcgactcatctctccagcgggttttttttttgtttgncgtgtgcaatcctcacnctcatgaacatacncaggtttnccc

SEQ ID NO: 6398 - DNA, 262 bp, Homo sapiens
  misc_feature (1)...(262): n = g, a, c or t
cagaccccaaaattccgggtcctgaagacaggacagagcatgacactgctgtgtgcccaggatatgaaccatgaatacatgtactggtatcgacaagacccaggcatggggctgaggctgattcattactcagttggtgagggtacaactgccaaaggagaggtccctgatggctacaatgtctccanattaaaaaaacagaatttcctgctggggttggagtcggctgctccctcccaaacatctgtgtacttntgngcca

SEQ ID NO: 6399 - DNA, 312 bp, Homo sapiens
  misc_feature (1)...(312): n = g, a, c or t
aaatagagccaaccagtcattttctgagactaaactctggcaaactgcttcttcatgtagggaattgataatttagaaactagtttgcattttcaggtatgtctccaaaggattttttttttttaagtaaactatccgcctaaattgttaancccttttggggcagcaaaaacagcccttattacccatcaacaaccagtttgaacgggaattcagtgttntttgggaaaatgngtttttacaaaggagcagtaattaggcccccactgnttaacagatgacccnaancaaaaaaggaacnaaaatgtaacc

SEQ ID NO: 6400 - DNA, 287 bp, Homo sapiens
  misc_feature (1)...(287): n = g, a, c or t
ccaagggtcgctcactgggcaggaacattgtcaaggccattcatgcttggaatagggtctctcttcagctctgaggcaaatctgttctctaatttacagatgacttcaaggggaacgtgtacccgcacccctctggtgcgtcacattgcttaggaagcctgctgtgtttatcactgggtggctgtcagggctgagatggagagggccagggcctggcgaggtggagcagtcggcccaggtgtcccancaattgttgctggaacagggtctggaacccacaggagagg

SEQ ID NO: 6401 - DNA, 315 bp, Homo sapiens
  misc_feature (1)...(315): n = g, a, c or t
cccgtctgcgtcctgcatccatctccctgttacagtggcccgcatcatgattaaagaatgtggatccctctgtctggggtgggatgccttactttgcacttaatttaataagggcattctcngaggagtagacntttaatacgaagtggnggcatagccctgccganatgtcggtgatggcctggatgctgtaaccacaacctgtggctaaaaattttattttctatcctttacccgtcattatcattagttgctatgattctttctgcattttcggttaactatcatttccaaagacttgtcattcactaatat

SEQ ID NO: 6402 - DNA, 152 bp, Homo sapiens
  misc_feature (1)...(152): n = g, a, c or t
aaactgcataatttagtaaaattggtacaatttcttttcacatattaatcaacattagaggactgtaaatgcctccctagtaatacagaaatatccattggaaataaaaatagcaccagtggggaaagtatnaaaaaaataagacaantcag

SEQ ID NO: 6403 - DNA, 177 bp, Homo sapiens
aaataaaggtcactattgctgtgaaatgggatgtcagttttgcaattcttctgcactttcccaccaagctgggatctgggtgagtctagagatatttgtgaaataagctaatttgaaaggacaccacaatccgtcaaaagcgactttcttcctcttccacagcacgatgaaggccag

SEQ ID NO: 6404 - DNA, 213 bp, Homo sapiens
  misc_feature (1)...(213): n = g, a, c or t
aaacattgacccaacatattaccaaactaattcctgtgaaatacaaaaagaataatatatcatgataaaggtaagtttgtttaacccatggttaatttaacatatgaaaatcaatcatctatcatcttaatagatacaaaaaagaatttgataaaagtcaacacttatgataaaaagcaaaacccttaacaaattangtttagactgggcttt

SEQ ID NO: 6405 - DNA, 204 bp, Homo sapiens
ctggaagaagaaaagaaagcaaacaatgagaaacagaaagctgaaagggagctagagggtcaaatccagagattgaacacagagaaaaagaaactaaatacggacctgtatcacatgaaacattctctcagatactttgaagaagagtccaaggatctggccggccgcctgcaacgttcatcgcagccgtataggagaattaga

SEQ ID NO: 6406 - DNA, 206 bp, Homo sapiens
ccagagggaaggcccaagagacgtctctgaagccaccgttcctgattattcagaggcagggtccacagtgagtgactcggtggggctggaggaacccagggtgacccagagggggctctggagcgggtccctaacatctgaaaaagtcctcccagggaactcggagctggaacttccaggcagcttcgggggtgacatttgtattc

SEQ ID NO: 6407 - DNA, 221 bp, Homo sapiens
  misc_feature (1)...(221): n = g, a, c or t
cctgtgtccaggtctccctggcggccctgcagagatcttcctagcccgagagcttctctgcttgggtcctacggttccaagcctggttccattttcttctcatttggtgagagtccacctcaacattcggggctggagtggctcactggcctcccagtgtcgcatggtccgtgcagaggggagcatctctgcctgtctncttctggaccctttgcctttgg

SEQ ID NO: 6408 - DNA, 172 bp, Homo sapiens
ccaaggtgcatgcctacatcatcagctacctgaagaaggagatgccaagtgtatttggaaaggaaaacaagaagagagagcttatcagcaggctaccggaaatctacattcagctacagcgagaataccagatttctgcaggggacttccctgaggtcaaggctatgcatga

SEQ ID NO: 6409 - DNA, 172 bp, Homo sapiens
ctgccctgtcagccctgaagatatcgtgaacaaggatgccaagagcacactgcgggtgctctatggtctgttctgcaagcacacgcagaaggcacacagggacaggacgccccatggagccccgaattgaccctcactgcctccaaagcccagagcctgcctgtcagcccag

SEQ ID NO: 6410 - DNA, 217 bp, Homo sapiens
  misc_feature (1)...(217): n = g, a, c or t
ccatggtaaggaggagggtgggatagggcagatgatgggggcaggggatggaacatcacacatgggcataaaggaatctcagagccagagcacagcctaatatatcctatcacctcaatgaaaccataatgaagccagactggggagaaaatgcagggaatatcacagaatgcatcatgggaggatggagacaaccagcgagccctcttaaantaga

SEQ ID NO: 6411 - DNA, 148 bp, Homo sapiens
ctggttcacgtgtggagctagttaatacgtcctgccaagatgggtaccagttgactggacatgcttatcagatgtgtcaagatgctgaaaatggaatttggttcaaaaagattccactttgtaaagttatccactgcaccctccacca

SEQ ID NO: 6412 - DNA, 197 bp, Homo sapiens
  misc_feature (1)...(197): n = g, a, c or t
ctgacagttctccatggcaactcagtcctccagcagacccctgcatacataaaggtgcaaaccaacaagatggtgatgctgtcctgcgaggctaaaatctccctcagtaacatgcgcatctactggctgagacagcgccaggcaccgacagtgacagtcaccacgagttcctggccctctgggattccgcaaaangg

SEQ ID NO: 6413 - DNA, 187 bp, Homo sapiens
ctgcacagcttctaaaccataatttttaattttgtagctaatttgttagtcctgcaaaggcagtgtagtcccagtcaggaagagggtttttgttacagtctttctttcaaagtgaaactatcaactaagttcctcccaaagttagtttggtatccacccaggaatgaacaaggacagcttggaggtt

SEQ ID NO: 6414 - DNA, 205 bp, Homo sapiens
cctcctgcactccgcccggacccccggccccgccgtggctatccagtcagttcgctgctattcccatgggtcacaggagacagatgaggagtttgatgctcgctgggtaacatacttcaacaagccagatatagatgcctgggaattgcgtaaagggataaacacacttgttacctatgatatggttccagagcccaaaatcatt

SEQ ID NO: 6415 - DNA, 189 bp, Homo sapiens
  misc_feature (1)...(189): n = g, a, c or t
ccaggncactgccacaatcctcggggtgtggtcaaggggcactcagagacacctgcactagaaattgcattgacattgtgagctggctcagaagacaaaccaattaagatgtagatagaaattaatttaaggtcttttcttaaaaaaaaaagnccacctcattttcagttaacatgtgccattaaatan

SEQ ID NO: 6416 - DNA, 191 bp, Homo sapiens
aaaagggaaaatctcacacataattaagcagtggaaaatgtgctcaatgctatggtgcgtcaggccctctgtctaccaggtttctcccctttctgcagagctgtggaccctgtacgtaccaaacaggtgaacttggtccatctttccttcttcctttttttgcacatttgcatttatatcttcccgtacta

SEQ ID NO: 6417 - DNA, 180 bp, Homo sapiens
  misc_feature (1)...(180): n = g, a, c or t
cctgcnagaccccccaaagccagcagtcagcctacttcctgttaacactgtttagagaggtggctattttgtacagatcccacaatgcaagcctccaccccacgccagagcaatgngaagcttgtgagcaaattcattggcgaatgcaagatctttcacctctgatatcngccgttttgg

SEQ ID NO: 6418 - DNA, 210 bp, Homo sapiens
ctgggtcattataaaacctcacaccaggagttgtgatggcttcactcttatgcagaccttcatattccaatctcattaaggcttttcttctgacatcctcatagagttcttttattggatcaagcaggtcttttagtactatgtgattaattttgttcttgcaaatgggacaagatataaatccaaatgttatccttgggccaagccatc

SEQ ID NO: 6419 - DNA, 217 bp, Homo sapiens
aaaaacagatccttcaagctaagttaacacttctaatataaaatgtattttttcttcataaaaacaaaggaaaagcaaaagcttttagattcacttgaaagaattctctctctttctctgtctctcacacaaacacacacccatacacacatacatatacacacataacgattacaaagaagttgttttttactgaataagagataaaattttacct

SEQ ID NO: 6420 - DNA, 111 bp, Homo sapiens
  misc_feature (1)...(111): n = g, a, c or t
tgtgttggcatgcacctgcagtctcagctacttgggaggctgagacaggaggatcactcatgctcagaangnngaggtnacaganagctatgatcatgacactgcactcca

SEQ ID NO: 6421 - DNA, 181 bp, Homo sapiens
  misc_feature (1)...(181): n = g, a, c or t
cctctttgtctgtgagaggaaatggttccctcactttaagttctgtaggctaatcagaaagggatctctctatagtttcaaaaagtgaaattttacttgcactacagaaataagaaacttacagatttgtccttgaagacctactaacctgcaactttagggtcctgaaagangattaagt

SEQ ID NO: 6422 - DNA, 155 bp, Homo sapiens
ccacaccctcacccctgagcagcccggggggccacagcaagaggtacacatgctgtggacaccagcacccccagacctgacccttggggaaggtgaggaggctaggacgtgggacttcctgacagcggtgggcggcagccaggctgaggctcagg

SEQ ID NO: 6423 - DNA, 184 bp, Homo sapiens
  misc_feature (1)...(184): n = g, a, c or t
ctggaaggccggccatccattttagaaatggatgagacttcagcactcaagtttgaaataagagcaacaggttttccagagccaaatccaagagtaattgaactaaacaaggatgagaatgttgcgcatgttctactggaaggactacatcatcaaagacccaaacgttattncaccntagtga

SEQ ID NO: 6424 - DNA, 129 bp, Homo sapiens
ctggctgaggaccagcccgtgcacggggaccttgacctcgtcatgaacctcatggatgcacacaaggttttccagaaggaactgggaaagcgaacaggaaccgttcaggtcctgaagcggtcaggccga

SEQ ID NO: 6425 - DNA, 211 bp, Homo sapiens; identical to SEQ ID NO: 515
  misc_feature (1)...(211): n = g, a, c or t

SEQ ID NO: 6426 - DNA, 197 bp, Homo sapiens
ctggctgatgtctgcttggacactccactctgtaatgggcacaccacagggatggatgtcctctgggcagggacccccatggtgactatgccaggagagactcttgcttctcgagttgcagcatcccagctcacttgcttaggttgtcttgagcttattgctaaaaacagacaagaatatgaagacatagctgtgaa

SEQ ID NO: 6427 - DNA, 208 bp, Homo sapiens
ccaggtggccctccgtgtgaggtcatggtcacagcatagtttggagctagggagggactgtcagcctggaggtttggagactcattctggaatctagtgtgggtctagccaacttcagggagaggctgagccagggtaggagtcacaggagcagacgaggatgtggggtgccgtgcacagagctccatgaccagcttgggaagttaaa

SEQ ID NO: 6428 - DNA, 193 bp, Homo sapiens
  misc_feature (1)...(193): n = g, a, c or t
ccttgctcatagtatacacaagccaggttgccgtgcaccactgcgtgatttggactcaaacttagggcacgaagataagctgccacagctctgtcaaaaatgcgtgcctctttcaagacatttcctaaattgatataagcatccagaaagtttgggtcaagggtgacaagncttttcaaagtgatgaattgca

SEQ ID NO: 6429 - DNA, 198 bp, Homo sapiens
  misc_feature (1)...(198): n = g, a, c or t
aaaagtttacaggagagccgaccattttcagttgactttttcaggaaaatgattcagtttgaaaaggagcaagaatcctgcaatatggcgaacataagagaatattatgagagagctttgagagagtttggatccgcagattctgatctttggatggattatatgaaagaagaattganccacccccttggtanacct

SEQ ID NO: 6430 - DNA, 198 bp, Homo sapiens
cagacatttattgaactcctgatgtgtgccaggccaggcaccaaggaggagcacacagaggtattagataaagtcctggcccttgaggaacttctggatgatctgaggaaagaaaagtaggtgggcagaagcttctgtcaatcccaggcttctcccctctctctgtggtctcaggaaatgggagagccagaaaggggt

SEQ ID NO: 6431 - DNA, 204 bp, Homo sapiens
ccatctttaagtctggaggcattcctgccctggtgaaaatgcttggttcaccagtggattctgtgttgttttatgccattacaactctccacaaccttttattacatcaagaaggagctaaaatggcagtgcgtttagctggtgggctgcagaaaatggttgccttgctcaacaaaacaaatgttaaattcttggctattacga

SEQ ID NO: 6432 - DNA, 199 bp, Homo sapiens
aaaaatgtttttcagtgagtgcttttaacaaacttaagcttctgccctgccaagggaattaatgttatcttgtgaaaggtgttgctgtttgaattgatgagaaatggaagatgagaactccctaagagttctcataataaatcatctcatcacaaatcaatacggtatacagagttaaagtggaatgaggtaagaagat

SEQ ID NO: 6433 - DNA, 109 bp, Homo sapiens
ccacattttaagtgctcagtagtcacgtatggctaagggctactatactggacagtacagattcatagagtataaaatatgactttaactttggagatggtgaggtagg

SEQ ID NO: 6434 - DNA, 196 bp, Homo sapiens
aaaacctattaagtgtataatcttacaaatagtcatctacaaaatttatggagaaagtgcccagcccattcacatcacatggaccaggaattcttttgtaaatgacttaaggtaacatcatgcagttcagtgcctaataaatgctttttaatgatgaacatttctataatgactcgtaagataccatagtctgatt

SEQ ID NO: 6435 - DNA, 195 bp, Homo sapiens
cctacagacctggctcatgcccttggatgtggctgactctacttctagactgtcctgaagagattatctgaatcttggacagagattatgatgtcatttataacagtgaaaaaacggaaaacctcaatagccactagaagaaatgactgatgagtaaattatattaaaataacacaatttattttttcgtggaat

SEQ ID NO: 6436 - DNA, 198 bp, Homo sapiens
aaatccattgtttctttgttgatttttggttttgatgacctgtctagtgttgtcagtggagtattgaagtcccccactattattttgttgctgtctatctcatttcttaggtctattagtaattgttttataaatttgggagctccaatattaggtggatgtatgtttagaattgtgatattttcctgttagacaagg

SEQ ID NO: 6437 - DNA, 212 bp, Homo sapiens
ccagcagcatgggcaaggaggagctgaggcaccggcgggcgcagatgcccactcccaaggccattgactgccgaaaatgttttggagcacctccagaatgctagagaccttaagcttccctctccagcctagggtggggaagtgaggaagaagggattctagagttaaactgcttccctgttgccttcatggagttgggaacaggcttggaa

SEQ ID NO: 6438 - DNA, 211 bp, Homo sapiens
  misc_feature (1)...(211): n = g, a, c or t
ctgagttcccttcccgaaggtcagctcggggctcccgacgatcatgcagaagtagatgccactgtcttccggcttcacgcttgtgagattgagaatgaaccggcttgcatcccgaaacacagctatcttctcctgttccacctcttcaccgtggatagtcccttttgcggaatcccagagggccaggaactcgtggngactgtcactgctc

SEQ ID NO: 6439 - DNA, 216 bp, Homo sapiens
aaaatgcatgtattataatcatataatcataactgttgttaattcttgattatatacctagggacaatgtgtaatgtaagattactaattggttcttcccaatctcctttcagattttattaggaaaaaaaataaacctcctgatcggagacaatgtattaatcagaagtgtaaactgccagttctatatagcatgaaatgaaaagacagctaatt

SEQ ID NO: 6440 - DNA, 212 bp, Homo sapiens; identical to SEQ ID NO: 417

SEQ ID NO: 6441 - DNA, 189 bp, Homo sapiens
  misc_feature (1)...(189): n = g, a, c or t
nctgaaagccaaggaagagacttataatcaactacttgacaagggcagactcatgcttctaagccgtgacgactctgggtctggctccaagacagaacagagtgtagcacttttggagcagaagtggcatgtggtcagcagtaagatggaagaaagaaagtcaaagctggaagaggccctcaactttgg

SEQ ID NO: 6442 - DNA, 206 bp, Homo sapiens
  misc_feature (1)...(206): n = g, a, c or t
ttgcgctaatcacatttcaagtgctcagcagccacccgtgtctactactacacagtgcagacacagaacatatcatcactgcagatagttctactggacaatgttacgctagaataaacaccaaggcagtcagttaaggcagctatggtttggaaaggcatacggacagagtctgcttagaagagatacaagntgttaataaaaat

SEQ ID NO: 6443 - DNA, 212 bp, Homo sapiens
  misc_feature (1)...(212): n = g, a, c or t
ctggtgtatctcatcctcaggttgctttacaacgtcatctcctccagaggaaacgcagcctcgtcatatccctgagaaacaggtctgctgtgtcctccctccgcacgtatagactgtccctccaggaggttagacacctcccctgaaactgcggcttctgtgtccaccttcaccacacttccgtcctcctcatcttggagcacaacctngnc

SEQ ID NO: 6444 - DNA, 212 bp, Homo sapiens
  misc_feature (1)...(212): n = g, a, c or t
ttgaggacaccgaggttcacggtctgagtaacacctcattacaccgaagcctgggcctgtattcccagagctttgggaggctgaggcgagaggatcacttgagcacaggagttcgagaccagcctggacaacatagtgagacccccatctctaaataaaaatagaccaacgctaaagcctgtgctccaganccttcaggcaattggataaga

SEQ ID NO: 6445 - DNA, 217 bp, Homo sapiens
  misc_feature (1)...(217): n = g, a, c or t
ctgagcaaatggatatgtatctagttgtaagaaatcaagaagaggatataaaatataatcaggatgtggactctgaaacggaataacctctttgtcctgtaacttttttcacttgtaataatacagcattctcaccctattaaatggaaatttagagcacccttaaattccngaataattaaaattgctanttggattgaaaaancccctaagggat

SEQ ID NO: 6446 - DNA, 203 bp, Homo sapiens
  misc_feature (1)...(203): n = g, a, c or t
ccaagcacagctcgatttttgatcagttggatgttgtttcctacgaggaagtcgttcggctccctgcattcaagaggaagaccctggtgctgatcggagccagtggggtgggtcgcagccacattaagaatgccctgctcagccagaatccggagaagtttgtgtaccctgtcccatatacaacacggnccgccaaggaagaa

SEQ ID NO: 6447 - DNA, 207 bp, Homo sapiens
  misc_feature (1)...(207): n = g, a, c or t
ccttgggaaattacctggaaatgcgactgaaatcttccttcctgaggggtctgggctcttggaaatcaaaccctctcaggttgggtggctggacgattctcctcacacttacaatgggacaaggggaaccaggaggcccccaaggggatccctgggttccacacgaactcctcctaccctcattgtgtgacagcagccatgcctnct

SEQ ID NO: 6448 - DNA, 208 bp, Homo sapiens
ccactacatcgcccacgtgaaagatccacagtctggtgaatggtataagtttaatgatgaagacatagaaaagatggaggggaagaaattacaactagggattgaggaagatctagcagaaccttctaagtctcagacacgtaaacccaagtgtggcaaaggaactcattgctctcgaaatgcatatatgttggtttatagactgcca

SEQ ID NO: 6449 - DNA, 193 bp, Homo sapiens
  misc_feature (1)...(193): n = g, a, c or t
aaagcttatttttcaattcataaaaaagacatttattttcagtcaaatggatgatgtctccctcttttcccctattctcaatgtttgcttgaatcttttattattttttttaattctcccccatacccacttcctgatactttggttctctttcctgctcaggncccttcatttgtactttggagtttttctc

SEQ ID NO: 6450 - DNA, 222 bp, Homo sapiens
ctgtactatcttcagttttcaaagagggatgctaagaagggattacatgctactctggggttaggactatgtctcttggattgccctatcttacttggcaccctatgtgaggactaaaactagaatacatttgttactataaataaatgtggcatggtatacctagggaaaaaaataaggaaacagttgcaattacatgggttatcttaaaaaccaaaaacc

SEQ ID NO: 6451 - DNA, 212 bp, Homo sapiens
ctgctctgcgtccacctcctccccaacattgtctcgcacgttcagtgctgccttctggaagaacttcatgtacttgttgaagacagtctggatctcctcgttgatgctgggctgcaggacagctcggaggagatccatggagatggcaggatctgtgaaacttgttgtcatctgtgagcggcggcccctccgctgcacctgccggggcttta

SEQ ID NO: 6452 - DNA, 180 bp, Homo sapiens
  misc_feature (1)...(180): n = g, a, c or t
aaattgcagttattctcccaggggttgaagatacacatggaagttcatttgccagtgcactggctgatgttcaatatttggaaataccccagaacagtactattcagcagttaagagtgagagagtgctttttacataagaacagtgagtggcaggttacagaaactgacaggtgaatna

SEQ ID NO: 6453 - DNA, 189 bp, Homo sapiens
  misc_feature (1)...(189): n = g, a, c or t
aaattagccctataaataaaccaggcattctcttttcttcttgttttgttgttaccttacaggaaaaaaagtttcatatcataattaaggcttagggacacagacttcagagccaataaaattttggttcaaattccagngctacctcctactagctgtgagatattgggctagtttcttaaccattgc

SEQ ID NO: 6454 - DNA, 183 bp, Homo sapiens
  misc_feature (1)...(183): n = g, a, c or t
aaaaaaagacaatttgagcaggacgaccctctccaatctgggtagcatggttagcctgtgcagtaacaacgtaggcttggaggatgggtncaatgaaaatgattctgattcggaaacgttttgactttggactgtanaagcttttctttgatcacctgtgntggaggaaaggaaagaagcctt

SEQ ID NO: 6455 - DNA, 191 bp, Homo sapiens
  misc_feature (1)...(191): n = g, a, c or t
aaaaatatgtgaactcaaatattgcacttctttcaagatgttatcaattggttattgtactgtatagttttaataattttgattgaaaccctttaacaactctttgtaaattttaactcattttagttgattttcagtactatttacataggaattgatttttatggatatagtanaagaaatgggctgga

SEQ ID NO: 6456 - DNA, 193 bp, Homo sapiens
  misc_feature (1)...(193): n = g, a, c or t
tgcagtctacctgcagcacagcacactccctttgggcaaggacctgagacccttgtgctaagtcaagaggctcaatgggctgcagaagaactagagaaggaccaagcaaagccatgatatttccatggaaatgtcagagcacccagagggacttatggaacatcttcaagttgngggggtggaccatgctttt

SEQ ID NO: 6457 - DNA, 195 bp, Homo sapiens
ctgtgccaagtgcaagaagaagattacaggcgagatcatgcacgccctgaagatgacctggcacgtgcactgctttacctgtgctgcctgcaagacgcccatccggaacagggccttctacatggaggagggcgtgccctattgcgagcgagactatgagaagatgtttggcacgaaatgccatggctgtgactt

SEQ ID NO: 6458 - DNA, 210 bp, Homo sapiens
  misc_feature (1)...(210): n = g, a, c or t
ctgctgagctattggtattgctgtgccagaggggaggggatgaggggctctgcgaggaaggagaggagggtcccatcctcagatacagcagtgtgcagtgagaagaccccagtaccgcgtattgtagagattgaggtggggagagaggaagtcagggagaggcgcctgtggccccaggggcaactgaccacgaatncccttnccacccca

SEQ ID NO: 6459 - DNA, 186 bp, Homo sapiens
ccagcaccccaacatcatcactctgaaagatgtgtatgatgatggcaaacacgtgtacctggtgacagagctgatgcggggtggggagctgctggacaagatcctgcggcagaagttcttctcagagcgggaggccagctttgtcctgcacaccattggcaaaactgtggagtatctgcactcaca

SEQ ID NO: 6460 - DNA, 201 bp, Homo sapiens
  misc_feature (1)...(201): n = g, a, c or t
ctgtaattagagaaatgatgacttcctaagagttcagccacgcataattctagatttcaagagcatctaagacttgtggattagcctcatggcatgagagtttcagactcagccttctgagccagtcagggaaagtggagttctgcagcgcaaatgagagcctgggcttggtgtcgagggagctggcttctaattgngcca

SEQ ID NO: 6461 - DNA, 187 bp, Homo sapiens
ccaccactaaaggtcccagttcagggaaagcacaggagccggaagcggtggcatgggcagcatttcttactcagtcctccagcacactctgtgaagtgccctgggggcaatgaaaccttctccctagtattcccgatgacccacgaacaagttgctcccatgcacatcacacacagaaaggacctcg

SEQ ID NO: 6462 - DNA, 174 bp, Homo sapiens
  misc_feature (1)...(174): n = g, a, c or t
ctgcaacgcatcattcggacaggccgtacaggtcactggttgaaccatgggaaggaacactgcttggtgagcagcagtggggcccaatccaataggtggagcacaaagaagaatcatttgatttcttactgagaaaaagttcaaaggtgtggtttcataaggtaatctgctatn

SEQ ID NO: 6463 - DNA, 201 bp, Homo sapiens
ctggcgctgtcctggacttgatgggggatgaagcccagaacctgacgaggggccggcagcagctcaagtgggaccgtaagaagaagcggtttgtgggacagtcaggacaggaagacaagaagaagattaagacagagagcggccgctacatcagcagctcctacaagcgagacctctatcagaagtggaaaccagaaacca

SEQ ID NO: 6464 - DNA, 202 bp, Homo sapiens
ccaaagggaacataaggtaggcagaaaacttaaaagagtttgttaaagtgaagactggagaaattcctcccttcctctgagctgtgaatctctcttcatgaaagccaaaggtagagacagggaggacagggccaggttagggccttccacacacaaacacttctagagttgcccattcctgttatgttcttggaccctaaaa

SEQ ID NO: 6465 - DNA, 204 bp, Homo sapiens
  misc_feature (1)...(204): n = g, a, c or t
ctggagaggaggttccccgtaccattattgtaaccacccgttctcagtacgggttaccagaagatgccatcgtatactgtaactttaatcagttgtataaaattgacccttctactttgcagatgtgggcaaacattctgaagcgtgttcccaatagtgtactctggctgttgcgttttcancantaggagaacctaatattta

SEQ ID NO: 6466 - DNA, 206 bp, Homo sapiens
  misc_feature (1)...(206): n = g, a, c or t
ctggatatgttttataggaattgggcacttaaggaaagcttcataaaagccattggtgttggactaggatttgaattgcagcggcttgaatttgatctatctccattaaacttggatataggccaagtttataaagaaacacgtttattcctggatggagaggaagaaaaagaatgggcatttgaggaaagcaaaatagatnancc

SEQ ID NO: 6467 - DNA, 143 bp, Homo sapiens
ctagaacctgggtcctagtttgtacctagaatatgaggcaagtggcgagagtgatcgtgttcctgaccctgagtactttgagccttgctaagaccacccagcccatctccatggactcatatgaaggacaagaagtgaacata

SEQ ID NO: 6468 - DNA, 136 bp, Homo sapiens
  misc_feature (1)...(136): n = g, a, c or t
tgaattcagtgagagattcacatcattgcaagagccacgcatgtgttggatctgtgtcagtactgccctcacccacttcggtcccatcactgacttggcattaggtctactctctcttcctgggactgncanaagc

SEQ ID NO: 6469 - DNA, 154 bp, Homo sapiens
  misc_feature (1)...(154): n = g, a, c or t
aagctgctccacatctaccaacaatcccggaaggacaactccaattccctgcaggtgaaaacgtgccacctggtcaggtactggatctccgccttcccagcggagtttgacttgaacccggagttggcttgancanatcaaggatctgaaggct

SEQ ID NO: 6470 - DNA, 202 bp, Homo sapiens
ctgacattgataccagatctgaattctacaaacacattgtgctttctggagggtctactatgtatcctggcctgccatcacggttggaacgagaacttaaacagctttacttagaacgagttttgaagggtgatgtggaaaaactttctaaatttaagatccgcattgaagacccaccccgcagaaagcacatgggattcct

SEQ ID NO: 6471 - DNA, 198 bp, Homo sapiens
ctggtggctggtgacatcgtcctggacaagctaggggaaaggctagccatcctcctcaaggtgcgagacatggtcagcagccatgtggagcgagtgtttcagatctatgagcaacacgcagacacagttggcattgatgctgtcctgcagccttcagcagtgagcccctctgtggctgacatgttggaatggttgcaa

SEQ ID NO: 6472 - DNA, 192 bp, Homo sapiens
  misc_feature (1)...(192): n = g, a, c or t
ccaagacagagnccctacccccaaggcaggattcagtctcattttattgtctttcccatccccagcactgtctggtcctgtgtgtcactgaaggaataaagggatgggccctggaaagggtgggtcanagctgaccttggtgaagcctgagtcaggccacagagctgggagtcaggcatgtaganggataca

SEQ ID NO: 6473 - DNA, 204 bp, Homo sapiens
  misc_feature (1)...(204): n = g, a, c or t
ctgtgactgagggcctggtcaccacaattagagcttgatgcctcccggctttgcagggagaccaggcttcccaaaccaagtgccttgagctgcctgctctgcagcccacagaggacagtgctgaccccaggaagtgggagaagtggcccctcgtgacctacagggaactgggaagatgctggccccaaaagccttacggncatt

SEQ ID NO: 6474 - DNA, 210 bp, Homo sapiens
  misc_feature (1)...(210): n = g, a, c or t
cctgggacagttgatcttgaaagaagagatggagaaagagagccgggaaaggtcatctctgttagccagtcgctacgattctcccatcaactcagcttcacatattccatcatctaaaactgcatctctccctggctatggaagaaatgggcttcaccggcctgtttctaccgacttcgctcagtataacagntattggggatgtcaacn

SEQ ID NO: 6475 - DNA, 345 bp, Homo sapiens
aaaaagaccacatgaaatgctgattctaattgtgtgtaggtcttgaggattaagcacacaaatttcacaaacttctgtttgagtaaacaaactcagccttctgtaaatatacatgcaagtttggaaacagtaatactgtacctataaatatatgctgtctgttttgtgtacagtatgtaaaaactccttttctgccacactaaaaatgcaagccatttatgggaatcctaaaactagtattgaactaaaactttgctaatgatctttattagaggatcgtccaacttttcacttaccttgggttttcttttcaattcactcttacactagtctgcttatttccag

SEQ ID NO: 6476 - DNA, 264 bp, Homo sapiens
cctgcaagaccccccaaagccagcagtcagcctacttcctgttaacactgtttagagaggtggctattttgtacagatcccacaatgcaagcctccaccccacgccagagcaatgtgaagctgtgagcaaattcattggcgaatgcaagatcctttcacctcctgatatcagccgttttgcaacatcgctcgtggacaattctgtgccattgttgagggcggggcctagtgacagcaaccttgatggaacggtgacagaaatgg

SEQ ID NO: 6477 - DNA, 286 bp, Homo sapiens
  misc_feature (1)...(286): n = g, a, c or t
ctggtgctctgggtctaccctacctgacatccttccagtcttatcctttgtttcctatccaggcccaggcttgtggctgagaacatccactttcagtcccatatacctgcctccaagtgtggtacagagaacttgggcctgctgggggcgcttagccttactctctccaccacctctcccaccaacccccagatgaactgcaggtagacgtttcttccttgcttggagccccagtttttgcatttcattttcattaaaatgaaaggnggtttggttttggttctaa

SEQ ID NO: 6478 - DNA, 382 bp, Homo sapiens
ctgcttatgctgctcgttgggtggcaaaatcccttgttaaaggaggtctgtgccggagggttcttgttcaggtctcttatgctattggagtttctcatccattatctatctccattttccattatggtacctctcagaagagtgagagagagctattagagattgtgaagaagaatttcgatctccgccctggggtcattgtcaggtaaagatggtaaagcctgttgctagtcaagtattgagggtgttgggtgtgtgtgtatatacttaaggctgaggaggtgaaggtgtgaaggaagactcctcaaatgggaatatattttaattcctggaacagttttgaactgctgccttagtgaagacttagttatttgagaaattt

SEQ ID NO: 6479 - DNA, 386 bp, Homo sapiens
aaatttatttgtaaaaagttaaaagagagtgggtctctgtggctctcactgatgttcactctggcatccttcagcatttttcttttttcatttcataattgtaggtcattagcatgcatatcgagtttgcccttacgtggtgggagttcaaacacacaaagacccactctttgcacaaaactgttctcgctggtttggaataggctcccgtgcttttctaatgttattgcagcatggatgtccattacagaattcagataaaatttgctaatgttctgctatgatgtttgatctcatcttaatcacagtgagctcttctatagctcaatatgcggtttgccctcaagtgtgcactgtttattactttgtaatatgccactgtgagt

SEQ ID NO: 6480 - DNA, 329 bp, Homo sapiens
ccaaagctgcctcttgatcaaccacgcaaacaaaaaccatttacctcaggtaccaaccaaccaagcgcagagcccccaccagccccgcctcgggttccaggctcagcagtggcaggcatgagcgactgctgtttccatctttgcaagttagggttctgaaagcatccccaagggtggaatccaaacaataccacactagaaatttggggcttcttcccccttttggtgctacagaagaactgcactgaggtgagatggtacctagaaccacatgactctggaagcacatttatgtctgccaagtggcagcagtgacacagaatcagagg

SEQ ID NO: 6481 - DNA, 376 bp, Homo sapiens; identical to SEQ ID NO: 6158

SEQ ID NO: 6482 - DNA, 428 bp, Homo sapiens
ggagaggagtcgaagtatagataaagataggaaaaagaaagacaaagaaagggaacgtgaacaggataaaagaaaagagaaacaaaaaagggaagaaaaagattttaagttcagtagtcaggatgatagattaaaaaggaaacgagaaagtgaaagaacattttctaggagtggttctatatctgttaaaatcataagacatgattctagacaggatagtaagaaaagtactaccaaagatagtaaaaaacattcaggctctgattctagtggaaggagcagttctgagtctccaggaagtagcaaagaaaagaaggctaagaagcctaaacatagtcgatcgcgatccgtggagaaatctcaaaggtctggtaagaaggcaagccgcaaacacaagtctaagtcccgatcaaggtagtatacttttt

SEQ ID NO: 6483 - DNA, 362 bp, Homo sapiens
ccaacatggtgaaaccccacctctactaaacacacatacacacccacaaattagccaggtgcagtggtacattcgtgtaatcccagctacttgggaggctgaggtgcacaagtgagaatcgcttgagcctgggaggcagatgttgcagtgagccaagatggtgccactatactccagcctgggcaacagagtgaaactctgtcaaaaaaagaaaaagaaaaagaaaaagaaaaagaaaagaaaagaaagaaagaaaacattctagaattccagaagccattctcattccctatttaagtcactaacccaagagtaattaatatcctgagttccaacaccttggatttgtatgggttattttt

SEQ ID NO: 6484 - DNA, 247 bp, Homo sapiens; identical to SEQ ID NO: 2583

SEQ ID NO: 6485 - DNA, 309 bp, Homo sapiens
cctggagatttatgaagtcatgaggaagagccttccaggctctgatccgaatgaaattcaattacaaatggatttgagatgaatcttaatacaaaaaaacagtgtgacagtgtcctgaggaatgggtctacagagcctttggatagctgaattgtagagaacctgggaggctcaatagtatcttcagagtgctccttcatgagaatcacaaacttacacaaaagaagagctatatgtttgctaaactatcattaaataattgagaaaatcaaactcagcatgaacatacctgatagcctgaatgttgaa

SEQ ID NO: 6486 - DNA, 435 bp, Homo sapiens
ccaagccgtagtggggtctgatatcaccagcataaccgagcggtataggatatattctgttaaagatggaaaaaatggaaaatctctgccatttatgttgtgtgacactatggggctagatggggcagaaggagcaggactgtgcatggatgacattccccacatcttaaaaggttgtatgccagacagatatcagtttaattcccgtaaaccaattacacctgagcattctacttttatcacctctccatctctgaaggacaggattcactgtgtggcttatgtcttagacatcaactctattgacaatctctactctaaaatgttggcaaaagtgaagcaagttcacaaagaagtattaaactgtggtatagcctatgtggccttgcttactaaagtggatgattgcagtgaggttcttcaagacaacttttg

SEQ ID NO: 6487 - DNA, 280 bp, Homo sapiens
aaaggcacttttactctttggttttatcattccattttgctaatatttactagctttataaattacagtaaggtacaaaaactcatcttgtaatattttcatttttgaagtgaaaaagtacatatattttgcacaaggttttatactgctaagtgcttggttggggtggtgagatgatgattagatcaggggtgaggctgagagactctgggtttagggctagccctgcctccatctcccttgggtaaaatgaagggtgtggggtaaaagatgcataagg

SEQ ID NO: 6488 - DNA, 333 bp, Homo sapiens
  misc_feature (1)...(333): n = g, a, c or t
cctaggatggttcttgtcctatatccacctagtcttcacctggggctataattctgtcctggaaaaagaactctgaaaacctgggtcaggggaatgattcctaaggaaaacggtctgcatttgagctctggtttgaaagtagccaaggagactgatggtggacactccagatgtggttggaagcatatgtggggaggctggctggttgagttttgttattttctgtatagaaaggttgagatatatcaacacttggaattgttacccatctgcagaattgacttctcaaataaagatgctaaaaatctaaaaaaaaaaaaaaaaaaaaacntg

SEQ ID NO: 6489 - DNA, 324 bp, Homo sapiens
tttcatttcaagtttacaagaggcatggatggagttgtgacgttcttgacaagctgggctaacctttcccgaacttgtttcccggaggcaaggtgctcggtgacccagcgcatcttaaccttgggtctcctaggctcgaggctagggcattacgtttcgtggaaccaaagcagccaattgcatagcaagtattttcctgcattccaattaaatgcttaagaaaaagcagcatcctataaaattgtgatcataaacatccatttccctcagcttttgtgagtgccttgacttacagccaacatcactgtttaactcagtctgttt

SEQ ID NO: 6490 - DNA, 237 bp, Homo sapiens
aaacagagcacagaattaaaccattagtatgtgaatctgcaaaaagagaacttgttttagactcttctacagtttagacttcaatgtgcatactaaatgcataacattcgtatcaaataattaacatttatatacaattaacaaataaggacaaattttatacaaaacttctactactgctataatttttgaaaacatttaacccactagcaagaggtaagacagcactgccttttt

SEQ ID NO: 6491 - DNA, 187 bp, Homo sapiens
tgaatgcaggggctgccgcaataaaacccagatttctttggtgcgaatgccttacgcatgcaaactattgtttcaggaacttatgtctatgagtattgcaccgcgaatgatgagtgtttagctattttacaggagtcaacaagataattaaatatcttggtgtcttgtttctattgtgtggcttttt

SEQ ID NO: 6492 - DNA, 343 bp, Homo sapiens
ctggagaggatgcctgatgacttcctgccaggagaagccaaagccaggacatagtcaaccaaaataactccaggttggtgagggaagggacaaggaaaagaaacactgggaaattcaaagaaaggcaatctcagacactaaaagagcagagagagaaagcgacatgggggacttaaagaggctccttccagggcgctgggcttctcttccagcacagaaggctgcaaaagtggaactggcccccagttcccagaggatcacaaggccaaggatccaatgggcacaccatgaggacccaaggaaaggacagagaaaggaacggctctgggaaagccaaacctgg

SEQ ID NO: 6493 - DNA, 392 bp, Homo sapiens
ccttaacccttgccctgggagcccccaaggataataacatccctttctggggcaacaaaactgggaccgagtgggtaactgatatttgacaggggaacctaaacagtctacggaagtgtcctgagatgggcgtaaagtcaaacagaccaagcacacaggtaacactgaaataggaaagagtaagagcttctgttcaggctggaggtgctcgtatggtgggacaggaaaggggaaaagagaaaggggcaacatggcagacataccacggttcctacagagattaggggcagccctggcccgggaagtacacagggcagagagctgactctcaggccaggaaggagtttagctctgacccatcctcagggaccacggctctcccccagcctcag

SEQ ID NO: 6494 - DNA, 220 bp, Homo sapiens
ccaagtcacccaccctgtatgggcctcagtttccccatgtttacaatgagatactgagctgaatggtaaccaaaagaatcagagtttgcatgtattgagagcattctatgttccacgtacattctgtaatatcaccaatccttacagtcatctgacaggataagtttccatttgacagagaaactaaaacgtggcctataccccacagactgggatttga

SEQ ID NO: 6495 - DNA, 178 bp, Homo sapiens
  misc_feature (1)...(178): n = g, a, c or t
ctggggatgagaactgtcaggagggaaggtcanaagtcccaggatgcacttgaaaagcctctagctccaccagtgaccagctcctggctggactcctggtctggactcagcatcagggaggctctggcctctcgccctcagggctgggggcttcttcacatggtcatcaaagacttgg

SEQ ID NO: 6496 - DNA, 531 bp, Homo sapiens
  misc_feature (1)...(531): n = g, a, c or t
aaataatgtctatccatgtatcatgaaggacagtatgcttcaaattgtcttttgaggcagacatgttctcagtactaaaagacatttttagatggattttattctcaacagatgcaaaatgcaaaataaaatattgacaaacaatacagcaacaaataatttactatcactcaggattataaggctggtgttaagcagaacagccattaaatcagcatcaaaagaacaaatagtaaagtccaaagtattaattacagataacttttcaaaaattcatcattcacccttgatttaattatttctctggcaattatttaatanacttctcggagtctgttaagtacttaaaccaagaactaccattattcctactgggaaaacataaacatttctcaagtggaaagtaaacagtggtggcactatttttatatatggttaaagagacctgtcattgcaataaaagccagcattcacaaaatgaggaagataaggaaagtagcataaatattttctattaacatggctttacaa

SEQ ID NO: 6497 - DNA, 265 bp, Homo sapiens
  misc_feature (1)...(265): n = g, a, c or t
cctgggaacgtttggggcaattttatataagcagtacaaccataattcctttactcatcactgactttcatgaaatggaatgttaaactacctgttcattcttatttgttttcataccagaaaaaggaatgatgtcctaaagggcagggtggggagagcaggtcgagtgatgataaacaaaacaacnaaacgttaagtttcattgagccattcctctgaattactgacaaagtgncctactcactggtgnaaggggaaactttgg

SEQ ID NO: 6498 - DNA, 342 bp, Homo sapiens
  misc_feature (1)...(342): n = g, a, c or t
ccacttgtgtgggtcctcacaagcaaagagagcactaaacttgacattgggggtccaccactccaactttgctttctgaaggttttggtgtacattgagccccagaaggaaaggagagtatctgtgagtgggggcctcccttgaccccagtacgaagtctatgccctgaatccccagagtagcccttcctggtgcccaactggcctggggacaaacagcgtccactacatctaggactgccggctaagtggacacacttcttgacctcctaccaggaactttggtaaaagctagctttggggaaggggttgggtgtaaatatgagagggnggagggagacca

SEQ ID NO: 6499 - DNA, 345 bp, Homo sapiens
cctagacgaacacaatcacatgttttctttgctgttcctcccgggatgggcctgttttggggtttgggactctgaacccgagcggggttccttcgcttgactttgatcctggtccttaaatgcctttccccactcccctcccgtgggttcaggggccaagcggcccctcctcagagcacgggcagcaccgtctcctggacccctgtgtgccagcctctgcagacgcagaaatagagagtaaaatggaatggctgaatagccctcaaaaccaacgtatgtctagggatcatctacctaaggtagattctacagttttgtacaagcttttttttttttttttttttt

SEQ ID NO: 6500 - DNA, 310 bp, Homo sapiens
  misc_feature (1)...(310): n = g, a, c or t
cctcacaagcatgagtcctcagccccaggacaagtcatctaacacctctgagccccaggatcctcccctctaagaagctgccacctactttgcagagtcttttgagggtgcgttgtcaacagtgcttgatgactaaaggccactgtcagctctgggggtaaggtgacatctaggaggggcaggtcagctctgggagggggtcatctctcgggattcaagccctggctccagcacgtcctccctctgagacccaggagggacgtactgcacctcagnttcctcccgcgccacacgtcaccccttcccgagg

SEQ ID NO: 6501 - DNA, 285 bp, Homo sapiens
ccaaggaccgctgcaggatcgagatgtctatggctgacttgttcacaaaacttgctatcttcttaatgaacgccaccgaaaatgtatcccaggacactatgccatggtccatcagctcaacgaaggccgtcagggtgaaggacagcatgtctccaaagcaaggcttcatgatcttctgcaatttctggtatcgctcagtgccgctctccaccatctgcgtgaggagagagataccgtccaggtttataaactcctgggcaaacgtgacaccccgggagaggctgg

SEQ ID NO: 6502 - DNA, 491 bp, Homo sapiens
ctgtgagagttaagcagatttttttttaaccctccgcttaccttgctgatagtgaagtatgtgaaggagatctagagctctgacgactgccttttgtgctagctgtaggtagttctaacccactctggaggaatattcaatagcaatcattagtactacctactgttttttagaagataaatatttttaattagctttcacttcatgatgaatgtcatgaaagtttttattttcatgaagtttttaagaaatatttaatagaaggtgctgtattacctgttgaaagtatgtttgaaggataatacggatctcagtattttcttctatgatatcaactaacatttcatcaataactttgtgaagctgtttcatttcacgaagtttgatgtcttgttcttccattgtttcatcttttgtgtctttcaaaagacggatttcctttgtgagttctgcacactgttggtaaataatagtcaattattctataaacc

SEQ ID NO: 6503 - DNA, 365 bp, Homo sapiens
ctgacatgctctcaggggtgaagaagtttagcttaaaatacctgatggcgctgcataaactggggatttgggaactgagtttttagctctgtgacacacaacataaaaaacaaaaatccagtctcattagctaaattcggattaaaatctgaaatgtttttatggagttgccaacaggctggaatgtacctgatacagtttaatctgcttttatttctttggctgtcttccaaaccactttcttcctgtaattcttaagttggctagttctccttcctcagaaaaattacccctaagaatcttcctaatagtgagggtgtacttccgaatagaagagtccttcggctgaaatggcatctccaagg

SEQ ID NO: 6504 - DNA, 247 bp, Homo sapiens
cctcgctggaggccccggggctccaggctccctgtcatgtgctcagcccagtgttcctcggtgattcgtaaggactgggtgagtgaatgatgaagtaaggaaaggtaaaaccagagacgtgagggccacgggtcacctgtgactcggccaagctgctggctccagtgccagcccctggttgtggattccagaactttctaggcaacaaagtaacctcccagcagaggttatcaccaacaagacgcag

SEQ ID NO: 6505 - DNA, 224 bp, Homo sapiens
aaaatgtctttataaaatcagttttggaatggaatgtgtgtgttctggaagggtggggaagggaggttaaaaatcaaagctgagctccagtgagtagggatggggttcgccttgctgcccaagaaggggagggagaagagattcgattctgagtctcctactcccgggttctgcgtagagaagccgactgctgctggaggtcggcaacgcggccacaaccgctc

SEQ ID NO: 6506 - DNA, 170 bp, Homo sapiens
ctgccagtgctgcacggatgtccttcttgccctcaatatccttctggctgcggttcaccacgccaatgtagcctcttctcaacgggagcaacttgttctccaagacgtccctggcgtcggtgccctcgtccatcaggtcaagcttggtgatgacaccgatggtccgtagg

SEQ ID NO: 6507 - DNA, 251 bp, Homo sapiens
  misc_feature (1)...(251): n = g, a, c or t
cctaagtgaggtaatcgatgagatttaaggatgtaggatcacgttaatagtagggaaaaaagtcactttagctatgatgaaaggaagggaactgaattctacaaaggcagaatgagagcttttgatgagtaaccatgatacaaatacacaaacagaaaacatcttacaacatgaagaaacagtgatttctctgtgagtaaaattcaacaatcccattcttaatattgaatggaatctntgagttcaccagg

SEQ ID NO: 6508 - DNA, 126 bp, Homo sapiens
  misc_feature (1)...(126): n = g, a, c or t
ctggttttgtttttgtttttataaacagagcttctccatttccttagaagagctgtcatcttganctttgtgcttgtgaccatgctcacatgttgtttgacaaaccagctcattcttggnccatga

SEQ ID NO: 6509 - DNA, 284 bp, Homo sapiens
  misc_feature (1)...(284): n = g, a, c or t
tggccctgtcctgcagaatgaggtgtccggcccggtacagtgggtgttcatgcagatctgtctgggcgggaaacaccagcagctccggcatcaaggagtccaggagaaaatgcttccccttgagggcttgtaagtcatcaaggctgccagggaagaaccattcattcatttcctgaatttctccctgccaggccctatttcaacggtccattcatgcaacaaatgntaccacagctatggagaaatcaacagggtgataagggaatccgggatccgcagttgag

SEQ ID NO: 6510 - DNA, 247 bp, Homo sapiens
  misc_feature (1)...(247): n = g, a, c or t
ctggacatggggtgtggtcactagccagggctgcaccctacagttcaaccagtcctagcactggcgctgagccctacccctttcctccagcccagagtccttcctctgcggccggcacacagaatcagtttccccacagacatactgaccatatttcccaagccaaaagctggcatgacaacatgatagaatatttggaactgagattgcccaaaaaggcagaggcagccagccacatantatctgg

SEQ ID NO: 6511 - DNA, 263 bp, Homo sapiens
ccaagagcccacgccacacagtcttgccagttctgtggacgcactctcaggaccccaagcactggcttcagtaaggtgagtgtcttgtggctcatccatgtctgccagggaagtgtgtgcctgttggtggtggttgatggtctctgcagacagtcggaagagttcttcaaactcatgccgggcccactgcagggtgtgctcggctgtgctagggaagtaccgcacggtacagacagggtagggggcatcctcagaagctgcag

SEQ ID NO: 6512 - DNA, 357 bp, Homo sapiens
ctgacagttctccatggcaactcagtcctccagcagacccctgcatacataaaggtgtaaaccaacaagatggtgatgctgtcctgcgaggctaaaatctccctcagtaacatgcgcatctactggctgagacagcgccaggcaccgagcagtgacagtcaccacgagttcctggccctctgggattccgcaaaagggactatccacggtgaagaggtggaacaggagaagatagctgtgtttcgggatgcaagccggttcattctcaatctcacaagcgtgaagccggaagacagtggcatctacttctgcatgatcgtcgggagccccgagctgaccttcgggaagggaactcag

SEQ ID NO: 6513 - DNA, 287 bp, Homo sapiens
ccaagggtcactcactgggcaggaacattgtcaaggccattcatgcttggaacagggtctctcttcagctctgaggcaaatctgttctctaattttcagatgacttcaaggggaacgtgtaccaccacccctctggtgcgtcacattgcttaggaagcctgctgtgtttatcactgggtggctgtcagggctgagatggagagggccagggcctggcgaggtggagcagtcggcccaggtgtcccagcaattgttgctggaacagggtctggaacccacaggagagg

SEQ ID NO: 6514 - DNA, 267 bp, Homo sapiens
  misc_feature (1)...(267): n = g, a, c or t
ccaggaaatgatnaaagggtagcatttangaaatcagcaaactanagcctcaaatcgaaggtggacaaatgcattctcaactcaaacaggttgggtaatgctttcataagatacattatgnttttgtgtncacagnacacaaattttattatgnctacaaacagattcangaaagacctccaggctatttccccaaatgattgacaaagtgcaaaacaaaacaaaaaagaggagagcacaaatgaatagcccacttagaagctgaat

SEQ ID NO: 6515 - DNA, 369 bp, Homo sapiens
  misc_feature (1)...(369): n = g, a, c or t
cctaagaactgagacttgtgacacaaggccaacnacctaagattagcccagggttgtagctggaagacctacaacccaaggatggaaggcccctgtcacaaagcctacctagatggatagaggacccaagcgaaaaaggtatctcaagactaacggccggaatctggaggcccatgacccagaacccaggaaggatagaagcttgaagacctggggaaatcccaagatgagaaccctaaaccctacctcttttctattgtttacacttcttactcttagatatttccagttctcctgtttatctttaagcctgattcttttgagatgtactttttgatgttgccggttacctttagattgacagtatta

SEQ ID NO: 6516 - DNA, 190 bp, Homo sapiens
ctgctgctgacttgagtgagaacaagagagaggacggcagcgccaagcaggagctgaaggacttcaggaacttcctgtagaaaagcccccaaaacaaaacaaaccttaattgactaaaaagtattgcatgctcaacttaggataagcactacggcaaaggatacgaaatctaccaagcttgcaagaccag

SEQ ID NO: 6517 - DNA, 272 bp, Homo sapiens; identical to SEQ ID NO: 261

SEQ ID NO: 6518 - DNA, 308 bp, Homo sapiens
  misc_feature (1)...(308): n = g, a, c or t
aaagtcaactctagagagacattttgtgtgactggtccaaataaaacagcacatttaatgaggtcatattcttcttaaactttttaagagaagcaaaaacaatggaaaagccattaaaatttacacaaagaccactaaaactctactagtgtcaattaaaacaaagccaataaaacatgaacaacttcaaagttaccatcactttccacactgttctacagttatangaatatattcaagcaccatattgatnataggtaggtaaacgatgaagtcctactttggcggtctgacccacgctcacacaa

SEQ ID NO: 6519 - DNA, 306 bp, Homo sapiens
  misc_feature (1)...(306): n = g, a, c or t
ctggaaggtagtattccgccctcacccagccacccgagtaaatgagaatgatgactgactgagaccctgatggtggtggcttangcaagatgaacgtctgaaatggaggcccagggctgccacgatggctctgtagtcatcagggagggagctccttttatcttgttacctactcccctcttgtgcccctttcttcccttgatctaagaaggttgctccggatctcnccatctggcctgcgttcaatcaacataagcttcctggangancaggaggaggcactgtgctcgcatcacataccagtgg

SEQ ID NO: 6520 - DNA, 284 bp, Homo sapiens
aaaaagtctgaagcaagtttatccagtagatggctgggggtgttactcgcgctgtctctgaggccctcctttgcagacatcatgaccgtaaggcttttggggccagcatcttcccagttccctgtaggtcacgaggggccacttctcccacttcctggggtcagcactgtcctctgtgggctgcagagcaggcagctcaaggcacttggtttgggaagcctggtctccctgcaaagccgggaggcatcaagctctaattgtggtgaccaggccctcagtcacag

SEQ ID NO: 6521 - DNA, 480 bp, Homo sapiens
  misc_feature (1)...(480): n = g, a, c or t
nctgtaagagctggctgagctccatgacgatggacagtgaagatggctaccagacgtgtgtgtctgaggactccagcaggggtgccttcagtcggcagacgagtacagatgatgagtgctttatccccaaggagggggatgattttctgaggaggtcatcttcaaggaggaaccggagcatcagtaacaccagcagcggatccatgtctcccttgtgggagggcaacttatcaagcatgtttgggaccctgccccggaagagcagaaagggaagtgtccgaaagcaactcttgaaatttatccctggccttcatcgtgctgtggaagaggaagaaagtcgcttttgacggattgtggtgtcctttcaaattagcttatttcacaaatatctctagactcacccagatcccagcttggtgggaaagtgcagaagaattgcaaaactgacatcccatttcacagcaatagtgacctttattt

SEQ ID NO: 6522 - DNA, 230 bp, Homo sapiens
  misc_feature (1)...(230): n = g, a, c or t
nctgctccctgagaaagggctgggccttgattccctggcactctgaccttttgagcacagcagagtggggacagtttcgagcagagctgcaggtgggagctgggccagtaggcaccagtcaaggagtgggcagggtaccggcagcccccgcattagcttcctagggctactgtaacatgtgaccacagactgaatggcttaaaccacagaaacctactgtcttacagtgc

SEQ ID NO: 6523 - DNA, 195 bp, Homo sapiens
aaagcttcttgttttaattaaaaacaagcacatattaacagccacatgtgaatgccaaatgattaaaacaaaaaaacaaaaacaagagccatctacactgcagctagggaaagcaaacttcttggcttaagagaagtgagggatgtgtgtacgtgtgtgtgtgtgtgtgtgtgtgtgtgtgtgtgtgtgtgtgtt

SEQ ID NO: 6524 - DNA, 332 bp, Homo sapiens
tgaagaacatctcgaatacaattttggtgggaaaggagccaattgatttcaacagaatcagatctgagcttcataaagtctttgaagtgacttcacagagacgcagacatgtgcacttgaagatgctgccccttccctggtacctagcaaagctcctgcctctttgtgtgcgtcactgtgaaacccccacccttctgcctcgtgctaaacgcacacagtatctagtcaggggaaaagactgcatttaggagatagaaaatagtttggattacttaaaggaataaggtgttgcctggaatttctggtttgtaaggtggtcactgttctttttt

SEQ ID NO: 6525 - DNA, 283 bp, Homo sapiens
aaaaatctactttttccaaaaacagtaacactgacattcctcccctttttcaagggagacagagtagggtccttcaaatcttatttaccaacagatttgacaactgttttaacatcaaatctaaggttttacttcaaatcaacttcagcaggaaggaaagaaggtccagttggacaagctgatgaattttaagtaaccaggggaaggcagacagtggaacaaataggtgggagaccactgtcaaagcatatttttgcccaaaaggtctgcttacttcagtcag

SEQ ID NO: 6526 - DNA, 500 bp, Homo sapiens; identical to SEQ ID NO: 262
  misc_feature (1)...(500): n = g, a, c or t

SEQ ID NO: 6527 - DNA, 249 bp, Homo sapiens
  misc_feature (1)...(249): n = g, a, c or t
ncggccatcggccagaagattttcctgtggagcctgcgggccagcgagctgacgggcatggccttcatcgacacgcagctctacatacaccagatgatcagcgtcaagaacttcatcctggcagccgacgtcatgaagagcatttcgctgctgcgctaccaggaggaaagcaagacgctgagcctggtgtcgcgggatgccaagcccctggaggtgtacagcgtggacttcatggtggacaatgcccag

SEQ ID NO: 6528 - DNA, 334 bp, Homo sapiens
  misc_feature (1)...(334): n = g, a, c or t
aaaaacatgggcttcatgaaaacaccattgntactaacttgggcttagatgggaatctaatgtgaatagttcaagttatgggacttgtctaaatatgtctatactctaaacctgggggaaggnggngnggaacattgacttgactacagccgaatacatgttgggaatcattcccaatcataagacatcgtcgtttctgtaggatgactgcatatgttcanagtanctttttgaatttggttcccttacctttagggatgcgatgtnatagnccaaaatgattacacnaaaacctaagtcttcaaaanccaacttttgttgcttatgactttgc

SEQ ID NO: 6529 - DNA, 441 bp, Homo sapiens
ctgaacacacaactcttaaaccagttacaccaagtgtattactccctcctcccaccctaaaggtaatgatagtagtccataaagctaacctttagtttttctttctttggcttcttgctcttggagtgagtttctctgttgcagacaagtcctgcatttgcttaaaagctcttgcagagttggaattagagctgggtttaactgtttgggagtgtgtactgacaggagcaaagcgagtgccctcaggtcctacaaaaacccagataggaacatttcaaattctaaagccaacactttgatgcagttgtttacagttaattgcagatgtttattttcccaggaatccattctttcctaagaataccctggtttctctgggattcttagaatgataaaaccagaaagccagtgttaagatactacagcatttcattagttgct

SEQ ID NO: 6530 - DNA, 520 bp, Homo sapiens
aaataattattctttttataactaagccatatactggacaagatttataatttagagataatatccccattagtaaagtttatgacccaataaacagctcccactagttaataaatgccaaagccataaaaacaaagactattaatgtaatagaatttctgtacctccctcttttgctggtggtctcaagacactgaagggaaatgctatcttaggaaaaacatttattctcgttatgtaaatatcagtgaattgtcttacaatccatctggaagtctcccagccccccttggtcccaggtggtcctgaaatgctgatgcattctgcttaggtttcaagcagtagataactctggctttcagcacaaataaatcccgaaactaaaattttggggggaggaggactggaatttctgcctcttctcttccctctgcaaaagagaaatcccaactattgtcattgttccagggtaataatttgaaagaagtttcacaacctttccatatacttatattttcag

SEQ ID NO: 6531 - DNA, 292 bp, Homo sapiens
tgctgtccctcctcctgcctcggtccccgccgcaccagtgctgctctgtggctccaccttcacagtgcctgttctgaggctaagggcatggggtgaacaaggtaatgggcatctctggagtttggggtccagcagggataagaatgataaggggatattagagcaggggctctgccatgggtgcaggaccctaggacacacctccctgccaggaaacttgccccaccccctagcagccaccagttctcttcccatttccctgaaggagtgtttggctgccccacaactgtgg

SEQ ID NO: 6532 - DNA, 400 bp, Homo sapiens
  misc_feature (1)...(400): n = g, a, c or t
naaagttgctttgaagctcgtctataaatggcttcaagcaacatgactggttggttgtgagaattaaagggtcattaactgaataactccaaagtcattaacatgaccaaggtaaggatacagaataggaaaaggaaaatcctattccaagttggagggccatgccatcaaccacagtggtctgtgccagagcaacactattcgctagtggttctatactgacttctttactggctttccatctttgtatttattccctctgcaatccgtttcattttcagtagaagccagtgtcgaataggaataaagaatctgtgtattgcggtcagacagatttgggctagaataccagctctagactttctagttccatcactttgggcagatgtcttggcttttt

SEQ ID NO: 6533 - DNA, 250 bp, Homo sapiens
  misc_feature (1)...(250): n = g, a, c or t
ngnaggaagacaaagagtattaactgttaaacactgaaatttgacaagttatgactcaaaatgattaagtataacagttttattttctattagtgatatttgtaatctttactttgcctttatgactttgcactcagttcttggtttacaacagtactatgtagaaacacaaaggttgccatcactagttatttttacctgctacagatattttttacctgccatatttacaatgttgagattcaagttt

SEQ ID NO: 6534 - DNA, 312 bp, Homo sapiens
cctttctcccagggtcttattgaagtttgggttttggcataagagatctaagggttgccctaggaggcagaggatggttccctgatcttaaaggctctcaacctctcctctctcctcccttcccccacagtgtgccagagctgtgtggagctggatccagccaccgtggctggcatcattgtcactgatgtcattgccactctgctccttgctttgggagtcttctgctttgctggacatgagactggaaggctgtctgggggttagtggaagagcagagcatgagagtgtgtttgtgtgtgtgtgtgtgtg

SEQ ID NO: 6535 - DNA, 318 bp, Homo sapiens
  misc_feature (1)...(318): n = g, a, c or t
naaaactaagtcagatttttatttttttttccatagaccacatcatttaataataaaaaaaataaaaataaaaattgaacaaaaggaaaaggtggatataaagtggaacctgtgggaaagaggcaagggctgcaggacagaagagactgggaactgcaggggccctgggactcaggaggagatgctgattcagctcataggtgacccagtcctggccccggctgttcccaagagaaggctgtaagtacccagggaggtggtaagcaggatggaggaaaaatcagaggactggggcacctggctgttccccatctctgg

SEQ ID NO: 6536 - DNA, 395 bp, Homo sapiens
ctgtgcaacttggagcattttagcttggtaacactgatcccctttcaggtgagtattgggcttgtaatttgaatttgaatgagaaaccgtaatgtggctactggtaaggtaaaacggataaatgccccagaccaaaacagctcgcaacgaagtatgtttgccgtaaagtcacacagtccaggcttgataatcttctgagaaattgataaaagatgtgtgatgtagacatgagtagcaaggactaaagagataaattcattctgaaactgctttgaatattgtatgttgttgatgggttggaaatatgtcaccttaggaatgagtttgtttttttttaattggagttttaggagttggtaatatcgtggtcagtatatataggcttcacaagttat

SEQ ID NO: 6537 - DNA, 301 bp, Homo sapiens
ccaagcaaagaaaggaaaaggagcagaatgaggctgaagaaagaagctctaggtgattgggggaaaggaaagaattcactagaaatttgtttagggtccagttgatttgtgtatttttgttatcatttaatttgtaattttcgtttcagaagcaaatattcgtgttgtacaaatttctgattgccctaaatgtagagagactgatggggaaagtatgatgggtttgatttttatatcaaatcatcaggcatggagaaatatcttttagaagtgttaaaataaatgttcctactgtatattt

SEQ ID NO: 6538 - DNA, 327 bp, Homo sapiens
aaatagttttatatgctcattggtctcattttctctataattaaaatactagaccagtcttaaaatggggatgattgaagtattgatatttctttttacagttactattttataatttatgcactttgattctgtgattcagatttctaatcagaaaatgtatttttttgtttttggctgttactatgttaaaattgaattatgggcatgtcattttgccatctttgtagtttcacaaattttgtgtaatctacctcaaatgaataatccaagtattggttaactatgatgttggcatctcttattcggcaagcttaaaggctcttt

SEQ ID NO: 6539 - DNA, 302 bp, Homo sapiens
  misc_feature (1)...(302): n = g, a, c or t
aaagtgaaataattttttgcaaaggggtttcctcgatttggagctttttttttcttccaccgtcatttctaactcttaaaaccaactcagttccatcatggtgatgttcaagaagatcaagtcttttgaggtggtctttaacgaccctgaaaaggtgtacggcagtggcgagaaggtggctggccgggtgatagtggaggtgtgtgaagttactcgtgtcaaagccgttaggatcctggcttgcggagtggntaaagtgctttggatgcagggatcccagcagtgcaaacagacttnggagt

SEQ ID NO: 6540 - DNA, 342 bp, Homo sapiens
ccttggtgctcagtggggagactcaggaacgggagcgaatcctctaccagttctccagacgcttccaccattgcaatccggggatcttcccctcagtagattctgtacacaccttgacatgtgcaatcatgctgcttaacacggacctgcatggacagaacattgggaagagcatgagctgccaggaattcataaccaacctgaatgggctgagggatggcgggaacttccccaaggagctgctgaaggccctctactggtctatccgcagcgagaagctcgagtgggccgtggatgaagaagacacagccagacctgagaaggcccagccgtccctgccag

SEQ ID NO: 6541 - DNA, 393 bp, Homo sapiens
cctctagcatgggtgacccagccgacctcaggccggtttccgcactgccacaactttgttcaaagttgcccccaattggaacctgccacttggcattagagggtctttcatggggagagaaggagactgaattactctaagcaaaatgtgaaaagtaaggaaatcagcctttcatcccggtcctaagtaaccgtcagccgaaggtctcgtggaacacaggcaaacccgtgattttggtgctccttgtaactcagccctgcaaagcaaagtcccattgatttaagttgtttgcatttgtactggcaaggcaaaatatttttattaccttttctattacttattgtatgagcttttgttgtttacttggaggttttgtcttttactacaagtttg

SEQ ID NO: 6542 - DNA, 347 bp, Homo sapiens; identical to SEQ ID NO: 5482

SEQ ID NO: 6543 - DNA, 266 bp, Homo sapiens
aaaaattccatgtgattcaattatgtatgattacatttcagttttgctatactttatatttggcttgtatgattaaagtaaacaaagtaaattccattgttataattggttttgagtgttataggtttattcaaatccaagatttgattacagttttgataagagtcacagcttaacaggtatctggagttcacatgtgcatagctatttcactgtataaaaatagattaagatattttgagattttggtgatatttcctgttttt

SEQ ID NO: 6544 - DNA, 282 bp, Homo sapiens
  misc_feature (1)...(282): n = g, a, c or t
nncatcccantcccggctctccctgttgccaggacacaaggtctcctttccccgntcggctggccggatacaaatgtcacccccgaagctgcctggaanttccanctccgagttccctgggaggactttttcanatgttagggacccgctccacagccccctctgggtcaccctgggttcctccanccccaccgantcactcactgnggaccctgcctctgaataatcagnaacngtggcttcanagacgtctcttgngccttccctntggacctcgnccgc

SEQ ID NO: 6545 - DNA, 507 bp, Homo sapiens
gaagatcctggaatagcgtcttccatgtgggacatcttaaaagatagtattttggcttcagtgagttacacaaatgaatcaccagtccttattaattcaatgggtctgtttacagagtgtggtaatttcgttctttagatttgcagaatttataaagaaagaaaattacagcctgcacacccaagaccaggacaattcctccaatgaaactggctgcatcaaaggtagactttcgcacaggttgtgaggttggagtcacagtgttatttgttgtacctgatgtagtaactgtcttggaagttgtagaaggggagggctgaactgtgggtttagctgtagaattggctgttggcactggagtggccgtggaaacggaacagaagtctgtcgtgttccccacttgacaatcactaactgttgagttatgtgaacaatagctctcatctttacattctatccaaaagcaggtaagtattaacaacgctaacattaaaacaggaaacgcag

SEQ ID NO: 6546 - DNA, 103 bp, Homo sapiens
  misc_feature (1)...(103): n = g, a, c or t
ggcttgctctattactgtgaagcactaacaaanacaaacctccaactccataaagcancttgcctggctctgaaaatccttnaggntactgaaagcattaaaa

SEQ ID NO: 6547 - DNA, 234 bp, Homo sapiens
gccgccaccaaaatgcagattttcgtgaaaacccttacggggaagaccatcaccctcgaggtacgggccgggtggtcatgaggaagccaaggtccgaataaggtcctgaggtggattttaggaccggcgctgctttccatgtcttagaccatgattccgaatttgggttctaaaacttaagctttgaaatgagtaccttttgctgagcaacgacctagaggtgattttcggtgg

SEQ ID NO: 6548 - DNA, 619 bp, Homo sapiens
  misc_feature (1)...(619): n = g, a, c or t
ngcatctnacactatgccatgatgaagaagatgcagttgccagaactgcccaaggacatcagctacaagcgatatattccagaaacattgaataagtccatcagacagaggaaccttctcaccaggatgcggataaataatgttttcaaggatttcctaaaggaatttaacaacaagaccatttgtgacagcagcgtgtccacgcatgacctgaaggtgaaatacttggctaccttggaaactttgacaaaacattacggtgctgaaatatttgagacttccatgttactgatttcatcagaaaatgagatgaattggtttcattcgaatgacggtggaaacgttctctactacgaagtgatggtgactgggaatcttggaatccagtggaggcataaaccaaatgttgtttctgttgaaaaggaaaaaaataaactgaagcggaaaaaactggaaaataaacacaaganggatgaggagaaaaacaagatccgggaagagtggaacaatttttcttacttccctgaaatcactcacattgtaataaaggagtctgtggtcagcattaacaagcaggacaacaagaaaatggaactgaagctctcttcccacgaggagg

SEQ ID NO: 6549 - DNA, 255 bp, Homo sapiens
gcgacgggtttgtcagagcaccataacatggtgtgggaagtgaagacaaatcagatgcctaatgcagtacagaaactcctgttggtgatggacaagagagcctcaggaatgaatgactcattggagttgctgcagtgtaatgagaatttgccatcttcacctggatataactcctgtgatgaacacatggagcttgatgaccttcctgaacttcaggcagttcaaagtgatcctacccaatctggcatgtaccag

SEQ ID NO: 6550 - DNA, 149 bp, Homo sapiens
ctgaagttttaggagacagcttagggtttggtgcgggccacggggaggggaccgggaagcgctggggcttgtttctgtttgttacttacaggactgagacatcttctgtaaactgctacccctggggccttctgcaccccggggtgagg

SEQ ID NO: 6551 - DNA, 603 bp, Homo sapiens
  misc_feature (1)...(603): n = g, a, c or t
tgtggggagatttcantgcattgcctcccctgggngttnttcatcttggattattccttgggcctgaatgacttgaatgtttccccgcctgagctaacagtccatgtgggtgattcagctctgatgggatgtgttttccagagcacagaagacaaatgtatattcaagatagactggactctgtcaccaggagagcacgccaaggacgaatatgtgctatactattactccaatctcagtgtgcctattgggcgcttccagaaccgcgtacacttgatgggggacatcttatgcaatgatggctctctcctgctccaagatgtgcaagaggctgaccagggaacctatatctgtgaaatccgcctcaaaggggagagccaggtgttcaagaaggcggtggtactgcatgtgcttccagaggagcccaaagagctcatggtccatgtgggtggattgattcagatgggatgtgttttccagagcacagaagtgaaacacgtgaccaaggtagaatggatattttcangacggcgcccaaaggaggagattgtatttcgttactaccacaaactcaggatgtctgcggagtactcccagagctgg

SEQ ID NO: 6552 - DNA, 258 bp, Homo sapiens
ccatctcagaggcacatttagtgtttgttctacttatgaaatcaaggacaaccaattgtacttatcttacaactgatgttctgggatgggactggaaaacattgattccagaaccactctttttcttaaaatcactggcttttatgacaatgtcttccaagagctcattagaatctataagatcgcaggaatttcgccaagaagggctgcatagaaaccacagagacaactcggccagggctgctcccattgtggtgg

SEQ ID NO: 6553 - DNA, 562 bp, Homo sapiens
  misc_feature (1)...(562): n = g, a, c or t
nctgtagcagcttctccgccacgtggacaaagtgtgtgatgaccagggcccgctgcggggctgtgggtttgctgaggatcatgagctgcacccactgtgagacgctgttgaagagggagatgaaccgctccaggacggggttgtccacagtgcagccatgagtcacgaaactgtgatagtcctgaaacaggatcttgcagaaggagcgatactccaagtaggtgagatgctccgccagctccatgggctccaggtggtcaaacaacggggacatcttgcgctttttctgtcccacagggttccgctgagtcacctgccgcttccacttgtaggtagggacgctgtctatgtcgatttggctgctgtgccgtcggttcccttcttggtctagcagagccttcagctccttgatctgctcagccaactccgggttcaagtcaaactccgctgggaaggcggagatccagtacctgaccaggtggcacgttttcacctgcanggaattggagttgtccttccgggactgttggtagatgtggaacaacttggccgccanacctgc

SEQ ID NO: 6554 - DNA, 181 bp, Homo sapiens
  misc_feature (1)...(181): n = g, a, c or t
agttcagtgacctcggcggnatccacggaatagctgttgttttccttggagagtttttccacggcgtanacaatttcattgtgtaggcgaatcaagtagctgacgagagcggtagcacagaggcccaggccccgtcggcgtggcaagaggatctcaaactcagtgtccanatccaagtcag

SEQ ID NO: 6555 - DNA, 232 bp, Homo sapiens
aaagaacagtcccaacaataaccacagagctgacaaaaatgccacctaatctgcatcatttccaggagctctgccacatattcttcctggcccgtaccaagtctcttagcccctctagaagagctaagaaaatgcaggtgtgcacctctgaacagcccatacttggcttttctgaggcaaattcccatggaaaccacattgaaggaagaggcaaaggctggtaggaaatcag

SEQ ID NO: 6556 - DNA, 285 bp, Homo sapiens; identical to SEQ ID NO: 418

SEQ ID NO: 6557 - DNA, 312 bp, Homo sapiens
ggcagtagctcaacaaggaatagagggaggagtgtaattttggtagctggtgttgaatagggcctttgagaatcagactgaacacagtgaaatatgtgcccaaagttcagaaagatgaagtttccagaaactaagaaggtagcacaatatgtggcatcatactcagaaaggaagaccatgccatggggccagaaattcagaaacgtaattcttacattgtgattgcaatggatactcatggaagaaagtgggtagtggccgatttgacttcagagtgacaggtagagaagggaagagcgtgtagaactgtgg

SEQ ID NO: 6558 - DNA, 727 bp, Homo sapiens
  misc_feature (1)...(727): n = g, a, c or t
aaatgtttgaagaacagcaaacatcaaataatataataccaaatagaatattatagtctctatgagataataactcatcagctacaaccacctaaaactgaaattttctgtacttagtttctattagtacaacaccttcattcttaatgcttcttagggcatcacaggttttagaaattaatgtatttttagcattccacagtaatgatcactttcaaaaactgcaatatacatctgcatgttacactgacatacaacacataagtattttgtcacacatcaacttttagcctcaaataatagaatacaaaaagctacactggacataacgccacagaacttttgaatatccccttttcccaattgttaacaggtagtacttttttctaaagagaaagtgatgaaaaatccaaaatttctgcatccagtgtttgactccaactttctactttatcgtctcctggtaccaccatatcctgatgcagttctggttttcgtgtctgagtttgaacataccgaatagctgcccgagcctccatgaaggggtgagtaagccctattccacgtgccagggtaggagggaggataggacgggtagtaccacgagtctgagaagggtgttgccgctctattgctgncaaacaaatatcctagtattccaccagttcccaagcctgtccagaaccctgggcctggaatttcatatccttggtggcctgnaaaagca

SEQ ID NO: 6559 - DNA, 320 bp, Homo sapiens
ctgaaggagagccgccaggaagagatgaattctcagcaggaggaagaggaaatggaaacagatgctcgctcgtccctgggccagtcagcgtcagagactgaggaggacacagtgtccgtatctaaaaaggaggtagggattggagctgagtgtggaaggaaagccaggagatgggacttgggtacggaaataacacaatttgtaagtgttcagtaagtaatagcttctattttgtgccaatttccgccctcagcatcttatagatatttttcatttaattgctttgagttccaagtactatacgtgcctacattttacag

SEQ ID NO: 6560 - DNA, 410 bp, Homo sapiens; identical to SEQ ID NO: 4733

SEQ ID NO: 6561 - DNA, 372 bp, Homo sapiens
aaagccattatttctcaaaaagaacggtttatgttttagctgccattttaattaagcttgttaaaaatgaaatggcctaaggatgaactctgtaaactccacatgggcagggccactgttgtatcatggctttgccagtgtggtgatgagatcaggacctggcagatgtgcttggtgaacctaatgaacaaccacctgaggaatgacgtgaagggggaggagattaccaccactaccattggctactaattcaaaactactgtgatggcgtagagcttattttagatatatctgtgattcattattcttttgtcacacttcagcttgccaattctgtaactccttgggatatcttgctgagcttaattgcag

SEQ ID NO: 6562 - DNA, 239 bp, Homo sapiens
gttgtgaggtgagctttttcagaagcgcgatcccaggacacgtcgggaagcaagcatccccagagctgcttggaaagaggaccaaagacgtctaaaaagtcatttggaaatatctctaaatatttgttaccatgtataagctgctaaagagaaattgggcccaacaaaactaattgaataattgaggcagatttgtgtgtatcatcaaattctatccagaagttgaagaatctgaattt

SEQ ID NO: 6563 - DNA, 287 bp, Homo sapiens; identical to SEQ ID NO: 263

SEQ ID NO: 6564 - DNA, 400 bp, Homo sapiens
  misc_feature (1)...(400): n = g, a, c or t
cgtccttgtctcacccanaatnacgacgctntcagttcaccaacaaacacgattcagtgctgctagngctgggtcctgttctgggggctggtgatgaggccaagagggaaagagggagctctgtgttccatcgagggggcgacaagcctggaccagatgaaagtgactcatgttgttaattancggcttagggncaaaggtggcccctggaccagtggcctcagcatcacctgggaaaaggttanaaatgaacattcccaggccccacctcagcctcctgaatcagagcatccctttggcaaaccatactganaaacaaccacgtgcatcaccaagcgctgtgaagaaggcaaagctttgagaccttgaaggaatcatcaaactctgggcctcggtgtgc

SEQ ID NO: 6565 - DNA, 316 bp, Homo sapiens
aaaatgccaagataagaaacgatttattatagagagaagaaaaatttctcatccaaaatatagaaatctgtacaactttgccacaatcaatatacatgaactgtacaaatttacaccagttcataatttaccaaataaaagatgactaacaaagttcacaaaatagatggtggtttgtggaaaagacttttacccaattaagtacaaggaaagttacaaaccagacctccactttctaaaaataagaagtttactcagtcttagaaaactacaagctagcaaatgtacagagagctggctggtgctaacaccacag

SEQ ID NO: 6566 - DNA, 271 bp, Homo sapiens; identical to SEQ ID NO: 419

SEQ ID NO: 6567 - DNA, 157 bp, Homo sapiens
cctatcaacctaagcaacagaaataatctgacactaccttatcaggcagattggggaggggagggtgtatctagctctagttcaaattatttggaagtgttcccttgagaaaacccaccagcctaagaagctctggccccaagcttgtcactagcag

SEQ ID NO: 6568 - DNA, 522 bp, Homo sapiens
  misc_feature (1)...(522): n = g, a, c or t
ngcatntaataactacaagttccttgcaactagattactgatattggncngaacaaccatccaagcccttaagagggctntttttcaaaggacacccaatatcatcagcaggttcttggctctagcacttctacttttgtggaactccaaatctcagtaacaccgtcattctttagtttannctgaaatgctgaacatgtgaatggtgaaaaagccgttattcggaatgaagatattctgtctctcctagtncctaaacgttagttgagtattacaatccctgcattcacagaaattattactgaggaagataagactaaaaattaaattattgacgttatgaataaagagaaaatggttttctaataaggaatgaatagtggaatacaacttcagatagaatgttgattccaagaaagccccttggaggaacttctactggatacttaaagactgagaacccagccagatacagggaaaaaaactgggntgaggactatttcaggcaaanggataaaaaaa

SEQ ID NO: 6569 - DNA, 237 bp, Homo sapiens
ctgaaggacatcattgagtacgcagagctcaaaacagacgtgttccagagcctgagggaagtgggcaatgccatcctcttctgcctcctcatagagcaagctctgtctcaggaggaggtctgcgatttgctccatgccgcacccttccaaaacatcttgcctagagtctacatcaaagagggggagcgcctggaggtccggatgaaacgtctggaagccaagtatgccccgctccac

SEQ ID NO: 6570 - DNA, 381 bp, Homo sapiens
  misc_feature (1)...(381): n = g, a, c or t
cctggaaagaaatatcgtgtttggaatcaatccaggagtagccccaccggctggggcctacaatcttctgctctgtttggcttctagggcaaaaagacatctgtatattctgaaggcttctgtgtgacaggaaacccaagcctaagaaacaattaagtggttctcatctctaattaactgtgaaaccatttaatccaaacatgtaagcacacactcacttattaagtcacatacttttctaggtgctggggattgagaacgaatcgatgtaagattcctcctttagggcagagacagaccactgacaaatacncagatagacnaggaatttcccatggtaaaaagggatattagtaattaagaagaccnngagactnaaaa

SEQ ID NO: 6571 - DNA, 262 bp, Homo sapiens
aaaatgcatgtattataatcatataatcataactgttgttaattcttgattatatacctagggacaatgtgtaatgtaagattactaattggttcttcccaatctcctttcagattttattaggaaaaaaaataaacctcctgatcggagacaatgtattaatcagaagtgtaaactgccagttctatatagcatgaaatgaaaagacagctaatttggtccaacaaacatgactgggtctagggcacccaggctgattcag

SEQ ID NO: 6572 - DNA, 379 bp, Homo sapiens
aaaatacaatagaattaaaatgtaaacctcaaaaaaggggtgaggaatggagggaagatatgtgagtaggccaggacagaatgagagcgtcgttgtgggttcctgagacaacagttatccaatgtcattgttatttttaatgaaattcaaggaatttgcatttattccaaattggaaaagatgtgaaccaggaacaacctgcctgacagtttatgtatctttggtgattttcctttgaaccatgggaaaaatcatgtttatcttgtagtttacattgtaattctcatccactcctctgtgaagacgtggaactgtgccacccagaacctcctgcaagagaagacttgcttgcccaactgagggggaatgaagtaagcag

SEQ ID NO: 6573 - DNA, 101 bp, Homo sapiens
  misc_feature (1)...(101): n = g, a, c or t
ccacgctaagggcgaattccagcacactggcggccgttactagtggatccgagctcggtaccaagcttggcgtaatcatggtcatagctgtttcctgtgan

SEQ ID NO: 6574 - DNA, 393 bp, Homo sapiens
  misc_feature (1)...(393): n = g, a, c or t
nctggagagagatcaatatgctgaacaaataaaaggagggagggcccagtggcagcagaggatgaggaaaatgtcgcaggaggtttgcacattgaaggaggagaagaagcatgatacgcatcgggtagaggagctggagaggagcttgtccagactcaaaaaccagatggctgagccactgcccccggatgccccagcagtgtcctcagaggtggagctgcaagacctgaggaaggagctggagagagtggcaggagagctccaggctcaggtggaaaacaatcagtgcatcagtctcctgaaccgtgggcaaaaggagagcttcgcgagcaggaggagangcttcaggagcagcaggagangcttcgggaacaggagaagangcttcagcag

SEQ ID NO: 6575 - DNA, 249 bp, Homo sapiens
  misc_feature (1)...(249): n = g, a, c or t
ggtcttttgcaaaatgaaaagaagcctgttcccaagatgaaaactttattctcaaacatgacagagcgttccttttatcaatggcnnatcgagggaaacataccaatggttcccagtttttcataaagagtgttacaccgtgcgctccaaagagttgccgtgtcagagcttcaccttgggtgaaggaagatgggcaggaattctggaaacagaactcctgagacctacctctgcctgcctaaaaanggg

SEQ ID NO: 6576 - DNA, 335 bp, Homo sapiens
ccaagaaaagattagcagaaactcaagaagagattagtgctgaagtagcagcaaaggcagaacgtgttcatgagttaaatgaagaaattggtaaattgtcagccaaggtggaacaactaggagctgaagggaatgtggaggaatcccagaaagtaatggatgaagtagagaaagcacgggcaaagaaaagagaagcagaggaagtttatcggaattctatgccagcttccagttttcagcagcagaaacttcgagtctgtgaagtctgctctgcctatttaggacttcataataatgacagacgactggctgatcattttgggggtaaactgcac

SEQ ID NO: 6577 - DNA, 274 bp, Homo sapiens
ccaggcatggaaccagcaaggatttaatcagacacagtcttctgcaccatggatgggaccaaattatggagtgcaaccgcctcaagggcaaaatggcagcatgttgcccaatcagccttctgggtatcgagtggcagggtatgaaacccagtgaataaggactccagaatctaaagccagtggcttgaggctacagggagtgtagtaaagccgttgtttacttaaagatttatcaaatcagtcagtgcaaatgtcagatacaatgtatttattt

SEQ ID NO: 6578 - DNA, 687 bp, Homo sapiens
  misc_feature (1)...(687): n = g, a, c or t
gctgtgcttttcacatcaagttggcttagttcttggaggaaagtcttagtgactaaaattgtacacagatcacaggacaagagaactagtctaacaaattcaataagaaatcaggacaactgtagactatataaaaactgtcttagaaaattatttacaactttatcatagtgtaaatactctaaatgtaaaataaatctatggattttatataaaaatactccaaagtacaaatgtaagttaaatgctgaataaaacattttcaccttttccagtggatgctattactaagactataatctaggtgtcaaaacttaaagtgataaccacaaagcaatgttttcttaatcactcataattttacatttgttagtagtcatcacgaggtttagagttccactgaaaaagtctcatttttacaaatgcaactcatacactttccttcatggaccctttctctgtttaacacatgttaaaaaagtaaaacaaaattcttagtcaaaagttgacatgctatgtgaagcatataaattgnaaaattatcagtcttaaatacctagttgattctctttacaaaagaaacagtcatgtaatacatcagaaaatgcaaagcacactgctacaaggnacctactcaatctaaaaataatggtccccacttgggaaaatggtaagcactaaatcttt

SEQ ID NO: 6579 - DNA, 313 bp, Homo sapiens
ctgaagaaaaaagcagtcatcgattttaagtccaatgggcacatttatgacaatcggatagttctgaatggcatcgacctcaaagcatttcttgatagtctaccagatgtgaaaattgtcaagatgaagtgtcctgatggaggagacaatgcagatagcagtaacacagctcttaatatgcctgttattcctatgaatactattgcagaagcagttattgaaatgattaaccgaggacagattcaaataacaattaatggattcagtattagcaatggactggcaactactcagatcaacaataaggctgcaa

SEQ ID NO: 6580 - DNA, 285 bp, Homo sapiens
ctgtttccaggagatcagaaaagggtaaatgaatactcaagatttacagcgtcaaaaggctatgttgaggataattcttatgactatgtaaaagacaaggtagtgaaattgtgagggccctgggcccggccactcacagaatgactgaagcatgctgcagtggagaactggaaatgtatctcttgttgccctccatctccacccaccctcaagactgggacttagaattcccacgtccagcactgttgtagatgggaggtacgttgtgctgaactgctgcgctgg

SEQ ID NO: 6581 - DNA, 385 bp, Homo sapiens
aaaagttaacttgaaaatcctcgttgataattcagcagcatgcttctggtcagcctatacagtctctgtcctggtgaggagcatgatcaccaacaggcaagatcttctggccttgaagtttcgcttgagttaaaagagctcatctcaggtaagtaacaggccaagaatggtgggcaccgtgaccactagccaacttgcaatccattctactccaaaggaccgggccagggtacagggtggactgaggcagaccgtgccattcttgctgctcacagaattgctgacttggcaagtataacacctggagtaattatgtggcataagggtggtttcaagcacactgttctggagctcctttgggaagggccttttgtccccataccag

SEQ ID NO: 6582 - DNA, 332 bp, Homo sapiens
  misc_feature (1)...(332): n = g, a, c or t
aaaagaggtatgagggctgggcgtggtggcttatgtttgtaatcccagctacttgggaggctgaggttgcagccaagattgcgccactgcactacagcctgggcgacagagcaagactctcaaaaggaggcatgaaatgcacctcaatcttttgctccaagtctgccaaagattgtcaaaccctccctgttaaaaaaaaaaatcagtttacctactctcccttctatataaaggaccctaaaattaaatgtcaatgccaaaatgcgaagtgcanatcgtnttctctccaaataanagttacttggaatccttaacaaatccaaggagaanaa

SEQ ID NO: 6583 - DNA, 390 bp, Homo sapiens
  misc_feature (1)...(390): n = g, a, c or t
nctgagagactctaaatccagtgacaagtctgtctgcctattcaccgattttgattctcaaacaaatgtgtcacaaagtaaggattctgatgtgtatatcacagacaaaactgtgctagacatgaggtctatggacttcaagagcaacagtgctgtggcctggagcaacaaatctgactttgcatgtgcaaacgccttcaacaacagcattattccagaagacaccttcttccccagcccagaaagttcctgtgatgtcaagctggtcgagaaaagctttgaaacagatacgaacctaaactttcaaaacctgtcagtgattgggttccgaatcctcctcctgaaagtggccgggtttaatctgctcatgacgctgcggctgtggtccag

SEQ ID NO: 6584 - DNA, 358 bp, Homo sapiens
ctggacgtgcagggaggtgaagggctccacgcggatgaggtagtgcatcacgcctgctgcattggagtagtgggtgccatagtggaacttgtcaatggtccctgctgggtcctcaaagctttcatacttctccctcacgagctgggcatgcttggggttcaccacaccgatgggcttagacaggtcccggaagacggctgggttgctgaggtccagggttggggacacgtagtcctgcaggacccaggggaacacagggtactgagacaggtcattgtaggtccgccccgcaatggtgttgagttgcatcaagtactcgaagttggatatctcacgctgtacccatttctgggtaagg

SEQ ID NO: 6585 - DNA, 449 bp, Homo sapiens
  misc_feature (1)...(449): n = g, a, c or t
nctggcagggcagggtcagcctccttggggggaaggtgctgacacaatgaggtcaatgacagactggcgccccacccacgcggggcactcatggctatgttcccaaccaaggccaattaggtatcaattaacaaggacactcgcccaaccacacacccctgtgtagcacagaagcttgagagccaccattcatggggcccatcatggcagcagactaagcagcctcctgcctccccttccttctaacttcccaagctggtcatggagctctgtgcacggcaccccacatcctcgtctgctcctgtgactcctaccctggctcagcctctccctgaagttggcttgacccacactagattccagaatgagtctccaaacctccaggctgacagtccctccctagctccaaactatgctgtgaccatgacctcacacggagggccacctgg

SEQ ID NO: 6586 - DNA, 317 bp, Homo sapiens
ccagtatggaatccagaaggaccgagtggataagagcgctgtcggcttcaatgaaatggaggccccgaccacagcttataagaagacgacgcccatagaagccgcttctagtggtgcccgtgggctgaaggcgaaatttgagtccatggctgaggagaagaggaagcgagaggaagaggagaaggcacagcaggtggccaggaggcaacaggagcgaaaggctgtgacaaagaggagccctgaggctccacagccagtgatagctatggaagagccagcagtaccggccccactgcccaagaaaatctcctcagagg

SEQ ID NO: 6587 - DNA, 263 bp, Homo sapiens
aaaatctagatctctctcattcatttcaatgtatttttactttaagatgaaccaaaattattagacttatttaagatgtacaggcatcagaaaaaagaagcacataatgcttttggtgcgatggcactcactgtgaacatgtgtaaccacatattaatatgcaatattgtttccaatactttctaatacagttttttataatgttgtgtgtggtgattgttcaggtcgaatctgttgtatccagtacagctttaggtcttcag

SEQ ID NO: 6588 - DNA, 514 bp, Homo sapiens
  misc_feature (1)...(514): n = g, a, c or t
naaacttaattaaagagcttgacaagctctgcatattcatgtgtcataagcagtatgtgacaaaaaaaactgtgcagtatataccccctcacgaaatttagtttggcagggaaaacaagatgcacatgttattataaattagaaaatggaagagaagtagaaataaatccatgagtattatatataagtaacagaacaaaaacaacaggataatgtatcccccccaaaggcccagtagagaccatcaaagctcattctgggggtagtcaaggagggagtggagggagaaaaagaacgcagaccttcaaccactaatgaaagaactgaaacatctgtatgtagaaaaaaggtaaaatcaactcactatcatcttcagccttttggttatctcatttaatggtcacagttaagtccgtgagtagggtttttgtacttgaagttcaaatagaagattaagataagcaacttcctcaaggtaagcaaactaattaatagatcaaggttttgaactttt

SEQ ID NO: 6589 - DNA, 331 bp, Homo sapiens
  misc_feature (1)...(331): n = g, a, c or t
ggcatgcannggncaggtccttatgacagacctggggctggtagagggtataacagcattggcagaggagctggctttgagaggatcaggcgtggtgcttatggtggaggctatggaggctatgatgattacaatggctataatgatggctatggatttgggtcagatagatttggaagagacctcaattactgtttttcaggaatgtctgatcacagatacggggatggtggctctactttccagagcacaacaggacactgtgtacacatgcggggattaccttacagagctactgagaatgacatttataattttttttcccgctcaa

SEQ ID NO: 6590 - DNA, 236 bp, Homo sapiens
cacagccccagaagcgagaggagcaaaccaagaaggagaatgaagaagacaaactcactgactggaataaactggcttgtctgctttgcagaaggcagtttcccaataaagaagttctgatcaaacaccagcaactgtcagacctgcacaagcaaaacctggaaatccaccggaagataaaacagtctgagcaggagctagcctatctggaaaggagagaacgagagggaaagttt

SEQ ID NO: 6591 - DNA, 343 bp, Homo sapiens
caggagtctgcctacctgtcgccctgaccgcttgtggatggagaaggggagagcatctaggcaggcaaacagaagggaagtggagttaaacctctggcatgaagtctgggagtagggtaggctagggggtttcttctatgacacttgacccttccatgctggttcccaagcctattggaggaatgtgggtgtggccgaggtgatggcaagaaaggtgcaagaaagtgagcagtctgcctgtgagtgagcacagatgccggggtgtgtgtgtgtgtgtgtgattttcactgtggggtgtgtctgtgagagctagctgccttacccctccttggcacatagtagg

SEQ ID NO: 6592 - DNA, 297 bp, Homo sapiens
  misc_feature (1)...(297): n = g, a, c or t
nccatcaggaaggtgaaagaggtctttgggacaggggccatgagacacgtggtcatccccttcacccacaaagaggacttagggggccaggccctggatgactatgtagcaaacacggacaactgcagcctgaaagacctggtgcgggagtgtgagagaaggtactgtgccttcaacaactggggctctgtggaggagcagaggcagcagcaggcagagctcctggctgtgattgagaggctggggagggagcgagagggctccttccacagcaatgacctcttcttggatgcccag

SEQ ID NO: 6593 - DNA, 284 bp, Homo sapiens
ctgtactgggcatctcagaatcaccgggaaggctgaaggggtagaattggaagacgggcagaaataacggtcgctaggtggttgcaccagaaccaaaatcatgctagagaatgaccctaggaaaaccactgttgctgctgacggggctgagcacgacaccactgatggcattggggcaggttgcgttccctggaccaggatgtttctgtctgcagcagaatttctctgctgagtcaccaccacatgaccgtaaatccaaggtgacatatctatctccagcctgg

SEQ ID NO: 6594 - DNA, 236 bp, Homo sapiens; identical to SEQ ID NO: 6590

SEQ ID NO: 6595 - DNA, 293 bp, Homo sapiens
  misc_feature (1)...(293): n = g, a, c or t
ctggtacacggcagggtcagggttctggatatcaggtaaaacagtcaattgtgtcccagatccaaaggtcagttgccttgcagaaccagaagactccatgtcacccacgaggcagtagtacacagcagtgtcgctcagggaaacccggggcaggctcagagtgctggactttctgtcggcagggataaacagggaggccacttcgtttgtaacttttgncttgnatccttgaataataaatcgtggtccttggctgggaaactgttggtaccacgtgatataatcatttgtag

SEQ ID NO: 6596 - DNA, 286 bp, Homo sapiens
ccttgctgaccctgtggcctttagcctcagagacgaatcgacaccctcaactcagatggatacacccctgagccagcacgcataacgtccccagacaaaccgcggccgatgcccatggacacgagcgtgtatgagagcccctacagcgacccagaggagctcaaggacaagaagctcttcctgaagcgcgataacctcctcatagccgacattgaacttggctgcggcaactttggctcagtgcgccagggcgtgtaccgcatgcgcaagaagcagatcgacgtgg

SEQ ID NO: 6597 - DNA, 371 bp, Homo sapiens
aaaaaatgtgagaagagaaaaaccaggcaggaagcccattttgcgggatagggcaccaggaggtgaagaatgtacacatgtacagttgaggattagatgaatctgagcttgaaaaaggtaataccatgcacaggggaattttctaaaccaaaccacagagatcagtcaattccaatgttttctttctagactgaatgttccagaaatcatctctaattaaggatcccaaaagataatgtacaaaattctaaaaagtaaacagagataattttggataagctgagtaaaatcatcttctgaatgacagagttttatcttgaggctctccacttcacaataattataattaaaaattatgcatctgaatctca

SEQ ID NO: 6598 - DNA, 425 bp, Homo sapiens
aaaagagcctagaacctgggtcctagtttgcacctagaatatgaggcaagtggcgagagtgatcgtgttcctgaccctgagtactttgagccttgctaagaccacccagcccatctccatggactcatatgaaggacaagaagtgaacataacctgtagccacaacaacattgctacaaatgattatatcacgtggtaccaacagtttcccagccaaggaccacgatttattattcaaggatacaagacaaaagttacaaacgaagtggcctccctgtttatccctgccgacagaaagtccagcactctgagcctgccccgggtttccctgagcgacactgctgtgtactactgcctcgtgggtgacatggagtcttctggttctgcaaggcaactgacctttggatctgggacacaatttgact

SEQ ID NO: 6599 - DNA, 369 bp, Homo sapiens
ctggtcttgaattcagcacgagagaagagggacatggagcagagacacgtgctgctgaaacagaaggagctgggtggggaggagccagaaccaagcttaagagaggggcctggtggcctggtgatggaaggacatctcttcaaacgggccagcaacgcatttaagacctggagcagacgctggttcaccattcagagcaaccaactggtttaccagaagaagtacaaggaccctgtgactgtggtggtggatgaccttcgtctctgcacagtgaaactctgccctgactcagaaaggcggttctgctttgaggtggtgtccaccagcaagtcctgcctcctccaggctgactcagagcgcctcctgcag

SEQ ID NO: 6600 - DNA, 374 bp, Homo sapiens
  misc_feature (1)...(374): n = g, a, c or t
ctgagagactctaaatccagtgacaagtctgtctgcctattcaccgattttgattctcaaacaaatgtgtcacaaagtaaggattctgatgtgtatatcacagacaaaactgtgctagacatgaggtctatggacttcaagagcaacagtgctgtggcctggagcaacaaatctgactttgcatgtgcaaacgccttcaacaacagcattattccagaagacaccttcttccccagcccagaaagttcctgtgatgtcaagctggncgagaaaagctttgaaacagatacgaacctaaactttcaaaacctgtcagtgattgggttccgaatcctcctcctgaaagtggccgggtttaatctgctcatgacgct

SEQ ID NO: 6601 - DNA, 324 bp, Homo sapiens
aaaactcagtgaggacttagatgggaaagaatgaggtaaatacaaaggattacaggacaacaactacagcgttgtgtactgtgggaaggggagttgggcactcttggaggactcctgctgaaggtggtcagcctgcctgacaatggaagacatacttgaatggggagcagggtatgtgctttcatatgaaaaaagagctgatgttaaaactcatttggtgaggtcaacgttgtcacataccttcacataagggatagtatattttgggttgcagtcaaacttgtgctcagactggtgaaactgagagtcaggcttttacatttt

SEQ ID NO: 6602 - DNA, 336 bp, Homo sapiens
ccaggaactgaagcgcaggagcccctcccggccattggtggcctcttcctcagggaatggcagcagaggagtggggggaagcctcgtggaagcacagaatctcttgagtgactccaccaactccccccgcccattcatctccatgaagccccgagaccagcacacaaagctggggggactattgagtagaggctgggaaccaggagaagagaaagcaagaagaaaaatattgaggaaaatgaaaaaaaaactgacatgttgggtagaggatcggggttaggggtaaggctcagtatcctccatggggaacgcgagtggggacaggggggccttcag

SEQ ID NO: 6603 - DNA, 190 bp, Homo sapiens
  misc_feature (1)...(190): n = g, a, c or t
gagcagagagactgttcccttgggtgganaggtgtgggcatganagccacccattgccaagcagcaagaatgttcgtgcttttttccagagaggggaaccccactggtttttgtggaaacaatggaaacttacagatgcctgcctgggatgatgaggcacattcagaacaaatgctttttttttttttna

SEQ ID NO: 6604 - DNA, 232 bp, Homo sapiens
ctgaggtttctcctgctccagggccctcagttcctgcctcatctcatcactcagagttgtctggtccagccccaggcgtatgagtttgcaggcaggatgcctgagcccctcacagagcagtcgcacgccaacgtcatccaggttgttctgctgcaggtctagctccttcaggctggggctggcactaagcacagaggccaggtcctggcagcagtcagacgtgaggccacag

SEQ ID NO: 6605 - DNA, 230 bp, Homo sapiens
ctgccatgtgtgctaaggctggtgtccctttaccaccaaacctaaagcctgcacctccacctactatagaagagaaagttgctaaaaagtcaggaggagctactatagaagaactaactgagaaatgtaaacagatcgcacagagtaaagaagatgatgatgtaatagtgaataaacctcatgtttcggatgaagaggaagaagaacctcctttttatcatcatcccttt

SEQ ID NO: 6606 - DNA, 338 bp, Homo sapiens
ccattcctaaatgaggtgctgactctagatcatcacccttccttcatgcatggcagaacaatcaggaggctcaattagtgtgctatttgtcacactacttagtatcttctgtttaagtagcattttgtgcaattatttaagtcacatgagtcaccagaggaaaactgtaaataatggttagataaaatcacaagcagcctcttaattacccatagtgatcctgccacgaaacctaggaccctttagagggttcagtagagatttttttccagttctgccttgtaaaacttgattttttaagagatgaagtcaattatagggaaggagcccattcattt

SEQ ID NO: 6607 - DNA, 442 bp, Homo sapiens
  misc_feature (1)...(442): n = g, a, c or t
ccaccacccccccccgccacgccttanagcagagcagcccctcctctcatttggtgcagaaacagtcaagaggaaccattggcctagagctcctgtgaccgagagcgccacggaagcctggggatgatgtcgggcagcttattctttgcttggctttggtaactaggtggtcccctcaagcatcctcagttcctcttgctgtttatgaatctaagacaaggaagtcctatagaagccaaagggacagggacggaaaggacaggtcccaagggatggggctgtctttacttgtggaaaccaggaaattgctcctctcagccaaccaaggttgaccacacaccacccttccggagcagctcagtcagccctcggggacgagaaaccacaagccgcagagacgctgaggcccaggcaggtgaanaagaagtggctttgggttttt

SEQ ID NO: 6608 - DNA, 546 bp, Homo sapiens
ccagtcacttacttaattcctgtccttcagtgttccatctagagaattaagagatatgatgtataaaatagacatcgagggccattaagagagtaaatacttaaaaatacatgttatgaaagcaaagccaataatcactgtaggagtatgagttgcctaagggccaaaactaatgtaaataagagaaagtgtggatataaatgaccattgtttataaacagttatgaaaaatgctgtgacttgaaatctttcccacatctcccaagaaagtaggtaggagtttatcctttccgtaatctctttttaaccctgctgactattacagggcttgtttaatcacagtggcaagaattacatgtatcttacagtaaagaaacagaatactggaatcgttagagaaccctgatgtgttgacctggataaagtacaaaggtggaagagggaatgagttatgctgttaaaatctcaggctattctgttaatgttcctgctactatgaacccaacttttttttcccccttttgactccttgggcttcctctcctg

SEQ ID NO: 6609 - DNA, 468 bp, Homo sapiens
  misc_feature (1)...(468): n = g, a, c or t
ctggtctgatgtctccctgaaaagttctcgcttgtcacaagaacacttagacttgccttgtgccttagagtcagagctcacacaagaaaatgtggatactatcctagttgagtagcagcttctctttcagaatttttataccaattctgaaaaagaaaatttgcgtggcatttttaattcataaattattttcctcctcaagtttcattgactttttttcttcacagcttatccatggttttaaggttgtatatattagatcttctcataagacatattaatatgtggctattaaaatgtaacattcaattactactgtgaacttttcacaaacgaaataacaatttagaaatcagaaatcaatgtagaaatatggaaaccttaaatagttatttatagaattctaagtttttccagttatagaatcagtaaaatcaaattgaatataaagtaaatgaaatctgnttt

SEQ ID NO: 6610 - DNA, 506 bp, Homo sapiens
  misc_feature (1)...(506): n = g, a, c or t
ccaattatttccaatttttattttattcttaaaacttaagcatggtaaaatgttaagctgttttcatccactgatattattctactataaaaagcccttcttgagcagatttgatgataaaaaggagaacatttctaaggtataattagagaagctgttgcatgagaaatcatgtctccatctccattttgctatgcgttatctgaggattgtttctgaaagagatctatttaggcagtgtatgtatgtgtcagcatgtaaaaagtaaagaactgaaaatagacaaaccttgtaaatgcacttcaaaaccaattgtggctcaagtgtaggtggttccccaaggctggtaccaatgagactggggtttgggaattagttggtcatcatccctcctgctgcccagcagtggtcagtcatttttcatgagggatggactaggaaaatgaagtgtctattataaggagagtnctgtacttaaggagcaagtnactacaaacccagttcct

SEQ ID NO: 6611 - DNA, 240 bp, Homo sapiens; identical to SEQ ID NO: 326

SEQ ID NO: 6612 - DNA, 461 bp, Homo sapiens
  misc_feature (1)...(461): n = g, a, c or t
ctgtgcaacttggagcattttagcttggtaacactgatcccctttcaggtgagtattgggcttgtaatttgaatttgaatgagaaaccgtaatgtggctactggtaaggtaaaacggataaatgccccagaccaaaacagctcgcaacgaagtatgtttgccgtaaagtcacacagtccaggcttgataatcttctgagaaattgataaaagatgtgtgatgtagacatgagtagcaaggactaaagagataaattcattctgaaactgctttgaatattgtatgttgttgatgggttggaaatatgtcaccttaggaatgagtttgtttttttttaattggagttttaggagttggtaatatcgtggtcagtatatataggcttcacaagttatgtaatttgtagtggggacatggaatagacatttcatctgtgtcaccccgaggnggttttagggttt

SEQ ID NO: 6613 - DNA, 313 bp, Homo sapiens
ctgaaagagacagactccctggggaaaactaaatataaagacccaggatcaaacagggacacaaaagcaagtatcatgggaggaacttgaaatctctgtggacagcagaagctgacttcaactctgataattgtggcatccataaattgcaaatatagccctgaatagatacacacaaatgtctataatgaaggcccagcagaatggaatgtgtgaccatcttcaggaagaaaataatgaatacatgagtacaagaaaataaattacaaataaaagtcaaacttgaattctatatgtattaaaaatttcattt

SEQ ID NO: 6614 - DNA, 212 bp, Homo sapiens; identical to SEQ ID NO: 6127

SEQ ID NO: 6615 - DNA, 286 bp, Homo sapiens; identical to SEQ ID NO: 421

SEQ ID NO: 6616 - DNA, 274 bp, Homo sapiens
ctgacaagacacctacaccttcccactaccccttgtcctgcccctcagggattagcacccagaattccctgagctgctctccaccccaccagtccccagccctagaggacattggctgcagttcttgtgcggaaaaatccaagaaaaccccttgtgggactgccaatgggccagtgaacacagaggtgaaagctaatggcccacacctctacagcagccctactgattccacggacccccggcgacttccaggcgctaacaccccactaccagg

SEQ ID NO: 6617 - DNA, 314 bp, Homo sapiens
ttgttgcactgcaactctgcctcgaattgggctatgcccgagtatcctcagagtttagatgggcagtgtatttttgcttaagtagaagaatgtagttgtgccactgagaaggataaccagaaaaggttagatatatttgtcagttcacttttactcaaatttccattgagttacttaagaaatcagttcttcaaagtggatatgtacattacaggctctgtcacctacacatacacaggaatcttttgaagaataagatctgggtaatactggagtaggatgtaggaaggttaatgttgtatagatgatgtttt

SEQ ID NO: 6618 - DNA, 304 bp, Homo sapiens
aaatctgggaagctggggggacgagctgtgtatgacatagttcattttcagccatattcctggattgatgggtggagaagttttaacccaggacatgagcatccagatcagaactcatttacttttgcccccaatggacaagtatttgtttctgatgctctctatggacccaagttgagccaccttaacaatgtattggtgtttgctccatcaccctcaagccagtgtaataagccctgggaaggtcaactgggagaatgtgcgcagtggcttaagtggactggcgaggaggttggtgatgcag

SEQ ID NO: 6619 - DNA, 292 bp, Homo sapiens
aaaagacatcggtcagtaacgagcacgatgtggaaaaatgagagaagggacacattcaaccctggagagttcaatggctgctgaagctgcctgcttttcactgctgcaaggcctttctgtgtgtgatgtgcatgggagcaacttgttcgtgggtcatcgggaatactagggagaaggtttcattgcccccagggcacttcacagagtgtgctggaggactgagtaagaaatgctgcccatgccaccgcttccggctcctgtgctttccctgaactgggacctttagtggtgg

SEQ ID NO: 6620 - DNA, 175 bp, Homo sapiens
aaaattagggttcacaagttctttacgattagaacactgaagtgcatttccataaactaagtccaaagcacacagcagcaggtgataagaattgaccaaatcatcactaatcatggggaaattaccgctgtttccttcctcgctgctgacgaggttgctcctcttgagggtattt

SEQ ID NO: 6621 - DNA, 214 bp, Homo sapiens
  misc_feature (1)...(214): n = g, a, c or t
aaaattttatctcttattcagtaaaaaacaacttctttgtaatcgttatgngtgtatatgtatgtgtggnatgggtgtggtgtttgtgtgagagacagagaaagagagagaattctttcaagtgaatctaaaagctttgcttttccttggtttttatgaagaaaaaatacattttatattagaagtgttaacttagcttgaaggatctgttttt

SEQ ID NO: 6622 - DNA, 349 bp, Homo sapiens
  misc_feature (1)...(349): n = g, a, c or t
cctcgagggagattgccagcaccctgatggagagtgagatgatggagatcttgtcagtgctagctaagggtgaccacagccctgtcacaagggctgctgcggnctgcctggacaaagcagtggaatatgggcttatccaacccaaccaagatggagagtgagggggttgtccctgggcccaangctcatgcacacgctacctattgtggcacggagagtaangacggaagcagctttggctggtggtggctggcatgcccaatactcttgcccatcctcgcttgctgccctaggatgncctctgttccgagtcaagcggccacgttcagtcacacaggcccttgcttgg

SEQ ID NO: 6623 - DNA, 174 bp, Homo sapiens
ctgagcaggacctctgaaaccctggaccagtggtctcacatggtgctacgcctgcatgtaaacacgcctgcaaacgctgcctgccggtaaacacgcctgcaaacgctgcctgcccgtaaacacgcctgcaaacgctgcctgcccacacaggttcacgtgcagctcaaggaaagg

SEQ ID NO: 6624 - DNA, 298 bp, Homo sapiens
ccacaggaggacagaaagtgaaatgtcagccaggatcgctaaaatgtccttgagtcccagcagccccaggcacgaggatcagctcgaggtcaccagggaaccggccaggcggctcttcctttttggagaggagccatcaaaactcgatcaggatgttttggccgctcttgaatgtgcagacgtcgacccccatcagttcccggccgtgcacagatggaagagtgctgtcctgtgctactcaccctcggacagacagagttggcccagtcccgcggtgaaaggaaggttcaagtctcag

SEQ ID NO: 6625 - DNA, 481 bp, Homo sapiens
  misc_feature (1)...(481): n = g, a, c or t
ccactgcaatgactgtaattaggcccatgataacagcaattaaagtgaaaataaatctcttagatctttttagaattcactgtaacacttcattaattaaatgtattgaaggggaggattcccaaggtctgggcaaagttaccggaatccagattccttcttgagctcgaaccaacattacacttttcctggaatcaaaatgggagttaatacaagtgtataaatgacaattaatgcattggacagtttgattgttcatccaaattttgatatatctcactaacagcatgcaaggaggcttaacagaactctgtatggaaacaggttggaggtaggtaaagcagaatgtctggatctacgttgatactgagagagggagatggtagtggggacaacagacagaatagtttctgcttnccatacttgcagtccagacatggcaatagccaatttccaaagttctgggtggtctgggtcagaa

SEQ ID NO: 6626 - DNA, 360 bp, Homo sapiens
  misc_feature (1)...(360): n = g, a, c or t
cctcttaatggatttcaggcacaagataatttgtggtttcttctactttatccctactgcaattaattccacttttcaaatcccaaactaggaaggtgctgatattcccttttcaattgatatgctttgctacaaagcattagaaaataatcaacattttgcccactcccccaaataagaatctttttagaaggcatgacttcccaatggagatttacacaggccttgtaaatagaacatcacccaaatgcacagaggcactaagaaaaagccggagggtactgcttaccattttaggtgcggncacccagacttattcaaaactagatttcaaaagaaaaaaaaaaattttcactttgg

SEQ ID NO: 6627 - DNA, 372 bp, Homo sapiens
  misc_feature (1)...(372): n = g, a, c or t
tcttggcacctctaattgctctcgtgtattcggngccgcgactttcacgatggctcgcccaaccttactaccttctgtcggccctgctctctgctgccttcctactcgtgaggaaactgccgccgctctgccacggtctgcccacccaacgcgaagacggtaacccgtgtgactttgactggagagaagtggagatcctgatgnttctcagtgccattgtgatgatgaanaaccgcagatccatgccccatgaagagggacaaagaatgggatataggagtgcacagcccagcctgacctgtgacatctctgtgnttcagncactgtggagcaacatataggcaacattttcatgtttantaaagtggacct

SEQ ID NO: 6628 - DNA, 155 bp, Homo sapiens
cctatcaacctaagcaacagaaataatctgacactaccttatcaggcaaattggggaggggagggtgtatctagctctagttcaaattatttggaagtgttccctgagaaacccaccagcctaagaagctctggccccaagcttgtcactagcag

SEQ ID NO: 6629 - DNA, 334 bp, Homo sapiens
aaaatgaattccggctcaaggagaatttgtaactttagtaggtacgtcatgacaactaccatttttttaagatgttgagaatgggaacagtttttttagggtttattcttgaccacagatcttaagaaaatggacaaaacccctcttcaatctgaagattagtatggtttggtgttctaacagtatcccctagaagttggatgtctaaaactcaagtaaatggaagtgggaggcaatttagataagtgtaaagccttgtaactgaagatgattttttttagaaagtgtatagaaactattttaatgccaagatagttacagtgctgtggggttt

SEQ ID NO: 6630 - DNA, 420 bp, Homo sapiens
ctgcttgggattagaagtttttactgactgaaaaaacagtgggtcccatcctctctgaattttccctgaggagagtcagttcaaccttattacagcagcttttacaaatctatctctaaagtctccctgccgactcaagtttccactgacttgtccccctgcatgcgatgccatgaccttcacaccaacatccaaccacatgtctctcctttggaatctgtgtgccccaccaccaggaacctgttaggcaaaggtggcaccatctccctctgtaaggctgcagcgggtgtctgtcagcatctgacaggggccctttgcgtgctgtgtgttgaatgttgcacttgctgaatgcatgcagttcccgtgagcctgtggctgagctgaaactgacagcgctctgcagcccgatccatcttccag

SEQ ID NO: 6631 - DNA, 309 bp, Homo sapiens
aaaacaacttttaacagatataagatcagtatcattcacattcacacaaacatacacacactttagaaagactgtgtgcttggcttcggcatatttaatatcattaaagaatatatagaatcatccttttatcataaggaatttacatcattgttttctcaaaagctgctattttagattgaaacagcattcagaaaaaaagtacatttcagatggtcagcatcaggatttactacagactttgtaaacagatatctataaataaataaactagggtggagaaaagaatatcctgaggtggctctgtgg

SEQ ID NO: 6632 - DNA, 315 bp, Homo sapiens
ccttcctccgcttccgctgcacctcttccttgtctgggggcagaggaaaatgagattgagcccagttattgtgtcatgcctcaggggcccttcccagaagagccctcagggccggctcctaggaagcacctcctgggaccctcgcacttctgacttggctcatgcatccccacatctagctcttgggaccttcttctagcccagcctggccccccgccagcaccctgaggtcctcagcccagctccaccttccaccagagggtaataggtgaactgtttggaatcagacacgtcccctcctcgcttgcgtttcag

SEQ ID NO: 6633 - DNA, 306 bp, Homo sapiens; identical to SEQ ID NO: 264

SEQ ID NO: 6634 - DNA, 129 bp, Homo sapiens
  misc_feature (1)...(129): n = g, a, c or t
gtaggaagtgaagagaaccagggcatctggtcaggaggatattgtaatgattcagataagagatggtggcagtggaggtggtaaaaagtgggtagatactagatgtctttttttttttttnaaanaaan

SEQ ID NO: 6635 - DNA, 341 bp, Homo sapiens
atctcaaacaaacaaacaaacaaagaaaaaaaactcttgtctccttaggatatgttacctgctccactgcagactagagaaataaatgtgtattgaaccttttactgcaaacttgaaaatgctagaaaaccaagcatgaagaataaatacatggtgggaaacacacaggcatgtgcatatgcatatacattgtaagttagtaagttagaaagctagctttgttgtatctgaacacatgaatcttttttggtcagtgtaggaagcacagccagatcctataggaatgaatacctcaaatctgttgtctgagattctagagattaaaccactgtgccattttt

SEQ ID NO: 6636 - DNA, 367 bp, Homo sapiens
  misc_feature (1)...(367): n = g, a, c or t
aaaaaacttttccaatagaaaatgaaatattattgaaaataatatctattttttagctttcagcaattgatggtgctttgttgtggtgtctgctggaagtctactgccattatagggaaccttgcttgttagcttctctagatctctattctaaacaatctgttagtgatgataaattctgtaggagggtctattctgagccgttaacttcctgtaaggggaaaatgggtgggttaccagaaataccattgaagcagggtgggctgtggggtggaaggttggggtatttgtcttgagaattaaaaactacgaaacacttttgtacacaactgattttttacctgnccgggcggccgctaangcgaat

SEQ ID NO: 6637 - DNA, 262 bp, Homo sapiens; identical to SEQ ID NO: 6571

SEQ ID NO: 6638 - DNA, 155 bp, Homo sapiens
ccatggagacagtggcccagcagaaaagagactactaccagcccctcgccgccaaacggactgagattgagaagtggcggaaggagttcaaggagcagtggatgaaggagcagaagcggatgaatgaggcggtgcaggcactgcggcgcgcccag

SEQ ID NO: 6639 - DNA, 171 bp, Homo sapiens
ctggtgcttgtctggctgggtgaagtgctaggtgtcattggggactgtccagagctagttcagcgctccttcctggtggctagtgttctgcctggccccgatggcaacattaactcacctacaagaaatgctgacatgcaggaggagctaattgcctccctagaggagcaa

SEQ ID NO: 6640 - DNA, 274 bp, Homo sapiens
ccaggcatggaaccagcaaggatttaatcagacacagtcttctgcaccatggatgggaccaaattatggagtgcaaccgcctcaagggcaaaatggcagcatgttgcccaatcagccttctgggtatcgagtggcagggtatgaaacccagtgaataaggactccagaatctaaagccagtggcttgaggctacagggagtgtagtaaagccgttgtttacctaaagatttatcaaatcagtcagtgcaaatgtcagatacaatgtatttattt

SEQ ID NO: 6641 - DNA, 397 bp, Homo sapiens
  misc_feature (1)...(397): n = g, a, c or t
ctgcatagtgcaaaggggtcctcccacacttgtcctttttatggaaatctgctccgctgctctgcaagagttttatacattccacattacctcctgcagcagcagcatgaaggcacgttcttccaaatttatctggggtgtctatttcaaagcccgatgataacaactttctgcagcagtcagagtgagcatttagggcagctaaatgtaaagggaacatgctatggattccacacttggctgtgtcagctccgctggttattaaggtgttaatcaaaagctcatgaccgtatcttgcagccacatggagaggagtgttgccgtccttatccacacagtcaatttcacctccattctgaatgagggtctgtgaccgtgtggnaccttccatggacag

SEQ ID NO: 6642 - DNA, 270 bp, Homo sapiens; identical to SEQ ID NO: 2914

SEQ ID NO: 6643 - DNA, 195 bp, Homo sapiens
cctgctctctttttctccagggtcagaaacaggaccgggtggaagggatggggtgccagtttgaatgcagtctgtccaggctcgtcattggaggtgaacaagcaaacccagagggctccactaggacttcaaattgggggttggatttgaagacttttaagtttccttccagcccagaaagtctctcattctagg

SEQ ID NO: 6644 - DNA, 244 bp, Homo sapiens
  misc_feature (1)...(244): n = g, a, c or t
ngtctggncctgcanacaggtgctcttgtcctgagtgacaacggcatctgctgtatcgatgagttcgacaagatgaatgaaagtacaagatcggtattgcatgaagtcatggaacagcagactctgtccattgcaaaggctggggtcatctgtcagctcaatgcgcgcacctctgtcctggcagcagcaaatcccattgagtctcagtggaatcctaaaaaaaacaaccattgaaaacatccag

SEQ ID NO: 6645 - DNA, 343 bp, Homo sapiens
cctgaaggacccagggccctctggctggatgcgtttgcctatcaggacccagaattacttacagacctgtttagggctaggcttggcctctttcttgagctcatctggaggggtgtgacaacactcattcttcatccttattctccctggctgtgggcaacacttgtcctcagtgtcaccagatggtcctcctctgtgcccatgacccctcagcagccaaggctggccctgccagataaatgtgtgtgcccatgatcacacccaggggcacaggccacatacgtttccctgaaaccttgggctccagccttcatcccgtccatgtgggaaggaacttgggtcc

SEQ ID NO: 6646 - DNA, 306 bp, Homo sapiens
  misc_feature (1)...(306): n = g, a, c or t
ctggtgtgggtgagtgtcctcggggctggtgaggggacagcagcttcagtggaaacccttccctatgtgtggccgagggcctagaacacgtctgagcgggtcaggtgggttcttcccactggagggcgtggcctcaggctgagagtgaagacggggaaggggaggaagagaacagctcgggctcctgagaccagganccagacctggtaagtacatgaccttaggggctgggcctttgcctgnaatcccaacgctttggaggnccatgcaggaggatcggatcacttgaanccatgagttaaaacc

SEQ ID NO: 6647 - DNA, 471 bp, Homo sapiens
  misc_feature (1)...(471): n = g, a, c or t
aaatgttttacttctttgataaagcagagtacaatagaaaaaaaacaattagtttccagtaatatctatatctctaatcagaattaagtcttccaagacatattacctggaaataaaagcctgttacaataagcaaagcttcaaccagagcggctacttttcgtgccaggaaaaagttcatccctataggaggaatgatgtgctatgtaaaatggctgtaaggtcacagccttgagggcattggaagtatattatcctattccacattaagtatttcagcgaatttcaaacatcagtttatctgcaaccatgctggcaacctttaactgatatttcaatcaaccggtaaaaaataaattaagaaatcccttcacggatattcccgggatttacactgttaaaangtacactgttcattaacatgtaattctggttcagaattacctttgagactccttgctcaaaaattgg

SEQ ID NO: 6648 - DNA, 467 bp, Homo sapiens
aggtccttatgacagacctggggctggtagagggtataacagcattggcagaggagctggctttgagaggatgaggcgtggtgcttatggtggaggctatggaggctatgatgattacaatggctataatgatggctatggatttgggtcagatagatttggaagagacctcaattactgtttttcaggaatgtctgatcacagatacggggatggtggctctactttccagagcacaacaggacactgtgtacacatgcggggattaccttacagagctactgagaatgacatttataattttttttcaccgctcaaccctgtgagagtacacattgaaattggtcctgatggcagagtaactggtgaagcagatgtcgagttcgcaactcatgaagatgctgtggcagctatgtcaaaagacaaagcaaatatgcaacacagatatgtagaactcttcttgaatt

SEQ ID NO: 6649 - DNA, 338 bp, Homo sapiens
  misc_feature (1)...(338): n = g, a, c or t
aaaaagcatatgccaccttttttattaattattatataaaatgaagcatttaattatagtaataatttgaagtagtttgaagtaccacactgaggtgaggacttaaaaatgataagacgagttccctattttataagaaaaataagccaaaattaaatattcttttggatataaatttcaacagtgagatagctgnctagtggaaatgaataatatcccagccactagtgtacagggtgttttgtggcacaggattatgtaatatggaactgctcaagcaaataactagtnatgacaacagcagttctttgnaataactgaaaaagaatattgtttct

SEQ ID NO: 6650 - DNA, 366 bp, Homo sapiens
ctggaagaagaaaagaaagcaaacaatgagaaacagaaagctgaaagggagctagagggtcaaatccagagattgaacacagagaaaaagaaactaaatacggacctgtatcacatgaaacattctctcagatactttgaagaagagtccaaggatctggccggccgcctgcaacgttcatcgcagcgtataggagagttagagtggtctctctgtgctgtcgccgccacacagaagaagaagccggatgggttctcgagccgcagtaaagcacttctcaagcggcagttagagcagtccatacgggagcagatactgctgaaaggacacgtgacacagttgaaggagtcgcttaaagaagtccag

SEQ ID NO: 6651 - DNA, 287 bp, Homo sapiens
ccaagggtcgctcactgggcaggaacattgtcaaggccattcatgcttggaatagggtctctcttcagctctgaggcaaatctgttctctaattttcagatgacttcaaggggaacgtgtaccaccacccctctggtgcgtcacattgcttaggaagcctgctgtgtttatcactgggtggctgtcagggctgagatggagagggccagggcctggcgaggtggagcagtcggcccaggtgtcccagcaattgttgctggaacagggtctggaacccacaggagagg

SEQ ID NO: 6652 - DNA, 138 bp, Homo sapiens
ccatgttgaaggcaaggaagaaaaaatggaaatggcctgtgccagctatatatatcgccttttatgagggaaagcaaagctttctcagaaatcccaaatggattttcccttgacttaattgcctgaccagttaaatgg

SEQ ID NO: 6653 - DNA, 248 bp, Homo sapiens
  misc_feature (1)...(248): n = g, a, c or t
ctgctttgaaggctgcacagaaaaccttacttgtttccacctctgcagttgataataatgaagcacagaaaaaaaaacaggaggcattgaaacttcagcaggatgtaaggaaaaggaaacangaaattttataaaancacattgaancacagaagatgttaatttcaaaactggagaaaaacaaaacaatgaagtctgaanataaagcagaaanaatgaaaactttagaggttttgacaaaaaanatt

SEQ ID NO: 6654 - DNA, 305 bp, Homo sapiens
ctgagttcccttcccgaaggtcagctcggggctcccgacgatcatgcagaagtagatgccactgtcttccggcttcacgcttgtgagattgagaatgaaccggcttgcatcccgaaacacagctatcttctcctgttccacctcttcaccgtggatagtcccttttgcggaatcccagagggccaggaactcgtggtgactgtcactgctcggtgcctggcgctgtctcagccagtagatgcgcatgttactgagggagattttagcctcgcaggacagcatcaccatcttgttggtttgccctt

SEQ ID NO: 6655 - DNA, 236 bp, Homo sapiens
  misc_feature (1)...(236): n = g, a, c or t
aaaaaagactatgtagaaaagaggtctataaaattgtgcaaaatacccagcattaataaacccgtttcaagtattgccagcatgagcataacccacccatgccgggacctggcttgggagagaagtggaggggcaggctgggatcccttaaagagctctccatgggcaggggaaggaccaggctcccacttccactgtgctgcccaggaactgcacaggagctgaggctgnngggt

SEQ ID NO: 6656 - DNA, 357 bp, Homo sapiens
aaaacaggtacaaaatattgaaatgaccaacgttacatgatttcaagggttgtcctttctgtgcttttatctgtcacgacaggaaggtgtggaaagtttatatccttaatttgactactcttggatattaaaatctttctattaattaaaaagacttttagacaacctcttaaatggaattacactatggaaaacagggctcccccaaaaacacctaggcagaactgagagttctttgaaaaccattcccaataaaaactaaatgaaaaataaatataaaacaaagcttaaaaaaatatgcattacctgacaccaaccttttctggctgacaatatttattcatgaaaacatatcag

SEQ ID NO: 6657 - DNA, 343 bp, Homo sapiens; identical to SEQ ID NO: 6492

SEQ ID NO: 6658 - DNA, 298 bp, Homo sapiens
ctggtggctggtgacatcgtcctggacaagctaggggaaaggctagccatcctcctcaaggtgcgagacatggtcagcagccatgtggagcgagtgtttcagatctatgagcaacacgcagacacagttggcattgatgctgtcctgcagccttcagcagtgagcccctctgtggctgacatgttggaatggttgcaggatattgagagacattatcgaaagtcgtacctgaagagaaagtatcttctttcgtctatccagtggggagactaggcaaacatacaagctttgcccaagg

SEQ ID NO: 6659 - DNA, 453 bp, Homo sapiens
ctggtcaggtactggatctccgccttcccagcggagtttgacttgaacccggagttggctgagcagatcaaggagctgaaggctctgctagaccaagaagggaaccgacggcacagcagcctaatcgacatagacagcgtccctacctacaagtggaagcggcaggtgactcagcggaaccctgtgggacagaaaaagcgcaagatgtccctgttgtttgaccacctggagcccatggagctggcggagcatctcacctacttggagtatcgctccttctgcaagatcctgtttcaggactatcacagtttcgtgactcatggctgcactgtggacaaccccgtcctggagcggttcatctccctcttcaacagcgtctcacagtgggtgcagctcatgatcctcagcaaacccacagccccgcagcgggccctggtcatcacacactttgtc

SEQ ID NO: 6660 - DNA, 359 bp, Homo sapiens
  misc_feature (1)...(359): n = g, a, c or t
gtctacctgcagcacagcacactccctttgggcaaggacctgagacccttgtgctaagtcaagaggctcaatgggctgcagaagaactagagaaggaccaagcaaagccatgatatttccatggaaatgtcagagcacccanagggacttatggaacatcttcaagttgtgggggtggacaatgctctgttgtgatttcctggcacatcatggaaccgactgctggacttaccattattctgaaaaacccatgaactggcaaagggctanaanattctgccgagacaattacacagatttagttgccatacaaaacaaggcggaaattgagtatctgcagaaaactctgcctttcagcc

SEQ ID NO: 6661 - DNA, 368 bp, Homo sapiens
  misc_feature (1)...(368): n = g, a, c or t
cctcgggtgatctgcccacctcagcctcccaaagtgctgggactacaggcataagccactgcgcccggcctggtccaggttttctaagatgcaggctgcagattctgtgttctccagtggacacttgcagagganccaggaaggaccacaggtcccttttggaaggaacgttgggcctgtccccangaatgcacactagtatcctttctagtggagtgtctgaggctcacagcctcttgcttaccccaggctcanatcactgagccttagcannggtctctatcctgtttcaaggatgccaananccacaagacaaatggacgtttcagaaggaactctgacggccgagtgancancctgtcctgagg

SEQ ID NO: 6662 - DNA, 147 bp, Homo sapiens
  misc_feature (1)...(147): n = g, a, c or t
cctccaaaagcgagcctctaggtgcacatgtaactatgtgtcttctctgtgcatgcacatgttcaggtctgggcccacccatgagaaacaggagcacccgcagcagaccattttaggaatgtgagctctggggcccatcntgtgttc

SEQ ID NO: 6663 - DNA, 347 bp, Homo sapiens
  misc_feature (1)...(347): n = g, a, c or t
ccaagaacaaggcgtgtgccacagtcacgtagtgacacaggtcacatttgctttctgccagcagaagagactggactccagtgcaggggagtgtgcaaggacaggttctggggggtggaggcatctgtggacatcccagggcaggggtgagggccagaacatccctaggtcctgagactacagtttctccacatttagatcagacattctcttccaaggaaggaaaccaagagaggctggtgaaccgtctggtaatgacaagccctcacttttgcagccctcttggctggtccctcagcaggtcttccctatgaacctgcaaaggagacaggcaggaatganttcca

SEQ ID NO: 6664 - DNA, 168 bp, Homo sapiens
  misc_feature (1)...(168): n = g, a, c or t
cctatggaagaagaacacaaaggaactatatctgtagtagaagcccatcctaactactaagaaagccacacgataccctttagatttcacattagaattcctaaactgttagcctaacacctggccctcatnctgaccaacaggaagagganttctgaaccacccatc

SEQ ID NO: 6665 - DNA, 368 bp, Homo sapiens
  misc_feature (1)...(368): n = g, a, c or t
agggcgaattgggccctctagatgcatgctcgagcggccgccagtgtgatggatatctgcagaattcgcccttagagcggncgcccgngcaggnccatactaaccctgntaaaatgcccatnttacctggatggcnacccancantgctcctgcccacctgcccctnaatcctcctagaattcagnccccaattgcccagttaccaataaaaacttgtacaccanncccagggacagtctcaaatgcaaatccacagagtggaccaccacctcgggtanaatttgatgacaacaatccctttantgaaagttttcaagaacgggaacntaangaacntttacgagaacagcaagagagacaacggatc

SEQ ID NO: 6666 - DNA, 396 bp, Homo sapiens
ccacataccaagatgtgaacatattcttgtcttatataagaaaaggctcaggttgtatgccacaaactttgaattaaattccagggaaatattgctttggtaacatgaacaatttgtaccacattccattaaaaaaagatttaataaaatccctcaaacagcacttttctacttgtttcggagtacacaattcccaaattagcacaaacaaaacaaagcaaaaaaagaaaaacagacagaatgtaaaatgaaggttgctacttttatgatatcacttccctttcccttccttagctagtgttcttttcctttcccttaatagtaaaggatggtgaatagaaaatgacctattcttatccccatccatttgcttctaggattcctgcttaaaccaaa

SEQ ID NO: 6667 - DNA, 234 bp, Homo sapiens
aaaaagtcttcaggcagagtaatcatgttagaggtggtattcgatggaagaaagtttagagagttaggagtgggggtagaattctagaatttataagagtccaggaagcatagcagtcaggggcaaaaattagcgtaatatggagtaggcaatagaggagctactggagtcagaagtcactgcagagtgcaacataggaagatggactcctagcttacatgagattccctgcag

SEQ ID NO: 6668 - DNA, 245 bp, Homo sapiens
  misc_feature (1)...(245): n = g, a, c or t
ctgcaagaaaacatacctgtcccccaaaagttgtttttatgcactgtgtctcgtctangcaagcgcttncaagaagccaggattcacttgagaatgtgtctctctctggcaggtctcgacatgacaactactgtgtangtgagggagggaactttcaaagcactttgttttcccacttactatgtgtgagaagttgctcctgctctagatctcatgtgccagtactcaccaatttgnaaaaggct

SEQ ID NO: 6669 - DNA, 247 bp, Homo sapiens
ccttcccagtccccacaggtccccgtcctgataggtccctggagctccactggccctcaggtaaactccaagcgccacactactgtctacaaacgctggtgatctgggcctgcagcccttctcgccttggtggaggcccctccccacgctctggaaagtgcctcaggccctctcagctctggtctctgcaccttccattcccctcacctagatcactcctctaccaaactcctgcacaccttccagg

SEQ ID NO: 6670 - DNA, 225 bp, Homo sapiens
aaaatttccttgaataatccatgaaaggaataattcaaatacagataaacagagttggcagtatattatagtgataattttgtattttcacaaaaaaaaagttaaactcttcttttctttttattataatgaccagcttttggtatttcattgttaccaagttctatttttagaataaaattgttctccttctaaaagtcaaaaaaaaaaaaaaaaaaaaaaccc

SEQ ID NO: 6671 - DNA, 172 bp, Homo sapiens
ctgccctgtcagccctgaagatatcgtgaacaaggatgccaagagcacactgcgggtgctctatggtctgttctgcaagcacacgcagaaggcacacagggacaggacgccccatggagccccgaattgaccctcactgcctccaaagcccggagcctgcctgtcagcccag

SEQ ID NO: 6672 - DNA, 340 bp, Homo sapiens
  misc_feature (1)...(340): n = g, a, c or t
ctgcgagtgggtgagttctgtcacaaccgtggcatcaagctggtggtggcagacacgcggggcctgtttgggcagctcttctgtgactttggagaggaaatgatcctcacagattccaatggggagcagccactcagtgctatggtttctatggttaccaaggacaaccccggtgtggttacctgcctggatgaggcccgacacgggtttgagagcggggactttgtctccttttcagaagtacagggcatggttgaactcaacggaaatcagcccatggagatcaaagtcctgggtccttatacctttancatctgtgacaccttcaacttctccgact

SEQ ID NO: 6673 - DNA, 101 bp, Homo sapiens
ttctgagaagctgattaaagctgtgcccaaagaagtgaactttggtttggttttgaatggtgaaggttgccactgctgactatatcaagctattgagacag

SEQ ID NO: 6674 - DNA, 101 bp, Homo sapiens
cggccgaggtctgttttattgctaaactatcatgatacaagccgtataaaaatactttacatataggaaaaataaactacattaaactggagattaaaaac

SEQ ID NO: 6675 - DNA, 199 bp, Homo sapiens
ctgtccccaccaccaccctgtgcagcaggggttaacagacctcactttgtggggggaaaacagaggcttggagaggtcccctaacttgcccactgtcacacgtagtgagtccagagctgggactccatgtttggcccccccctgcactacctctgtggacaggacactgccctccttgcccttggtctctctttcagag

SEQ ID NO: 6676 - DNA, 204 bp, Homo sapiens
  misc_feature (1)...(204): n = g, a, c or t
aaaggatctcatgatttntagtattccaagaattttctttcaccaagggcgatttaatatgggtcattcatacttctcttggatttcttgcctttttttaatctccttgccagccaaatgataaatgccaacccanagaatgcagtnaccatgactgccactggaatgaanagggggtnataatcaccctccttaatcattgag

SEQ ID NO: 6677 - DNA, 217 bp, Homo sapiens
aaatcaaggttcataggaaaagacataaatgaggaaactccaaacctcctgttagctgttatttctatttttgtagaagtaggaagtgaaaataggtatacagtggattaattaaatgcagcgaaccaatatttgtagaagggttatattttactactgtggaaaaatatttaagatagttttgccagaacagtttgtacagacgtatgcttatttt

SEQ ID NO: 6678 - DNA, 296 bp, Homo sapiens
  misc_feature (1)...(296): n = g, a, c or t
ctgtgttggcatgcacctgcagtctcagctacttgggaggctgagacaggaggatcactcaagctcagaaggtcgaggttacagtgagctatgatcatgacactgcactccaacctgggcagcanagcaanaccccgactcaaaaaaaacatatgaaaagaaaaaagtatggancatanttggggaaaagcaaatagccntatctgagcacagtcgactcatgatgctctcttctactataactgcctttacttttctcataaaagttgaaaaataccattctgccatttgtgcat

SEQ ID NO: 6679 - DNA, 103 bp, Homo sapiens
  misc_feature (1)...(103): n = g, a, c or t
agggactgatgccacaggccaggctgcctctggagggtcctgggctggtggcagcttctaatgctctatggaatgaggacatatccttcttcttnnagaatct

SEQ ID NO: 6680 - DNA, 278 bp, Homo sapiens
aaatgactgtgctgcccctttcacatcaaagaactactgacaacgaaggccgcgcctgcctttcccatctgtctatctatctggctggcagggaaggaaagaacttgcatgttggtgaaggaagaagtggggtggaagaagtggggtgggacgacagtgaaatctagagtaaaaccaagctggcccaaggtgtcctgcaggctgtaatgcagtttaatcagagtgccatttttttttgttcaaatgattttaattattggaatgcacaatttttttaa

SEQ ID NO: 6681 - DNA, 201 bp, Homo sapiens
  misc_feature (1)...(201): n = g, a, c or t
ctgccttttggctcagtcagaatattcaagtctccagttccaatctgagaggactttgagagcaaccctgctttgcagacatctggttttgttctcagagcttcagactttgtatttagacaggaagaaatttcctctggtaaactttgtttatgacatccttgaggaatttttgctccaaggttangtggagagttggca

SEQ ID NO: 6682 - DNA, 223 bp, Homo sapiens
  misc_feature (1)...(223): n = g, a, c or t
ccttccgggccctcgtgcaggagaagatacaaaaaaggaatcagaggcaaagtggagacagacgccagctacccccaccaccaacaccagncaatgaagagagaagaggagggctcccacccctgcccctgcatccangtggagaccaangaggccctccagtgggtccgctctccctggggctggcgacagtggacatccagaaccctgacatcacgagttc

SEQ ID NO: 6683 - DNA, 100 bp, Homo sapiens
  misc_feature (1)...(100): n = g, a, c or t
ggaaagaatagggcacaggtggggatggatggttggttggatatgtcacttttcttatggnaaacaattaaatccatattctctctgcttaaaagaagaa

SEQ ID NO: 6684 - DNA, 448 bp, Homo sapiens
ccaatgtcaatcttatgttggagttactagtgcagaagaagaaacaactggaagcagaatcacatgcagcccaactacagattcttatggaattcctcaaggttgcaagaagaaataagagagagcaactggaacagatccagaaggagctaagtgttttggaagaggatattaagagagtggaagaaatgagtggcttatactctcctgtcagtgaggatagcacagtgcctcaatttgaagctccttctccatcacacagtagtattattgattccacagaatacagccaacctccaggtttcagtggcagttctcagacaaagaaacagccttggtataatagcacgttagcatcaagacgaaaacgacttactgctcattttgaagacttggagcagtgttacttttctacaaggatgtctcgtatctcagatgacagtcgaac

SEQ ID NO: 6685 - DNA, 429 bp, Homo sapiens
ccaaaagaagtaagacagcttgctgaagatttcctgaaagactatattcatataaacattggtgcacttgaactgagtgcaaaccacaacattcttcagattgtggatgtgtgtcatgacgtagaaaaggatgaaaaacttattcgtctaatggaagagatcatgagtgagaaggagaataaaaccattgtttttgtggaaaccaaaagaagatgtgatgagcttaccagaaaaatgaggagagatgggtggcctgccatgggtatccatggtgacaagagtcaacaagagcgtgactgggttctaaatgaattcaaacatggaaaagctcctattctgattgctacagatgtggcctccagagggctaggttagtacaaactcgcattcatggcttggtttcccagaagatctccatttaactttttt

SEQ ID NO: 6686 - DNA, 286 bp, Homo sapiens
ccacttcaagtcacacaggtagataaaaacaggtccttttaggggccaaaggagaggttatcacagcagcagtttggttctcagcagaaatgcccagggcccctgttccacatcaaagctacaagcactgttgtcagggcatggagagtgacgggaccagagccctcctcgtctcagggcagcctgcctggcttcaaggtggagatcacagcgtcctctggggtcataggttcccccactgttccacaggagggaactggtccacctcgcccacctctgtgctcag

SEQ ID NO: 6687 - DNA, 240 bp, Homo sapiens
ccattgacttttctgtcgccaacagatctggcaaaagcaggcttttactacataggacctggagacagagtggcttgctttgcctgtggtggaaaattgggcaattgggaaccgaaggataatgctatgtcagaacacctgagacattttcccaaatgcccatttatagaaaatcagcttcaagacacttcaagatacacagtttctaatctgagcatgcagacacatgcagcccgcttt

SEQ ID NO: 6688 - DNA, 219 bp, Homo sapiens
  misc_feature (1)...(219): n = g, a, c or t
aaaaatagccatctttgtacttttttgcaagtttctctataagcttgaaatagtcatgtgatacttcgacaaacatcatatgccttgcagtttttctcggncgtgttctcagggttgagtagtccccttagctacctaactttactttcaatacaaagcacaaaaaagaatatcttcaaataaaagnttgcctgcagaacctggcaaaatgacccatta

SEQ ID NO: 6689 - DNA, 118 bp, Homo sapiens
  misc_feature (1)...(118): n = g, a, c or t
agtgtgatggatatctgcagaattccagcacactggcggcngttactagtggatccgagctcggtaccaagnttggcgtaatcatggtcatagctgtttcctgtggncgntntacaac

SEQ ID NO: 6690 - DNA, 308 bp, Homo sapiens; identical to SEQ ID NO: 3350

SEQ ID NO: 6691 - DNA, 226 bp, Homo sapiens
ctgagcggttgtggccgcgttgccgacctccagcagcagtcggcttctctacgcagaacccgggagtaggagactcagaatcgaatctcttctccctccccttcttgggcagcaaggcgaaccccatccctactcactggagctcagctttgatttttaacctcccttccccacccttccagaacacacacattccattccaaaactgattttataaagacatttt

SEQ ID NO: 6692 - DNA, 180 bp, Homo sapiens
ccttgattattgttgcagttcaatgtggctgtgatgggacatttctgttgacccagtcaggcaaagtgctggcctgtggactcaatgaattcaataagctgggtctgaatcagtgcatgtcgggaattatcaaccatgaagcataccatgaagttccctacacaacgtcctttaccttgg

SEQ ID NO: 6693 - DNA, 378 bp, Homo sapiens
ctggctgcacccagccctgggcatccttaggcttcctggctcctggcagattgctcctgtacggactgccacagagctctgatgttgccctgaccaaagccagtggccccctgcctccgaatcagctccaggaagaaagtgtcctcagtaaaaagggacttggtgaagacctgaagcagaaacttgcctttatcaccatctagcaggatcccctgtcgagcaagcagatgaggctcgtgccctgcagctcggatctgcctctcctttcctggctgctggtagtatgccccagggggagccaggaactggcctccagcagttgccaccccctcagtggcctccacaatgttaggcgtatacagccccacgtgctgcagg

SEQ ID NO: 6694 - DNA, 52 bp, Homo sapiens
ccaccctgaccatcaacagggtcgaagccggcgatgaggccgactattactg

SEQ ID NO: 6695 - DNA, 449 bp, Homo sapiens; identical to SEQ ID NO: 52
  misc_feature (1)...(449): n = g, a, c or t

SEQ ID NO: 6696 - DNA, 493 bp, Homo sapiens
cagagacgctgcaaattgcttgtggacggtgtaggccgctgcaggccaccatgaaccggcttccggatgactacgacccctacgcggttgaagagcctagcgacgaggagccggctttgagcagctctgaggatgaagtggatgtgcttttacatggaactcctgaccaaaaacgaaaactcatcagagaatgtcttaccggagaaagtgaatcatctagtgaagatgaatttgaaaaggagatggaagctgaattaaattctaccatgaaaacaatggaggacaagttatcctctctgggaactggatcttcctcaggaaatggaaaagttgcaacagctccgacaaggtactacgatgatatatattttgattctgattccgaggatgaagacagagcagtacaggtgaccaagaaaaaaaagaagaaacaacacaagattccaacaaatgacgaattactgtatgatcctgaaaaagataacagagatca

SEQ ID NO: 6697 - DNA, 369 bp, Homo sapiens
ctgtactcaaacgtaatctttctactgaggccctgaaggggttaaagattgatccacagatgccagccaaaaagccaaagcggggtgtcccaactagtgcctcagccccacctcgtgttaacactcccagcttcagtggacaacctgataaggggtcatcaggaggtgcttacatgttgcagaagctaattgaagagacagataggtttgtagtgttcacagaagaggaatcaggcatgagtgaccagttgtgtggcattgctgcctgccagacggatgacatatacaaccgaaactgccttattgaattggtcaactgtcagatggttcttcgtggagcagagacagaaggctgtgtcattgtgtcag

SEQ ID NO: 6698 - DNA, 484 bp, Homo sapiens
  misc_feature (1)...(484): n = g, a, c or t
ctgttcctggggctgctcccacagactatgagactcagcagcccccaggcccaccccagcagcctgtgatgaccccaaacttcacctggtagccatggagttctctgcacccctcattcactcccctctggtcatttcctgagtctaacatgccctttgaggaaggcaggaggccgatccgtgaacagagagacactgggccccagaggtgacggggctccagggacagacacatctctgccctaagagactgtctcctttctggtgactgtcctgggagggttggattctggcacctcacccagtctcacccgtccctctgtgtccccatgtcctcatgacccagcacaggccacagagctgcagcctagacccagagccctctctgtgccctccattggtctccccttggggtgacctctgtgtcaccaggccgtgtggccctnccangctggattggcatccagtcctcagcctagaccct

SEQ ID NO: 6699 - DNA, 121 bp, Homo sapiens
gggggaagaggtttgttaatacgttcgccatgtgctacgatcttgggacgaactgagccacgagcgtggctttgagggccgtccgaacgctgcaggccggccaggtccctgggcgtccagg

SEQ ID NO: 6700 - DNA, 459 bp, Homo sapiens
ccttgctgaacaggcaagaagattctatgaggtgcctggctcaggaggacacgccactataataattcttttttttgagacagagtcttgctctgttgcccaggctggagtgcagtggcgcgatctcggctcactgcaaactccgcctctcgggttcacgccattctcctgtctcagcctcccaagtagctgggactacaggcgcccgccaacacgcccggctaattttttctatttttagtagagacagggtttcaccgtgttagccaggatggtcctgatctcctgacctcgtgatcccacccacctcagcctcccaaagtgctgggattacaggcgtgagccaccacacccggccaataattcttacctctacaagctagtggggggcaaaggtacacccaggacccaaggaactatctatttagaactgaggggtttcccaaggactatgggcat

SEQ ID NO: 6701 - DNA, 140 bp, Homo sapiens
ccaccctgaccatcaacagggtcgaagccggcgatgaggccgactattactgtcaagtgtgggatcgtaataatgaccatgtcgtcttcggcggagggaccaaactggccgtcctaggtcagcccaaggctgccccctcg

SEQ ID NO: 6702 - DNA, 248 bp, Homo sapiens
aaatgtatttacagaactattcctgcataagttataattcagacatccaaattcaggtaattgcctcttgggtaataagacaaataatgatagtctcaacagaaaaaaagcagctcattagtatacacacagattctaatttgcttcattatttagccatctttgccacaaactacctgctaacagttaaaattctgacatggacacgttttagttgagaagttcaattttgcaaagaatttaatttt

SEQ ID NO: 6703 - DNA, 278 bp, Homo sapiens
ctgacactatgggaggcaagtaatgccttgcgtgttgggcttgtatttgaaataactctgatcaaagaccccttgcccgtttcaataaaacactgccacctcacctctatttgcctgaagggcatcttacctgagttttcttttgtatgctggatgctccagatctgggaataaatcgggttgctatctccaggatttacattgctgtacattggctccagctccattggggctagtggtttagagtgagtgggctcttgagggtctatcctggaagg

SEQ ID NO: 6704 - DNA, 337 bp, Homo sapiens
ctgccaccacggcagggcatgggctttgggggcaacaaggagagacaggctgtctcctctaggaacaactcattattcagctaaacgaaatggaagagctccatgtgaccaacaaacccaaattgagccaaaacaacaggcgtccccaccccccagagggataatgtgccaccaccctgtgtgcagtgggagagcaggaatggaggaaatattcctggttcagttacactcctcgtctgtcaggacagatgtgtcaccctatctcggattccgggagggtggctgggggtttccctcaactctgcagcaaatacttcaatgctactgtcatttgagg

SEQ ID NO: 6705 - DNA, 472 bp, Homo sapiens
ccactacgataagcaggtagctgggttttgtagtgagcttgctccttaagttacaggaactctccttataatagacacttcattttcctagtccatccctcatgaaaaatgactgaccactgctgggcagcaggagggatgatgaccaactaattcccaaaccccagtctcattggtaccagccttggggaaccacctacacttgagccacaattggttttgaagtgcatttacaaggtttgtctattttcagttctttactttttacatgctgacacatacatacactgcctaaatagatctctttcagaaacaatcctcagataacgcatagcaaaatggagatggagacatgatttctcatgcaacagcttctctaattataccttagaaatgttctcctttttatcatcaaatctgctcaagaagggctttttatagtagaataatatcagtggatgaaaacagctta

SEQ ID NO: 6706 - DNA, 339 bp, Homo sapiens
  misc_feature (1)...(339): n = g, a, c or t
ctgatgcctcactnctagatgcagtgctgggaccttcctcttttggagctgtcccatgtacagtggacccaagctcaggaccttcgtggagctgcttctccaacctgagaaactcaagacccatcctcccgctgtcactttggacaatggaaatctacattttcttttcccttttttttttttgagacagantctcgccctgtcacccangctggagtccagnggcacaatcttggctcactgcaacctctgcttcccgagttcaagcanntctcctgcctcancctnctgantagctgggattataggcatgcaccactcacacccagctattttttg

SEQ ID NO: 6707 - DNA, 244 bp, Homo sapiens
cctggtctctggaagatgaacttaaaaccagcttctcaaggtggttcatttaccacacatacttcagtgctcttttctgatttcatgtcccttatcaaggtttatgatttggggaccctcaggatttaagtgatcatggagaaaggaccataggtattgctggctcttaacagggcagttaacatagctgaaggatgtgggctttcttatgttctccatgcctaggacttcctccgtcaggcag

SEQ ID NO: 6708 - DNA, 486 bp, Homo sapiens
  misc_feature (1)...(486): n = g, a, c or t
ccttgcctcacatccaaggtcactcggaagaggccatgtctaccctcaatgacactcatggaggaaatgctgagagaagcattcagatgcatgacacaaggtaagactgccaaaaatcttgttcttgctctcctcattttgttatttgtnntatttttaggagttttganngcaaacatgacnncacccagaaattcantnaatgggactttcccggcagagccaatgaaaggccctattgctatgcaatctggtccaaaaccactcttcaggaggatgtcttcactggtgggccccacgcaaagcttcttcatgagggaatctaagactttgggggctgnccacgattatgaatgggctcttccacattgccctggggggtcttntgatgatcccagcagggatctatgcaccccatntgtgtgactgtntaggtaccctctntggggangcattatgtatattatttccggatcactcctggca

SEQ ID NO: 6709 - DNA, 305 bp, Homo sapiens
  misc_feature (1)...(305): n = g, a, c or t
ctgcaaatggttcnncngaaacatctgccttggacacagggttctcgctcaacctttcagagctgagagaatatacanagggtctcacggaagccaaggaagacgatgatggggaccacagttcccttcagtctggtcagtccgttatctccctgctgagctcanaagaattaaaaaaactcatcgaggaggtgaaggttctggatgaagcaacattaaagcaattagacggcatccatgtcaccatcttacacaaggaggaaggtgctggtcttgggttcagcttggcaggaggagcagatcta

SEQ ID NO: 6710 - DNA, 420 bp, Homo sapiens
ccggacggagggccggcgaggtgcggggtctggtgatgcgagctgcgcctctcggcaagatttcgcgctgcccatcccgggccctttcatcagtaatcggtagtggatcactctgccaagcggcaggaagaattaaggaaacgacaaggagacgctcggctctctcccgcttggctccttgcggcctcctcttcccttcgctccggcccggtgaaactgaacttataatcgtcactggattgtaagtacccgaggcgaagagagctcgctgagccctgattttttgagtgtctttgttccgggagagtttgtgagttgaaagtatctctgctgggctttctgggccgaaaaccgttccgggggagccgccatttgctttcctgttccctagctagctagctagctctctccgcgttgtcc

SEQ ID NO: 6711 - DNA, 262 bp, Homo sapiens
ctgcaaagtaaatattgagcagtttctgcaaaagaatagcagaattatgaacgtgcattcattctctaatggtttagattgcattatacttagttgttaggttgagcgtaatttttcttgtttcaaattaaatagacagtttcaagcattactttctcaggatgatctctttttgatgcttttttcttacagttacagatttatggtaatggaaagactaggaatagatttacagaagatctcaggccagaacggtaccttt

SEQ ID NO: 6712 - DNA, 292 bp, Homo sapiens
aaatttgtgagcctgcttgggatccattacctagccattcagagatcctgtcaaatgcacagcagattggatactcaccatcccaaaggggttcctcccacctggatggggccaatctctagttgacagtgcccctcagagtgcaccatggagatggaatgtcccttccagagagacttttacacagggaaaagcatttgttggctgggctccaactctcatttggtacaaaaagctttacattcttttccctttttacattacattcttcaaagacttccgtgcttgccag

SEQ ID NO: 6713 - DNA, 515 bp, Homo sapiens
ctgattgagcgaaggaacgagtgagccgagccagtcagcagcattagtgtgatacgtgttgcttttcaattaaagctctctgcctctcggttgagcaactctgagagccggggtccccacccttctgtccccctcatggtgggtcttgtacccaacagcttgccagagcagagagccatgaatagggtttggtttcaggaaagatgaccaggagactcagcccaggagtcagcctgagttcaaatcctggccccacgcttcctgccttgtcaccctgggcatgtgattcagttcttggttcttgtacatttgggtggaaactgacaactgcctgccatggggagaaccagcttgcctgccttctgcaccacggctggcactgatcattagcaggttaaaaaaaaagctttgccaatacgccgggcacagtggctcacacctgtaaccgaggcactttgggaggccgaggcgggtggatcacctgaggtcaggagttcgagatcagcctggacctc

SEQ ID NO: 6714 - DNA, 525 bp, Homo sapiens
ctgttatttccccagtggggcctcccaaggagcttggctgcttggcttgagtgggacaagggcaggggtccctgactccccacctgatcaaaggctggggaggtggtagggagcacccagaactgccggacgggcctcccacaccccaggtgagcaaacaagcacggagcagcttcctgcggttccatctgagtgacatcctcacgggggcagggcacggcttcctggggcctggggacttccctgcctcagtgtgtttcttacacttccctgcctaaggtgatgccacggaggggatggttgagatgactcccacgggccccttccagtccacctttctccgttccgactctgagtttcctcgggtctatagcttatgggaagggagtgaggaggggacaagccagcctccttccccatcaatgcccacaacctcccatcccctggacccagccaccctaggagttctccaccccaccccatctcgcctggcggaggggaccgccgggtttgattgatccatct

SEQ ID NO: 6715 - DNA, 237 bp, Homo sapiens
ccatccgcttcctgaatgctgagaatgcacagaaattcaaaacaaagtttgaagaatgcaggaaagagatcgaagagagagaaaagaaagcaggatcaggcaaaaatgatcatgccgaaaaagtggcggaaaagctagaagctctctcggtgaaggaggagaccaaggaggatgctgaggagaagcaataaatcgtcttattttattttcttttcctctctttcctttccttttttt

SEQ ID NO: 6716 - DNA, 343 bp, Homo sapiens
aaagccattggatgtgccacaatgatgacagtttatttgctactcttgagtgctagaatgatgaggatcttaaccaccattatcttaactgaggcatccaaaatggtgagttggggaacatagagagtacacctaagttcacatgaagttgtttcttcccaggtcctaaagagcaagcctaactcaagccattggcacacaggcattagacagaaagctggaagttgaaatggtggagtccaacttgcctggaccagcttaatggttctgctcctggtaacgtttttatccatggatgacttgcttgggtaaggacatgaagacagttcctgtcatacctttt

SEQ ID NO: 6717 - DNA, 66 bp, Homo sapiens
  misc_feature (1)...(66): n = g, a, c or t
ctgtagcttctnnnggacttccactgctcaggcgtnaggctcanatagctgctggccgcgtacttg

SEQ ID NO: 6718 - DNA, 199 bp, Homo sapiens; identical to SEQ ID NO: 53
  misc_feature (1)...(199): n = g, a, c or t

SEQ ID NO: 6719 - DNA, 513 bp, Homo sapiens
  misc_feature (1)...(513): n = g, a, c or t
gagggaaggaaattantgatgatgaggcagaggaagagaaaggtgagaaagaagaggaagataaagatgatgaagaaaaacccaagatcgaagatgtgggttcagatgaggaggatgacagcggtaaggataagaagaagaaaactaagaagatcaaagagaaatacattgatcaggaagaactaaacaagaccaagcctatttggaccagaaaccctgatgacatcacccaagaggagtatggagaattctacaagagcctcactaatgactgggaagaccacttggcagtcaagcacttttctgtagaaggtcagttggaattcagggcattgctatttattcctcgtcgggctccctttgacctttttgagaacaagaagaaaaagaacaacatcaaactctatgtccgccgtgtgttcatcatggacagacctgcccgggcggccgcccgggcaggtaaatcaattcaaaatatctcttaaatgcctttgtaaaatcagctctatacta

SEQ ID NO: 6720 - DNA, 373 bp, Homo sapiens
  misc_feature (1)...(373): n = g, a, c or t
gcctggatgcacctggaatatgccancannacctgctccacctggtgtgcgctcttaggttcctggaatatcttcttcctggcagccanacggnccagcangccacccttctcccantgggcatggacctggcgcaggtactcgtaggaggggaagaaacagaccacccctccaggaaccacaccgcacaggttacaganaatgcgacccacctngtncatcatctgangcanctctnttttctggaacgtgaattccagcggctggttgganatcccgctgcagatgacgaggggcaggatgttgtctggagggatcacntgaccacaggaaaactccaccacgcgctcagnttncaccccggcacaggcca

SEQ ID NO: 6721 - DNA, 407 bp, Homo sapiens
cctcccatcagtccctggtccgctcgctggcccgcacagacgaggcgaggggcctgctctggctattggaagaggaggctctggtgccaggggccagtgaggacaccctcctggagcgccttttctcctattatggcccccaggaaggtgacaaaaaaggccaaagcccccttctgcacagcagcaaaccacaccactttctcctgggccacagccatggcaccaactgggtagagtacaatgtgactggctggctgaactacaccaagcagaacccagccacccagaatgtcccccggctcctgcaggactcccagaaaaaaatcatcagcaacctgtttctgggccgcgcaggcagtgccacggtgctctctggctccatcgcgggcctggagggcggctcgcag

SEQ ID NO: 6722 - DNA, 292 bp, Homo sapiens
ggaagcagcactggtggtgcctcagccatggcctggaccgttctcctcctcggcctcctctctcactgcacagactctgtgacctcctatgtgttgactcagacaccctcagtgtcagtggccccaggaaagacggccaagattacctgtgggggaaacaatattgggagtaacaatgtacactggtattaccagaagccaggccaggcccctgtcctaatcatctcttttgataacgaccggccctcagggatatctgagcgattctctggcttcaattctggggacatgg

SEQ ID NO: 6723 - DNA, 575 bp, Homo sapiens
  misc_feature (1)...(575): n = g, a, c or t
aaatattgcgtgactggggcttttctcttcagcaaggtcacaggcacagagcaggtcggaatcgattgagatgggtttctgcttaatccaaaacttagtgctggctttctgattcgtaacagggtctatctctactttgtctccagagatacctagctgtacgtcggttgtgaatcgcggtctgtggatcatgctgactttgaatgacttgtaatgatggctgctaagcatatcctgtactgtggctatgtcaatttgcgaatcctcctcaaaaaccccgtctgcccttgaacctgaaactttctgggatccttttcctcgcttcactgccttcagtaagatttccttcatggtaacctttgtgttgtccacctgaataagggagaatccatgagcagcatttattcgaacaaagagtgactctttggatgtcagaccaggagatgagtacttttcaaccagggccaaagtactgaagccaaacttatgaatgggctcattggaatccagcggggggaaatcggtgtccacctccccatcatnctcagcantatgcaggcagtaggcactgacat

SEQ ID NO: 6724 - DNA, 315 bp, Homo sapiens
ctgtgcgggtggtagactttggcagtgccacctttgaccatgagcaccatagcaccattgtctccactcgccattaccgagcaccagaagtcatccttgagttgggctggtcacagccttgtgatgtgtggagtataggctgcatcatctttgaatactatgtgggattcaccctcttccagacccatgacaacagagagcatctagccatgatggaaaggatcttgggtcctatcccttcccggatgatccgaaagacaagaaagcagaaatatttttaccggggtcgcctggattgggatgagaacacatcag

SEQ ID NO: 6725 - DNA, 461 bp, Homo sapiens
ctgaagtctgtactggagatgtatggtcacttctcaggtataaaccggaaggtacaattgacttactaccctcatggagtaaaagcttctaatgaggggcaagatccacagagggaaactctggccccatctctgttgctggtactgaagtggggtggagaactgactcctgctggccgtgttcaggctgaggagctggagcgagcttttcgctgcatgtaccctggaggacagggtgactatgctggcttccctggttgtgggctgcttcgtctccatagcactttccgccacgatctcaagatctatgcctctgatgagggtcgtgttcagatgactgctgctgccttcgccaagggccttctggctctagaaggggagctgacacccattttggtgcaaatggtgaagagtgccaacatgaatgggctactggacagcgatggggattccttgagcag

SEQ ID NO: 6726 - DNA, 146 bp, Homo sapiens
ccatgattacccccggcaccttccatttttcctaaaaaaaaatgattacagtagttgtccaaaaatgaaggagctctgttgtcccatgggtaagtctatggcacacaatgtaaaaaatgatctagacacagtgatttaaggatttt

SEQ ID NO: 6727 - DNA, 406 bp, Homo sapiens
ccttctgcagttccctccagagctgatgttccgtaaaatgcgaggcttaagtgaatttccagagaatttctcagccactggagacgtcctgtctcacctgacctcctctgtggacctgtactttggggcgcaccatcccctccatgtgacaatgttgcccaatccctcgcacctggaggccgtcaaccccgtggccgtgggcaaaactcgcggcaggcagcagtctcgccaagacggcgattactctccagacaactcagcccagccgggggacagggtcatttgcttacaggtccatggtgatgcttctttctgtggtcaagggattgttcctgaaacattcacgctgtccaatctcccacatttcagaattggtgggagtgtgcatttgattgttaataaccag

SEQ ID NO: 6728 - DNA, 111 bp, Homo sapiens
  misc_feature (1)...(111): n = g, a, c or t
ccaggctggtctcnaactcctgacctcgggtgatccacccgcctcagcctcccaaagtgctgggattacagacatgagccactgcgcccggcctcttaattaccttttttt

SEQ ID NO: 6729 - DNA, 285 bp, Homo sapiens
aaaaggcaaacactcccaaacagacaaacagtaaacatgcagaaaacagactggagtagaaatcaacaaattagcaattacattatacctgaggtgctggaggatgctgtggcattccctggggacttgtctgggcataataggctgcttgttgtctataatactcagcccaggctgcactataatctggctgaccacctggaggagccccagtcggagcagggactgcctgacccattttcttgtagtactcttcccaagccttggtataatcaacctgtccag

SEQ ID NO: 6730 - DNA, 517 bp, Homo sapiens
  misc_feature (1)...(517): n = g, a, c or t
cctcggatgatgaagacagtgcccaccacaatgcccacgaggcccacagacaaccccagggcgcagaccacagtctctgtgagctctgacataggggctggaatctcaggctcccagtgtttcagaagaggcttgtccagtccccagtgctccaccttgcagtcataactctcctcagcagaagggaggagggtgaggtaactgatcttgaagaaggaatgatcactcttggagaggaagctggtctcagaaacaccttctgtgactgagtgcccattgctcagccatgtgatgttgaccacaggaggaaagatgttgtccacaagacagatgaggatgttgggctgacccagtgtcacgggagacttggaaaacactgtgacctcaggaacctcattggtagcagcggtagagttggagcgtttaatcagactgttcaagttatgttttangacagcgatgtttgtcagngcaaattgcgggtnaatctaaattgnctgagaacaggcaaacacca

SEQ ID NO: 6731 - DNA, 434 bp, Homo sapiens
ccaccaggtgctgtgagtttctgtggctcatggcctctgggctggtcccttgcacagggcccacgctggagtcttaccactctgctgcaggggtggaaggtggcccctcttgtcacccatacccatttcttacaaaataagttacaccgagtctacttggccctagaagagaaagttgaagagtcccagacctactagcattttgcaactatgcttgtaaagtcctcggaaagtttcctcgcgtaccagacagcggcgggggctgatagcaattttagtttttggcctccctatcctctcacatgagaacactgcctggatgcatctcatgatctctggagaatttccccatctttctcttctttccatcgtgtggattcaatagtttggatttgaaggctgccctgcccccgactctcctgccgcacccctgg

SEQ ID NO: 6732 - DNA, 513 bp, Homo sapiens
ctggtggccctgaagaagatcagactggatttgtgagtgctgggacggcccctgagttacccaccctgggccatcacaacctgggcgctccctgatccgttccctctttcctggagtccacgtttaactcctctgggtgctgcccagcagcccttacctgtcctctccccagttcactgccttctgaccagcctttgccggggccctgactgtggagtttggtggatgacgtgccaaggagcacaggtctccattgccggggccctggtcattctgtggggttaaggagaagccgatccccctggctggaagtgcccttcttggcccaagtctctgcccacggctgtgcccttgtttcttgcagggagatggagggggtcccaagcactgccatcagggagatctcgctgctcaaggaactgaagcaccccaacatcgtccgactgctggacgtggtgcacaacgagaggaagctctatctggtgtttgagttcctcagccaggacctgaaga

SEQ ID NO: 6733 - DNA, 378 bp, Homo sapiens
ccagtcaggacacagcatggacatgagggtccccgctcagctcctggggctcctgctgctctggctcccaggtgccaaatgtgacatccagatgacccaatctccttccaccctgtctgcatctgtcggagatacagttacaataagttgtcgggcctctcagaatatagatcggtggttggcctggcatcaacagaaaccaggcaaagcccctaatgtcctaatttatgcgacttccagtttagaagaaggggtctcattaagatttactggcagtggatctgggacacaattcaatttaaccatcaccagtctgcagcctgacgattcagcaacttattattgtcaacattattctgcatctcttcgcagttttgg

SEQ ID NO: 6734 - DNA, 294 bp, Homo sapiens
  misc_feature (1)...(294): n = g, a, c or t
ccgggcaggttgggggtaaatcaggggtgctgctattcccccagctacctggaccagccctgccttgagaccgtcaaccgcatcaagttgtacagtgagtccctggcccggtatggcaagagcccatatttatacccgctctacggcttgggcgagctgccccanggttttgcaagattgagtgccatctatggggggacatatatgctgaacaaacctgtggatgacatnatcatggagaacggcaaggtggtgggcgtgaagtctgagggagaggtggcccgctgcaagcag

SEQ ID NO: 6735 - DNA, 580 bp, Homo sapiens
  misc_feature (1)...(580): n = g, a, c or t
ccacttagtttgctggctcagtcactacttgaagaccccatttaatttttctctggcagttatagctcttgtgatttcagtacagtctcatctctcagaccaatctcatcaagaaggattgaagggataactatgaggtaagctggacattggagccgtgtttgctgccacgtcagcgtcttgctgggtgaatgtcaagccataaatgggctccagggctctggatctcatcagcattggaaatctattgcctctcatcagtctgaccaaattatgtagagcattaatgtagagactcccattaatgggaatacaagaggcagacctgcccgagcggccgcccgggcaggtccaaagatggctcagaacagatctcacagaaacggtctgagtgtccgtggttaggtatcaggattagtgagagcccagaaccaggtcaaaggactttcacaacattaagttctgtcaactgcccttttataagtactctgaatactgaaggctgttcaagcaatttggnaaattggnaacgatgattatgtttcagaaccccagcaagaaccttgcccatatgcttgtg

SEQ ID NO: 6736 - DNA, 443 bp, Homo sapiens; identical to SEQ ID NO: 541

SEQ ID NO: 6737 - DNA, 177 bp, Homo sapiens
ccaaggaccacctgggctcccaaggagtggagggaggagggattcagttccacaggaaataaatgggaacagcccggtggagaagacaatgacaactgcaggacaacacctcaaccactccagaaaacagcccttgctcctccttctggccttttcatatttccaagttactgtttt

SEQ ID NO: 6738 - DNA, 260 bp, Homo sapiens
aaaatccattttattttcaatctgtaccactggggataatgtacttcataattctaccatagtatgtgtggagttttacagtgaggcttcagttttattaaaattctctgttgtggcttctatgctgttaataatttctgatttttcttctacctttgttattaatattaatattactaatattataaacacagcttaaagagttgtgggtctttttttcaaatttatggtcctttattttaatgtattttttacctgcc

SEQ ID NO: 6739 - DNA, 223 bp, Homo sapiens
cctctttgatgacctttggagaatcaggttcagctctgttcagctccttggggatctcctgtttcacatctcaggagtcactgggaagatgaccacagaaactgcctctgaggatgataactttggaactgcccagtccaacaaggcgatcatcactgccctgggggtagagcggcggaaccgggtgttggcagggctgtacacgggccgctcagacacccag

SEQ ID NO: 6740 - DNA, 363 bp, Homo sapiens
ctggtgtgggtgagtgtcctcggggctggtgaggggacagcagcttcagtggaaacccttccctatgtgtggccgagggcctagaacacgtctgagcgggtcaggtgggttcttcccactggagggcgtggcctcaggctgagagtgaagacggggaaggggaggaagagaacagctcgggctcctgagaccaggagccagacctggtaagtacatgaccttaggggctgggcctttgcctgtaatcccaacgctttggaggcccaggcaggaggatcggatcacttgaagccatgagttaaaaccagcctgggcaacaaagcaagaccctggtctccaccaaaaataagtaattaatttttt

SEQ ID NO: 6741 - DNA, 316 bp, Homo sapiens
aaaatctccaatttatgatttcccttggaaaacaggaagttctggtaacactgagactgcattcgagggtcccacaaaccagacttggtttctcacttcccgtaacagtaacgaatggaagacttgatgatttacattacctgcctggcccctgtagcaacttgagttcaaaactgttggacagggtcatgattccttaacatggtattcaaagcttcatgattggctgggtgcggtggctcacagttgtaatcccaccactttgggaggccgagatgggtggaccacttgaggtccaggttcaagaccagcctgg

SEQ ID NO: 6742 - DNA, 520 bp, Homo sapiens
ctgtggcttcccggcatgccctgtgaccccaagccgcagggtacaggaaagaagtttgtgctgggggactcaaagacccagaggttaattaacaggaaccagggccaggggccttcatctagaggtcagtggagtctccagggcactcatcactgtggctgggagactacagtgtctcggctgcggacttgtggaagaagagggggaaggatgggagaaggggtgactggatgccagccaggaatcctggccttagccctatcctggcctcgcctaatcagccatgtcgttattcttacacctttcttcttgggagacccaacattattctgagatgccatgagactgtttagcttttcttcatggccccagggagtgaggctgagggcagtcacttcccctccaatgccctcgactgcccagtaaaagaatggcgggacccaaggaggaaagagtggggggcagacaacgcttgggggatcagtccactttctctacattcaaactgcagaccaaatag

SEQ ID NO: 6743 - DNA, 605 bp, Homo sapiens
aaaattctatcacaaagggattgcttccttaacagcagctagtacaccactgaatcctttaagctttcagtgtgaatttgtaaaactcaggattgaccttttacaagccttctctcaacttatctgtacttgtaatagcctgaagacaagcccaccacctgcaattgccacaacaattgccatgaccttaggaaatgacctccagaggtgtggtcgcatctccaatcagatgaaacagtccatggaagaatttcgaagccttgcttctcgatatggagatctttaccaggcatcttttgatgctgactcagcaactttgaggaatgttgaactacagcagcagagctgtttactgatatctcatgcaatagaagccctgattttggatccagaatcagcaagtttccgggaatatggatctactggaacagcccatgctgatagtgaatatgaaagaagaatgatgtctgtatataatcatgtcttggaggagcacacagcatgcctctgcaatgccatcattgctttgctgaaaagttcccctttctttccagagatattttttccagaaactacagtctaccagcatcaagcttgctctgtca

SEQ ID NO: 6744 - DNA, 402 bp, Homo sapiens; identical to SEQ ID NO: 3672

SEQ ID NO: 6745 - DNA, 243 bp, Homo sapiens; identical to SEQ ID NO: 622

SEQ ID NO: 6746 - DNA, 204 bp, Homo sapiens
  misc_feature (1)...(204): n = g, a, c or t
cctgggatgcacgnagaaaggctgaccacaagttgagacaagatacagaaacaaacaaaaacagcagaaagtccgatcgatggtgtaagtgttgtgttcactgcttanngtgcaggtgagcttgatcgaggctcccagtaaggcagatgtagannggggctgagtcancacaggcagagcacagnnacctgtggagaaaatgaa

SEQ ID NO: 6747 - DNA, 422 bp, Homo sapiens
ccagtttcagaaaatagttggtggtttaattgagcttgttgatcaacttgcaaaagaagcagaaaatgaaaagatgaaggccatcggtgctcggaacttgctcaaatctatagcaaagcagagagaagctcaacagcagcaacttcaagccctaatagcagaaaagaaaatgcagctagaaaggtatcgggttgaatatgaagctttgtgtaaagtagaagcagaacaaaatgaatttattgaccaatttatttttcagaaatgaactgaaaatttcgcttttatagtaggaaggcaaaacaaaaaaaagcctctcaaaaccaaaaaaacctctgtagcattccagcggcttgaccaatgacctatgtcacaagaggtggcgtgtaaggaatgcagccccctgaagacagcactacaagtct

SEQ ID NO: 6748 - DNA, 273 bp, Homo sapiens
  misc_feature (1)...(273): n = g, a, c or t
ctgcagattanatcacattccacagaatctctaagatggtaccaaggcatgccaggaatttcagaaagctttacatctaaatagcttctcgaacattttcgcaaccaaaacacatcggcttcagttgttatctgagaatatcaagaagctgctggccgaaaatgcaaatgtgagctgggtgtggaccatgcttcctctgggctctggggctgtcacacaacgtggggctcaagacagatttggggccatgtgggagaatttcctggggactgg

SEQ ID NO: 6749 - DNA, 263 bp, Homo sapiens
ccaaggctgctcaaagccctggacacctcacgtttatatcaacagagcagttgctagaggaagcagcctcccgccctccagaggggtgtctggtgcccgagccctgttgtttgtgtaccttgtctcagtagtgtccagaggggctcatgcagcatcgcctcatggactaagaggtgacctcacctggtgcaggggactgtgcccggggcactcctccagtggctccccttcctgcccacccctgaggaggcagccctaggtag

SEQ ID NO: 6750 - DNA, 373 bp, Homo sapiens
ctgtagcttctgtgggacttccactgctcaggcgtcaggctcagatagctgctggccgcgtacttgttgttgctttgtttggagggtgtggtggtctccactcccgccttgacggggctgctatctgccttccaggccactgtcacggctcccgggtagaagtcacttatgagacacaccagtgtggccttgttggcttgaagctcctcagaggagggcgggaacagagtggccgagggggcagccttgggctgacctaggacggccagtttggtccctccgccgaagacgacatggtcattattacgatcccacacttgacagtaatagtcggcctcatcgccggcttcgaccctgttgatggtcagggtgg

SEQ ID NO: 6751 - DNA, 255 bp, Homo sapiens
aaagcagccctagtcatggtgctggtgctaccgccttgttttaggagcctgcctcctgtcagtatgaaaccctcacctgaaaaatgccagcctggacaccaaacactgagccccttcaacaggcacattatttccccctgagatccataagggaatttagtttctactattgtagagttctgaaaagaggtaaaatagtagtcctttggtcatcctatttttgctttcaattttgatatttcagactgtaaaagg

SEQ ID NO: 6752 - DNA, 350 bp, Homo sapiens
ctgaaggactgggagggtctgacaagcctgctgctggagaaggaccagagcacgtgccacatggagccagggccagggaccttccacctcctagggtgaaaccaggagagattgcttgcttcacttgtacaaggcaggaacggtggcatggcgtgggggaaacttggagttggaaggtggctaatctttgattctatgtttttgatcctcctggcactccagacctgggtgatatgcaggagagcacactgatagaaatccttgtgtccagtgcccagcaactcctgcctcagcctcccgagcagacctgcccgggcggccgctcaagccctatagtgagtcgtattaga

SEQ ID NO: 6753 - DNA, 342 bp, Homo sapiens
  misc_feature (1)...(342): n = g, a, c or t
aaaaatggagcacanngacnagaatattcaattctggatggcatgtgaaacctataagaaaattgcctcacggtggagcagaatttctagggcaaagaagctttataagatttacatnnagccacagtcccctagagagattaacattgacagttcgacaagagagactatcatcaggaacattcaggaacccactgaaacatgttttgaagaagctcanaaaatagtctatatgcatatggaaagggattcctaccccagatttctaaagtcagaaatgtaccaaaaacttttgaaaactatgcagtccaacaacagtttctgactacaactcaaaagttt

SEQ ID NO: 6754 - DNA, 206 bp, Homo sapiens
aaaaagttgttaggtcattatttgtcggggagggaatgacagaggcgactccttctctcaacactggctaaaaacaagacaggcaaaatacaatacaatattctggttgggatcctggaacagaaaatgaatgttagcagaaaaactggtaaaatattaataaagcgtgtagttcaattaatagtattataccaatgttaatttcc

SEQ ID NO: 6755 - DNA, 338 bp, Homo sapiens
  misc_feature (1)...(338): n = g, a, c or t
cccggagatctgttgctagacgactgttttccaactccagttgttctgtttggcctttgcactcctctaactgggcagagacttgttccagcaccctagaaacctcctgcttttcctcaattgccacatcacgttcctgcagggcttgctggctcttgactgtgagtttctctgtgagttgtcgggaccgactcagcaaagctgtccatgttgtataatccanttgcatggacctccagtcttgttgcaaggtnnaagtaagactcactgtctgctgaaccagctcttcntgcttggcatgaagccctaccagttgggtctgggcatccttcagaagg

SEQ ID NO: 6756 - DNA, 118 bp, Homo sapiens
gtgaatggagcagttctgagaaccacccttttgctaagggagcttgggagccacatggctgctcccttcacactgggtaacagtgtagtatcctgtgagagaataaatgtattcattt

SEQ ID NO: 6757 - DNA, 265 bp, Homo sapiens
aaaatccagaatgcacaaagtactgcacaatttgatcactaaatcattagttgataagcgaacctcacacaacagcttcatgtcagccaaggccacaaacaccgtgtaccacacatgtgaacggacagattgacatgttaaaaacacaacatcagtgcatgttggggattcctggtgccagaaacaggggtgacgggagggcagaactagtccttagcagcttcctcctcctttattttagctgaggcactctctcgggctttgg

SEQ ID NO: 6758 - DNA, 408 bp, Homo sapiens
cctatcataattcccccgcgtaccttgcttacataaatgcaaaaagtcgtgcagaagctgctttagaggaagaaagtcgacagagacaatctcgcatggagaaaggagaaccgtacatgagcattcagcctgctgaagatccagatgattatgatgatggcttttcaatgaagcatacagccaccgcccgtttccagagaaaccaccgcctcatcagtgaaattcttagtgagagtgtggtgccagacgttcggtcagttgtcacaacagctagaatgcaggtcctcaaacggcaggtccagtccttaatggttcatcagcgaaaactagaagctgaacttcttcaaatagaggaacgacaccaggagaagaagaggaaattcctggaaagcacagattcatttaaca

SEQ ID NO: 6759 - DNA, 272 bp, Homo sapiens
ctgcctgggcaccaccgacaaggacgtgctcatctccgagttccagaggctgctcggcttccagctcaatcctgccggttgcgccttcttcctggacatgaccaactggaacctacaagcagcaattggcgcctattatgactttgagagcccaaacatcagtgtgccctctatgtcctttgttgaagatgtcaccataggagaaggggagtcaatacctccggatactcagtttgtaaaaacatggcggatccagaattctggggcagagg

SEQ ID NO: 6760 - DNA, 244 bp, Homo sapiens
  misc_feature (1)...(244): n = g, a, c or t
aaatctcacaaaattgntttgataaacatactcttataattcttgcaacaccttgggaaatagttggttctatattactgttttatagctgaggagaaagactcacatcatttactaagatcatatagctagctagtaaatgtttgagtgaaaatacaaacaaaggttttctgactttaagagctagagttttttccactataccatattgcatctgttgtaattgttaactaatgtgcatttt

SEQ ID NO: 6761 - DNA, 200 bp, Homo sapiens
gggggactgggggaggggtagctgctatctttgagacagaaagatgcaggacagcatttcatatgtaaccatttgaatgtttttgctgtttttagaattcagagcccttgctggggggtgcctgggagatggggtaagaagagctttcatttgtctggtagatagatagcatgtaagggggtggttgtcccaggaggcag

SEQ ID NO: 6762 - DNA, 93 bp, Homo sapiens; identical to SEQ ID NO: 55
  misc_feature (1)...(93): n = g, a, c or t

SEQ ID NO: 6763 - DNA, 493 bp, Homo sapiens
aaatatatgcttttctagaatttgatgtttgaccatttatgacttaattaccagagagccagtaaattaggacagtgtttcaacaagcctaggctatctcgtaagttgaaaaatatcccactatagttgcttcatgagtatgaagtaagatggcctctgatttacactggttcaatttacaaattttcaactttatgataggtttatccgggtactaaatgcatttcaacttgatagtttcaacttatgataggtttaccaggatgtagtcccactgttgaggagcatctatttaggggttaattactttagtaataagtggaaagtaagataccttgagtaatgtttgcctataaaattgtcagcgtatttttacactattggctcaagaatgttataatgctaagggacataagttggcaaccacttggtttttggaaggactttcggtattgtattagaagtctgccctagctgttaaatttctgggtat

SEQ ID NO: 6764 - DNA, 229 bp, Homo sapiens
  misc_feature (1)...(229): n = g, a, c or t
gccaccctgaccaccaacagggtcnaagccggcgatgaggccgactattactgtcaagtgtgggatcgnaataatgaccatgtcgtnttcggcggagggaccaaactggccgtcctaggtcagcccaaggctgccccctcgnncactctgttcccgccctcctctgaggagcttcaagccaacaaggccacactggtgtgtctcataagtgacttctacccgggagccg

SEQ ID NO: 6765 - DNA, 372 bp, Homo sapiens
  misc_feature (1)...(372): n = g, a, c or t
aaattttctggnncatgagaagaaatgtggattgctaattcaaaaagaatatatgaaaatcatatatatatactcaatttttatttacccttagagacaatgattattcattagatttttatccacaggaaatcttgtaatattttaagttttaggataatctattctcagttgctttattaacatttcagctttcctttattttaattcatttatcattttagtcattagaatgaatgcctgttatatggtagatactgtcataggcacaaaaatgaataagacacggtccctatccatcatcaaggagcttataatctgaaaaggggggtggtggcagacacataagaaactagttacaataaaaggcag

SEQ ID NO: 6766 - DNA, 79 bp, Homo sapiens; identical to SEQ ID NO: 54
  misc_feature (1)...(79): n = g, a, c or t

SEQ ID NO: 6767 - DNA, 334 bp, Homo sapiens
  misc_feature (1)...(334): n = g, a, c or t
aaaatgatgtaaagatgtaataaaattccttttcattgtaaaatagtaattaagtcaatttacacagacctttgtatttaatatgtctccctatttgtatagaatttcagatgggtctanatgagaaccctatgcataagcttggatcttgatgaaaggttaccaggatcangatcaaaaattgggaaatactaagctcttgaagatatttttctgatataattagattgaaaagagcaattttgaaaatgctgtgtttctccannaagtacagggngcattatttgacatcaattacttaaagaagttatgagttgttccccanacagatttt

SEQ ID NO: 6768 - DNA, 260 bp, Homo sapiens
aaaccaaaatatgtccaactgcaaagcatgtaagtaacaattttagagggtatacggaggtgaccctaagtaacaaggaatcacatatagtgagcaagcaatttgcttttcagtttttggtcaatccttatgattatttagaggagaaagctcagtttggtgctggtatatcttatgtttatcacccgacagttgttaatctctttttaacaaagaatacaggccaaggccctgtgactttagctggctttggtatttgg

SEQ ID NO: 6769 - DNA, 527 bp, Homo sapiens
ctggtggaactgggcccaggtaggggaaccctcgtgggagatattttgagggtgttcactcaacttggatctgtgctgaaaaattgtgacatttcagtacatctggtagaggtaagccaaaaattaagtgagattcaagcattgacactgactaaagagaaggtcccgttagagcgaaatgctggatccccagtgtatatgaaaggtgtcactaagtctgggattccaatttcctggtaccgagatctgcacgatgttccaaaagccttgtgatgaataaaagctttaactgctatttcagggtacagcttttatcttgcacatgaattttttgatgttcttcctgtgcataaatttcagaaaacaccacagggatggcgagaagtatttgttgacattgatccacaggtttctgataaactgaggtttgttttggcaccttctgccaccccagcagaagccttcatacaacatgacgaaacaagggatcatgttgaagtgtgtcctgatgctggtgttatcatcga

SEQ ID NO: 6770 - DNA, 232 bp, Homo sapiens; identical to SEQ ID NO: 57

SEQ ID NO: 6771 - DNA, 182 bp, Homo sapiens; identical to SEQ ID NO: 4551

SEQ ID NO: 6772 - DNA, 191 bp, Homo sapiens; identical to SEQ ID NO: 58
  misc_feature (1)...(191): n = g, a, c or t

SEQ ID NO: 6773 - DNA, 346 bp, Homo sapiens
ctgagtgagttccctgggagggctctcttcctggcttggagacggcctccttcttgctgtggccttacacggtggagataaagaactctggtctctcttccactttcttacaagggcactaatcccatcatggaggccccatcctcatgacctcatctaaaccaattacctcccagaggctttacctccaaataccgtcacattgggagtgacagcttcaacatgaatttggggaagacaaaaatattcagttcataagagaggcttacacaatagtctaatcaaatgacagtattgagcaggggcagtgggagcagagagaaagggacagactcaaagacatttt

SEQ ID NO: 6774 - DNA, 545 bp, Homo sapiens
ctgtgttcttaggggttctgagggccatgcagctctgttgcaccatgattctgtcttctctcttgcccactgcctgaaggaaatttggagtgggctgggcccagagctcccctgtatagcaggccctgtcctggagggcctggcagggacatggcttagcctgttggcccctagtcccgagacctcataggccacaggggtccactgtggcttgtttgggcctggggtggggctcatggagtggtgggtgttggactgagactctgaccagggacagggggatggggtcacagccaagccactccacccctaccccatgcacacagcactcagagcccagaccctctcctaagagcccccaccaaaatcctctctaggggcaggggatagagcaagacatgtcccccacccagagcaggggctgcggtcagggagctcaggggactcagccactccatggcagagccctgtttaatacaacttgtgtctgggatggcctggatcagagaccctatctaaggagcatgttcagaaaccatgttgct

SEQ ID NO: 6775 - DNA, 517 bp, Homo sapiens
ctgaggcttggaaacgtttcttgtgttgccctgaaaaatctttgagacctcagggaggctctgtctctcttaaaaggtggagaaagatgccattctctccctaaggtctggtggagtctccccatcttgcatacccttctgcaagccatctatctctgctcactctccaattgacccgcctgggaacaagggatgaggaggagttgggggctggggggaatcctgccagtgggtgaagccctgtggcaggaaggtatatgtggacatagagtatacctgattctctttcttcagccactgactgcttgggttgggctgtgaatgataatggaatggctggagtctgctgttgtcagaaggcagggagggtgatgaaggactgacccacatggactgggatgtgtgtcggttatgggcatgactgcacgttcactctcagtgggatctgggcaacatggagttcattgtcctgttgcttacttactgcaatgtctttggccctccttttcaactggtt

SEQ ID NO: 6776 - DNA, 426 bp, Homo sapiens; identical to SEQ ID NO: 56
  misc_feature (1)...(426): n = g, a, c or t

SEQ ID NO: 6777 - DNA, 526 bp, Homo sapiens
ggaagaggcgtcccaggaagccggcctgccggcaggagcgggccccagccccacctttccagccctgggcatcgggatggactcctgcgtcatccccctgaggcacgggggcctgtcactggtgcagaccacggacttcttttaccccttggtagaagatccctacatgatggggcgcatagcttgtgccaacgtgctgagtgacctctacgccatggggattactgagtgtgacaacatgttgatgttactcagcgtcagccagagtatgagtgaggaggaacgcgaaaaggtaacgccactcatggtcaaaggctttcgggatgcggctgaggaaggagggacggcagtgaccggtgggcaaacggtggtcaacccttggattataatcggtggagttgccactgtagtatgccaaccaaatgagttcataatgccggacagcgccgtcgttggggacgtgctggtgttaaccaaaccgttaggaacccaggttgctgtcaatgcccaccaatggctggataat

SEQ ID NO: 6778 - DNA, 638 bp, Homo sapiens
ctgcttcagactaccaaactggtggaagaacatttggattctgaaattcaaaaactggatcagatggatgaggatgaattggaacgccttaaagaaaagagactccaggcactaaggaaagctcaacagcagaaacaagaatggctttctaaaggacatggggaatacagagaaatccctagtgaaagagacttctttcaagaagtcaaggagagtgaaaatgtggtttgccatttctacagagactccacattcaggtgtaaaatactagacagacatctggcaatattgtccaagaaacacctcgagaccaaatttttgaagctgaatgtggaaaaagcacctttcctttgtgagagactgcatatcaaagtcattcccacactagcactgctaaaagatgggaaaacacaagattatgttgttgggtttactgacctaggaaatacagatgacttcaccacagaaactttagaatggaggctcggttcttctgacattcttaattacagtggaaatttaatggagccaccatttcagaaccaaaagaaatttggaacaaacttcacaaagctgggaaaaagaaaactatccgaggaaagaaatatgattcagactctgatgatgattagagctca

SEQ ID NO: 6779 - DNA, 410 bp, Homo sapiens; identical to SEQ ID NO: 60

SEQ ID NO: 6780 - DNA, 332 bp, Homo sapiens
cctgattctcgcgattattctcgaatcacctcctgtgttgtgctgggagcaggactgattgaattacggaaaatgcctgtaaagtctgagtaagaaacttcatgctggcctgtgtgatacaagagtcagcatcattaaaggaaacgtggcaggacttccatctgtgccatacttgttctgtattcgaaatgagctcaaattgattttttaatttctatgaaggatccatctttgtatatttacatgcttagaggggtgaaaattattttggaaattgagtctgaagcactctcgcacacacagtgattccctcctcccgtcactccacgcag

SEQ ID NO: 6781 - DNA, 385 bp, Homo sapiens
ctggcttccgagaggcaattctgtccttggaagccaggtttgaccatctgtaatcagccttgtgagaagtctcgtttgagggggccagggatggaacgggagggcgcatatcgtatgaggtatgggcattgtgttaagctgggggaagttgcagcttgtcctgaattacatggagaggaataaagtgggtgagtaggaggagccatttcatctgaaagcctgaggcccctctggtcccctcgataaaccccactggtgtcccaggccacaggtaacaggagaatagacatttaatgtcacagaatgtcagagcaggcaaggccttcagtgatcactctttctaggcttaggacgggttggggttagaaagggtgatcactgaagg

SEQ ID NO: 6782 - DNA, 482 bp, Homo sapiens
ccacaagatatgttctagagacgtccatgagtcctcttgctgtgtgggagcggcatccacagacttctggaataattggcctgtgaggaagctcatcaaagctgcaaacagtacaatgaatgcaatagagagccagagggccttattagcctttctgatggaggacttgagatttgttgcccaggaagctattgtgtcataaactgaagagacatcccactttgatggattatttttcttttcagaaagacttggcttccttgtcctttctactgtttcttctccagatggctctgagtcatctttagttctgtaaataaatgttgtttttaatatttgaaactaaggataatatgctataattattcataaaatattgctgaatcttactgtaactcaagaggctcacaaatatttgttctgttttagggaaagttgataaatatctaactctaaaaatcaaatcaccagatttataattt

SEQ ID NO: 6783 - DNA, 309 bp, Homo sapiens
ccatctgtccagcaggggctccagcagtcctttttgcacactctggattcttaccggatattacaaaaggctgccccctttgacaggagggctacatccttggcgtggcacccaactcaccccagcaccgtggctgtgggttccaaagggggagatatcatgctctggaattttggcatcaaggacaaacccaccttcatcaaagggattggagctggagggagcatcactgggctgaagtttaaccctctcaataccaaccagttttacgcctcctcaatggagggaacaactaggctgcaagacttt

SEQ ID NO: 6784 - DNA, 254 bp, Homo sapiens
  misc_feature (1)...(254): n = g, a, c or t
aaatgaatttggggaaggaagtgcgctggagaaatccttanctgtcagccaaggtggagagctctatgaagagtggctggaacttagaaacggttgcctctgctgttcagtgaagtgaggaatgtgtttactgtgtacatggtttactagaaatgtttattgattatatttccagctttaattntcttgagtaatttaactgaatttacacagtttgcttcattgtattttcaaacaaatagaaaataaactta

SEQ ID NO: 6785 - DNA, 259 bp, Homo sapiens; identical to SEQ ID NO: 59
  misc_feature (1)...(259): n = g, a, c or t

SEQ ID NO: 6786 - DNA, 415 bp, Homo sapiens
  misc_feature (1)...(415): n = g, a, c or t
cctacaaggagtcctacaaagaccggcggcggcgcgcacacactcaggctgagcagaagaggagggacgccatcaagagaggctatgatgaccttcagaccatcgtccccacttgccagcagcaggacttctccattggctcccaaaagctcagcaaagccatcgttctacaaaagaccattgactacattcagttttgcacaaggagaagaaaaagcaggaggaggaggtgtccacgttacgcaaggatgtcaccgccctaaagatcatgaaagtgaactatgagcagattgtgaaggcacaccaggacaaccccatgaaggggaggaccaggtntctgaccaggtcaagttcaacgtgtttcaaggcatcatggattccctgttccagtccttcaatgcctccatctcagtgg

SEQ ID NO: 6787 - DNA, 327 bp, Homo sapiens
ctgacatctggagttcatagcaccataaaggttattaaggccaaaaaaaaacatagagaagtaaaaaggaccaattcaagccaactggtctaagcagcatttaattgaagaatatgtgatacagcctcttcaatcagattatctaggggaagctccagcttctcatctgcttgatttgagtcccatggagaagctctgatatgtggtaaggtggaaaaatatgacacggtgcgatcaaggcattagaggatgaagctattgaagtgaaaacaaaattgaagaggcaaattcttttgagcagagggtaatttttttcttatttcattt

SEQ ID NO: 6788 - DNA, 132 bp, Homo sapiens
  misc_feature (1)...(132): n = g, a, c or t
gtgagtccaaactccagagaaagntgtgtgtgtgtgtgtgtgtgtgtgtgtgtgtgtgtgtgtgtgtgtttgtgtgaggtctgggggcttccccccanatgggtgtgagtgcatggtcctactgtacacaca

SEQ ID NO: 6789 - DNA, 342 bp, Homo sapiens; identical to SEQ ID NO: 306

SEQ ID NO: 6790 - DNA, 269 bp, Homo sapiens
ccactcctggaaacccactgatagatgagtttcccccattcttctggcctccgccacatgatcaggaagctggacttgctcttatccaaccactcgaggttccctttcttcctcagttcctctaatacaatctggatcgactccacaggaagctttcgctgtagcttgacgttgttgaagagcgggctctcctgagcttccatcaccgtcatgctggactgtttgtgcaggcggcagaaggacaggaccagcgagcaccaggcggccag

SEQ ID NO: 6791 - DNA, 361 bp, Homo sapiens; identical to SEQ ID NO: 61
  misc_feature (1)...(361): n = g, a, c or t

SEQ ID NO: 6792 - DNA, 298 bp, Homo sapiens
aaatgactgtgctgcccctttcacatcaaagaactactgacaacgaagtccgcgcctgcctttcccatctgtctatctatctggctggcagggaaggaaagaacttgcatgttggtgaaggaagaagtggggtggaagaagtggggtgggacgacagtgaaatctagagtaaaaccaagctggcccaaggtgtcctgcaggctgtaatgcagtttaatcagagtgccatttttttttttgttcaaatgattttaattattggaatgcacaatttttttaatatgcaaataaaaagttt

SEQ ID NO: 6793 - DNA, 262 bp, Homo sapiens
aaaggtatgtctcagtctggatttgaaacctcttagtatcaacaggaagaaacgttttgtatctattacaatgaggaaatctttttcaaaagatatttgggacaaagtacttccatccattcctgctctccaagctttcaagccctccccaggggttaaataggaaatgtatgtttgctggcctcctcaccgtccaacgtgacatttttttggtaccatctattctgctgtaatagaactaaatcatccatcgatgtcccag

SEQ ID NO: 6794 - DNA, 345 bp, Homo sapiens
cgctcagctcctggggctcctgctgctctggctcccaggtgccaaatgtgacatccagatgacccaatctccttccaccctgtctgcatctgtcggagatacagttacaataagttgtcgggcctctcagaatatagatcggtggttggcctggcatcaacagaaaccaggcaaagcccctaatgtcctaatttatgcgacttccagtttagaagaaggggtctcattaagatttactggcagtggatctgggacacaattcaatttaaccatcaccagtctgcagcctgacgattcagcaacttattattgtcaacattattctgcatctcttcgcagttttgg

SEQ ID NO: 6795 - DNA, 341 bp, Homo sapiens
ccacagctaacatcattgcagcacctttactccttcggctttttgccagcaccaacattggccccttccaggatagaccctcaagagcccactcactctaaaccactagccccaatggagctggagccaatgtacagcaatgtaaatcctggagatagcaacccgatttattcccagatctggagcatccagcatacaaaagaaaactcaggtaagatgcctttcaggcaaatagaggtgaggtggcagtgttttattgaaacgggcaaggggtctttgatcagagttatttcaaatacaagcccaacacgcaaggcattacttgcctcccatagtgtcag

SEQ ID NO: 6796 - DNA, 244 bp, Homo sapiens
aaagggaaaagtaaatttaacagttgcctttttttttaatgtcagggcagatcttattttacagtacagtgggggaaatagaaacatgtgaaaggcaaaaggcaggctcctaaattaatgtcagtgaagttcagggtgggcaaatgagtgtgtgtgaggtataggaaatgctgatgacttctttaatgcttgaagtccgttcacaggtatctagccctagaatgcctagaacaggaagaggcag

SEQ ID NO: 6797 - DNA, 437 bp, Homo sapiens
ctgtctcaaaacaaacaagcaaaaatacaaagaaaaatctggttatcaactgaaggctttcagcagaagcagcaccaccattatgtgttttgttttgttccctgacatatcccagattagaatagtaccttacacaggtgatcaataaatgttaaacagatgacagcacttaatagcatgggctctgacaagcagttagcactcaataaacacttattgtgtaatggtttgttttgttcacggacgtatatgaagcactagaacagtggctgctaacagagtagggctgaataaatatttgttaaacaggtgaaaacaattagtaaaaaaggacctagcacaaaatgagctctcaatacttatgtaatactttgctgagtgtctagaattatgtctgtcatatagtaggtggtcaatatacctaacttgttaaacag

SEQ ID NO: 6798 - DNA, 371 bp, Homo sapiens
ccatcggcctggtgggcttcctcgtgggcaccgtcctcatcatcatgggcacatatgtgtccagtgtccccaggtaatgatccttctgagagaaatgacttgtgggagacaccctgcagatcctcatgggtttgtgacagaccctgcgtgctcagtgccctttaagtgcatcccgctgtgctgactttgagtgggatcaacatctgtcctacgggtcccctcttttttggccccagtattcatggcagggtttgttggacacctactagcttcccttcccattcaacacacacacacattcttgctctacccaaagctctggctggcagcactaaatgctttggtggtgtttgcactgtgtcctttccagg

SEQ ID NO: 6799 - DNA, 216 bp, Homo sapiens
aaaagtaatacttggtgctaagaatttcaggattattgtatttacgttcaaatgaagatggcttttgtacttcctgtggacatgtagtaatgtctatattggctcataaaactaacctgaaaaacaaataaatgctttggaaatgtttcagttgctttagaaacattagtgcctgcctggatccccttagttttgaaatatttgccattgttgttt

SEQ ID NO: 6800 - DNA, 368 bp, Homo sapiens; identical to SEQ ID NO: 62
  misc_feature (1)...(368): n = g, a, c or t

SEQ ID NO: 6801 - DNA, 383 bp, Homo sapiens; identical to SEQ ID NO: 63
  misc_feature (1)...(383): n = g, a, c or t

SEQ ID NO: 6802 - DNA, 389 bp, Homo sapiens
ctgctgttgtgaacttcattctgccttttctttctaattctctgggtccagatctgtttacaccacctcctggtacaacacccctaagagctgactttggcagttgtgtatctctgttactggggcttgaattaaacatcttagtgaacaaactttagctttactcttcaatactgaaaaaaaaaatgttatgcccatggttaaaccagtatcctactcaatccttctgtgatgttactcacaaaatgaattgcataaaatcggatacctgagattgttttggctgggaggatccttgaattataaagattaaattagattaatcaggaatgacctctgttactccttatggggacattcaacttctgactgaactttttttttccttt

SEQ ID NO: 6803 - DNA, 547 bp, Homo sapiens
ccaaaactcttccttttggaaccacatgaaagtcttgatgctgctgccatgatccctttgagaggtggctcaaaagctacagggaactccaggtcctttattactgccttcttttcaaaagcacaactctcctctaaccctcccctcccccttcccttctggtcgggtcatagagctaccgtattttctaggacaagagttctcagtcactgtgcaatatgccccctgggtcccaggagggtctggaggaaaactggctatcagaacctcctgatgccctggtgggcttagggaaccatctctcctgctctccttgggatgatggctggctagtcagccttgcatgtattccttggctgaatgggagagtgccccatgttctgcaagactacttggtattcttgtagggccgacactaaataaaagccaaaccttgggcactgttttttctccctggtgctcagagcacctgtgggaaaggttgctgtctgtctcagtacaatccaaatttgtcgtagacttgtgcaatatatactgttgtgggttg

SEQ ID NO: 6804 - DNA, 309 bp, Homo sapiens
cagcaaggaacacaaaggcatctgccacctgagcaagtatcgaacaccatcacctgcatccttcaagggttccaggtagatctccagcctcttgtaggagagaaccaagttgaaaaggtcaaacgctggggacttggtaggaaaaggtggagactccaggggagcctcgggcatcacgctggggctcagctccggcccactcccctcacgttctgatgtctgcatcccggccgctggctccgtgagggaggcggcagggtcgggcaggagcaggggtagagccactgggccccggagcgtttcttcagg

SEQ ID NO: 6805 - DNA, 435 bp, Homo sapiens
ctggctgaaggtggaaggatggtgtattccacgtgttcactaaaccctattgaggatgaagcagtcatagcatctttactggaaaaaagtgaaggtgctttggagcttgctgatgtgtctaatgaactgccagggctgaagtggatgcctggaatcgcacagtggaaggtaatgacgaaagatgggcagtggtttacagactgggacgctgttcctcacagcagacacacccagatccgacctaccatgttccctctgaaggacccagaaaagctgcaggccatgcacctggagcgatgccttaggatattaccccatcatcagaatactggagggttttttgtggcagtattggtgaaaaaatcttcaatgccgtggaataaacgtcagccaaagcttcagggtaaatctgcagagaccagagaaagcacacag

SEQ ID NO: 6806 - DNA, 227 bp, Homo sapiens
ctgggttttgggagaaaggagatgctaccaagtcttggatgttagggcgagaccctgcaagttgagtattagagagcttgtctttcaaggcaggttcctggggcttcagggctaggagggaggagcctgcccttttaacagaaccccagtcacatgcggctcaagtcactcagaggctgttgcatttcagggctatgttggtcctttgtttacctcctaaaccacag

SEQ ID NO: 6807 - DNA, 347 bp, Homo sapiens
aaaaagcattcagattaagagattgaaaagagcgaggcatctaaggctggggggtggggaaggaaaagctgtggagcactacccctcccccaggccacaaaagtcaagggatgtctcttccactggtagcctcaccacacagcttactgaaatcaacaatgttaaatatttagcttcacaaactctgtaaaaatgagttgttgtgacctacaaaaaaggtatatacatattttacataatacaatatcttaaaggtcatatttacaaaaaaatctattcacagaaacactgcgagattctgattcagaatgcagtacctggccttgggttttcagaagtttattttt

SEQ ID NO: 6808 - DNA, 299 bp, Homo sapiens
tccacctcggagagctgggccaggcgcggggccctgaggctcacgtccatctcgtccccgatgcaggccagccgcagggccaatgcgtcactgccctccatgcattccaaagaatcgaagtcctccatagggtccaggtcctcttcagagtcagtcatgccaagaacctccatggtcgggggttccaggagctgctcatacaggagggtctccatcaagatgtctctggagaggggtcttacttcagacatttctcctctggcggcggcgatgctggcagcgtctgtaagccacccggg

SEQ ID NO: 6809 - DNA, 306 bp, Homo sapiens
  misc_feature (1)...(306): n = g, a, c or t
cgctgcgttacccggaaccgccgggccgaacagcatgacgtccgctttggagaactacatcaaccgaactgttgccgttattacatcagatgggagaatgattgtgggaacactgaaaggttttgaccagaccattaatttgattttggatgaaagccatgaacgagtattcagctcttcacagggggtagaacaagtggtactaggattatacattgtaagaggtgacaacgttgcagtcattggagaaatcgatgaanaaacagattctgcgcttgatttggggaatattcgagcagaaccttt

SEQ ID NO: 6810 - DNA, 226 bp, Homo sapiens
ccaagatgtggatgtgaccaccaacccagatgaggaacttgatggggatgaccgctatgacttcgaggtggtccgctgcatctgtgaggtccaggaggaaaatgacttcatgattcagtgtgaagagtgccagtgctggcagcatggggtctgcatgggattactggaagaaaatgtgcccgagaaatacacctgttatgtttgccaagaccctccaggtcagagg

SEQ ID NO: 6811 - DNA, 456 bp, Homo sapiens
aaaatcccagtttcagggaacaggactcaggtgggagccacgcctaaaagccttccacagagagagtgtggttaagcgcataggcgtcgctatcctcttcctccaaaagcagcttgtcgatggtcaacgagctggcggctcttctggggtcttccatgtcctgaaggactggctctgggatagagatggggagctggacaaactggggcccaggtagggctggggccggaggctggtactgcagggtggaggtgggtagtgtggaaaggggctgaggccacgggaaataggtgaggggtgcctggtgctctgggccctccagcgggggccccactgcgggcgtggcggagcttcctgtcgtgacattggtgatgagtggcggagaggcataggtcaacactgaggagggccccaccaccgtgtagccggggcacacgggctgcacatacatgtcag

SEQ ID NO: 6812 - DNA, 301 bp, Homo sapiens
ccagaaccttggcctggtccacagcgtcgagcaggttcttggcgtccacagccagggtgtgtgaagccgtcagcatctgcctcttgcactcctcactcagggaggtcacggcgttctgctgcgccagccgcatcttgttgatgagctctgccaggtctttgttgagcagtttctgggtgccctcgatctctgtccgtgaagatgacggcaaggaaggcaggagatcatccacgctcccgatgagcttccgcagggtcagccccacattcttcaccaccaccacgtagccctcggggggcag

SEQ ID NO: 6813 - DNA, 443 bp, Homo sapiens
ccatggagaaacgcagagcagtccagaaccagtggcagctacaacaggagaagcatctgcagcatctggcggaggtttctgcagaggtgagggagcgtaagacagggactcagcaggagcttgacggggtgtttcagaaacttggaaacctgaagcagcaggcagaacaggagcgggacaagctgcagaggtatcagaccttcctccagcttctgtataccctgcagggtaagctgttgttccctgaggctgaggctgaggcagagaatcttccagatgataaaccccagcagccgactcgaccccaggagcagagtacaggagacaccatggggagagaccctggtgtgtccttcaaggctgttggtctacaacctgctggagatgtaaatttgccatgacttcctggaggacagcagcatggagaaagatcctagaaaagg

SEQ ID NO: 6814 - DNA, 448 bp, Homo sapiens
ccaggtggccctccgtgtgaggtcatggtcacagcatagtttggagctagggagggactgtcagcctggaggtttggagactcattctggaatctagtgtgggtcaagccaacttcagggagaggctgagccagggtaggagtcacaggagcagacgaggatgtggggtgccgtgcacagagctccatgaccagcttgggaagttagaaggaaggggaggcaggaggctgcttagtctgctgccatgatgggccccatgaatggtggctctcaagcttctgtgctacacaggggtgtgtggttgggcgagtgtccttgttaattgatacctaattggccttggttgggaacatagccatgagtgcccctcgtgggtggggcgccagtctgtcattgacctcattgtgtcagcaccttccccccaaggaggctgaccctgccctgccag

SEQ ID NO: 6815 - DNA, 545 bp, Homo sapiens; identical to SEQ ID NO: 307

SEQ ID NO: 6816 - DNA, 393 bp, Homo sapiens
ctggagagagatcaatatgctgaacaaataaaaggagagagggcccagtggcagcagaggatgaggaaaatgtcgcaggaggtttgcacattgaaggaggagaagaagcatgatacgcatcgggtagaggagctggagaggagcttgtccagactcaaaaaccagatggctgagccactgcccccggatgccccagcagtgtcctctgaggtggagctgcaagacctgaggaaggagctggagagagtggcaggagagctccaggctcaggtggaaaacaatcagtgcatcagtctcctgaaccgtgggcaaaaggagaggcttcgcgagcaggaggagaggcttcaggagcagcaggagaggcttcgggaacgggagaagaggcttcagcag

SEQ ID NO: 6817 - DNA, 332 bp, Homo sapiens
ctgctcacctcactggtctaaacactcatgggctaaccttgtcctagtccatgatttcagtggtgtttggaaaagatgatttttctaactcagtcactcattcacatttatgggccgacattcctttttgttgttgtttttttgagacagagtctcattctgtcacccaggctggagtgcaatggtgcgatctcggctcactgcaacctctgccttctgagttcaagcaattctcctgcctcagcctcccaagtagctgggattacaggcgtgtgccaccacacccatctaaagtttgtatttttagtagagatggggtttcgccatgttgg

SEQ ID NO: 6818 - DNA, 244 bp, Homo sapiens
ccagaaacatttggacaactgtgtctcaaaaacagtgtgttctcgtttcgcttctgtgcctcagtctttaagatacaaaactatctcaggacaccacatcctgggcccagcctgcagagtggtcacttttctgccactgccctcaatatgagggagcactgaaaggctcttgacttagaaccccttcccctttctgtctaaagccgaggagccatctgtggttgcgagcacgcagcacaccagg

SEQ ID NO: 6819 - DNA, 429 bp, Homo sapiens
ccaggtggctcatgcagtcaccggagctttgcttcaggacatgtgtgctacaagtccaggctggacaaccccaagaactgtgagggttcagcaagcggggtgggtccactgagctctcaacacaagcttccgggacccagaccctcatctggaaaccacacaggccagccctgcgatgctctgtgtagcagggagcaagggtcacaccacagccacatctgcttcattcgggggatccaacttggcatgtcttggtaaaggcattcatggtgctgcccaggacaccagcaagcactgaagtcctcacaagttacttcaggagtttaaccctgcacacgcccaacagaagggttttcaccagctctgagcctggacacttacaggcacactgtatgttcaagtcagttattctgtctccatctagaaagg

SEQ ID NO: 6820 - DNA, 103 bp, Homo sapiens
ccagggcgtgtaatgacttcagtattggcctcgtgttgttggtactcactatccgatccaggcagggaaatggtcagtgcgtgtgtgtcgggtggggtggggg

SEQ ID NO: 6821 - DNA, 302 bp, Homo sapiens
ggcccggcgatgtcgctcgtgctgctaagcctggccgcgctgtgcaggagcgtcgtaccccgagagccgaccgttcaatgtggctctgaaactgggccatctccagagtggatgctacaacatgatctaatcccgggagacttgagggacctccgagtagaacctgttacaactagtgttgcaacaggggactattcaattttgatgaatgtaagctgggtactccgggcagatgccagcatccgcttgttgaaggccaccaagatttgtgtgacgggcaaaagcaacttccagtcctacag

SEQ ID NO: 6822 - DNA, 571 bp, Homo sapiens; identical to SEQ ID NO: 625

SEQ ID NO: 6823 - DNA, 277 bp, Homo sapiens
gcttgaaggaatttcacttccttgggtgctggtaccttattcacagcagatggtcatgcttagaaaaccctgcttcagggtcagtgactgaaaaaccaggggtgccatgccagtgcctttgtcagggctgttttctgcttaaccactttctcagaataatgcagaagaaacccagtccgctaccttttgagtgtgtgggaaataagaacggggtgggagaggagatgggagatgcaggtcgaaggacaaaaaggagcagatgagcaggatgaacagg

SEQ ID NO: 6824 - DNA, 287 bp, Homo sapiens
cctgctctcctcacacattgtgtggtttggggttaatgatggagggagacacctcctcatagacggcaggtgcccacctttcagggagtctcccagcatgggcggatgccgggcatgagctgctgtaaactatttgtggctgtgctgcttgagtgacgtctctgtcgtgtgggtgccaagtgcttgtgtagaaactgtgttctgagcccccttttctggacaccaactgtgtcctgtgaatgtatcgctactgtgagccgttcccgcctagccagggccatgtctta

SEQ ID NO: 6825 - DNA, 334 bp, Homo sapiens; identical to SEQ ID NO: 65
  misc_feature (1)...(334): n = g, a, c or t

SEQ ID NO: 6826 - DNA, 214 bp, Homo sapiens
ccacaccttgatgaaatcattttcctcctcgacctccaactggcatcactctggatctcaattttgatatttaccaccacaccaagtatgttccttcacatgtccatacctagttttctttttttctaaataataagtgatcctcccacttcagcctcctgagtagctaggactacaggtgcacaccaccatacccaactaattttttgttttt

SEQ ID NO: 6827 - DNA, 377 bp, Homo sapiens; identical to SEQ ID NO: 66
  misc_feature (1)...(377): n = g, a, c or t

SEQ ID NO: 6828 - DNA, 330 bp, Homo sapiens; identical to SEQ ID NO: 308

SEQ ID NO: 6829 - DNA, 373 bp, Homo sapiens; identical to SEQ ID NO: 6

SEQ ID NO: 6830 - DNA, 80 bp, Homo sapiens
aaacaagaatgaatcattactgtgtatgttagggtattaaaactgtttcaccagtacagtgaaagttgtttcaacatttt

SEQ ID NO: 6831 - DNA, 281 bp, Homo sapiens
cctcagaccgggttctgagtacacagtcagtgtggttgccttgcacgatgatatggagagccagcccctgattggaacccagtccacagctattcctgcaccaactgacctgaagttcactcaggtcacacccacaagcctgagcgcccagtggacaccacccaatgttcagctcactggatatcgagtgcgggtgacccccaaggagaagaccggaccaatgaaagaaatcaaccttgctcctgacagctcatccgtggttgtatcaggacttatggtgg

SEQ ID NO: 6832 - DNA, 159 bp, Homo sapiens
aaattttacatgctgaaaagctgcagagcagaggaaccaaaccaggtttatttgtgctaccaggaggtgttcttaatgggaacaggcctcctatctttagtcactttgtacaggatgatatccatgagtactttagtgtttgtatatgttttttctttt

SEQ ID NO: 6833 - DNA, 465 bp, Homo sapiens
aaaggtggagcttttcaaaaagggaaactgggagcacttacagcccaggtctatgttactggtaagaagtggtttgtctcaggaataatgtaccctgtggagagtactttgtgtcagcctcactgagaacaaaaaaagcactcctttccccatgattaacactcatgtgtcaggaaagtacagtcaatgtatgctaaaaatccacttgaacaattagctcgcttttttccctcatttgctttcagagtaaatgtgctttcagagtattaggtcggcctaatacatgatacattttaagaaggggaggaaagcgcattgtataccctgatgctgggacccaatagaagacaggccccctggctggcctttggttctccctggagctgacaaagggaaggggcttggaaagcagccactgtccccgcctagtttgggcctttacagacacacctttccttttggcag

SEQ ID NO: 6834 - DNA, 536 bp, Homo sapiens
cctggcatttcctactggatgttctctcaataattgtgctgcccattatactcccaatgccggtgacacaacagtattacagtatgatgacatctgtaaaatagactttggaacacatataagtggtaggattattgactgtgcttttactgtcacttttaatcccaaatatgatacgttattaaaagctgtaaaagatgctactaacactggaataaagtgtgctggaattgatgttcgtctgtgtgatgttggtgaggccatccaagaagttatggagtcctatgaagttgaaatagatgggaagacatatcaagtgaaaccaatccgtaatctaaatggacattcaattgggcaatatagaatacatgctggaaaaacagtgccgattgtgaaaggaggggaggcaacaagaatggaggaaggagaagtatatgcaattgaaacctttggtagtacaggaaaaggtgttgttcatgatgatatggaatgttcacattacatgaaaaattttgatgttggacatgtgccaataa

SEQ ID NO: 6835 - DNA, 553 bp, Homo sapiens
ctggagcagaaggcggcccgttcacttcagccagatccacttgtctcccacctcggtgttgtacccagggctgtacttgcggcccggcagctctctgaactgatgtaagacacggtcagtctgatgagctccaatggtgacttccgggagaaagataggaatgcttgtgtaattcagcacctcaaacttatcctgaaccagtaatcgcaggtggtataaagtgcgattgtcctgcttgagccacggccctttatcgaacttcaggtattcaatgtcctctaccaccttttttgaatcttgagcttcccttgcagaatattgtaaaacctcacatttttcactcatctcagggagaaaggttttcttataggcattctcaatgtcctgtagataggcagaggtgatcttcatttcatgtggctaaacagaagcagaaaaatcaaactgggaaacatttagagttcattctctttgacctgtgcgtatataaaatgcgaagacaatcactgaccaccaatttcttacaactcacaccgggcactgtggggactgc

SEQ ID NO: 6836 - DNA, 251 bp, Homo sapiens
aaatgaaatttgaaaaccaaatagtaagaaatggaaagagatagttgtaagaatccatttaccaattttacagctaaaaattaaagtgaagtagaaatagcaaaagataacagacaaatatattattttaggtcattaatttatagtgccttatcatcttaagttataaatagaataaggattttgttatataaaaactatcaaaaaagtatcagtgaaaagacatgacctccatgaaatgtgctgagtgg

SEQ ID NO: 6837 - DNA, 443 bp, Homo sapiens
  misc_feature (1)...(443): n = g, a, c or t
aaaaatatttttagtagagatgggttttcgccatgttggcacactggtctcgaactcctggtctcaagcaatccacccccctcagccttccaaagtgctgggattacaggtgtgagccacaacacccggccggctcttttttttttttttcttctttanagacagggtttcgtgctgttgcctaggctggagggcagtggtgcaatcatagctcaatagctcactgcagcctcaaccctctggctcaagtgatcctccctgctcagcctcccaagtagctgggactacaggggcgcaccatcacaataactaattttttatgttttgtagaaagggagtcccactatgttgcccaggctggtctcaaactcctggcctcaagtgcaccatcacacccgactaatctttgtatttttagtagagatggggtttcaccatgttgg

SEQ ID NO: 6838 - DNA, 289 bp, Homo sapiens; identical to SEQ ID NO: 4564

SEQ ID NO: 6839 - DNA, 300 bp, Homo sapiens
ccataaagatgattttgtcatcacaaaagaccatgatagtatcagttagttcataaccaaagagccatgtctgtaaggcagttgatttggcataaacaatttcttcatcaacacccactgatacaacaatggcatcaacgttggcatactcatcttctcctttccgccaattgctgtacagtctcttcactcgccgataataagcgtctttgtccagagtcacagccatagccccggacgccgcttctcctcgggttccgagaatcacgcgaggtcccggctcagccacccgctctcggc

SEQ ID NO: 6840 - DNA, 240 bp, Homo sapiens
aaatatgggaaggcaatgcagaactcttgggaattatcgagttctgataccccaaaagaatgaaatcaaacttctgttaatgggatgatgggtcgtggaatgggacaccttgggcacttgctaacaggaacataggaaaattggagttgaaacttcgcaggctctgtaacgaatgtggatgactgctacagaataaggctgacttcctgtaattatgatatttagtaacgcgatgtgttt

SEQ ID NO: 6841 - DNA, 51 bp, Homo sapiens
  misc_feature (1)...(51): n = g, a, c or t
gatcctgcgttaatctatgactatgccattgngctattcaagggtcaagga

SEQ ID NO: 6842 - DNA, 189 bp, Homo sapiens
ccaaataaccaaggtgaagaaaggtaaggggaagaaaaaaaaagaaaaaaaagggctgtatccaaacaaaaacaactcgagatcagagaattggtctatatttcattaagataaattgtttcaaatgaaacatttggtaattgagaatactactttaatatctgagctacttagggccctttccttttt

SEQ ID NO: 6843 - DNA, 463 bp, Homo sapiens
  misc_feature (1)...(463): n = g, a, c or t
ctgtgcgtggaccanntcagcttccggntgtgactggagcagggcttgccgtcttcttcagagtcactttgcangggttggtgaagctgctcccatccatgtacagctcccantctactgatgtttaaggatggtctcggtggttaggcccactanaataaactgagtccaatacctntacacagttatgtttaactgggctctctgacaccgggaggaaggtggcggggtttaggtgttgcaaacttcaatggttatgcggngatgttcacagagcaagctttggtatctagctagtctagcattcattagctaatggtgtcctttggtatttattaaaatcaccacancatanggggactttatgtttnggttttgtctaagagntannttatctgcttcttgtgctaacanggctgtngntgntagggcccnttatacctgggggccagcctttggaaat

SEQ ID NO: 6844 - DNA, 520 bp, Homo sapiens
cctggcagcactggagggcaggcagggaaagtagggtgggtaacccagcctggcaaatgcacggcagctagaaaacctcttcaggttctggggtggctgggccatgagaggggaggccaggcagggctgtcaaggtaaccggggtcagatcatggagttgcctgccaggctccacaggagtgggggacagaagcagagcaacccagctaccagccgggccctgagctccctcagggtgaccagggaggagctgtgactggctggggaggcagggctggggccgaggttccccaggacgacaggagggagccaaggcactctaagaggtggaagaagaggaccagaagctggtgagtgcatcactggagcccataggagggctcctgactgtcctcaaaagcctcagacctcagtgtccactttctccatccaagaaatggggctgtgatctctgcttatgacagcacaagcttgcacagaagtggaggcgggaaataagcacaagtgtgccttcccagcc

SEQ ID NO: 6845 - DNA, 418 bp, Homo sapiens
aaaaatggagagtctgaattttattagagctcacacaccatatattaacatatacaactgtgaaccagctaatccctctgagaaaaactccccatctacccaatactgttacagcatacaatctctgttcttgggcattttgtcagtgatgctgatctttgccttcttccaggaacttgtaatagctggcatcgttgagaatgaatggaaaagaacgtgctccagacccaaatctaacatagttctcctgtcagcagaagaaaaaaaagaacagactattgaaataaaagaagaagtggttgggctaactgaaacatcttcccaaccaaagaatgaagaagacattgaaattattccaatccaagaagaggaagaagaagaaacagagacgaactttccagaacctccccaagatcag

SEQ ID NO: 6846 - DNA, 479 bp, Homo sapiens
  misc_feature (1)...(479): n = g, a, c or t
ccttgcctcanatccanngtcactcggaagaggccatgtctaccctcaatgacactcatggaggaaatgctgagagaagcattcagatgcatgacacaaggtaagactgccaaaaatcttgttcttgctctcctcattttgttatttgttttatttttaggagttttgagagcaaaatgacaacacccagaaattcantaaatgggactttcccggcagagccaatgaaaggccctattgctatacaatctggtccaaaaccactcttcaggaggatgtcttcactggtgggccccacgcaaagcttcttcatgagggaatctaagactttgggggctgtccagattatgaatgggctcttccacattgccctggggggtcttctgatgatcccancagggatctatgcacccatctgtgtgactgtgtggtaccctctctggggaggcattatgtatattatttccggatcactcctg

SEQ ID NO: 6847 - DNA, 486 bp, Homo sapiens
  misc_feature (1)...(486): n = g, a, c or t
ctgtgctggccccgacacagctccagttccacccatgacatctggctgaggaggcttatgggagcggcttctcatgcacagttactgtccctctctggagggtcctttaatggggactgtgcaaagcagtgacactaactgccagtacactcacttttctgaggtgaaaataaaaaggtttattcaaggataaatgaactctggttaaattactacttcattttcattactacttcatatattagatttcagagtgtgtgagatggacagtgtattctggaaattttaatttaacacccatccacaaatacttatttcaaggaaggctaatcatcttcattaaattgnncactttttcgtgtagactttttctctccatgtttactaaaacagggagatccacgangcacatttttttaacctcgcaaaactcttaattctaacttaattactaaactctgccttcaaccaaattttcaatatctt

SEQ ID NO: 6848 - DNA, 223 bp, Homo sapiens
ccactgactcaggtgaccttctaccgagatggctcagctctgggtccccccgggcctaacagggaattctccatcaccgtggtacaaaaggcagacagcgggcactaccactgcagtggcatcttccagagccctggtcctgggatcccagaaacagcatctgttgtggctatcacagtccaagaactgtttccagcgccaattctcagagctgtaccctcag

SEQ ID NO: 6849 - DNA, 249 bp, Homo sapiens
ccttcatgtgtatgtctggcaatcactttgacctacttagtaggtaacaaacatgatgccaccagctacagtgattatttaggcttatgtaacactataaatgaaaaggggagtagtagagcacccccattatctaaagcggggatcagcaaactttctctgtgaagagctagacagtaaaattttaggttttatgggccgcatagggtttgtgtctcatattattctgtgtcgttgtcataacccttt

SEQ ID NO: 6850 - DNA, 361 bp, Homo sapiens
aaaaacctgtacacagtgtttattgtggttaggaagcaatttcccaatgtacctataagaaatgtgcatcaagccagcctgaccaacatggtgaaaccccatctgtactaaacataaaaaaattagcctggcatggtggtgtacgcctgtaatcccagtgacttgggaggctgaggcaggagaatcgcttgaacccgggaggcggaggttgcagtgagctaagatcgcgccactgtactccagcctgggcaacagcgagactccatctcaaaaaaaaaggaaatgtgtatcaagaacatgattatccaggggtattttctaattcagatcatcaaactgattatatagaagagttggcttt

SEQ ID NO: 6851 - DNA, 494 bp, Homo sapiens
ctgcaagaggctgacagaggccaccaccagaaattccttgaggtgagtttcaatgttcttgttgtagagcgtgaagagggcagcagacacctggatgatggctttggtcaagcaatgaatattgttgttgtaaccatccttctcaatgctataaaaggaagaagggtcagtggcaaggagtgggagggaaactgccagaaagatcaagagcaggcaggccaccttatattcctcctcaggagatgaagtatcagctttcagattagcaatggcagccaccaaggctgggtcaatgtcacagcccacacctgcagcagatgccagctcaaagatactcaaggtcaccttgatgtctgtgtctggagtgacaaactccttcaagcactcaatgggacccataagaaatgggcagtgggaggagaaaacctcccgaagtccctcttgggccatggccctgaaactgaggataaccccaatgatggtcatgcgcttta

SEQ ID NO: 6852 - DNA, 189 bp, Homo sapiens
ctgcttgagaacagagactgctaccccatcctgcccatgcaggcaggctcttgccagccccgttctgacccgtgtccccccaggctctgcctgggcagaagactcaccttggaggagtgggccctggagtcctgtccctcccagaagcccccagggtgggatttctcaggctgccagggcaggcccagg

SEQ ID NO: 6853 - DNA, 295 bp, Homo sapiens
aaacagaggaaccgaaaaatgaggtttacagtctcatcacatgaacactcaaatctgtacccaaggaaacagcggtattatatttactgtcacagctagaccctatcaggtgaacagggctctccacctgcggctgttgcttcgcaaaatatctttcctctccacgtgaacaagtagctctagagtgcttttaggcagagtgacggtgatgtcatgggcaccacgccaatcttattcctggacaatgacttaagccccatcgtgagaatggttttttcctcttcaacacattttt

SEQ ID NO: 6854 - DNA, 186 bp, Homo sapiens
aaaaacttaaatatttcggaggcacatgttggactactttgttttaattaaactgctagtatttctttgtcaaggatgtttctagttttttgctttattgccttgcattctaatgcagtttgttctgtaactcgagagccagtagcattggattgatggaagtgtagggtttatgaattattgcag

SEQ ID NO: 6855 - DNA, 357 bp, Homo sapiens; identical to SEQ ID NO: 87
  misc_feature (1)...(357): n = g, a, c or t

SEQ ID NO: 6856 - DNA, 308 bp, Homo sapiens; identical to SEQ ID NO: 88

SEQ ID NO: 6857 - DNA, 326 bp, Homo sapiens
cctgaggctgctggaggttgctacatgggtgatgaccccatctctgctatcttccccctgcccgttgtgtaccatcttgctcttgggaaagtggcattcacacccccttcctggctgggttagtctcatttgaatacttccacgtgctcccaccctcggcattcaacttcccacacaggtgggggctgtctggatgcacagggtgattcctccagaccttcctttgattgggtctttgtctgttgattgacactttgtgacaggtcacctttccattgcaatgtctagttgtgaggctacctcatgactcaatttccagtgggttt

SEQ ID NO: 6858 - DNA, 495 bp, Homo sapiens
cctcttggcctcacatacagttggtatatgaattcttcttgagatttttggagagccctgatttccagcctagcattgcaaaacgatacattgatcagaaattcgtacaacagctcctggagctttttgatagtgaagatcccagagaacgtgacttcctgaagactgttctgcaccgaatttatgggaaatttcttggattaagagcattcatcagaaaacaaattaacaacattttcctcaggtttatatatgaaacagaacatttcaatggtgttgctgaacttcttgaaatattaggaagtattatcaatggctttgcattgccactgaaagcagaacataaacaatttctaatgaaggttcttattcctatgcatactgcaaaaggattagctttgtttcatgctcagctagcatattgtgttgtacagttcctggagaaagatacaacactaacagagccagtgatcagaggactgctgaaatttttgg

SEQ ID NO: 6859 - DNA, 418 bp, Homo sapiens
ctgggccttcaggaaggtggtccacttcttctgcagcagcttttcgccgcccacgtcattcttgcagactctagccacccgcgatgtgtggagcctctcaaagaagtcaaactcgctggctgtctcctcgaagaagaagtagacgacctgggtcgaagggatggctgccacaaaggaggcgtcatgatgcagccagcggaggaagttgtcggtcttgaggacaagctgggatcccagtgtgcgcatcaggatgggctcactgcccaggaagttgttcatagtaccagaatagagcatcccatccaccaagacagccgtatgcttgtgagcggggtcaaaggggctttggccttttccctccatgaccttgtcctccgagatgggcaacaggtaggaatcttgaagttcctaaatgggg

SEQ ID NO: 6860 - DNA, 269 bp, Homo sapiens
caggctccaaactccactaaccagagctgtgattgtgcccgctgagtggactgcgttgtcagggagtgagtgctccatcatcgggagaatccaagcaggaccgccatggaggaaggtcaatattcagggatcgaggagcttcccaggaggcggtgttgcaggcgtgggactcagatcgtgctgctggggctggtgaccgccgctctgtgggctgggctgctgactctgcttctcctgtggcactgggacaccacacagagtctaaaaca

SEQ ID NO: 6861 - DNA, 192 bp, Homo sapiens
cctaccaccttcagaagtcgacctgtggcaaatgtggctaccctgccaagcgcaagagaaagtataactggagtgccaaggctaaaagacgaaataccaccggaactggtcgaatgaggcacctaaaaattgtataccgcagattcaggcatggattccgtgaaggaacaacacctaaacccaagagggcag

SEQ ID NO: 6862 - DNA, 206 bp, Homo sapiens; identical to SEQ ID NO: 89
  misc_feature (1)...(206): n = g, a, c or t

SEQ ID NO: 6863 - DNA, 417 bp, Homo sapiens
aaacagagaacaaagggattcactcagagatcagaatacgaagcttcctctcagcatcatgggaggagataaaataattcattctatggtctttgttccattaagacttggtgctttcttcagtaacagtatgtgaaatgtggctgactttgagtcccccactgtgtaagtggaattatttttcactgcagcatttctgagtctttttcttgttccttactctgaactgtaaaattaagttcataaaggcatttggcaagggtggaggaagcttccatgttactaatggctagcactgataagttattttcatgtctctttaacaatctttctaaatatggaaggctgcacagcaaaattctttttcaatcttcattcatgtttctagaaaatttagaaaatggtgtcagaaaacag

SEQ ID NO: 6864 - DNA, 336 bp, Homo sapiens
ctggcaggtagaattcagggacactgctaaacatcctacagtgcacacccacaacaaagaattaattggtccaaaatcaccatagtgccacatttcacaaactctgagccaagtcatccttttccatcacagtgtgtcagcggataatatcgaaaatgtaaatatcaagtagcaaaaataggtgttcagagattgagtgatagatataaaattaaatagctgaaggctcagagtgagaagtaaggctgggttggtggggtttcatcatgacaatccttgtggaactctttgtttctgtaaactctgtgtatgtgtatgtacaacttttgatatttt

SEQ ID NO: 6865 - DNA, 373 bp, Homo sapiens; identical to SEQ ID NO: 90

SEQ ID NO: 6866 - DNA, 545 bp, Homo sapiens; identical to SEQ ID NO: 307

SEQ ID NO: 6867 - DNA, 428 bp, Homo sapiens
ctgatgaagaacacgggtgtgatccttgccaatgacgccaatgctgagcggctcaagagtgttgtgggcaacttgcatcggctgggagtcaccaacaccattatcagccactatgatgggcgccagttccccaaggtggtggggggctttgaccgagtactgctggatgctccctgcagtggcactggggtcatctccaaggatccagccgtgaagactaacaaggatgagaaggacatcctgcgctgtgctcacctccagaaggagttgctcctgagtgctattgactctgtcaatgcgacctccaagacaggaggctacctggtttactgcacctgttctatcacagtagaagagaatgagtgggtggtagactatgctctgaaaaagaggaatgtgcgactggtgcccacgggcctagactttgg

SEQ ID NO: 6868 - DNA, 347 bp, Homo sapiens; identical to SEQ ID NO: 91

SEQ ID NO: 6869 - DNA, 308 bp, Homo sapiens; identical to SEQ ID NO: 3350

SEQ ID NO: 6870 - DNA, 299 bp, Homo sapiens
cctctatgccagagaaggagccctcagttctgagaaaagtactattggaggatgaggtgttggctgccatggtgtctgtcattggcactgctacaacccacctgagccctgagttagctgcccagagtgtgacacacattgtgcccctcttcttggatggcaacgtgtcctttctgcctgaaaacagcttcccgagcagattccagccattccaggatggctcctcagggcagaggcggctgattgcactgcttatggcctttgtctgctccctgcctcgaaatgtggaaatccctcag

SEQ ID NO: 6871 - DNA, 421 bp, Homo sapiens; identical to SEQ ID NO: 92

SEQ ID NO: 6872 - DNA, 406 bp, Homo sapiens
ccagcagaaatggtctataaatctacacatttgtcctaaaacctaaagccatgtagaccttttatacagtaagatacccacttacgtgcagtgaggtgtattcctataggtgacatcaaagtcatgcaacaagacactggcgtgaagaagtaatttctgagagtcagacagaacaataatatgaactacatagaactggataataccaatcaaaaagcgaaaatgcgaaacagctttcctgggacaagagtcaggtaattttgttcataggtaatacaaatgcacttacacacacctctaaaaacatactttcttggccgggcgcagtggctcatgcctgtaatcccagcactctgggaggccgaggcagacggatcatgagatcaggagttcgagaccagcctgg

SEQ ID NO: 6873 - DNA, 589 bp, Homo sapiens
ctgctgtttacttatcaaggttatagttcgtgcttctaactggagcactagctgctaatgcatatctagagaaaaaaatcttcctttgcagttagtgccaaaaggattcaaggcttgtctggctgcaaaatgagatttttatcaggcatcttgagcattattataaagcagatgacagtatcgtgtttggggtagtgaaattaaagcccataccaaagtgggccagccaagagcaggtgtcagcctgggacagatgtgaacaccaggaataaaagagcagttatgtaatccatttcgacgcacttctggaactgtaaactgtaaacaaatgctgcaaaggttaactattttctaaaacttacttttttccagtgggaaaacaaatatttggtatggtaacccaaacttatcactgcttttttgctcagtttcacacgttgtaactcaaattactctaaacgtgtttaactgccaaacagctacctgcatgttagaaaccagacaatacaaaccacctaataagaaaggttccctaatagaaatactaatacaaaaaaatgccttagctggagcaacttaaaaatcaaat

SEQ ID NO: 6874 - DNA, 470 bp, Homo sapiens
ccttggagactcacgagttttgagagcaaaatgacaacacccagaaattcagtaaatgggactttcccggcagagccaatgaaaggccctattgctatgcaatctggtccaaaaccactcttcaggaggatgtcttcactggtgggccccacgcaaagcttcttcatgagggaatctaagactttgggggctgtccagattatgaatgggctcttccacattgccctggggggtcttctgatgatcccagcagggatctatgcacccatctgtgtgactgtgtggtaccctctctggggaggcattatgtatattatttccggatcactcctggcagcaacggagaaaaactccaggaagtgtttggtcaaaggaaaaatgataatgaattcattgagcctctttgctgccatttctggaatgattctttcaatcatggacatacttaatattaaaatttcccatttttt

SEQ ID NO: 6875 - DNA, 324 bp, Homo sapiens; identical to SEQ ID NO: 93
  misc_feature (1)...(324): n = g, a, c or t

SEQ ID NO: 6876 - DNA, 366 bp, Homo sapiens
ctggaagaagaaaagaaagcaaacaatgagaaacagaaagctgaaagggagctagagggtcaaatccagagattgaacatagagaaaaagaaactaaatacggacctgtatcacatgaaacattctctcagatactttgaagaagagtccaaggatctggccggccgcctgcaacgttcatcgcagcgtataggagagttagagtggtctctctgtgctgtcgccgccacacagaagaagaagccggatgggttctcgagccgcagtaaagcacttctcaagcggcagttagagcagtccatacgggagcagatactgctgaaaggacacgtgacacagttgaaggagtcgcttaaagaagtccag

SEQ ID NO: 6877 - DNA, 600 bp, Homo sapiens
  misc_feature (1)...(600): n = g, a, c or t
ccttgcctcanatccaaggtcactcggaagaggccatgtctaccctcaatgacactcatggaggaaatgctgagagaagcattcagatgcatgacacaaggtaagactgccaaaaatcttgttcttgctctcctcattttgttatttgttttatttttaggagttttgagagcaaaatgacaacacccagaaattcagtaaatgggactttcccggcagagccaatgaaaggccctattgctatgcaatctggtccaaaaccactcttcaggaggatgtcttcactggtgggccccacgcaaagcttcttcatgagggaatctaagactttgggggctgtccagattatgaatgggctcttccacattgccctggggggtcttctgatgatcccagcagggatctatgcacccatctgtgtgactgtgtggtaccctctctggggaggcattatgtatattatttccggatcactcctggcagcaacggagaaaaactccaggaagtgtttggtcaaaggaaaaatgataatgaattcattgagcctcttgctgccatttctngaatgattcttttcaatcatggacatacttaatatta

SEQ ID NO: 6878 - DNA, 605 bp, Homo sapiens
gtcattgttttcaacagtgacttttatttacttaaagccagcagtagttcccattactctcataatgttatagttaaggcttgatttagttccagaaaataaatagggtaaatttttaatatttccctagctctgtctgctatagggaatttcagagtatgaaggtaagatgaagcagatatataagaacatttttagataatgacaatttttccttaaaatttggtgagaatttagtttcttctcaagattctgtacttctatccataaaagtaaatttctattttagtagctctgtaagaactaggccagagaagagtattacccataatagtaaatagcaaatactttggcaagtctgaattagagtacaagtgaagacattcacaaacacactttttacatctcctggatgtggtacgggctgtatgttagaattaaagcatcacaactatctgattgtagggtgctggtgggcaatgcaatcaatcaacacgtctaccccaacagatgtggagacgcatggaaaaaatacatcaaccaaagtggtcagggagaacaaaacacagaaaacaccataaaactgaagacattatctcttcttg

SEQ ID NO: 6879 - DNA, 227 bp, Homo sapiens
aaagtttaacttcctggttctcttcacccccttgcctctagtttcagtaaacaactttcccgccagtcctaatcactagttcacatctgttaccctggtcacctgctccatcctgactcatctcggtcacctgctttgaccggagtcacctttagttacctcttcctaaccgtccttcccaccaaactgctcaccccgccactctggctcgtactcctgctctcttt

SEQ ID NO: 6880 - DNA, 322 bp, Homo sapiens
aaagttgctgagctgcactatcttatattttagttgcttaggaaatgatttataatcccaacaagataatctccttgagaataagccttatgtctcattcattttggtgaaccccataacaaatacagtgcctgttaatagatgccaataaatgtttgagcaaagagtgaatttcagaaggactatgctctacctgagaatccatcacatttagtacaatcacccattttggaaaacagttcatactcccttttaagggtgtcattctgattaactcagttgctgacctactcatttcaacaatagaaaacactaggaattt

SEQ ID NO: 6881 - DNA, 403 bp, Homo sapiens
aaaatctcttaggccaaattaccttattgaggaggaagggagaactgaatttgaatcaactaaaataagattgatatctttcctcattggaaaaaaacatgaaaacacagggactcgtaagaatgctaacatttgtatgttgtttccatttctactccaggtgttgccacatctgcaaacttcctgggagagtaatggggattcgagtgcttcgattatctttggtggtcatcctcgtattattactggtagctggtgctttgactgccttacttcccagtgttaaagaagacaagatgctcatgttgcgtagggaaataaaatcccagggcaagtccaccatggactcctttactctcataatgcagacgtacaacagaacagatctcttattgaaactttt

SEQ ID NO: 6882 - DNA, 508 bp, Homo sapiens
  misc_feature (1)...(368): n = g, a, c or t
ctgaacaatatagaaaagtgcagaggcaagtgcctttccagaaccgcgtggtgacttagaagcggggcttgcgcttgcggccggtgtactgggtgtcaggtctgacttccctgccctggcgcctgtgccgctccttcttctccagcacccatgcccgactcttcctcaccattccccgcctcgacatccttaatgggaacctgtggcggagacacagctatgagctgatggacagacctgcccgggcggccgcccgggcaggtgtacaagcttttttttttttttttttttttttttttaccanagttgacttttaatttgtcctaaagccgctgaagcaaaaaccatgataaaacattctgctttcttttcttttacaaccccacgaacgcaaaaaaaaaaaaancaaaancaaaacnaaaaaaagaaacancatacnaaacccaaactatttgtaggaaaaaatggttttgtncatgggatgaaacaatntaaattcaaaacttac

SEQ ID NO: 6883 - DNA, 214 bp, Homo sapiens
  misc_feature (1)...(214): n = g, a, c or t
aaaaacaaaaaattanttgggtatggtggtgtgcacctgtagtcctagctactcaggaggctgaagtgggaggatcacttattatttagaaaaaaagaaaactaggtatggacatgtgaaggaacatacttggtgtggtggtaaatatcaaaattgagatccagagtgatgccagttggaggtcgaggaggaaaatgatttcatcaaggtgtgg

SEQ ID NO: 6884 - DNA, 354 bp, Homo sapiens
ctgtccctggatagtgccacctttgcctctccccaggattttgggcttgttttgcaaacactcaaagagtacaacctagccctgaaaagactgagcttccatgacatgaatctcgctgactgtcagagcgaggtgctccttttgctacagaatctgactctgcaagagattaccttctccttctgccgtctgtttgagaagcgcccagcccaatttctgcctgagatggttgctgctatgaagggcaactccacactgaagggcctccggctgccagggaaccgcctggggaatgctggcctgctggccttggcagatgttttctcagaggattcatcctcctctctctgtcag

SEQ ID NO: 6885 - DNA, 150 bp, Homo sapiens; identical to SEQ ID NO: 94
  misc_feature (1)...(150): n = g, a, c or t

SEQ ID NO: 6886 - DNA, 167 bp, Homo sapiens; identical to SEQ ID NO: 95
  misc_feature (1)...(167): n = g, a, c or t

SEQ ID NO: 6887 - DNA, 442 bp, Homo sapiens
ccttcttcactgaagagtatgtcagggaccaccctgaggaccaggacaagctgacccacctcaaggacctgattgcatggcagatccccttcttgggagctgggattaagatccatgagaaaagggtgtcagataacttgcgacccttccatgaccggatggaggaatgtttcgagaacctgaaaatgaaggtggagaaggagtacggtgtccgagagatgcctgactttgacgacaggagggtgggccgccccaggtctatgctgcgctcatacagacagatgtccatcatctctctggcttccatgaattctgactgcagcacccccagcaagcctacctcagagagctttgacctggaaattagcatcacccaagacgccgagagtggagcaggaggaaccgatctccccggggagcaccctgcctgaggtcaagctgc

SEQ ID NO: 6888 - DNA, 442 bp, Homo sapiens
  misc_feature (1)...(442): n = g, a, c or t
ctgtgcagcgccgtggagcacatgcattcacgccgggtgatgcaccgagacatcaagcctgccaacgtgttcatcacagccacgggcgtcgtgaagctcggtgaccttggtctgggccgcttcttcagctctgagaccaccgcagcccactccctagtggggacgccctactacatgtcaccggagaggatccatgagaacggctacaacttcaagtccgacatctggtccttgggctgtctgctgtacgagatggcagccctccagagccccttctatggagataagatgaatctcttctccctgtgccagangatcgagcagtgtgactaccccccactccccggggagcactactccgagaagttacgagaactggtcagcatgtgcatctgccctgacccccaccagagacctgacatcggatacgtgcaccaggtgg

SEQ ID NO: 6889 - DNA, 395 bp, Homo sapiens
aaatgaagaagatagcatttctaacctgaaattagggacattaaatggatctcaggaagaaatgtggcaaaaaacggaaactgtaaaacaagaaaatgctgcagttcagaagatggttgaaaatttccagaagaaccaactccacattcaaccaggttgtgttgaagaggttgtttatgagtcgcaccaaccggccgcctctgtccctttcccggatgatccggaagatgaagcttcctggccgggaaaacaagacggccgtggttgtggggaccataactgatgatgtgcgggttcaggaggtacccaaactgaaggtatgtgcactgcgcgtgaccagccgggcccgcagccgcatcctcagggcagggggcaagatcctcactttcgaccag

SEQ ID NO: 6890 - DNA, 307 bp, Homo sapiens; identical to SEQ ID NO: 96
  misc_feature (1)...(307): n = g, a, c or t

SEQ ID NO: 6891 - DNA, 337 bp, Homo sapiens; identical to SEQ ID NO: 98
  misc_feature (1)...(337): n = g, a, c or t

SEQ ID NO: 6892 - DNA, 342 bp, Homo sapiens; identical to SEQ ID NO: 99
  misc_feature (1)...(342): n = g, a, c or t

SEQ ID NO: 6893 - DNA, 366 bp, Homo sapiens; identical to SEQ ID NO: 100
  misc_feature (1)...(366): n = g, a, c or t

SEQ ID NO: 6894 - DNA, 285 bp, Homo sapiens; identical to SEQ ID NO: 321

SEQ ID NO: 6895 - DNA, 260 bp, Homo sapiens; identical to SEQ ID NO: 548
  misc_feature (1)...(260): n = g, a, c or t

SEQ ID NO: 6896 - DNA, 293 bp, Homo sapiens
  misc_feature (1)...(293): n = g, a, c or t
ttcaaagcaggcttgggtctccccacacactgcctgccaggacagtcctacaggatgagcaggggacccacagttcacggaggaggctctaggtcctggaagaataaagtgggtgatggaggggggtatagggatggaaatgagggatccaggggtcaaggccagattctaaactcagactccagagatcagagaagaaggaacacagcctgccctgggtatatggagaaattgaggctgtnnaggagaggggctgggccangacacctgtgaaaaggtgacttgggagggct

SEQ ID NO: 6897 - DNA, 305 bp, Homo sapiens
ctgcaggacatgtagagaaaccaaaccgggaaatcttacaaggagttgaaaagattaatgtcccaacctgatgagattacggccttgagacaataaggtggagcaacagaacaatgggaaagaggactgggagaggaatctaagaaccagatggcttcagctctctagaggagctgagcctattcacagtgcctaacctggaagcctgtgaggaacaggcctcaggcccttgccatgacctacttaggctacaatttcctttaaggcagcccctagctctgggaaggaatactggtagccagtgg

SEQ ID NO: 6898 - DNA, 571 bp, Homo sapiens; identical to SEQ ID NO: 97
  misc_feature (1)...(571): n = g, a, c or t

SEQ ID NO: 6899 - DNA, 131 bp, Homo sapiens; identical to SEQ ID NO: 101
  misc_feature (1)...(131): n = g, a, c or t

SEQ ID NO: 6900 - DNA, 330 bp, Homo sapiens; identical to SEQ ID NO: 102
  misc_feature (1)...(330): n = g, a, c or t

SEQ ID NO: 6901 - DNA, 192 bp, Homo sapiens
tctgaacacagaatctgaggagcacactgttcaaacagttgggacagacaggtccctgcaaaggctactgcctttttaaaacacatggggtggggatcatggacggcatggaaaggggagagaaggtgaggaaacaggcggcggggagagaatgagaagaggaacaggtatgcgctggggaagatggggcag

SEQ ID NO: 6902 - DNA, 369 bp, Homo sapiens; identical to SEQ ID NO: 103
  misc_feature (1)...(369): n = g, a, c or t

SEQ ID NO: 6903 - DNA, 459 bp, Homo sapiens
  misc_feature (1)...(459): n = g, a, c or t
aagctttttttttttttttttttttttttgnttgnacacagatgctttattttggatgttaatatgtcaacattgtatgcaagattctcttacaatgaagttttccatatatcacaaaactcaatttagtcagggtaattgctgtattaatgtgaaaaccttacaataaaatgcagtattatgtatgtgtagtcagtttccatgcaagtatggctgctacatgttatgtctggcatttgtataacatactggaagaaactcanaggaacaaaacagtataaaggtgacttaagatgcctgacatgtttaanataaaaaatcttgcaaaaagcaacaaagcagctaactgaaggattcaaccagtaccaacccaaatatgtattatgtccaataagcccagacttatccacaatatattaccatttaggataatttaatgctcaagaaaaaatatgcttt

SEQ ID NO: 6904 - DNA, 454 bp, Homo sapiens
gtttcttacccggtctgagtacgacaggggcgtgaatactttttctcccgaaggaagattatttcaagtggaatatgccattgaggctatcaagcttggttctacagccattgggatccagacatcagagggtgtgtgcctagctgtggagaagagaattacttccccactgatggagcccagcagcattgagaaaattgtagagattgatgctcacataggttgtgccatgagtgggctaattgctgatgctaagactttaattgataaagccagagtggagacacagaaccactggttcacctacaatgagacaatgacagtggagagtgtgacccaagctgtgtccaatctggctttgcagtttggagaagaagatgcggatccaggtgccatgtctcgtccctttggagtagcattattatttggaggagttgatgagaaaggaccccag

SEQ ID NO: 6905 - DNA, 479 bp, Homo sapiens
aaactgataagaaacaatgaataggaaaggaaacctgctaaaatctcttagaatttacacgattcttattctactacaagaaagcattatttggtacaaggtgtatttgtggatgtacatgaacagtatatatattatccggatcatgttgtgctatgtacaggtctttacaattcttcctgaaggttaaaacagttcattagaattcaaaatgcgtaatcatctgtaagttggcacttgttaggctcttgtcagcattgataactggcatgttttattgcagcccagttccagccagtgtttgccaacttgtacaacagaagtccagcaataggtgggtagagtgcaggaaaaacagtgccatgtttctcaattggagaccctgaaataagtgaagttactagctgctaaataaatgtcactcaaaagcagtctcttggctttttcttacacagcgggcaacttttcttttacctcgg

SEQ ID NO: 6906 - DNA, 305 bp, Homo sapiens
cctatccccttgccgatgcccacctcaccaagaagctactggacctcgttcagcagtcatgtaactataagcagcttcggaaaggagccaatgaggccaccaaaaccctcaacaggggcatctctgagttcatcgtgatggctgcagacgccgagccactggagatcattctgcacctgccgctgctgtgtgaagacaagaatgtgccctacgtgtttgtgcgctccaagcaggccctggggagagcctgtggggtctccaggcctgtcatcgcctgttctgtcaccatcaaagaaggctcgcag

SEQ ID NO: 6907 - DNA, 135 bp, Homo sapiens; identical to SEQ ID NO: 322

SEQ ID NO: 6908 - DNA, 487 bp, Homo sapiens
ctgttcctggggctgctcccacagactatgagactcagcagcccccaggcccaccccagcagcctgtgatgaccccaaacttcacctggtagccatggagttctctgcacccctcattcactcccctctggtcatttcctgagtctaacatgccctttgaggaaggcaggaggccgatccgtgaacagagagacactgggccccagaggtgacggggctccagggacagacacatctctgccctaagagactgtctcctttctggtgactgtcctgggagggttggattctggcacctcacccagtctcacccgtccctctgtgtccccatgtcctcatgacccagcacaggccacagagctgcagcctagacccagagccctctctgtgccctccattggtctccccttggggtgacctctgtgtcaccaggccgtgtggccctcccaggctggattggcatccagtcctcagcctagaccctcag

SEQ ID NO: 6909 - DNA, 299 bp, Homo sapiens
  misc_feature (1)...(299): n = g, a, c or t
ccttttttaagtgacctgtaactcatatcagtgaaaaagaacatgctataaaaagattccacaaagtgagagcattaagctcaaaggtcctgaggtaggtgtgtttgaggagctggtgtgtancggctgtataagaagtcaacctccttattttcaggtacatttattattattttaaccccaagcagaattgnctanntgggtccctcacctttacacaatagtcataggatttgactgttatcaaaaagtaaatccactctnagaggccatanatttcctattactgangttcttca

SEQ ID NO: 6910 - DNA, 254 bp, Homo sapiens; identical to SEQ ID NO: 104
  misc_feature (1)...(254): n = g, a, c or t

SEQ ID NO: 6911 - DNA, 373 bp, Homo sapiens; identical to SEQ ID NO: 107

SEQ ID NO: 6912 - DNA, 75 bp, Homo sapiens; identical to SEQ ID NO: 108
  misc_feature (1)...(75): n = g, a, c or t

SEQ ID NO: 6913 - DNA, 485 bp, Homo sapiens; identical to SEQ ID NO: 109
  misc_feature (1)...(485): n = g, a, c or t

SEQ ID NO: 6914 - DNA, 265 bp, Homo sapiens
cctttgtgggatttacttgttgtccagcaagaaactgtaggagcttcctaatatctatgtgcacttcagccatgtgttccacgtttctgtcctcatgggtgctttcagaggctaatggaggatttccaagatctttaaactgaactcaaagaatgcaaaagcggcaagttcagacaaggcaagaacaggacctttagtccattttaagccataaatattacacaaaatatgcctctaactgaaactgagaggtataaaaacatat

SEQ ID NO: 6915 - DNA, 337 bp, Homo sapiens
cctggcaaggaacatggtgcatggtaggtggcagaagggacctctgtgctcagagctgtgcctcaggacccatcgttcagatgggaagactgaggttggggagatgtgtcttgggttaggaagctgggctcggggcaggggtcagcgcgggcatggcaggcacggtgaatgtgaacttctcagtctggacaaaggcaacgcccttctcatagtaggcagcctcgttaatgaacacggggtacaccgtggactctccctcatagagcaggtcctccccactgaacatctggaagatgggagcaccaggctgcagtggctggaagtctcggtcctgcag

SEQ ID NO: 6916 - DNA, 399 bp, Homo sapiens
tcagaatataaccctcatgcctggacccctgagagcttctgatcccagctattagggacagaagaagcctccaaatctggaaggtgctgaatgccctgctgactgggaaagtttcagggcactgatggggtctacctggtaagcggagggcctgaggaaacctgtagcttcaatcatgtctggtaaccgggtgcctgagccccaatctgggttgtgaggaaataggggagaggtatcctgggccacatcccagcctaacacctgtgaggttcattttaggaactaacctcattagctataaggatcatgcagaggcagcaaagccgggtgcgatgagctcagcctttactcattcacatacaccatcacactttaattccaatctgtatattgcttttt

SEQ ID NO: 6917 - DNA, 561 bp, Homo sapiens; identical to SEQ ID NO: 110
  misc_feature (1)...(561): n = g, a, c or t

SEQ ID NO: 6918 - DNA, 340 bp, Homo sapiens
ccaacatggcaaaaccccgtctctactaaaaatacaaaaattagccagcgtggtggtgcatgcctgtaatcctagctactcgagaggctgaggcaggagaatcgcttgaacctgggaggcagagtttgcagtgagccgagatcgtgccattgtagtccagcctgggcgacagagtgagtgagacttcgtctcaaaaaaatagaaaaaatacatataaaataaaaataaatcaggaatgcaagatccaagtaactggactcccagtccagtgttcttggtcgagttgctctttgagctgttcaatcaaccaataattactgggagccaactatgtgttagg

SEQ ID NO: 6919 - DNA, 366 bp, Homo sapiens; identical to SEQ ID NO: 105
  misc_feature (1)...(366): n = g, a, c or t

SEQ ID NO: 6920 - DNA, 485 bp, Homo sapiens; identical to SEQ ID NO: 106
  misc_feature (1)...(485): n = g, a, c or t

SEQ ID NO: 6921 - DNA, 255 bp, Homo sapiens; identical to SEQ ID NO: 111
  misc_feature (1)...(255): n = g, a, c or t

SEQ ID NO: 6922 - DNA, 120 bp, Homo sapiens
ctggtgggagggagcatggatttggaggtggagaagtcactcctggtcctcggagggggtgggctgtgtgcctagttcagtgtgactcggggattggtgagggcggacaggtttctgagg

SEQ ID NO: 6923 - DNA, 433 bp, Homo sapiens
cctagagagtcacatgtctcagttcagaaatctatcgaagtggcagagctggaattcaaacacaagcagccgttctctgctattccaccctggtgtccaagcaacatggtagggcagaaggaagaggatcttacaaagagtaagggaaagggagaggggcagaggctgcttctcagagccaccaaaggacaaaataagacaggtgtgagcccagtggaggaggcacggggcagagaccagccactgttgctggcacgctggtgcacgtagcactgtggcagatggacctggagaggaagcaggagggacagcacaatggagccaagaaaggacttagcatggccgggcgcggtggttcatgcctgtaatcccagcattttgggaggccaaggtgggcagatcacctgaggtcaggagtttgagaccagcctgg

SEQ ID NO: 6924 - DNA, 98 bp, Homo sapiens
ctgatgatcgggaagaggatggctgctcccaggccgttccattggtgccactcacagaggaaaatgaggaagccatggaaaacgaacagtttcagcag

SEQ ID NO: 6925 - DNA, 365 bp, Homo sapiens; identical to SEQ ID NO: 112
  misc_feature (1)...(365): n = g, a, c or t

SEQ ID NO: 6926 - DNA, 517 bp, Homo sapiens
  misc_feature (1)...(517): n = g, a, c or t
cctggagaacatangtgagttgctcaagacccagcacaagcatccatgattcctgtaataaggcttccctctgctgttttcactgcagccttaccaagtatggttgggtgtgcaaagtttacattttaaggacctctgctgctgccactgtcattgtggttaatgatggctttaaggtttattcttattcccgtatctttgagagaggaagagagtgggattgctacccacattttaatgaaggtggagctgagccgtagaactctctgggagccatccaacctggctgtggctcataacaaggcccagagcaggggctgttgccgaaaggctgtggagcaacaagttgacatctgacctgacatttgcctatgaacgtttgtcacacttccgctgtgagttgctgangcgaggtgtccaggcccaacccctcaatgtaggcttctgtgagcaggagtttgaacagacctgagccccangcaccgaggagggtgctggctgtangtgaatggtagtg

SEQ ID NO: 6927 - DNA, 525 bp, Homo sapiens
ctgacccctttcccgcgcactgaaagggcagagggtgaggcagtctggcccttggacccttcggccagaaattctcccttgcctccttgattgaggtgtcccagatgtagtattcccacaggggtctggcaggcccctcctgtaaccactccagtcacattttctgctcttgaggcagaggtgacatcaggacgtttacagcctccacatgaattgagtgttcatttacctcagtattaccgtgttcatttttgtcctcgtgctacagttagctccctgccgcctcttgcaggtcttacttcagctcttgcctgtgacccacacagcttctgggctctgcctctgctctaagaagtgctgtgggggtagagaaccaggaaggacatgctgttgggaatgtacacctgggcagaggtggccctgttaagatgtgactgtagccacagccagggatgggatccctgggtctctggaatctgaaacctcaacaaataccagtcttgacccctagcagcagagataaga

SEQ ID NO: 6928 - DNA, 341 bp, Homo sapiens
cgcagggtgatgtgggcctggccatgggcaagctctacggcaacgacttcagccagacgaccatttcccgcttcgaggccctcaacctgagcttcaagaacatgtgcaaactcaagcccctcctggagaagtggctcaacgatgcagagactatgtctgtggactcaagcctgcccagccccaaccagctgagcagccccagcctgggtttcgacggcctgcccggccggagacgcaagaagaggaccagcatcgagacaaacgtccgcttcgccttagagaagagttttctagcgaaccagaagcctacctcagaggagatcctgctgatcgccgagcag

SEQ ID NO: 6929 - DNA, 192 bp, Homo sapiens
cctaagcataatataatagattctggggattcagtggaagagtgagagtggggtgatggataaagtactacacactgggttcagtgtacactgctctggcaacgagtgcaccaaaatctcggaaattactgctaaagaagttactcatgtaaccaaacaccacctggtccccaaaactactgaaattttttt

SEQ ID NO: 6930 - DNA, 94 bp, Homo sapiens; identical to SEQ ID NO: 114
  misc_feature (1)...(94): n = g, a, c or t

SEQ ID NO: 6931 - DNA, 369 bp, Homo sapiens
ccactctgtctgcaagatgttttagtggaatgttgtagccaaagttagatctgaagttggaagcttcttctcttgctatgtctgctaaagaacgagcatctgccaacaaacctgctactgccattccaacatgccgatcaacattaaaaagtcttttgttggaaccttcttcataaagtttagaaaggactaatttttctaccccaaagacaacaccatctttgcatctgattccaatagctgtactactattttccacagccttcatagcatattcaacttgaaaaactcttccgtcaggagagaatgtagaggctgacaggtcatacccagtgccgattgagctcatcgtgctaaacccaaagggac

SEQ ID NO: 6932 - DNA, 297 bp, Homo sapiens; identical to SEQ ID NO: 323

SEQ ID NO: 6933 - DNA, 563 bp, Homo sapiens
  misc_feature (1)...(563): n = g, a, c or t
ccacacattctctaagaagtcagcactttcctggactgggcacttgtggctagaagggtatgcactacttgctaatttctaaaacctcaaaccttaattttcccccatcttaaaatgggaatcagcttctggaaaagctaataactgtttacaattgtcagacttctaaaaagtgctaatttgttcccttaacagagcaaatgatgagagacaccattttcctgcagattaaaaacaatatataaacatatgattcaacgatgtcaacagctttcagtctatgaatcttgtccaggtcactttgggtcacttggttctttcatcagaacatgttcaagatttctgacattcctttttccgaactttcgattttggtgcatttggattttcttgtttgtagaangtctttaacatttccactgcttcctcagcccgatatccagggatacactgaaatggtcccccagtgtttggtaggtcagcagaggcaatatttagaacagagccacaaccaccaaatcgttcattctganagccatatacaaccagcgggattttcatca

SEQ ID NO: 6934 - DNA, 66 bp, Homo sapiens; identical to SEQ ID NO: 113
  misc_feature (1)...(66): n = g, a, c or t

SEQ ID NO: 6935 - DNA, 491 bp, Homo sapiens
  misc_feature (1)...(491): n = g, a, c or t
ctggcagctcacattttacattagagagtggggtccccacattttacattacagagcggggtccctgagctgcaggaggagagcctgcagggctcttgggtagaattgcacttttgcaataagggaaacgggagcaatgtttcagcctcagtttctatttataatactgacacaaaaagaatattgctggatacatagcatggatctagatagagcagctccaggagttctcacggtgacagcccccctcactcacagacaccatgtgatactaatagggcttagacacaaagcactgaattcccaaagcattgaaggagaaagacagctctcagtctgagtaaaaccgtattgagagaagaaaagaggntgaaagaatcttaaaagacaaattcagattacatgtaacattggtcaaattgaccagaaaatattcttccaaaagaagttcttctctaaaacaccaaaagtgcacagntactctcagcatg

SEQ ID NO: 6936 - DNA, 386 bp, Homo sapiens; identical to SEQ ID NO: 115
  misc_feature (1)...(386): n = g, a, c or t

SEQ ID NO: 6937 - DNA, 365 bp, Homo sapiens
cctatttaagggttcccagcagaatgggccattgtccgcctctccagttgcatgactggagtttgatggccttttgttctttctgagctgtagctggagcttgcttgttggttcacaggaacaagcaaggttcatctaaactgtaggcaaaaacttaaaaacaactagtgagtttagaatttaatggcaaatgtatgataagttttgaaacacaatttctttctctctagtcctcatttttggaaaaaacaaacaaaaaaacataaatcatgataggactgagttgtttgcaaaatagattgtagtcttacacttggtctgattatttgcataaagtgcaagaggaataattatttctacatagg

SEQ ID NO: 6938 - DNA, 511 bp, Homo sapiens; identical to SEQ ID NO: 470

SEQ ID NO: 6939 - DNA, 308 bp, Homo sapiens; identical to SEQ ID NO: 117
  misc_feature (1)...(308): n = g, a, c or t

SEQ ID NO: 6940 - DNA, 203 bp, Homo sapiens; identical to SEQ ID NO: 118
  misc_feature (1)...(203): n = g, a, c or t

SEQ ID NO: 6941 - DNA, 293 bp, Homo sapiens; identical to SEQ ID NO: 119
  misc_feature (1)...(293): n = g, a, c or t

SEQ ID NO: 6942 - DNA, 436 bp, Homo sapiens
  misc_feature (1)...(436): n = g, a, c or t
ctggaaaaggccaaagagagtcttaagaacgtggatgagaacattcgcaagctcaccgggcgggatccgaatgacgtgaggcccatccaagccagattgctggccctttctggtcctggtggaggtagaggacgtggtagtttattactgaggcgtggattctcagatagtggaggaggacccccagccaaacagagagaccttgaaggggcagtcagtaggctgggcggggagcgtcggaccanaagagaatcacgccaggaaagcgacccggaggatgatgatgttaaaaagccagcattgcagtcttcagttgtagctacctccaaagagcgcacacgtnggagaccttatccaggatcaaaatatggatgaaaagggaaagcaaaggaaccggcgaatatttggcttgttgatgggtacccttcaaaaatct

SEQ ID NO: 6943 - DNA, 266 bp, Homo sapiens; identical to SEQ ID NO: 120
  misc_feature (1)...(266): n = g, a, c or t

SEQ ID NO: 6944 - DNA, 335 bp, Homo sapiens
aaaagaaaaaaaaaaaaaaaaacaaacccacatgatttcaaggagtctggcattcctgaatccttcttccctgccaggtgcctgtcacctgtcttcactgcctccttttccctgtcatgctcatcagcttatggcttctgtctaagcacctgaacagaggactgaaacctccactgcaggctggttttaggtcttgaattatgtaagaatcttgcacagcactgctaatgtaaatttcagttgtttttccctctaggacaaacacttaccaaaatatgcaacttttttttggtgggaagagagattgtcctgtgatttctacccatttcctgagg

SEQ ID NO: 6945 - DNA, 188 bp, Homo sapiens; identical to SEQ ID NO: 116
  misc_feature (1)...(188): n = g, a, c or t

SEQ ID NO: 6946 - DNA, 193 bp, Homo sapiens
cctaactcagggtcccgaccctcaagggcacagagagcagagcctacgatgactggggtctcctcccctttatagccaaactcggtgagcagctcccggatctccagttccaccagttccaccatctcagagtcctggacagcgtcagccttgttcacatacaccaccacatgctccaccccaatctgtctgg

SEQ ID NO: 6947 - DNA, 268 bp, Homo sapiens
cctagagaacgagctgctcatcatgtttctaatataatttctggggtgaaatgaatgatttccttactggcttagagaaaaccaaggtcaataaaatgcagattgacttaactattagaaaagatgggatgacttctgggaaccacttaactcttcaaatgactgttgaaagagaaaaagcaaaactgaaatcccaccagaccattttgtgtgcctgtttctaatcgatacaaagttaagcatgagctaaaatcagacaaagcacttt

SEQ ID NO: 6948 - DNA, 282 bp, Homo sapiens
cctgggccagcttgggcaagccaagatcagatgtctctgtgttcgggaaggtctccgtgtgggaaagcccttgggggatcccgggtgaggagtgttgccccatccagagaatgaatgagttcctttaagtgccaccgccagcaagcccagaggcacacagtccgagtgcacccgcttagcctttacattcctctccaccgacaaaaggaaggggaaactcaatcagcaggacttcagaaagggccttgtgtttatagctttgtcaagtaaatttggacgcag

SEQ ID NO: 6949 - DNA, 345 bp, Homo sapiens
aaaagctagtaagaattgaaatttagcatcacagttcttgaccagaatataattacagctacccctaatgtgagggtagggacagcgatgtgtgttatatccccagcatctagcagtgtcacagaagagacaaagacatttttctggtatgcatgagtataagaatggtttgcctaaataagactgtcctcatggctctgtgactgtgcctcttgtcaggtgtatgagtttagagtcaaagaatctagcatcatagctccagctcccgctgaggatgtggatactcctccaaggaaaaagaagaggaaacaccggttgtgggctgcacactgcagaaagatacag

SEQ ID NO: 6950 - DNA, 521 bp, Homo sapiens
cctcaggaatagtacggaatgcccgaagaaaattattgccctggcaagggtcaccacgagagaggtccaacatgtgaaacaggaagcccagctcacatgccagacagaactccttctggcaaaggtggttttgaattagacagcgtacaggctccaggaaatagagcacctggatcatgcagttacagtaggcgttgggaatgtggggctctaatccagcaaacaaggtcttattgtagtgtttgaagtcaaagtcctccagccctagcttggaatatttgatggtcaccttgcggtatttcttagaaaccatgtggagatgtggttcctcttctcgtcctactggtgactcagtgacctggctgaagctgtcaaattcactgtctgactccttgagtctgtagggtatctgattgcgcagcctggtgcggggattgggcgcatagccaatgaagcccaccttcttcatggtgcgcagaatctctgcatccacgggtggtgctcgcctgggagctggagca

SEQ ID NO: 6951 - DNA, 425 bp, Homo sapiens
ctgttacttcacagctctgacctcagttttctcatctctaactaggtcaccggcacttccctcagggtttgtgagagttaaatgaagtcaagtgcggaacacccagcacaggccctggtgcatcgggaacgaatctgctctgggtgcaccctcacctcacagccagccacatgtgcaagggaagctttcagaatgtccttgagtaagggtgccagcagccctttcttgatcctgaccaggtcctcaagggagaacaggtggagctcatcagtcaagtgtcccggcacctgctcgaactcctttaatgcactgccagagaggaaacaaagaggaattcagaaacccacccacacagaggacagggaagaatggggccagttgttttctcttggcactcacacttaattttttttttaactcaattt

SEQ ID NO: 6952 - DNA, 373 bp, Homo sapiens
aaaactaaaaaaatcaaaacacttcattgtgaaggtacagaaataaacagtgatgatgagcaagaatcaaaagaagttgaagagactgctacagctaagaatgttctgaaactcctttctgatttcttagatagtgaggtatctgaacttaggactggagctgcagaaggactagccaagctgatgttctctgggcttttggtcagcagcaggattctttctcgtcttattttgttatggtacaatcctgtgactgaagaggatgttcaacttcgacattgcctaggcgtgttcttccccgtgtttgcttatgcaagcaggactaatcaggaatgctttgaagaagcttttcttccaaccctgcaaacactgg

SEQ ID NO: 6953 - DNA, 210 bp, Homo sapiens; identical to SEQ ID NO: 121
  misc_feature (1)...(210): n = g, a, c or t

SEQ ID NO: 6954 - DNA, 310 bp, Homo sapiens
aaagtacttttaagaaaaaaagcagggccttggaagttttggttcttttttcctcccctgttgcaaattctcatggtttgggttgggtggtggagagcgcgtgtcatctgcgggtggcactgcccacggtgggcgggcgggcctctctactcgaaggtgaccacgtttagattctgagacgggaagtggagggtgaataggtcacggcggcctttttttttttagtttaacttttccttttttgctgtctagtcatcctcgtcggtcttctgcttcttggtatcgacatcgtcatcctcatcatcttcag

SEQ ID NO: 6955 - DNA, 292 bp, Homo sapiens; identical to SEQ ID NO: 122

SEQ ID NO: 6956 - DNA, 400 bp, Homo sapiens
ctgggtttatccaaaccaataaataatgctacattagaatcctgagccagggactgtgatggtgttagacaatccatgatgtccacaagttaataaagaccccactttaagaacaaaatatggctgggagcggtggctcatgcctgtaatcccagcactttgggaggctgaggcagtggatcatgagttcaggagattgagaccatctggccgacatggtaaaaccccgtatctactaaaaatacaaaaattagctgggcatggtggcatgtgtctgtcgtcccagctactcaggaggctgaggcaggagaatcgcttgaacctaggagatggaggttgcagtgagccaagattgcagcactgcactccagcctgggaaacacagcgagtccccgtcttt

SEQ ID NO: 6957 - DNA, 550 bp, Homo sapiens
  misc_feature (1)...(550): n = g, a, c or t
ccagtctctcagaaatgtcctctgaactggcactcaattttgtagcacataatccttttccagttttctctaaatggactgtgcactcaggggaactgttctctgtggtttccagatagttgttgggaacagatgcctgcaagaagctgtcctgttgaccatccaaagtgtcttctacgcccaactggatggcttcggcaatttccacctcatctgcaatagccatcaaacggcgacgcatcctggtgaagtgagtggaactggaaacactcagcatttctaacagttttgaaaacacatggggtactgtagtaaccattcttgcagaactcaagtagatccttctggaaagtttgccaaccattgagtgggaattatcaatggactgcaaagcaaaggttaagagggacagcagcttcttatacctgatttcaacaggctcagcttgtgaaacatcagtactgacaatatgaggataaaattcagcaggaaattccaacaacagtctatctataagacaaaggcggncaagaagttcttgccaattgtt

SEQ ID NO: 6958 - DNA, 357 bp, Homo sapiens
  misc_feature (1)...(357): n = g, a, c or t
aaattttgaacttgtttcaatcaagttgtagccaaaacaaaaaggtcataattactgtgctcatataagagatgtgacgagggaaggagggagggagaaatgcaggaaaggagtggggagaggaggaagggaggaagagagggaggaaagagtaaggtacacatcangttaaaaggggcagaattaggaataaaactaagcacttaatctaatctgatcaggaagaaactttgccctttattcagattttattgcatttcataatcacagaaaaanaacatccaactttattcttaaatgtgnctcaagntaaaaatggcaggaatgaatagcccttanttagcacacactattttt

SEQ ID NO: 6959 - DNA, 413 bp, Homo sapiens; identical to SEQ ID NO: 324
  misc_feature (1)...(413): n = g, a, c or t

SEQ ID NO: 6960 - DNA, 537 bp, Homo sapiens
  misc_feature (1)...(537): n = g, a, c or t
cctctggccggagctgcctggtcccagagtggctgcaccacttccagggtttattccctggtgccaccagccttcctgtgggccccttagcaatgtcttaggaaaggagatcaacattttcaaattagatgtttcaactgtgctcctgttttgtcttgaaagtggcaccagaggtgcttctgcctgtgcagcgggtgctgctggtaacagtggctgcttctctctctctctctcttttttgggggctcatttttgctgttttgattcccgggcttaccaggtgagaagtgagggaggaagaaggcagtgtcccttttgctagagctgacagctttgttcgcgtgggcagagccttccacagtgaatgtgtctggacctcatgttgttgaggctgtcacagtcctgagtgtggacttggcaggtgcctgttgaatctgagctgcaggttccttatctgtcacacctgtgcctcctcagaggacagntttttttgttgntgngtttttttgnttttttttttttggtagatgcatgact

SEQ ID NO: 6961 - DNA, 507 bp, Homo sapiens
ccttgctgcagggtgtgacagtgagcgattccatgcctgtgcgggggttgtagctcttctgcttacagaaccctggatccagcacataaatgatgccctcaatggtgagtgatgtctcagcaatgttcgttgccacaaccacctttcgtgccccaggtggtgtgggctggaagatacgggcccgcatgtcagagggcagattggcataaatgggcagcaccaggagctcccggattttggagcccaggcggcggcagcgatcctggagcatctcacaggcagcctcaatctcctcctggatagagggtagggagagcagcaggggtcccagagtcacagaaggccaacatgccggccctgtcttcccctgggatacatcatcccctctccccaccatgtcaggcacctgtcctgtcaggaacaccaggatatccccagggggctgggtcacatggatctgcaacacagatactacacaagcttccaagtagtcagcctctggagcct

SEQ ID NO: 6962 - DNA, 243 bp, Homo sapiens; identical to SEQ ID NO: 622

SEQ ID NO: 6963 - DNA, 371 bp, Homo sapiens
aaaaacagatgcagacacaagggagaaagccatgtgcaggcaaatgtggagactgaagaatgcagccatgagccaaaaacaccaaagagtcaccagaaactaggagagaaatgtggcgtgggttctccagacacagagaaaggatcttacagagaagaaaagattatgacagggaaacttatctgccaaataatattagtagctaagatttctgagctcttatataccaggcaatattctaagcagattacatgtactgcatctttattttattttatttttttaattttgagctcttgctacattatccaggctggtctcaaactcttggggctcaagggatccacccacctcagcctcctgagtagctg

SEQ ID NO: 6964 - DNA, 453 bp, Homo sapiens; identical to SEQ ID NO: 636

SEQ ID NO: 6965 - DNA, 324 bp, Homo sapiens
aaatgacgctgatcttaagtctgaaataaatggaaagcagaaaaggtgagccagttgatttgaatgcattggatattagtgttagaaacaatgtatagtttagattgaaactgaactgacttatttagcacttaaacaaaaatttgacaatgtttttagttttttttaagacagcttagtgtggtgatacttagaattctatggtttgatgtttcttttagaaatgagaagtatagttttattttttaatataaaaaatggttttaatactaaaactagtaatttgatactagttgtttataaacattgtaaaatatatctttt

SEQ ID NO: 6966 - DNA, 364 bp, Homo sapiens
cagagtctcgctcggtcacccaggctggagtgcagtggcgtgatctcggctcactgcaagctccacctcctgggttcaggccattctcctgcctcagcctcccaaatagctgggattacaggtgcccaccaccacactggctaatttttgtatttttagtagagacagggtttcacaatgttggtcaggctggtctcgaactcctgacctcaagtgatctgcccacctcagcctcccaaagtgctgggattacaggcatgagccaccaaatctggcccaaattgagtttaataaagagcttgagtgatgctcagattagggagggagtgaccgggaatgctggggtctggaactgggggcccgg

SEQ ID NO: 6967 - DNA, 299 bp, Homo sapiens
cctttctccatggggcctggaggagatgcattagtctccgggtaaccggcaggaagggcctccacagtgggagcagccggatgcagcctggtcccggggcctgagctgggattgggcagggtcagggctcctcctctcttccagggcagatgtctgagtgagggacagaggctggttctgatgaggggccctgcagtgtccttagggacgttgcccagtgactcctggggtcaaggacagaggctgctggggtgggcctgggagctgctgagtctcatagtctaggggagcagccccaa

SEQ ID NO: 6968 - DNA, 474 bp, Homo sapiens; identical to SEQ ID NO: 123
  misc_feature (1)...(474): n = g, a, c or t

SEQ ID NO: 6969 - DNA, 215 bp, Homo sapiens; identical to SEQ ID NO: 637

SEQ ID NO: 6970 - DNA, 318 bp, Homo sapiens
ctttggaagaagggaaggtaaaacttacactcagtactgattgctacccttttctcatggatatggaagcagacaagtagagtttgatttgatttgcctctatgctaaatgtttttcttcttaaattcagaagcaattgcaagaactttctcgatacatatggcccctctgataaaggcagggggaagaactgccttccagtgaacactccccaaagcaggatccagaatgctgcaaagaggagcccagccacctatggtcattctcagaagaagcacaaatgctcagtgtattacagtaaacacaaaaccagcacag

SEQ ID NO: 6971 - DNA, 160 bp, Homo sapiens; identical to SEQ ID NO: 126
  misc_feature (1)...(160): n = g, a, c or t

SEQ ID NO: 6972 - DNA, 125 bp, Homo sapiens
  misc_feature (1)...(125): n = g, a, c or t
ccgagggggaagaggtttgttaatacgttcgccatgtgctacgatcttgggacgaactgagccacgagcgtggctttgagggccgtccgaacgctgcangccggccaggtccctgggcgtccagg

SEQ ID NO: 6973 - DNA, 286 bp, Homo sapiens
  misc_feature (1)...(286): n = g, a, c or t
aaaaagcatttagatnnagagattgaaaagagcgaggcatctaaggctggggggtggggaaggaaaagctgtggagcactacccctcccccaggccacaaaagtcaagggatgtctcttccactggtagcctcaccacacagcttactgaaatcaacaatgttaaatatttagcttcacaaactctgtaaaaatgagttgttgtgacctacaaaaaaggtatatacatattttacataatacaatatcttanaggtcatattttacaaaaaaatctattcacagaa

SEQ ID NO: 6974 - DNA, 562 bp, Homo sapiens; identical to SEQ ID NO: 471
  misc_feature (1)...(562): n = g, a, c or t

SEQ ID NO: 6975 - DNA, 445 bp, Homo sapiens
cctggggacatcgcagaatgccttcccctcattgtattgccctctgtcctagacatcctagcatgacacaagatactattaacatcctacagagaaaaagaaaaacacccaggtcacactctaagagtttatgatggcaaccatcctcaggtttttccaaatctgattttattccccaaggcaatttattcacattggaagatacccattgtgatggggccagcaactttcatcttagcagcagcttgtatttaatacatttgtatttaagacatgtgcagaggatttttgaaacagaatttaatataatagtaatataaattcaacacttgtttctcatataaagaaagcaaacatttagccttttattaagttactgaagaaaattttcttaactcagtgaagaatatctccccaaatttacagcaaccttcatatttacctc

SEQ ID NO: 6976 - DNA, 388 bp, Homo sapiens
ccaaatctggatttaagttcaactcagccagaatccaaagcagcttcttttagattcactatgccacatcccaccaaacccaacccagcacattgtattaggaaaaatcctaaaacttttgattaaatggtaaaaggaagtaactacctggagaaaataaggcttccgctaccttccgtcctccctcccagggcttggcaaaaagagatcttgagcatgaggaaggaacagcttcttcagaaacaggaattagctgtatgttggcttctgcataccctcttaagattcaatatggggcaggacacagtggctcacccctgtaatcccagcacttcgggaggccgaggcatgtggatcacttgaggccaggagttcgagaccagcctgg

SEQ ID NO: 6977 - DNA, 434 bp, Homo sapiens
  misc_feature (1)...(434): n = g, a, c or t
cctggaaaacattctccaaaaagaagctgcaacatgtgtggacaatgggcttttcatgcctctcttactgtctcttactgtctattgacctggtgcaagaaacatgctctggtgatggctgtgagggaggaatcaccaccattccccccgactcatattacagatggggaaaccgagacacacattcaacaaagcgcgcatcacatggggagttcagggttagcctggagtacgaacacacgttctccccatggcccantcagcggcccacctggcctcttcccctccctttagtaaccccatcagcagcagcataaaaatctaacccttcattttgctgaaagcccctgcagatgacagtttccttcctatcatgtctgcagagctccaaggctgggggcgatgttgaggccgaanccagccacagtgcctca

SEQ ID NO: 6978 - DNA, 200 bp, Homo sapiens; identical to SEQ ID NO: 124
  misc_feature (1)...(200): n = g, a, c or t

SEQ ID NO: 6979 - DNA, 552 bp, Homo sapiens
aaaccaaagcatttttttatagtttctagctaggtttatagaaactagtggagctatgggcagtcagttaaaaacaggccatagatagcataatgaattataacacccctgtccaagtcctatagagaaaaaaaaaatccctacttttgactacagttacacagcagatcccaaagagctttgtagtagtttaacgtactacaacttatcagaaagatgaggcacttgacagttacattaaggagctaaagtcaatacggcagttgtagatttgctaatgccactgtatttttctgctcatagcatggacccattcatatgactaatttaggtacaggcttctccagtcagaatgagattgaaggtgcaggatcgaagccagcaagttcctcaggcaaagagagagagagggacaggcagttgatgcctccaccagcctttccagtgactggaataaaaacagagtccgatgtaaggaatgggtctgggaccttaacagggagccatggtgagtgtgatatagctgggggaacaggggagtggctaagactg

SEQ ID NO: 6980 - DNA, 155 bp, Homo sapiens; identical to SEQ ID NO: 125
  misc_feature (1)...(155): n = g, a, c or t

SEQ ID NO: 6981 - DNA, 201 bp, Homo sapiens; identical to SEQ ID NO: 127
  misc_feature (1)...(201): n = g, a, c or t

SEQ ID NO: 6982 - DNA, 198 bp, Homo sapiens; identical to SEQ ID NO: 128
  misc_feature (1)...(198): n = g, a, c or t

SEQ ID NO: 6983 - DNA, 177 bp, Homo sapiens
  misc_feature (1)...(177): n = g, a, c or t
aaaaaatgatgttngaagtgaaaaaaaaaggatattcagggtcaaatcatgtacattacagatattatctaaattcttctagaatttatttttcatgaaatattgatgtattttaatctatgttaaaatatcttcaatgaggaaaatgtcacagaataaatttatattacacatttt

SEQ ID NO: 6984 - DNA, 259 bp, Homo sapiens
ccacctttttgataaagaccagcaccaagaggatggcaaacaggatcccgaagatgatggggatcaccaccagggctctcagccgatcctggggacctggagaaatcaggacttcagcatgcacccctcacctgcagtttctccctaccctcaacctgccgtgacttgtcagactccagaatcttccaatgtcagagctcatctacatcagaaggttcaaaccgcggtccttggggaaatgcggctggcagatgtcttt

SEQ ID NO: 6985 - DNA, 485 bp, Homo sapiens; identical to SEQ ID NO: 129
  misc_feature (1)...(485): n = g, a, c or t

SEQ ID NO: 6986 - DNA, 77 bp, Homo sapiens; identical to SEQ ID NO: 130
  misc_feature (1)...(77): n = g, a, c or t

SEQ ID NO: 6987 - DNA, 161 bp, Homo sapiens; identical to SEQ ID NO: 131
  misc_feature (1)...(161): n = g, a, c or t

SEQ ID NO: 6988 - DNA, 285 bp, Homo sapiens
ctgctccctcctcccccaggggcctggcctcttacaagggattgcgtgacagcgtacacagccttctccatggagatgacatgcaaccctctgcaacatacagggacccagaagtctcggcccccagcccccttcctctctaagactcaagaatctgggctctcagccagatgtggtagctcacgcctgtaatcccagcactttgggaggctgagatgggtggatcacgtgatgtcaggagttcgagaccagcctgggcagcacagtgagatcctgtctctattt

SEQ ID NO: 6989 - DNA, 470 bp, Homo sapiens
ccttggagactcacgagttttgagagcaaaatgacaacacccagaaattcagtaaatgggactttcccggcagagccaatgaaaggccctattgctatgcaatctggtccaaaaccactcttcaggagggtgtcttcactggtgggccccacgcaaagcttcttcatgagggaatctaagactttgggggctgttcagattatgaatgggctcttccacattgccctggggggtcttctgatgatcccagcagggatctatgcacccatctgtgtgactgtgtggtaccctctctggggaggcattatgtatattatttccggatcactcctggcagcaacggagaaaaactccaggaagtgtttggtcaaaggaaaaatgataatgaattcattgagcctctttgctgccatttctggaatgattctttcaatcatggacatacttaatattaaaatttcccatttttt

SEQ ID NO: 6990 - DNA, 577 bp, Homo sapiens
  misc_feature (1)...(577): n = g, a, c or t
ccacaagaaagacctacaaagaccacatgggaggaaaaagaaacatctgtaaagactgaatgcgtggcaggagtaacatctaataaaattgaagttttggaagaaggaacagctaagatgatcacatgtcctacaaagacagctacaaaagcaagtacaaatggtaagatgcttgagtgaactttgtagagtttattggcactttgggttccctagtggaaatagtgtggtacaggagtagtcaggaatggcttgaatgtctagataaggcaagcttaggcaacacattttaatagtgtagaaacgagtagatgttattctgtaggccctggaaaaattcccagaatacttctggctgtaaatattagatgaaaataactaacaattgctaaaaccatanaaaccaaagttgttttggtggtacagggatattataagttctcactccccctcccccattattagttatgctatcagcaagtgtttttgttcatgtctcctttcttggttggctaaattagcaacagctccaatcatcatgctnactcaagacaatatctgaangctgggagtgctg

SEQ ID NO: 6991 - DNA, 482 bp, Homo sapiens
ctggacaacccgtacatcgtgcggatgatcgggatatgcgaggccgagtcctggatgctggttatggagatggcagaacttggtcccctcaataagtatttgcagcagaacagacatgtcaaggataagaacatcatagaactggttcatcaggtttccatgggcatgaagtacttggaggagagcaattttgtgcacagagatctggctgcaagaaatgtgttgctagttacccaacattacgccaagatcagtgatttcggactttccaaagcactgcgtgctgatgaaaactactacaaggcccagacccatggaaagtggcctgtcaagtggtacgctccggaatgcatcaactactacaagttctccagcaaaagcgatgtctggagctttggagtgttgatgtgggaagcattctcctatgggcagaaggccatatcgagggatgaaaggaagtgaagtcaccgctatgttagaga

SEQ ID NO: 6992 - DNA, 314 bp, Homo sapiens
ctgttgttagttatatagcagtacaggacatatgtaatcttgttgagatgtgtcttctaaagacacatttctgagtagctcaaacatatcaggaaagttggttctgtgtacttttgttaatcattgttttgattcaaacttaagtaatcttagatgttgatttggtttttattgtatttcctttcctaattaggacttaaccaccaccatgtcgagcaaaagaacaaagaccaagaccaagaagcgccctcagcgtgcaacatccaatgtgtttgctatgtttgaccagtcacagattcaggagttcaaagagg

SEQ ID NO: 6993 - DNA, 294 bp, Homo sapiens; identical to SEQ ID NO: 132
  misc_feature (1)...(294): n = g, a, c or t

SEQ ID NO: 6994 - DNA, 483 bp, Homo sapiens
  misc_feature (1)...(483): n = g, a, c or t
aaaataggtgtcctgataacttccaggatattattcggaacacccgtttccccaactacgataagtccattgccggatgctgaataaacttcgcccattaccacttggatttcttgatagtcttatgtttccatcatccatcgtaatgtgttcagctcancttcctagaaacattgaacaacggtttagaaattttgcccaataacccggcaccctctaggtttttaacagtgaatgttacttgtgcaagtcaggaatctgataccaattaaatggtgacagctttgccaataaacaaggatatgctcttccatggctaggaagggagactgccacggctgacaggtcccaaagatacatggagattcacaatccagaattaaccancaaccaaactgctacaggttattactcaccatctggctcaaactgacagttctcggggtgctagggcacaagagcganagagtagactcaagatgg

SEQ ID NO: 6995 - DNA, 270 bp, Homo sapiens
cggaggtggtcaaggctaaagccggagcaggctctgccaccctctccatggcgtatgccggcgcccgctttgtcttctcccttgtggatgcaatgaatggaaaggaaggtgttgtggaatgttccttcgttaagtcacaggaaacggaatgtacctacttctccacaccgctgctgcttgggaaaaagggcatcgagaagaacctgggcatcggcaaagtctcctcttttgaggagaagatgatctcggatgccatccccgagctgaagg

SEQ ID NO: 6996 - DNA, 433 bp, Homo sapiens
aaaacaacataaatagaatacacttcttttaacaaagcctggccttggtggctttctagcttgcagtctaagtaacgtttggtttgcagaagggattccctgggagacggctgtgtggggcaacctcacttactggttgtgtgttctccatgggaaaagcaccagatggggaagcccaggatcagatgtaagctgcaagcttctttctctcttcaaactgcttgtccactgccagagacagggcctggaggaacccctctatggtgacggtgggggcctggacatacagcgcatgagccagaaaggggagttttctcaggacccggccgctgaggccctcgctcttccttgaaatgtcattcaaaagaaggctcaattttgacacgttgttttcaatgaagccaatcatctctagctctcggagggtcagcag

SEQ ID NO: 6997 - DNA, 419 bp, Homo sapiens
cctcaggccccttgcttgggtcatgctgccccctgtcggctgctgcccctgcctcttcctctgagttctaacaacacagacactggtgcctgaaagccctgctgctgccagggagtcagaattctggctgcctctacttgggaatctcctcccatgtggggatctgcagaacatccagatggggccatcccacctcatgatccattcactcccagtgggatacactggaattcaacccggagactggagcccaacagattaaggcagaattctccttgctctggaggcaggtctgcgggaagggggtgaagtctagctgcccctcatgtcccatgccggtgagggtacttggcttcccacagctaagcccaggagcttcctatatcccatctgctgagacagcaaggggtgcggcctgg

SEQ ID NO: 6998 - DNA, 449 bp, Homo sapiens
ccaaagccagacctggcagaactgatggatacctggtgaggcagcggagcccctgggctcccaccccattccctcctcccggggctgcacaggtgagtaggtggaaggtaaggggggcagggaggggaaagaggtcctgggcttaaagcctgggcttggagtactgctccttgacactcagggtcaggcagagagaaaagagacagccttcaaggcagtccatgtctgggtgccccgggtcaggtggggagtgggggccatttttccctgagcacaggctgggagggagtggagggatgagcaggatgggatgggctgtccctcgggtttggtatatttgctcctagagcagcccaggaggcacggtggctctgaagcatcactcacttctgtcccgttcttgacagcgccattcgcgaacgatttcccaagttactacgcctggatgg

SEQ ID NO: 6999 - DNA, 362 bp, Homo sapiens
ggaaggaaggaagaagaaagacaggaaggaaggaaaaaggaggaaagaaacaaaagggcaagcaggccgagcaggtctaggattggctagtttgaataattttggcaggctgcaggtgtagggactgtcttaagttgcctggaagcttggaagctataatagagaatggggagggtgggaatatgagccttggatgggctggctactatgaaaggcccactcctggatgagttatttcctctctctaggaattagctaaccctgatgggtccctccccagtcagcaaggccccggatgccacaacttaaagtacagaaaatgtagttaacacagccaccacgaattgactagttgagtgttt

SEQ ID NO: 7000 - DNA, 381 bp, Homo sapiens
  misc_feature (1)...(381): n = g, a, c or t
aaagttttattatnnanacacatggaattaacggtgttatccatgtatttgcaacagcagagaaagagtgagagtggaccatccccataggggacacttatcctttggctaaactaatataaataatggaaataacacctaatacaataatacagcacataaaagagattacattaagagaagagacaggaactgcggagaggagtcctgagtatggaggagatgcggctcatggagaagcatccaggctcaggtgaccttccctgaagacttcctgtctctgagcagctcagttcagttccaggtcatacacgtactcctggacccaggactcactggggtcagcgcagacttgcttgcctcttttggtttggaatacca

SEQ ID NO: 7001 - DNA, 551 bp, Homo sapiens
  misc_feature (1)...(551): n = g, a, c or t
ccttgcctcagatccaaggtcactcggaagaggccatgtctaccctcaatgacactcatggaggaaatgctgagagaagcattcagatgcatgacacaaggtaagactgccaaaaatcttgttcttgctctcctcattttgttatttgttttatttttaggagttttgagagcaaaatgacaacacccagaaattcagtaaatgggactttcccggcagagccaatgaaaggccctattgctatgcaatctggtccaaaaccactcttcaggaggatgtcttcactggtgggccccacgcaaagcttcttcatgagggaatctaagactttgggggctgtccagattatgaatgggctcttccacattgccctggggggtcttctgatgatcccagcagggatctatgcacccatctgtgtgactgtgtggtaccctctctggggaggcattatgtatattattnccggatcactcctggcagcaacggagaaaaactccaggaagtgtttnggtcaaaaggaaaaatgataatgaattcattgagcctct

SEQ ID NO: 7002 - DNA, 298 bp, Homo sapiens; identical to SEQ ID NO: 133
  misc_feature (1)...(298): n = g, a, c or t

SEQ ID NO: 7003 - DNA, 228 bp, Homo sapiens; identical to SEQ ID NO: 329

SEQ ID NO: 7004 - DNA, 373 bp, Homo sapiens; identical to SEQ ID NO: 134
  misc_feature (1)...(373): n = g, a, c or t

SEQ ID NO: 7005 - DNA, 506 bp, Homo sapiens
  misc_feature (1)...(506): n = g, a, c or t
gttggtttttttagnttctctctctgatctttagtttttccctttgttttcggtttctgggactttctcacactctcccctttcctccctttccccttttcctcatactcctcatttcttctgttttccctctgaggtcctatttgaaatgttttatttttcttctccctaaccttccagccctctcctctccctccccctgtgggcaggacctgaggctctaaagggcactccagtgtctcccttcggtctttcctgtcccttcaccgtcttgcttatcttcccacgggtggagaaaggtgccctgcctctgggcttttgctatctggccctctgtcttccacctcggggtggagggagttggcgggagcagtttttgaatgactgcagtttggggttggtgaggagagggaggttttcttcanggcctgctatttcctgagccttcctctctgaagcttgggaaatgacaccttttttactacgttagtgtttcccagagattt

SEQ ID NO: 7006 - DNA, 540 bp, Homo sapiens
cctacccactttagccagcgtcccctccagcagccatcagcaagccaacccactccaagccagggccccctttggtccttgcacttgaggtgctttgttcagggctgggtcaggagtggcagagacgatgtccaccacctcagtactggggaaagtagcctggttcctcctcgtgggtccagctacttggactgctggctgggttctggaagctgcctcggccccagggcagtgctaagcagctcagtcagggcatccagcttccccgccagcgtgtcaatctgtttctccagggcccggtgtgagctgctcagattctgctgcaggtcatacaggatcatgtgcatcttggagatgtccaccatggagttcacttgttcccggagcttccggtgtttcagccgcacctggcggagcgcgttgatggcggccagcagcttgcgctgatgcctgcgggcagcatgagactccttcctgcgagtatgtttgtagaacatccaggcttcttgtagcactcgggcagcggactccttcatctct

SEQ ID NO: 7007 - DNA, 402 bp, Homo sapiens
ccaacatgatgaaaccccgcctccactaacaacacaaaaattagccaggtgtggtggcgggcgcctgtaatcccagctattcaagaggctgaggcaggagaatcgctggaaccggggaggtggaggctgcagtgagccaagattgcactccaacttgggcaacagggagagactcagtctcaagaaaaaaacaaacaaacaaaaaaaccaaccaaacaaaaaaactttcttgtggtacttatcttttttgatcatttcatcttggaaactcatatcatgttcaaataaacacaataaagaaggaatgttcccagaccatgctattcaatgtggactttcttttataagctatgagaagaatactttggagaagcaagaaacttgggttattttttgttattt

SEQ ID NO: 7008 - DNA, 406 bp, Homo sapiens
cgggcggagaagctggagtgactctagggcagccgcatctttcgcgtcaggatctcaccaccttggatgttaccaagttgacgccactttcacatgaagttatcagcagacaagccacaattaacataggtacaattggtcatgtagctcatgggaaatccacagtcgtcaaagctatttctggagttcatactgtcaggttcaaaaatgaactagaaagaaatattacaatcaagcttggatatgctaatgctaagatttataagcttgatgacccaagttgccctcggccagaatgttatagatcttgtgggagcagtacacctgacgagtttcctacggacattccagggaccaaagggaacttcaaactagtcagacatgtttcctttgttgactgtcctgg

SEQ ID NO: 7009 - DNA, 487 bp, Homo sapiens; identical to SEQ ID NO: 135
  misc_feature (1)...(487): n = g, a, c or t

SEQ ID NO: 7010 - DNA, 194 bp, Homo sapiens
  misc_feature (1)...(194): n = g, a, c or t
cctacagacttatttcttcttggacacacccacggtgcggtcacggcggccagtggtcttggtgtgctggcctcggacacgaaggccccanaagtgacgcagccctctatgggcccgaatcttcttcagtcgctccaggtcttcacggagcttgttgtccagaccattggctaggacctggctgtattttccat

SEQ ID NO: 7011 - DNA, 310 bp, Homo sapiens
aaaggatggcccggcccccagtaaacgccgattcctgctcgcggccttctacgcccattactggagcagcagccatcagtgtagacgacgacgaagtctcccatgtaggaaaacgtgtctctgctaactggaggcgccggctccacgctcgacttcatgtgctttgcatacggctctgcgctttcatgtccatctccatccagtggctcacggagtcgcttgctggctttcgcctccgattcttgtccatgttgattttcatgcccttctgaaacttccgggcttgcagatttcctgacaaaggcccagg

SEQ ID NO: 7012 - DNA, 368 bp, Homo sapiens; identical to SEQ ID NO: 136

SEQ ID NO: 7013 - DNA, 202 bp, Homo sapiens
ccaatatggtgaaacctcatctctactaaaaatacaaaaattagccaggtgtggtgctacacgcctgtagtcgcagctacttgggaggctgaggcaggagaatcgcctgaacctgggaggcggaagttgcagtgagcaagatcatgaaaagcaaaatactcaaggacttttaatataaccaccaacacagtgtgccttctgg

SEQ ID NO: 7014 - DNA, 472 bp, Homo sapiens
  misc_feature (1)...(472): n = g, a, c or t
cctcggcctcccagagtgctgggattacagatgagagccaccgcacctggcctggcaaacttcttttacaaagagtcagagagtaaatatttcaactttgcaggctgtaccatccgtctcaattatgtagctctgctgttgtagcggatgccagaggtcacacgtgaaccaatgagcgtgcctgggttctaatatagctgtagtcccagctactcaggaggctgaggcaggagaatcgcttgaacctgggaggcggaggttgcagcgagcctagactgtgccattccactccagcttggtcgacaaagcaagactccgtctcctcaggggcagacaccgggcaggcagcttcctcggccactgcgttggagtagaggaagagatcctcgtaatccacgtttgcgggatccttctgcctgcanggctgtgtcagcagctccctgcgcggctcaattggcttctgctggtggaa

SEQ ID NO: 7015 - DNA, 153 bp, Homo sapiens
ccagctacaaagtggaatgcttctcgaagggcacggtcaggaggcgggcggccgcctcgtccaagaaccagcacagtttcccggtgtggggctggaccagggcggcgggcagcgggttttcctcctggtcctccaaaacgcgcttcagaacag

SEQ ID NO: 7016 - DNA, 389 bp, Homo sapiens
acgattcacagaggagctaccagatgaacgggaatctggactgcttggataccaggtacaggcttctccagtcagaatgagattgaaggtgcaggatcgaagccagcaagttcctcaggcaaagagagagagggacaggcagttgatgcctccaccagcctttccagtgactggaataaaaacagagtccgatgaaaggaatgggtctgggaccttaacagggagccatggtgagtgtgatatagctgggggaacaggggagtggctaagactggtctaaagctattagttttctcagccgggcgcagtggctcacgcctgtaatcccagcactttgggaggccgaggtgggcagatcacctaaggtcaggagttcaagaccagcttgg

SEQ ID NO: 7017 - DNA, 275 bp, Homo sapiens
ctggtggggtcagtggaagttctgtcactggatctggtttcagtgtctcagaccttgccccaccacggaaagcccttttcacctaccccaaaggagctggagagatgttagaagatggctctgagagattcctctgcgaatctgtttttagctatcaagtggcatccacgcttaaacaggtgaaacatgatcagcaagttgctcggatggaaaaactagctggtttggtagaagagctggaggctgacgagtggcggtttaagcccatcgagcag

SEQ ID NO: 7018 - DNA, 130 bp, Homo sapiens
aaactggtgggtttgggcacgtggttttaggtggctagagcctcagctctcgaggtcatcctgatatgacgaatgttcgtaaagcacttagcacagcacttggcacatcatgagtgttcgatccatgtgg

SEQ ID NO: 7019 - DNA, 419 bp, Homo sapiens
  misc_feature (1)...(419): n = g, a, c or t
aaaaaataacctagnctatgcaaaacatcaaagtgaattttccatgaatgtttttaatattctcatctcaacattgtgatatatgctactaaaaaccttttcatatacatcttacctcatttcaagtgaattattttaatctttttctctctttccaaaaatttaggaatgtttagtgtaattggatttcgctatcagttcccatccttaagttttgatattcaatatctgatagatacactgcatctttggtcatntaagntttgtttacaaatgtgcaaattatttagagcatagactttataagcattaaaaaaaactaatggaggtaaaacctaaatgcgatgtgaaataattttagtgttgataccgtatgtgtatttttattctaataaacttttgtgttccagattgaaaaa

SEQ ID NO: 7020 - DNA, 282 bp, Homo sapiens
ctaatacgactcactatagggctcgacggccgcccgggcaggtctgagccgtgcgctctccttttgcactcattcctggaggacggattccgctagacaccctccagcatcgctgactttataaagcggaaaaacggaaaacgtgactttgtaatagacaaacattgttttttaatggggttccatgggggggcgttcagcctttctgtttgctgtgtgctgtccagatgcctcttgggcgtcctgttgttctcttcccgtgttgtacgaagggtaccgtgg

SEQ ID NO: 7021 - DNA, 59 bp, Homo sapiens; identical to SEQ ID NO: 137
  misc_feature (1)...(59): n = g, a, c or t

SEQ ID NO: 7022 - DNA, 334 bp, Homo sapiens
  misc_feature (1)...(334): n = g, a, c or t
ccatgtccatggccctgcacttcctcatcctgctcgnnccgccccnncctctcattttccaggtgaccccactgagcgggcgccagtgggtggtggtgctccagatatctctgcctgtcatcctgctggatgaggccctcaagtacctgtcccggaaccacatgcacgaagaaatgagccagaagtgagcgctgggaacagagtggagtctccggtgtgtacctcagactgatggtgcccatgtgttcgcctccgccccccacccttgccaccacactcgcccacttgcccaccgggtcccgccggataaatgacaggcccgaggtcagaatgg

SEQ ID NO: 7023 - DNA, 223 bp, Homo sapiens; identical to SEQ ID NO: 6848

SEQ ID NO: 7024 - DNA, 296 bp, Homo sapiens
ccacagaccgtgggcgcattcttgtccacacgtccagtcttgcccaggggcagcaccaggaaggcccctcccccgctggcctcacagatcagggccacaaacttagggttgacagcacagaagccactgtcccaggtggtctgtgagacgcgcacatcttcatagcactggtcggccttggccggctgtccaaacacgtggcggaacttgctggagcggaccacctgccggctcattctgctgccgagagaggacagtgatcccccaaaagccggaggaggaggaggaggaggaag

SEQ ID NO: 7025 - DNA, 508 bp, Homo sapiens
  misc_feature (1)...(508): n = g, a, c or t
aaaagacaaaaacaaaacaaaaataccacagctcaagataaagagtcctatacagaaatcacaaaaaggacagaccatctaaggaaaaattaaaaagacgacacaaggacaggctgggcagcctgggtcagggctcctggctggtgacctgctttgagtaggtttcttgcaggtacttcttaaaagctgtggggtttttccagagctcggcagcatgtgtgttcaagggactatcaatgttgggttctcctagaaggctctggatggagagcagaatggtcctgacatcatacagggcagaccacttttccttcangatgtccaggcatatgttaccctgggtgtccacgttggggtgatagcagggcgtgaggaacttcactgtgggcgcattgtaagggtagccactggggaactctagcgagagcttatacctcaggtcttcatatactgttccagccttattcttaacaactttaacaaaccccatcctgcggaacagagaccg

SEQ ID NO: 7026 - DNA, 151 bp, Homo sapiens
  misc_feature (1)...(151): n = g, a, c or t
cctgggatgcangnagaaaggctgaccacaagttgagacaagatacanaaacaaacaaaaacagcagaaagtccgatcgatggtgtaagtgttgnnttcactgcttanggtgcaggtgagcttgatcgaggctcccagtaaggcanatgta

SEQ ID NO: 7027 - DNA, 537 bp, Homo sapiens
  misc_feature (1)...(537): n = g, a, c or t
ccaaggctatcatggatttcagattggtggaccttccccttggcttacccttttataaatggatgctacggcaagaaacttcactgacatcacacgatttgtttgacatcgacccagttgtagccagatcagtttatcacctagaagacattgtcagacagaagaaaagacttgaacaagataaatcccagaccaaagagagtctacagtatgcattagaaaccttgactatgaatggctgctcagttgaagatctaggactggatttcactctgccagggtttcccaatatcgaactgaagaaaggagggaaggatataccagtcactatccacaatttagaggagtatctaagactggttatattctgggcactaaatgaangcgtttctaggcaatttgattcgttcagagatggatttgaatcagtcttcccactcagtcatcttcagtacttctacccggaggaactgggtcagctcctttgtggcagtaaagcagacacttgggatgcaaagacactgatggaatgctgta

SEQ ID NO: 7028 - DNA, 357 bp, Homo sapiens; identical to SEQ ID NO: 138
  misc_feature (1)...(357): n = g, a, c or t

SEQ ID NO: 7029 - DNA, 176 bp, Homo sapiens
ccgccatctgcggtggagccgccaccaaaatgcagattttcgtgaaaacccttacggggaagaccatcaccctcgaggttgaaccctcggatacgatagaaaatgtaaaggccaagatccaggataaggaaggaattcctcctgatcagcagagactgatctttgctggcaagcag

SEQ ID NO: 7030 - DNA, 419 bp, Homo sapiens
  misc_feature (1)...(419): n = g, a, c or t
tgggagccctcagnnccagcctcatcactgtgtgaccctgggtctgctcttagcctccccatggctcacgttcctgccctggatgggatgtgagtggggcccacatcgtggagctgtggtggggcctgcagtcatgaatggcaagtggtccctgatgtgcagtgtctcattagttgcactgcagttaactgtggctcctgcagggcaccctgcccagaatgcccagaagagaaccatgcatacctgcactgcatttgagagccatgagctggaggctgtggttcgtgccagcaaggagcctactgtctggtgtgctgtaggcatctggagagggagagggcctgggtaggagctgggaggaagataattttcaactatggggcttcagtactgcagcgccccgagccaggctctgtgct

SEQ ID NO: 7031 - DNA, 338 bp, Homo sapiens
ccattaggagcctcgcctggaacggggcccccacaaagctcctgagcctgggccacatcactcaggctcctgttccccatctccaggctcgcagcggacagaactccactttctgaagaaacaagaaggtaactgtatcacgtgctaacaacttaaggttctaaaatactttgcttctcacttgaagaagtcctagaacaaaagcctaaggtgaggccctcagaaatccaactggcaatgtcccggaagtacagatcccgccaaggtggggatctaagcccagggccatcaaccgcagcttggtccaaatgctctgagcagtggttttggctctgtgg

SEQ ID NO: 7032 - DNA, 374 bp, Homo sapiens
ctgctgcactgcactttgcgattcaacaagtcagggaagaaaacatcaggaagcagctaaagaagctggactgcgagagagaggagctattggttttccttttcttcttctccttgatgggcctgctgtcgtcacatctgacctcaaatagcaccacagacctgccaaaggctttccacgtttgtgcagcaatcctcgagtgtttagagaagaggaagatatcctggctggcactctttcagttgacagagagtgacctcaggctggggcggctcctcctccgtgtggccccggatcagcacaccaggctgctgctttcgctttttacagtcttctctcctacctccatgaagacgcggccatcagggaagagg

SEQ ID NO: 7033 - DNA, 191 bp, Homo sapiens
cctgccggaggcgcaagcccctcgggcggcctttggtcatgctgagctcccacacacacaccacagtgctggtcccagaggtgacaatcgttgttggggatgggcacacggcgcacagacagcggccccaggcagccaggttctcgaatgtcatcaggaccttgtcggagccgtagctccccaagcagcag

SEQ ID NO: 7034 - DNA, 430 bp, Homo sapiens
  misc_feature (1)...(430): n = g, a, c or t
gcaaatactgggtgcccaatatatgtcagacacagttctagatgctagggagacagtagtgaacaagtccttccctaacctaaggtagatactgttccagcttttctagaaactagtcgaattaaagttgagctacatacaaacttagcatctctgggaaagagaaaatatttgacaaaggtgaattggggccttttttaacgctcatctcttcctgtaacatctctgtttagggaaggtgggaaccctggaaaagttacataaaatgtatttattgttaaatgtgtttagtctcataagaaaagcagtctttcacttggtaatcctaatactgtccttgaactangttagtctattttaagcatggcaggctacttttggtcttgagttattttagcttaaattaactcaagctaatttaagtttacag

SEQ ID NO: 7035 - DNA, 374 bp, Homo sapiens
  misc_feature (1)...(374): n = g, a, c or t
ctgatgcctcactactagatgcagtgctgggaccttcctcttttggagctgtcccatgtacagtggacccaagctcannaccttcgtggagctgcttctccaacctgagaaactcaagacccatcctcccgctgtcactttggacaacggaaatctacattttcttttcccttttttttttttgagacagagtctcgccctgtcacccaggctggagtccagtggcacaatcttggctcactgcaacctctgcttcccgagttcaagcaattctcctgcctcagcctcctgagntagctgggattataggcatgcaccaccacacccagctattttttgtattttttactggagacagggtttcaccatgttgg

SEQ ID NO: 7036 - DNA, 264 bp, Homo sapiens
ctgagaaaaatgcaattgagggacttttctgaattgagaaaaggatgacattctttggagagcagactttctaccctctccatctatcattgaatgttatattcattgctgccactagttaaatattaggtagacattgactggtagttacaatcaatgacacagtcactggcctaattactttggtgatttttataccatggtgtctgacattcccaggtgttttgtataaggcacacgtatttcaagagctcttcagccagg

SEQ ID NO: 7037 - DNA, 418 bp, Homo sapiens
  misc_feature (1)...(418): n = g, a, c or t
ctgctgttccgccaaggacagcatccttccggttgcgatggcgattgcagactccagggccccagtggtggagaaagtccagcaactgccgcanncaccctggaaaggccaggggagagcagaggacatcagtgatggggacgccgtgagacagccctgccttctgccttcctctgctgaccctgccagagctcccgagtccccaggtgccttggcagtttaccaagccctgttccagatccattcattctgagcctcgcaggccctgttccagatccattcattctgaggctcgcaagccctgttccagatccattcattctgagcctcgcaagtcctgagaggcttgcaaaggagcaggagcagcaggtggcctctgaccagtgcctgtggactcccaatcaccacctcttggtgg

SEQ ID NO: 7038 - DNA, 244 bp, Homo sapiens
  misc_feature (1)...(244): n = g, a, c or t
ctgccaccaggcatccacccaactgggcgctaaaggagcctggagccgggcctgtgtctgtcagcagagcaagatgtggttcattccgcagccgggcaggggccaaccctgaaccagcatgggccgggtgccaggatgctgaggctcatgggatacagcctggagaagagctgtgtccacgagtacccagttcaaggtccagcgtggttagtgtcctcanagaacatgcctgtccagagcacag

SEQ ID NO: 7039 - DNA, 290 bp, Homo sapiens
  misc_feature (1)...(290): n = g, a, c or t
acctaanncatggccctggctaggcgggaacggntcacagtagcgatacattcacaggacacagttggtgtccagaanagggggcnnanaacacantttctacacaagcacttggcacccacacgacagagacgtcactcaagcagcacagccacaaatagtttacagcagctcatgcccggcatncgcccatgctgggagactccctgaaaggtgggcacctgccgtctatgaggaggtgtctccctccatcattaaccccaaaccacacaatgtgtgaggagagcagg

SEQ ID NO: 7040 - DNA, 391 bp, Homo sapiens
  misc_feature (1)...(391): n = g, a, c or t
ctgtctcatatgtccagcaccgggcaacgttacgaatggtgtaaccaccgcctcccagcatcagcataggcaggttaaagctcttgacaaattccacacacttggcgtgtcctttgatagttagattgaagcaacctaaccgatccccagatagggagtctgagccacactgtaagaccaccgcactaggctggaacatctccattactttggacatgaccggcttgaaaatggcctcataggactcgtcatcaatcccgtctcggagcgggtagttaacagcataatacttgcctttgccagccccaatatcccgtangtccccagttcctgggaagtactctccatacttatgaaaggacacagtcatgacccggtccgtggtgtagaa

SEQ ID NO: 7041 - DNA, 340 bp, Homo sapiens; identical to SEQ ID NO: 325

SEQ ID NO: 7042 - DNA, 250 bp, Homo sapiens
  misc_feature (1)...(250): n = g, a, c or t
aaatatgttgctagaagtaaaagctagagccaaggaaaaaacaggtggtaaggtgcgccaaggccaaagccagaataaagaagtacttcaggagtatattgcaggtgccgacaccatcatggaagacccagccaccagggattttgtagttatgcgggccagaatgatggcagccaagttgttaggagcactttgttgctgtatttgtgatccangtgtaaatgtggtaactcaagaaattaaaccagac

SEQ ID NO: 7043 - DNA, 445 bp, Homo sapiens
  misc_feature (1)...(445): n = g, a, c or t
cctattttgaccaaagtatacagtaaagataacgatggagatctagcatgcttactacctaaacttatggagattgatggactgcatgcaaaagatacatgaatgggatttgtggtagcagtatgcctattttgggaagcataggggctgccaagatgagaggctaccaggtaacaggccacaatgaccctgaggtttcccattctcttactgagatggggaagaaagatagtaaagaaacatttggaatggtattatatttgaaatgagaaggtacaaatgatgattttcatatccagcactcccagcaaccaaacccaaatcacctcaaactgtagaggagtgttgcagcgactagcagtagtaagagatgtgactggtgaaaacatgaggctgtntccatttcgacactcctcttntnctgggtgagangagccaggtgtgg

SEQ ID NO: 7044 - DNA, 228 bp, Homo sapiens
cctggtactgaggaataacagcatttcgtggctcagttaatatttgtacaagtgttttctcatctaggctatgcaatggaaccaccacaggcaaccgtcccacaaactcaggaatcatgccaaactcaatcagatctctggcttccacatgacgcaataaccgatctttttcttcaatgtcttggtgagtattcgattccccacttcgattagcaaggtctgcagcag

SEQ ID NO: 7045 - DNA, 188 bp, Homo sapiens
aaaggaatgtggatcatagtgatttttccttttaattttattgctcagaaatgaggcatatcctaaaaatcctggagagctgtatttaatgcatttttgcactaagtggtccttagtttaattctattgtatctgtttatttaacaaaaaattcatcataccaaaaagtgtaagtgaaaacccccttt

SEQ ID NO: 7046 - DNA, 156 bp, Homo sapiens
ctgtggcagccagcataacctccctccgtgcttccatctacctttagaatgaggggttagtaaggctgggcgcggtggttcacgcctgtagtcctagcactttgggaggctgaggtgggtggatcacttgaggtcaggagattgagatcatcctgg

SEQ ID NO: 7047 - DNA, 447 bp, Homo sapiens
ctgcaagtcatgccttgggcacctgcacttttcagagcattcagaggagaagcaatatcagggtggtccagaggtgaatccgggtgcctcagggggggaccggctcatctgtgaccgatcgaacagccaggagggtgtttccatggcaacaggacacggaagtcaccgtgtaagggtgtgtctcatccaactgcactggccgagggagtccggcatcctcatccctccttcccaatcgacctcgcgcccctttgccccaagagtacacttcgctctctgccccaatagctacagtgaaggcatccccacaggctaccattgccatcttgatgccctcaaggccttggaccttacagggtgcccgactgcctcggcgagtattggtgcccaactgtccgtgctgattgctgccaaaagtgtagcaatcacccgaggcagtcacagcag

SEQ ID NO: 7048 - DNA, 529 bp, Homo sapiens
  misc_feature (1)...(529): n = g, a, c or t
ccaagaacaaggcgtgtgccacagtcacgtagtgacacaggtcacatttgctttctgccagcagaagagactggactccagtgcaggggagtgtgcaaggacaggttctggggggtggaggcatctgtggacatcccagggcaggggtgagggccagaacatccctaggtcctgagactacagtttctccacatttagatcagacattctcttccaaggaaggaaaccaagagaggctggtgaaccgtctggtaatgacaagccctcacttttgcagccctcttggctggtccctcagcaggtcttccctatgagcctgcaaaggagacaggcagggaatgagttccatgttcgagatangggaaactgagggccangggagaggcagtgactcgcccgagggcacacggcagaatgcaggcagaggcagagtggccctgggcatcctgagtccagttctgggcactctgcacctcacaggcctggactcagtccttgccaccaccactctcagagtccttctcatgga

SEQ ID NO: 7049 - DNA, 188 bp, Homo sapiens
aaagggggttttcacttacactttttggtatgatgaattttttgttaaataaacagatacaatagaattaaactaaggaccaattagtgcaaaaatgcattaaatacagctctccaggatttttaggatatgcctcatttctgagcaataaaattaaaaggaaaaatcactatgatccacattccttt

SEQ ID NO: 7050 - DNA, 310 bp, Homo sapiens; identical to SEQ ID NO: 6954

SEQ ID NO: 7051 - DNA, 301 bp, Homo sapiens
cctgtgcagagagcgccctgggctcaaaaaggccctggggcctgtgggcattctccctggtcccacacccaggatccctgggcctgtgggcactctccctggctctgtgcccccactatggaggcagagcccgaatcagcaagtcagtcttcggcagcaggagtgacgggctgtctggatgtgggggtgcaggcacttcctcccacactcagaacttaactttcttctaaggagtccagcccagctctacattcttttgactcccaaagtggcttacagatgccctggtgttttttttttt

SEQ ID NO: 7052 - DNA, 79 bp, Homo sapiens; identical to SEQ ID NO: 139

SEQ ID NO: 7053 - DNA, 289 bp, Homo sapiens
ctgtgttaccctgggcaagccctcacctttctgtgcctgtcccctctttgctgtaaaatgggggtactaatacttaagtcttcccttcccccacagttgctactaacaaacagaaaaacggtacccatgtgctccagggtcacctctgacctttttttcctccagatgtccagctcgccgctgtccaagaaacgtcgcgtgtccgggcctgatccaaagccgggttctaactgctcccctgcccagtccgtgttgtccgaagtgccctcggtgccaaccaacggaatgg

SEQ ID NO: 7054 - DNA, 326 bp, Homo sapiens
ccacgttgtgccccgagatgagatccggaagctgatggaaagccaagacatcttcaccgggactcagactgagctgattgctggaggccagctcctttcctgcctctcacctcagcctgctccaggggtggacaatgtcccagaaggaagcctgccagtgcacggtgaacaggcgctgcccaaggaccagcaaatcactgccttggggagagaggaacctgtggcaatagagagccccggacaggatcttctgggagaaagcaggtctgaaccagtggatgtgaagccatttgcttcctgcgaagattctgaagctccagtcccag

SEQ ID NO: 7055 - DNA, 177 bp, Homo sapiens
ctggcttcttgatgtcctggaagagagcgcggccgccacgctggttttgcatcttcaggagacgctcgtagccctcgcgcttctcctcggccagttcgcggaagaagtggctcacgccttccagagccacatcatcgcggtcgaaatagaagcccagagagaggtaggtgtaggagg

SEQ ID NO: 7056 - DNA, 227 bp, Homo sapiens
cacaaacagtccagcatgacggtgatggaagctcaggagagcccgctcttcaacaacgtcaagctacagcgaaagcttcctgtggagtcgatccagattgtattagaggaactgaggaagaaagggaacctcgagtggttggataagagcaagtccagcttcctgatcatgtggcggaggccagaagaatgggggaaactcatctatcagtgggtttccaggagtgg

SEQ ID NO: 7057 - DNA, 539 bp, Homo sapiens
  misc_feature (1)...(539): n = g, a, c or t
ctgccaacctgagtgagttgtgccgcagttgtgagcaccccttggctgaccacgtatcccacttggagaatgtgtcagaggatgagataaaccgactgctggggatggtggtggatgtggagaatctcttcatgtctgttcacaaggaagaggacacagacaccaagcaggtctatttctacctcttcaagctactgcggaaatgcatcctgcagatgacccggcctgtggtggaggggtccctgggcagccctccatttgagaaacctaatattgagcagggtgtgctgaactttgtgcagtacaagtttagtcacctggctccccgggagcggcagacgatgttcgagctctcaaagatgttcttgctctgccttaactactggaagcttgagacacctgcccagtttcggcagangtctcangctgaggacgtggctacctacaaggtcaattacaccagatggctctgttactgccacgtgccccagagctgtgatagcctcccccgctacgaaaccactcatgtctttgggcga

SEQ ID NO: 7058 - DNA, 235 bp, Homo sapiens
ccacacggtcacacaaggcttccgcctcagccaggttatgggtggtcaggaggacacctctctctgtgtttttaacgactgcctggattgcctgccacatttgctgctgccctgtggggtctatgcccgtagatggttcatccaggagcaagacaggtgagtttcccaggaggctcagcacaaaacacaactttctcgtgattcctgctgttaatttctgcacaggaacattcag

SEQ ID NO: 7059 - DNA, 518 bp, Homo sapiens
  misc_feature (1)...(518): n = g, a, c or t
ccagaacgtgaaccactggacaggatatagctgttccagcttagggagcccactcgggcagagtgactggtcatatttcgaagccgtttctgctgctgcacatcccatagctgcacctcagcactgctggtgcccacagccaagtagttgccctctttgatccaggccacagaggatatatattccccaggctgctccatttgcaaaagctgcaggatgtcaccagagcttgcactccacaggtacacactgttgtccagtgccacggccagtacattcccagaactccaatccacaaggttcaggtaatagtcatttcggatttcaggcgcatccaggatacggtctggcagggaaggaatgtaacggcaggtcttccggctggagccaggagtggccttttggctgtagagtactttcagtctgttctgataaccctctggcgcattttgtggttttccactgagccgaangatcttggcttcctctacatcaaaaccgttcangttcaaagccca

SEQ ID NO: 7060 - DNA, 367 bp, Homo sapiens
ccattatctacatgtgttttcagcacctggttggttctaaatgggatctggagacccagcttcttggagatttttaagaggaagtattaactggacaaatggaatgggcaccagaaagaaatacagggtcacccagaatggcagaaacctaggtttcccagagtggaaagagagaggagacattcaacaaacaagtatttattgagcgcctactatgtgccaggcactgttctagacccccccccagaagaaaaaacaaaaaacaagatagaggcagcaaacacaaattctgagggagaggaaaggggcagttgagtaagacggctaagggaactgagaagcctgaggtgatgggggctctgcctta

SEQ ID NO: 7061 - DNA, 196 bp, Homo sapiens
ctggggctcaaactgctgccagtgctggtgagtgatccccacatcggtgcgtagccccagggccaaaacttcctccagcagctccagcctgcccagggggacacgcttccgggtgccatgtccatcaagggcttctggaccccgaaggccgtgatgaagatgttgactaccacgatgatgaacaccaggcccgtgg

SEQ ID NO: 7062 - DNA, 373 bp, Homo sapiens; identical to SEQ ID NO: 141

SEQ ID NO: 7063 - DNA, 373 bp, Homo sapiens; identical to SEQ ID NO: 142

SEQ ID NO: 7064 - DNA, 185 bp, Homo sapiens
cctctacttaccaccaggtacagcatgaggcacggctgtctatgatgttgctggacagcagagctgacgacgggttccacctgctgttgatgactcccaaacccatgatccgggcttttgaccatgtcctgcatctccgtccactgagtcgcctgcaggcagcgtgccaccggctgaagctctgg

SEQ ID NO: 7065 - DNA, 246 bp, Homo sapiens
ccttaccacaatcactttgccaccatcaccttacctttgcaaacaagccaggccaaaaaggctcaacatttacaccggctgctttaatgagggcattgatcttatcctccgtgactgtcacctcatcgtcgtgcagaatgagggccgagtagatgcaggcgagctcggagacagaggccatggcgcgggcgagtgtagggctggcgctgccggacgcggtgctagtcgccggatgaagtgagggcc

SEQ ID NO: 7066 - DNA, 210 bp, Homo sapiens
cgcagcttcttggcttaggtacttctactcacagcggccgattccgaggccaactccagcaatggcttttgcaaatctgcggaaagtgctcatcagtgacagcctggacccttgctgccggaagatcttgcaagatggagggctgcaggtggtggaaaagcagaaccttagcaaagaggagctgatagcggagctgcaggactgtgaagg

SEQ ID NO: 7067 - DNA, 240 bp, Homo sapiens; identical to SEQ ID NO: 326

SEQ ID NO: 7068 - DNA, 132 bp, Homo sapiens
ctgcagagatatcaatgggaacagaggtttcagaagaagatatttgcaatattctgcatctttgcacccaggtgattgaaatctctgaatatcgaacccagctctatgaatatctacaaaatcgaatgatgg

SEQ ID NO: 7069 - DNA, 239 bp, Homo sapiens; identical to SEQ ID NO: 140
  misc_feature (1)...(239): n = g, a, c or t

SEQ ID NO: 7070 - DNA, 321 bp, Homo sapiens
ctgggtaaggcatgctttgagggaagactccaccagcccggccaggaaagggcagcaggcgcagtgcccctatggggcccacatgactggtaacagcagcaggacacctcttccaaagctgtccaccagccccactaggggctcctactcatggcaaaaaagactacatgagcccacaactgtcaactaacacagtgccacctcctcccaaagcaaacacatatacatacaatgttaagaacctattatcagaacagcagtgcagcagaccctggccttggtctctgaaagtcctgtgtcactggctgtaaggacgcttgg

SEQ ID NO: 7071 - DNA, 237 bp, Homo sapiens
aaagttgagaggcagttcacatcctaagtgatacctagaaacctgccttcttgttcgcaaatgatcaacatgaacatacagaatggctgacatttggacctttggataagcttaaaacatggattgtggaatgtctaatagagggcttttctctcttttttttaataatgactgtcccacactttaattcctcaatgatatgtggatgctaactaaatcagatgaaatgttttcttt

SEQ ID NO: 7072 - DNA, 368 bp, Homo sapiens
ctgtcatcttttgaaacggagttcaacacacagccgcatcgtaaggtagaaggaaacttcaacccttttgcctctccccaaaagaaccgacaatcagatgaaaacaacttaaaagaccctgggggctccgagttcgactcgatcagcaaaaacacatgggctcctgctcctgacacatgggctcctgctcctgaccaaactgagcaagaccagaatagactgtcacagaactctgtaaatctgtctcccagcagtcacgcaaacaacttatcagtagtgacttacagtaaggggctccatgggccttaccccttcggccagtcttaaacgggtgtcagcaagaagaaaaattaacaaaagacagaagg

SEQ ID NO: 7073 - DNA, 378 bp, Homo sapiens
ctgaggtctcttgagggagcttagccaatgtgggagcagcggtttggggagcagagacactaacgacctcagggcagggctctgatattccatgaatgtatcaggaaatatatatgtgtgtgtatgtttgcacacttgtgtgtgggctgtgagtgtaagtgtgagtaagagctggtgtctgattgttaagtctaaatatttccttaaactgtgtggactgtgatgccacacagagtggtctttctggagaggttataggtcactcctggggcctcttgggtcccccacgtgacagtgcctgggaatgtattattctgcagcatgacctgtgaccagcactgtctcagtttcactttcacatagatgtccctttcttgg

SEQ ID NO: 7074 - DNA, 353 bp, Homo sapiens; identical to SEQ ID NO: 327

SEQ ID NO: 7075 - DNA, 267 bp, Homo sapiens; identical to SEQ ID NO: 143

SEQ ID NO: 7076 - DNA, 264 bp, Homo sapiens
cagagatctattaatgagatgaagcggttggaagaaatgtcaaatatgtttcagagctctggagtccagcaccaccctccagaaccaaaagcccaaacagaagggaatgaagattcagagggcaaagagcaaccttgggaaatggtgatggataagaaacactttaagctgtggcggcgcccaattacaggcacccacctttaccagtaccgagtttttggaacctacacagatgtgacacctcggcagttcttcaatgttcag

SEQ ID NO: 7077 - DNA, 353 bp, Homo sapiens; identical to SEQ ID NO: 327

SEQ ID NO: 7078 - DNA, 181 bp, Homo sapiens
  misc_feature (1)...(181): n = g, a, c or t
gttgactcatacaccctcantgtcagnngccccaggaaagacngccaagattacctgtgggggaaacaatattgggagtaacaatgtacactggtattaccagaggccaggccaggcccctgtcctaatcatctcttttgataacgaccggtcctcagggatatctgaggcgattctctgg

SEQ ID NO: 7079 - DNA, 473 bp, Homo sapiens
gttcggggagagggtggtagcacagggcttgggatatcggcagtgtgggaaatgcgaagcatttctcatcatcatcatctctgctacagtcatgtttctgcatgtcagcgagcgacactgtccctgcctcaggttggaggttttatcagccaaagtgtttttttcatgtatcgttcgttccattcatccactctgtgccttgtcagcctttgaaaggcttggttgctcccaggctgctgttctcagggaccttaaaagggacctggttagtcttggggcagagagtatctacttgggcactctcttccaagaaagaccttgtctccattttcattagacaatgcttcttgtgtgtgttctggaagatcttctaaatggaatgcttgttgcactgttcccaggcgagtggctgccatgagacctgaggaccacacttgggggaccaatcatgtccttcaccactgtgccttaga

SEQ ID NO: 7080 - DNA, 497 bp, Homo sapiens; identical to SEQ ID NO: 638
  misc_feature (1)...(497): n = g, a, c or t

SEQ ID NO: 7081 - DNA, 566 bp, Homo sapiens
  misc_feature (1)...(566): n = g, a, c or t
aaatgattctttatttcaataaactttaacaaacaatatataatatttcttccttaaaaagctcattcaaagatcataggcagacttcttccccattgtattttagttggggagataaaggcaaaaagaggaaatgtaagctatcttacagtcattctgagaacctctggtttcatgctatactttcccagctaaaagttactaatttacgaagttcagatactgaaacttaaaaatcaagatccatatattaggatgtcctgctgtcacactggtggtggcccattgtgtcggagtctggtaaatggacctgcccgggcggccgctcgggcaggtctgagaatatcatatggtactaacaaaggaaaaaactatactgaagaagaagatcgttttctgatttgnatgcttcacaaacttggatttgacaaagaaaatgtttatgatgaattgcgacagtgtattcgcaactctcctcagttcagatttgactggtttcttaagtccagaactgcaatggagctccagaggagatgtaataccttaattactttgattgaaagaga

SEQ ID NO: 7082 - DNA, 283 bp, Homo sapiens
atggcgtcctccacataggcagtggctgtggtttctaccccgggtggccgggggcagtgctgagctgggactgttgtttgcccagcctgggctgcagaaagcagcagttaaagttcgtttctggtcactgctccaggaagccaccttactctgagggtcaagaattgccgcttccttttagttactgtaagttcctcctctgcccctggtttgtttcccgcggcacttctggatacccccaggtcccagacccttccagactcaaaccatgaactttcggcag

SEQ ID NO: 7083 - DNA, 259 bp, Homo sapiens
  misc_feature (1)...(259): n = g, a, c or t
ctgccacctgtgaccaagggctcccagcccccacggttctgcttccagtccaagagctggaagaggtgtgtgccagtgaccctggagctgaccaaggtgtggaggcaggcnnaccagaccttcatctctctactgcaggccgtgaggctaggcaggtgggctctgccctgacagtccagccccaacaggtgttcagatgaggtgacccgccagctccaggccacagcttcccacaaggtggggcgagatgggattgtgg

SEQ ID NO: 7084 - DNA, 158 bp, Homo sapiens
aaaggcaaatattatccagcaagcagtctaccctgtcctttgcaattgctcttctccacgtctttcctgctacaagtgttttagatgttactaccttattttccccgaattctatttttgtccttgcagacagaatataaaaactcctgggcttaagg

SEQ ID NO: 7085 - DNA, 143 bp, Homo sapiens
gggatatgaggtcagaagggtagcaggagggcaggtcttgttcagccatggtaaagggtttggcttgactcctggtgaaatgaaaagtcttgggtgtgggggcggtttaagcagagaaatgataggatctgatgtatattttt

SEQ ID NO: 7086 - DNA, 428 bp, Homo sapiens
cttctctattaccctccttaccaccacagctccagccaagcttggagtgatctgcaaacccaatatgtgagtttagtgtatagaaaacacatgaatgaaaggcaaaaggggccaacattggtatttgggttttttttttttttgagctgtcactaggctcctgaccttccctctgaactccaccctgcagggcaggccaacagacaagctttctttctttctttttcttttttttatatgagatggagactcgctctctcgcccaggctgcaatgcagtagcacgatctccgctcactgtaacctccccctcctgggttcaagcgattcttctgcctcagcctcccgagtagctgggattacaggtgcacaccaccacatccggttaatttttgtatttttagtagagacggggttttgccatgttgg

SEQ ID NO: 7087 - DNA, 287 bp, Homo sapiens
ctgtatgcccatggacaaataaccattctgacctcagcttcatcctctgtaaatgagtctaattcaagaagcataagtctactgatgactagcgatggcatctccaccagcctcagccctcaaaaatgcaaccaggaaataagattaccttgactgcatcagggaccaaacaaaacttcccctggggaccgaagaaagatcagccctttttggaaacatacaggatatctaccacttcaatagtgaacttctgcaagatttggaaaactgtgaaaatgatcctgtgg

SEQ ID NO: 7088 - DNA, 228 bp, Homo sapiens
ctgccactgaagcccagcctgttgcaatctggggaattagcaggctgggggttgcccatcagtgtcttctgagtgcccggtgtgccctgtcaaggtgtctggtcggagagcagggtggagaagtactttctctgtggcccggtgcagtggctcacgcttgtaatcccagcactttgggaggctgaggtgggtggatcacctgaggtcaagagtttgagaccagcctgg

SEQ ID NO: 7089 - DNA, 166 bp, Homo sapiens
  misc_feature (1)...(166): n = g, a, c or t
ccttaaaaattanngcacgaccaaaaagaatgatttggtgagagatgtgtagctgattgacaattttagtgtgaattcatattcatttaacccagcagcaatctacataagctatgctttttcccgcctgtatttatgttncttagcttataaagtcccaatatat

SEQ ID NO: 7090 - DNA, 331 bp, Homo sapiens
  misc_feature (1)...(331): n = g, a, c or t
aaatagaaaacantatattgaaagtggtgggtttgatctttttatttagaaacccacaaaatcagaaacacagtacaaataaaacagaaatcaaactataagttgacttttagttcctaaaaagaaacatatttcaaaagcaatggaatctagaattcttataacatgaataacaaaatgtacagcaagcctatgtagttcaattaatatataaggaaaaggaaggtctttcttcatgatacaagcattataaagttttactgtagtagtcaattaatggatatttccttgttaataaaattttgtgccataatttacaaattagttcttt

SEQ ID NO: 7091 - DNA, 516 bp, Homo sapiens
  misc_feature (1)...(516): n = g, a, c or t
aaatgtatagggtattaaatacaagcttctaaaattttcagtatctatattggctttctctaacagctctacagcaaagtttgacatgttttttgtgtgtgtcatgtattgtaagttgtaatatctgtaggagtgagttggacattctaaattagcagtaaaaaattcacaattacagctcagcttgtttattcattatagtttccacatttccaacttccaagtgaactttatatatactacagtgaattatagataaatacagccatggtggacctttccctcaatagtgattttttgtacaaacagtataattaaaaggaaaagcttttatattttatgcaaggtaaatgtttcctaaatgtcacaaaagtgatagaaaacatagctttttgggatctggtccagcattagagtttctaattctgagacccaccagcttgtgtttcatcttctttatatcctgtcagaatacatacttaaatcatgtgggtatgngaaagatgttgtttaact

SEQ ID NO: 7092 - DNA, 402 bp, Homo sapiens
  misc_feature (1)...(402): n = g, a, c or t
aaaaatgttttcccncgggtaattntctattatatattttcatatgggcaaagggaaaaaatgataaatcctctgtaatcacaaaccccaatttcgttttgtttattcagcttctaaannattgaacacccagacttttaattcaacctttaagaaccttatcatttatgtttcagtagatatcaaagtaatccatgtttgtgtcaaatgatcatagaaaataaatagaanagacagtgaagcaagtaaaaagaaaagcattgttttaatttgtttgcattaatttttttcatttgtcaaaatgcttcttttgtttgccacagtaaagaacagtttttattgtttngtaagtaaaattacgtancttgattttgtatgtaaagattnatttccataataaaa

SEQ ID NO: 7093 - DNA, 418 bp, Homo sapiens
  misc_feature (1)...(418): n = g, a, c or t
ccattacatcctctnnttaatttacataatacagatacttgagaaagttgttgtggtgttgtatgccaagaaaattctttttattggtgcctatattgtaacaattatttttaatgcattgtattttgaagtaacggttcagttaaatttttcacctgctgtgtaactgaaacacaattacagtttataatcatctgtagaagtctggagataattttgcaactcatgttatgggttaaatgaatatttttgtaaaagtaaaagcaacaaatttataaattgattatttgaaactttacaacacaattgcatcccaaatacaaattgtattgcttattcattatagctattcgtcctgtaatctgtttctaggtgaagcatactccagtgttttaggggtttttgaaaataaatattt

SEQ ID NO: 7094 - DNA, 357 bp, Homo sapiens; identical to SEQ ID NO: 6074

SEQ ID NO: 7095 - DNA, 226 bp, Homo sapiens
  misc_feature (1)...(226): n = g, a, c or t
aaataacaaactatncncataaaaaggagcanaaataatatggaatgtttttgacgaaaacaaacttatggattcaataaataatataaaatgcctttgtgctaaaatagaactcttgtttcttatatatatatagttcagtgatctttatgctatccagaaaaagccagatctattataattaaacatagaaaaataccatttaacaataaaactaaaaaaatgg

SEQ ID NO: 7096 - DNA, 254 bp, Homo sapiens
  misc_feature (1)...(254): n = g, a, c or t
aaaatatcttttannggttttatataaaaatgtctgagtatgattttgtgtgaaagttctgataccagttgtaatagagtcaaatttatgtgagcaataaagaagaaattggcagatattggaaaaatattttgtgaaaagctgtatttattataaatactagggccatgacatagtaccattggggttaagtcattttcccaatctatttataatttaatgatatgttagtgcctctgttatatgtcaagttt

SEQ ID NO: 7097 - DNA, 378 bp, Homo sapiens
aaagtatttacccacagaactcataaaaaggtcaatttggtaaaaggacgttttgacccaagagcatctaatatttaagcttattttattggataagcatatctcttgtccatcacaagttatagaaaagttatatacgactaaaagaaaaagttatctactgtaattataggaagttgtcacaacaggaattcagctcaagaacttcttgcaattactgctacaacgtctataaatgggaaaagcaagcattaaaatagattaataaaatataaaattaagactggaaaattccagagacaagctgtatccttagaagaataaatagttaaaattattcagtaagctgacgtatttaaccattactgggcctgtaaa

SEQ ID NO: 7098 - DNA, 120 bp, Homo sapiens
  misc_feature (1)...(120): n = g, a, c or t
aaaatgtgtccctccnttgggagagaatcattttgttctttactaacaataatttgaaaattggtaatttaatatcttgnnaatatgaanntattatggtatagattngcttctaggaga

SEQ ID NO: 7099 - DNA, 397 bp, Homo sapiens
aaatctataatctggttcaagtgcaaatcaggtgctttctgttagtccttccaaaaaaggcatttttaatatttttggcacaaatgaaatgtcatcatgccaacaattctaattacaatacatatatccaaacctttagagtagcaatcatatacatacagtataaaactgagtatttacaaatgtattcagcataaatgtaaccttcgtgggtgaatcagaactcattagccatacccacactaataataattataaaaggtaaatacaattcctttctttcatttgcttatgctggttgttgtgggttgacattcatgtgaggaggatgtcctagaagaccaattctttgtttctgcttcctttgttctgtcatctgatcctttaattccgacag

SEQ ID NO: 7100 - DNA, 421 bp, Homo sapiens
ccaaaatgatggatcctagggttcttcatcacatgggtggtatggcaggacttcagtcaatgatgaggcagtttcaacagggtgctgctggcaacatgaaaggcatgatgggattcaataatatgtaaagaaaatgccttaatataaactgactcagttgaatacctaatttgctgagacctcagcgtttcccttctttttgcgaattggggggaaagtgtatttttcttgcttatcatgcactctttccttttcttctcgcccgcttttcccctccttttctttttccttccttctttcctccctttaatataagggagaaatacatggtttttgtggaaatcattatatgtttgctttagattttcttctgttttcaccatcataacacttaagtttaaatcatgatgtaaaattttag

SEQ ID NO: 7101 - DNA, 556 bp, Homo sapiens
  misc_feature (1)...(556): n = g, a, c or t
ccttttatctacttctttgcatgtaaagggtataagagaaaggttatgaggatgctgaaacggcaagtcagtgtatcgatttctagtgctgtgaagtcagcccctgaagaaaattcacgtgaaatgacagaaacgcagatgatgatacattccaagtcttcaaatggaaagtgaaatggattgtattttggtttatagtgacgtaaactgtatgacaaactttgcaggacttcccttataaagcaaaataattgttcagcttccaattagtattcttttatatttctttcattgggcactttcccatctccaactcggaagtaagcccaagagaacaacataaagcaaacaacataaagcacaataaaaatgcaaataaatatttcatttttatttgtaaacgaatacaccaaaaggaggcgctcttaataactcccaatgtaaaaagttttgttttaataaaaaaatttaattattatttcttgccaacaaaatggctagaaaggactgaatagattatatattgccagatgttaatactgnaaacatacttttt

SEQ ID NO: 7102 - DNA, 388 bp, Homo sapiens
  misc_feature (1)...(388): n = g, a, c or t
ctgaagtgtggctnncataaataactgtttattccaaaatatttacatagttactatcagtagttattagactctaaaattggcatatttgaggaccatagtttcttgttaacatatggataactatttctaatatgaaatatgcttatattggctataagcacttggaattgtactgggttttctgtaaagttttagaaactagctacataagtactttgatactgctcatgctgacttaaaacactagcagtaaaacgctgtaaactgtaacattaaattgaatgaccattacttttattaatgatctttcttaaatattctatattttaatggatctactgacattagcactttgtacagtacaaaataaagtctacatttgttt

SEQ ID NO: 7103 - DNA, 239 bp, Homo sapiens
  misc_feature (1)...(239): n = g, a, c or t
ctttttttttttntnnttttttttttttngagtattgttttattaaccaaaacacaaaaccaaaatgaaaactggcttanaatataaaattctcatttttcaaagtgaaagtttgaanatactanctaaagttgataacttaaatagtggtaaaagtaaataacttanaattatggcagcantcacaagaagaaacagaaaacagggggactagggattcggnggtagacttttacttt

SEQ ID NO: 7104 - DNA, 394 bp, Homo sapiens
aaataactttcttaaccccgcccattaagatcacagtaaacatacaataatttttattatggaaattaatctttacatacaaaatcagctacgtaattttacttacaaaacaataaaaactgttctttactgtggcaacaaaagaagcattttgacaaatgaaaaaaattaatgcaaacaaattaaaacaatgcttttctttttacttgcttcactgtctcttctatttattttccatgatcatttgacacaaacatggattactttgatatctactgaaacataaatgataaggttcttaaaggtttgaattaaaaagtctgggtgttcaatattttagaagctgaataaacaaaacgaaattggggtttgtgattacagaggatttatcatt

SEQ ID NO: 7105 - DNA, 332 bp, Homo sapiens
  misc_feature (1)...(332): n = g, a, c or t
aaatagaaaacagnntattgaaagtggtgggtttgatctttttatttagaaacccacaaaatcagaaacacagtacaaataaaacagaaatcaaactataagttgacctttagttcctaaaaagaaacatatttcaaaagcaatggaatctagaattcttataacatgaataacaaaatgtacagcaagcctatgtagttcaattaatatataaggaaaaggaaggtctttcttcatgatacaagcattataaagtttttactgtagtagtcaattaatggatatttccttgttaataaaattttgtgtcataatttacaaattagttcttt

SEQ ID NO: 7106 - DNA, 408 bp, Homo sapiens
ctgtgcaagaaaaattaaatgaaatagtagatcagataaaaactagaagagaagaagaaaagaaacaaaaagaaaaagaagcagaagaagctgaaaagcaattattccatggtactccagttacaattgagaatttcttaaattggaaagccaagtttgatgcagaactcttggaaattaaaaagaaaaggatgaaagaagaagaacaagcaggaaaaaataaattaagtgggaaacaactatttgaaacagatcataatcttgacacatctgatatccagttcttggaggatgctggaaacaacgtggaggtagatgagtctttgttccaagaaatggatgacttggagctggaggatgatgaagatgatccagactataatcctgctgacccagagagtgactcag

SEQ ID NO: 7107 - DNA, 519 bp, Homo sapiens
aaaaaaagaaaaataaaataaagtgttttgattatttagggctgacttacatttcagtatgtgacaaaaattcaaacccaaatgcatctagctcactcagtttcagacaggtcctatgttcagcccctaaacgaatggcacaatgccaccaattttgggattcctgagtttggttcccttaagttctcagagttttcccaactctcaaaaccaaagcatcatgggagtgacagggccactggcaagactttttgccagtcagcctagttcttcttttaagatgcagtagtctcaaagcttaaagtcagaaaatcttgcaatacaagagtaactgcaagaacatataaagaaggaaaagaaaggacggggtttctagttgctaagatttgccaaacatggctacaaaactggtaaacaaacctttcttgagtgcaaagtccattagcccaacttgccatgaagagatttgaaataaaaatgaacaaatcaatttctgttgtagatacaaagcgaaaaaat

SEQ ID NO: 7108 - DNA, 485 bp, Homo sapiens
aaatgcattcttcacaagtaattcagcatatatttttatatcatgtttacttatgcttaagaattaaagcaagtatatttattactctgatggaaatatgggaaatctctcattcatgcaatatacagggataatattcaagcgaagggaaaattcccgctttttatttttgtaaatgtatccatatataatcatcgacatgacagatgaggaaacccatgaagtttcccactagtcagatatacattttcacttcatcagaagcacctgatatctacagctaatttataattagatactgtttcaatgaaaccaaaatgagccctacaagttcctataaacaaaagcttccaatgtactaggacagtcagtaattaatgcatcattcagaggattatggctgttccttaagaagtgcaagttcaaacctgtcaacaccagaggtaatcattttatattaatttatacgtaataccatttacctg

SEQ ID NO: 7109 - DNA, 452 bp, Homo sapiens
  misc_feature (1)...(452): n = g, a, c or t
aaaaatgttttcccgtgggtaattttctattatatattttcatatgggcaaagggaaaaaatgataaatcctctgtaatcacaaaccccaatttcgttttgtttattcagcttctaaaatattgaacacccagacttttaattcaacctttaagaaccttatcatttatgtttcagtagatatcaaagtaatccatgtttgtgtcaaatgatcatagaaaataaatagaagagacagtgaagcaagtaaaaagaaaagcattgttttaatttgtttgcattaatttttttcatttgtcaaaatgcttcttttgttgccacagtaaagaacagtttttattgttttgtaagtaaaattacgtagctgattttgtatgtaaagattaatttccataataaaaattattgtatgttttactgngatcttaatgggcagggttaagaaagttattt

SEQ ID NO: 7110 - DNA, 500 bp, Homo sapiens
  misc_feature (1)...(500): n = g, a, c or t
cccaacttgcccttcaagttctacttcagtttgataaggctataaatgcagcactggctcagagggtcaggaacagagtcaatttcaggggctctctaaatacgtacagattctgcgataatgtgtggacttttgtactgaatgatgttgaattcagagaggtgacagaacttattaaagtggataaagtgaaaattgtagcctgtgatggtaaaaatactggctccaatactacagaatgaatagaaaaaatatgacttttttacaccatcttctgttattcattgcttttgaagagaagcatagaagagactttttatttattctagaattgcagaaatgactacactgtgctataccagagaattccagtanaaagaaacttgtaactctgtaggcctcttacatcacctttattatacagcatgaaaaaccataacttttttttaaggacaaaagttgttgccttcctaaagaaccttctttaataaantcatttt

SEQ ID NO: 7111 - DNA, 509 bp, Homo sapiens
aaataaataaatagctagactggtgactgattcttcagcaaaaatattttatgatccagcagattattcactgatttgacatagtctggctgtacccaggaatggagcctgcacggtgaatggctttgtatagaacctctttgtctacaccattatgtgcgctgataagcgttcatggaacgcgttgaaattgtaattatatctgaggaattctgtatagattagaattctgtatagattagagagtgttgaaacggatgatttctatgctgagtttgtgctggtgtatgtgtgaagtgagtgagttgggtgtattgtgcgctaaacttttctgatagaggaagcctgattaaagaatggtccgtgctaaggacttgttagatctagttcactctccatttaataattatatgctatttctatattttcattctcctatcacctgtcttgcctttttcattatttttattatgaaacttgtgtaaatacaatttttgtttctgtacttt

SEQ ID NO: 7112 - DNA, 328 bp, Homo sapiens
aatatggatcagagcatttattttggggaggaaaacagtggtgattaccggcattttattaaacttaaaactttgtagaaagcaaacaaaattgttcttgggagaaaatcaacttttagattaaaaaaattttaagtatctaggagtatttaaatccttttcccataaataaaagtacagttttcttggtggcagaatgaaaatcagcaacttctagcatatagactatataatcagattgacagcatatagaatatattatcagacaagatgaggaggtacaaaagttactattgctcataatgacttacaggctaaaattagtttt

SEQ ID NO: 7113 - DNA, 280 bp, Homo sapiens
gtacaaaactttttatatcaaaaggctttgcacatttctatatgagtgggtttactggtaaattatgttattttttacaactaattttgtactctcagaatgtttgtcatatgcttcttgcaatgcatattttttaatctcaaacgtttcaataaaaccatttttcagatataaagagaattacttcaaattgagtaattcagaaaaactcaagatttaagttaaaaagtggttttggacttgggaacaggactttataccttcttttactgtaacaagt

SEQ ID NO: 7114 - DNA, 244 bp, Homo sapiens
  misc_feature (1)...(244): n = g, a, c or t
tgcactcaaagcttnntaagatagttaagcgtgcataagttaacttccaatttacatactctgcttagaatttgggggaaaatttagaaatataattgacaggattattggaaatttgttataatgaatgaaacattttgtcatataagattcatatttacttcttatacatttgataaagtaaggcatggttgtggttaatctggtttatttttgttccacaagttaaataaatcataaaact

SEQ ID NO: 7115 - DNA, 484 bp, Homo sapiens
  misc_feature (1)...(484): n = g, a, c or t
aaattgttctcaaaattagggaaataaaagagaatgaaattgtggcaacttttttccctcctagttaccagatgtatgctactcatggtgggtcctggcttccctaaagataattggaagacttcattggattgatagagagaaactgcgtaatttcattttagcatgtcaagatgaagaaacggggggatttgcagacaggccaggagatatggcaagtaatatttctgacatatttctataaattatttcagcgtttgcattacttcatggttccatggatttccagggtggcattccgagtgttgctttgaaagcagtttttttttctatttattgtanagtgtatgaaggatatagaacaatcttacagaaatttcttgtcgcttgttgctaacaaaattagtatatggtaaaggtcaggtattcataatttgaagttaaagaagttttcattttgtgatctgtatataaattctttttt

SEQ ID NO: 7116 - DNA, 292 bp, Homo sapiens
caggtaaagtaattcgtttaataatagatgtgtttttagaggaaatgctgttacttggaattaattttccagttatacagtcttctataacttactaataatattctatatgtactttatgtaatttccctaaaaagaatgaactaccactacactatggtgttaaaccaaaatatagggaaaataaacactaactgctgcttatggataatgttgcaactacttgttatgcatataaatattttactttttcacatgtatagattgcatttcttaggtgttttaatttttt

SEQ ID NO: 7117 - DNA, 352 bp, Homo sapiens
ctgtaaggaggcggcagacggctaccagtgctgtatgatggcgcagtacaaccggcacgacagccccgaagatgtgaagcgacgagccatggccgaccctgaggtgcagcagatcatgagtgacccagtcatgcgccttatcctggaacagatgcagaaggacccccaggcactcagcgaacacttaaagaatcctgtaatagcacagaagatccagaagctgatggatgtgggtctgattgcaattcggtgatgacttgttcatccccccttcccttcgccctcatgtggaaagaggagctgggaccgcggcgagcagcacggagcggaagggagagcaggggagagaagg

SEQ ID NO: 7118 - DNA, 237 bp, Homo sapiens
  misc_feature (1)...(237): n = g, a, c or t
aaaaaattaactacnaaaagcttttatatttaagaactgnnagtgtttcaaaactatgctgttttgtgttgttatagttgtaacatatttctcaattttcctgtttttcttttagtttattgacaagactacctggtcggcctaaattcacattttcattcacgctttttgggcatttgagatcaaagagtaagtatggtttctacaagntacttcattnttctacttattcttttt

SEQ ID NO: 7119 - DNA, 396 bp, Homo sapiens; identical to SEQ ID NO: 6096

SEQ ID NO: 7120 - DNA, 436 bp, Homo sapiens
  misc_feature (1)...(436): n = g, a, c or t
tttttttttttnnttnttttttttttttatggaaggttctcaggtctttatttgctctctcaaattccaggaattgacttatttaattaatccatcaacctctcatagcaaatatttganaaaacaaatttatattcanattcttattttcagtagggaagtaanaagttgcagctcagtgcacataaagttganacagagatggagacatccagccccacctntntggaacaagaaagatgactggggaggaaacacaggtcagcatgggaacaggggtcacagnggacacaagggtgggctgnctntccacctcctcacattatgctaacagggacgcanacacattcaggtgcctttgcanaaagagatgccagaggctcttgaagtcacaaaggggaggcgtgaanaaatcctgcatntnagtccctcacaa

SEQ ID NO: 7121 - DNA, 497 bp, Homo sapiens
  misc_feature (1)...(497): n = g, a, c or t
tataacacctctagtagaaagcaagcaatagttaaggtggcaggaaggcaatctactttcaaggcttttattaaagtttagaaatgatcagtggtcttcagaagattataaatttcagtctaaactgaaatgcgtttttaattttctgaataagtaacttccagtttacgatgaaaataagtgatcagtttctctgaccaaagaaagaggccattgcatgtgattggactgacctcttcctgtggtgactagaaagtgctaaaagaatattctttantattttctctcatactaaggggttaatatggaatgtgtttgaaattgcaaattgaataattgtccaggntttttttttataccttgctaaattangttcctcttttaatctagngatangatacnngtgatgccagtgatgacagcttttnannagccaaggatannctganttggaaataangctgaaatgaatacatgactgggaataatggggactg

SEQ ID NO: 7122 - DNA, 131 bp, Homo sapiens
  misc_feature (1)...(131): n = g, a, c or t
ttactaaatatttaggagatnncagtgcattnngggttgttttttttttatataatnnatacatatcnnccctttgcagtgatagcatanaagagtaagtatggccttaggtacaacacgttttttacctg

SEQ ID NO: 7123 - DNA, 388 bp, Homo sapiens
ctgaagtgtggcttgcataaataactgtttattccaaaatatttacatagttactatcagtagttattagactctaaaattggcatatttgaggaccatagtttcttgttaacatatggataactatttctaatatgaaatatgcttatattggctataagcacttggaattgtactgggttttctgtaaagttttagaaactagctacataagtactttgatactgctcatgctgacttaaaacactagcagtaaaacgctgtaaactgtaacattaaattgaatgaccattacttttattaatgatctttcttaaatattctatattttaatggatctactgacattagcactttgtacagtacaaaataaagtctacatttgttt

SEQ ID NO: 7124 - DNA, 308 bp, Homo sapiens
  misc_feature (1)...(308): n = g, a, c or t
ccatttaccagactccnacacaatgggccaccaccagtgtgacagcaggacatcctaatatatggatcttgatttttaagtttcagtatctgaacttcgtaaattagtaacttttagctgggaaagtatagcatgaaaccagaggttctcagaatgactgtaagatagcttacatttcctctttttgcctttatctccccaactaaaatacaatggggaagaagtctgcctatgatctttgaatgagctttttaaggaagaaatattatatattgtttgttaaagtttattgaaataaagaatcattt

SEQ ID NO: 7125 - DNA, 146 bp, Homo sapiens
  misc_feature (1)...(146): n = g, a, c or t
aaaaaaattaaatacncttaatttactaaatatttaggagataacagtgcattaagggtttttttttttatataatacatacatatcacccctttgcagtgatagcatagaagagtaagtatggccttaggtacaacacgtttttt

SEQ ID NO: 7126 - DNA, 318 bp, Homo sapiens
aaagaaaccaccaccaacaacaaaacaaccaaaaaccatgttttatgtcaaagctctgtagcacagagaatgtggtgtcacagatacatcgccgagagaggtttctttctttcttttttttttttgagacagagtctggttctgtttcccaggctggagtgcagtggtgggatctcagctcactgcaacatccgcctctggggttcaagtgattctcctgtctcagcctcccaagtagctggaattacagggacccgccaccacgcccggctaatttttttgtgtggttttagtagaggtggggtttcaccatcttgg

SEQ ID NO: 7127 - DNA, 382 bp, Homo sapiens
aaacttgtgataggcatatctatgaaacctttgtaaatttagtttattgctttaccattattttactaggtaaaattagagaacagattttgttctctaatttttaagccttatttacatatgcagaaacagcttaaatattttgactagattagacaaacagttaatagatccaccattaggaatcaatatattatgtcataataaacatcctttttctttcactgaaatttcttttagaaataaacttatttttgcttgttatgttttgaaacttgacataggatattttccctctggctacacattcacctacccttgttctctatttagattattcaaataaagttagtttgcttttatagcaaaaaaaaaaaaaaaa

SEQ ID NO: 7128 - DNA, 559 bp, Homo sapiens
ggattacttgagccccagaggttgaggttgcagtgaaccatgatcacaccactgcattctagcctgggtgacagagtgagaccctctccctcctaaaaaaatccttaagaaatatattgatgcttggttcctttggtcagaattttgatttaaggtgttgggagtgtagcacagatgttggaataaacctctcaaactgattttaatatacaaacaaggtcgagaaccaccaaggaagagtttttatgcataaagattcctgtactctaccctagaactaatacatctgaatctctgggaatggagtataacaatcagatttgaaaaggtttctttagtaattttaaggactgaccagtttagacactgctttgttagagtaaaatgattaggtacctagtatcaacctagccatccaaccttatattaataactaggaaaataaagggttggagcctctgtgtttctttgttgaaaaatctgctactattattagatctgtgaaaacaattgaaaattcggttattatcaccttaaaagtacaaaacctatagatttt

SEQ ID NO: 7129 - DNA, 374 bp, Homo sapiens
  misc_feature (1)...(374): n = g, a, c or t
aaaggttattcactatatgaaaacagaaagggaacaattacaacaatgaaattgttttaacttttttaaatctgattctaatgtgtattgacatatatttaattatataaaagactgtgggaaaggggcattaacagtactctagaagagtaaaggataaaaatccctctttttcccctagcttccagtttgacaagagggaatacttaatcgaatcctgtccacaaaaacagctaacagtactgtgctttgaaaaaaaaaaaaaaaancaaacctgacttcatataattcttaatacatcctgtgctgctgttggtttttttaanacttctagcagtagctataggttccggtctggcactttaggtattttt

SEQ ID NO: 7130 - DNA, 53 bp, Homo sapiens
aaaaaaaaaaaaaaaaaaaaaaaaaaaaaaaaaaaaaaaaaaaaaaaaaaaaa

SEQ ID NO: 7131 - DNA, 317 bp, Homo sapiens; identical to SEQ ID NO: 6103

SEQ ID NO: 7132 - DNA, 115 bp, Homo sapiens
  misc_feature (1)...(115): n = g, a, c or t
ccacttgtgtgngtcctnacaagcaaagagagcactaaacttgacattgggggtccaccactccaactttgctttctganngttntggtgtacattganccccanaaggaaagga

SEQ ID NO: 7133 - DNA, 212 bp, Homo sapiens
  misc_feature (1)...(212): n = g, a, c or t
ccaggctgcactgnngctagctcaatgtttgttgcattcagcttctcctccattacttgtttgaggatgatgagtgaagacttgatggcttctttcaaagtcatanncttgtggtaaacttcttgcaaggagctctgggcaccctctgaagcanagccaattgctcgagcatnncactgtacaaaggtcccanatgggtccatatgaaacag

SEQ ID NO: 7134 - DNA, 388 bp, Homo sapiens
ctgaagtgtggcttgcgtaaataactgtttattccaaaatatttacatagttactatcagtagttattagactctaaaattggcatatttgaggaccatagtttcttgttaacatatggataactatttctaatatgaaatatgcttatattggctataagcacttggaattgtactgggttttctgtaaagttttagaaactagctacataagtactttgatactgctcatgctgacttaaaacactagcagtaaaacgctgtaaactgtaacattaaattgaatgaccattacttttattaatgatctttcttaaatattctatattttaatggatctactgacattagcactttgtacagtacaaaataaagtctacatttgttt

SEQ ID NO: 7135 - DNA, 383 bp, Homo sapiens
ccattattccatgtgcttaaatgataatttccttattcagtttcagaagaaaaagaatgaaattgggtaactgtcattgcgttagctttatgttgaattgggaaattgtggcataaagcttaaattcgtgtttatcaaatgtgaaccatagtagtataatgctgctttgtatataatgtaagtgctacaaatagtctcagcactgaaaatgtattgatacctcttaaatgaatgcaacttttgatgtaggtgttttgctatgcctcagaaaatatctgtctgagaatttgttaatctgtttgataatgaagatacttcctgttttcttgtttcatattttcatgttcaaaatttaagttttacatttttactactgttaattt

SEQ ID NO: 7136 - DNA, 263 bp, Homo sapiens
ccactgtctgcagcatgggcagaaagtgctcaaagtccagcaccttcacattcatctcatcactcttggggttccccaggaccttgagcacctcggcgttggtagggttctggcccagggccctcatcacatccccacactggctgtacaggatcttgccatcacctgttcggtcaaacagctggaaggcctccttgaactctgcggtctggtcttcggtgaagtcacacatcttgactgctcagctctccgggaccttttcc

SEQ ID NO: 7137 - DNA, 242 bp, Homo sapiens
ccatcttgttgctgcttggttagatcatatagctaatgaattaggcaggggagctattttttgaagatgatgaactaaatgttgaagacaagtttgagatctgtaaaatgtgattttttacttccacttataatacttgtgattggggaggtttgtggaaattcaattatgatgaaaaacctatcttttttgtaatgttggcatacttggggaatttagtggcaaatacattccccagcagg

SEQ ID NO: 7138 - DNA, 551 bp, Homo sapiens
aaatatatgcttttctagaatttgatgtttgaccatttatgacttaattaccagagagccagtaaattaggacagtgtttcaacaagcctaggctatctcgtaagttgaaaaatatcccactatagttgcttcatgagtatgaagtaagatggcctctgatttacactggttcaatttacaaattttcaactttatgataggtttatcagggtactaaatgcatttcaacttgatagtttcaacttatgataggtttaccaggatgtagtcccactgttgaggagcatctatttaggggttaattactttagtaataagtggaaagtaagataccttgagtaatgtttgcctataaaattgtcagcgtatttttacactattggctcaagaatgttataatgctaagggacataagttggcaaccacttggtttttggaaggactttcggtattgtattagaagtctgccctagctgttaaatttctgggtatttatcctaaggaattaattaaaagagttaatttgttccttttcttcagtgggccattg

SEQ ID NO: 7139 - DNA, 527 bp, Homo sapiens
aaaaattactaaaaggtttactttgttcattaataaaacatttaacaattcaaattatatgcaccttttacctagttgaaaaaaatacacattcctgttttcacattatagcaactgattaagctgaagctgtaagtcattttttatagatgagtgatccgcatctccatcaattagaacactggaaaagatgttttataaaagaggtatttaattttgtttgtaggattaactcatgcaaataataaaaaagatatcctgttggttcaatagtacactgtctcctttaaggaaggaagcgtgatgaatgaatgatgtgtagacttgagggatgactattaaaggggacgtaggatgaagagaaagaacctacagatgacaatgaatgtaaacttatttttcttcatgtgtaagcagtgtgctcgctggtgatatccagatcctaacaagattacttggttagctggttaggaccagtaactggattgcgaccactatgataatattttgaaccaaatgttaatgct

SEQ ID NO: 7140 - DNA, 363 bp, Homo sapiens
  misc_feature (1)...(363): n = g, a, c or t
ctgttctcatacagancgnaaatcannacgaaatatggaaaacatttatttcctttccttcaaaatttaacttacattccactttaatagctgttgaaggttaattaaaatgcagcaaagtataactacgttacgcangtgacttcagttattttaatgtnannaaaatcagactatggtatcttacgagtcattatagaaatgtncatcattaaaaagcatttattatggcactgaactgcatgatgttaccttaagtcatnnacaaaanaattcctggtccatgtgatgtgaatgggcttggcactttctccataaattttgtagatgactattngtaagattatacacttaataggtttt

SEQ ID NO: 7141 - DNA, 526 bp, Homo sapiens
taacagtaaaaaaattaaagagcgttcaagaataaattcttctggtgaaagtggtgatgaatcagatgaatttttgcaatctagaaaaggacagaaaaaaaaatcagaaaaacaagccaggtcctaacatagaaagtgggaatgaagatgatgacgcctccttcaaaattaagacagtggcccaaaagaaggcagaaaagaaggagcgcgagagaaaaaagcgagatgaagaaaaagcgaaactgcggaagctgaaagaaaaagaagagttagaaacaggtaaaaaggatcagagtaaacaaaaggaatctcaaaggaaatttgaagaagaaactgtaaaatccaaagtgactgttgatactggagtaattcctgcctctgaagagaaagcagagactcccacagacctgcccgggcggccgcccgggcaggtccaagaagcatgctggcgagcgcgataagaagctggcggccaagaaaaagacggacaagaagcgggcgctgcggcggctgtagtgggctctct

SEQ ID NO: 7142 - DNA, 437 bp, Homo sapiens; identical to SEQ ID NO: 345
  misc_feature (1)...(437): n = g, a, c or t

SEQ ID NO: 7143 - DNA, 327 bp, Homo sapiens
aaaaaaagaaaacaactgcgaaaaaaaagtaggctatgtatcttaagcatataaacatttgaccctttcttaaaaggtgccacaggtaatactaatctattttctatgtggaaagtgtttatgaatacagaaccaatttaggcaaaatgagatgcaaattattctagatgtaaagagttgaattttttttttaaagtacacagttttaacatactatccactctatcaagcagacttagagggattccggaaggcagagctttcagtaaccttctaaaaaattattcaatattattacacagaatcagagattgctgtgatttttat

SEQ ID NO: 7144 - DNA, 547 bp, Homo sapiens
ctgctgacagttctttggtggaaaagtaagttgcgtacttacccaagctgcccaaatgattatcaagccaagtttgtttttcaaaaataggttttaagatacaccaaagaaactatacaatacaaaaatttaacaatgaagttaaagtatatagcaaaagccaaatatgacaacacacatgtataatgtagaaaagaatcctttcagtcctagaaaactaaaatggggagaacttactgaagggtaacatacataaaatgagtactaatagcaaggaataatcctaaacattttcccaataaactgactaagcctcaaaaggacagcttaggaaaatgattaacatgcagtttttcttttttcctagccaattcagttctacttagataaatctggttgccaatcaatacatatataaattaatttttttctgctcaattactaccattttttctttttcaccttttccccaattttctctagcaacactttttcctttggtttgatcagttgaactcaaaaggtttggtacctaaaatgagtatca

SEQ ID NO: 7145 - DNA, 228 bp, Homo sapiens
ctgcttgcctgcaaagatgagcctctgctggtcgggggggatgccttctttatcttggatcttggccttcacattttcgatggtgtcactgggctccacctccagagtgatggtcttgccggtcagggtcttcacgaagatctgcataccacctctcagacgcaggaccaggtgcagggtcgactccttctggatgttgtagtcagaaagagtgcggccatcttccag

SEQ ID NO: 7146 - DNA, 404 bp, Homo sapiens
  misc_feature (1)...(404): n = g, a, c or t
aaattttctcacttangacttttcaaagccatctcaaaggagcttcctcaaaacatttaatgttggcatcaccccacaagtactcagaaataagtgttaaaatagaaatccaatccagtaatgggaaactgacttagattatcttatttgtttgtatatttatttgtcatctatctctcttattcactgccctattttcaacatctacaatagtgcttagtaatgaatacacatgcagtacacaaaggtgctaacacaatacatgactaatgatgagggctatgcacatttatacagaatgagaattatttagtccaaaaaatatctggaaagcataaatgctgtaattggataaagctaaaattctattactctattgaaatcagatatcaagtgatactttt

SEQ ID NO: 7147 - DNA, 267 bp, Homo sapiens
aaattacaaagtaataaaaagctttgctatttaattaaaaaaaaaaaaggaaaaaggggaaacagaggtaaataaattaggaaaacacacacacggagaaaacaaacaaaaataaaataaaataaaaacaaaaaggtgttaactaggaaggatgggttaatccaaaacccagccctgactccaggctcctcctcagaaaggtggaaccagggagaggggggaccccaggtgactgtcaggaccagggaagtaatttataactcagag

SEQ ID NO: 7148 - DNA, 492 bp, Homo sapiens
  misc_feature (1)...(492): n = g, a, c or t
aaatggtattacnnataaattaatataaaatgattacctctggtgttgacaggtttgaacttgcacttcttaaggaacagccataatcctctgaatgatgcattaattactgactgtcctagtacattggaagcttttgtttataggaacttgtagggctcattttggtttcattgaaacagtatctaattataaattagctgtagatatcaggtgcttctgatgaagtgaaaatgtatatctgactagtgggaaacttcatgggtttcctcatctgtcatgtcgatgattatatatggatacatttacaaaaataaaaagcgggaattttcccttcgcttgaatattatccctgtatattgcatgaatgagagatttcccatatttccatcagagtaataaatatacttgctttaattcttaagcataagtaaacatgatataaaaatatatgctgaattacttgtgaagaatgcatttaaagctattttt

SEQ ID NO: 7149 - DNA, 342 bp, Homo sapiens
aaaaatggagcacagtgacgagaatattcaattctggatggcatgtgaaacctataagaaaattgcctcacggtggagcagaatttctagggcaaagaagctttataagatttacatccagccacagtcccctagagagattaacattgacagttcgacaagagagactatcatcaggaacattcaggaacccactgaaacatgttttgaagaagctcagaaaatagtctatatgcatatggaaagggattcctaccccagatttctaaagtcagaaatgtaccaaaaacttttgaaaactatgcagtccaacaacagtttctgactacaactcaaaagttt

SEQ ID NO: 7150 - DNA, 363 bp, Homo sapiens
  misc_feature (1)...(363): n = g, a, c or t
aaagttacagagtgtttcctagatagaagattagttcatttggttcattttgtctttgaagcaagccaagctcatgagccagttggttatttgtcataaatgaacacccatcactatatgctatgttgaggggaggcaagtctgatcttcgaataattgataaagtttaatatctttgtagccaaaatacaatttgcaaaccctaactccagatgtgtcgtatgaatcttgacaaccaggtcttgagatttgttttactgattgccaatcaggtatattatttgtgatgttcgtgggagcatgcaaattagaagacagtgttgtgggagttcctcantattgaattacatgtgtgcactcagg

SEQ ID NO: 7151 - DNA, 297 bp, Homo sapiens
ctggcgacgtgccactttgcgctaggggagtacagaatgacatgtgaaaaagtccttgatttgatgtgctacatggtactccccattcaagatggaggcaaatcccaggaggaaccctcgaaagtaaagcccaaatttagaaaaggttcggatctgaagctcctgccttgtaccagcaaggctatcatgccatactgcctccatttaatgttagcctgttttaagcttagagctttcacagacaacagagacgacatgacattggggcatgtgattgtgttgcttcagcaagagtgg

SEQ ID NO: 7152 - DNA, 334 bp, Homo sapiens
  misc_feature (1)...(334): n = g, a, c or t
aaaagatttacatgttcntatacaatttataaagttaaaaattctctgtacaaaatcttacatgtacagagtttatataagccccattcttatggctgtatcaccacacagatttgcttaaaactataatactacaaacactcgggttcttcatattcaatcttggcacccatatagcaatacactattctgaaatgtaaattacaaaggaaataaaatgtaatcatgcagacattttttaatataagaaaatgcnataaaatatactacaccagancaacatttatcaattccatagatactgagttttnaacttactgcactgttttcatat

SEQ ID NO: 7153 - DNA, 304 bp, Homo sapiens
  misc_feature (1)...(304): n = g, a, c or t
aaaaatacaaattnnancaaaatattaagaatttttaggatgggaattataaaagtcaacgctgaacaaaattctacttttagatagtatgtatcttaaaatattatgaaaaatattctttattctgaaaacaatgtcaggaaagaatacctgagttctctaaaaccactagttctaatttcaaattgctgttttggtaacataaagaaaacacatttacaatttaacactgcagttacctgtcaaataattagaatagaataaatgttgcatatacattaggttgaacattatatatattttt

SEQ ID NO: 7154 - DNA, 402 bp, Homo sapiens
aaaaagccaacactttgccaagcttgttatatcttattatttcttgattctctttgagtaaaaagcccaaatgactgtatggaagagagatgaatggtagaggagagaggaaacacaggttctctaatgtactaaatcaggactttggcaaggaagttataaaaatataatatattcaaatcagtaacttcataatttattagacatcccatttattagaactctaagttcttttgcttttatataaatgaaacatttattctataaatagaaatgtatttttcagaattttctttgggttggtttcttggtagcatctcccagtaatacatgaataacatactgaaaccatgatacaatgtttaggtagatatacatatacatatgtggtcatgtgttttt

SEQ ID NO: 7155 - DNA, 346 bp, Homo sapiens
  misc_feature (1)...(346): n = g, a, c or t
cctgagcgtcaatcatatgttgcagttagtatacaactgactaaaacaagcaagcagagaaaagcatcagccttccanagttactgtctgcttaaggcagaaacagcagtaaataatgaggaaaatgaattanctccagtgctggaacaactaactaacttggtgttacctgnaagtgaaaactcaagtgtcanatgaagggaggnggagttatnctnttatagtacagtggcctgntatctttttaatgaatatatacaagccaacatccaatttctattattacaattagggngtcttgngagctgtgttatgnnaatatggaggaagaaaactatattggctg

SEQ ID NO: 7156 - DNA, 201 bp, Homo sapiens
  misc_feature (1)...(201): n = g, a, c or t
ggagaagacagannataaagataaaccccttatttataaaggtgaggggaagtggcttcgaaacattgactattaccgtttagatggttccactactgcacagtcaaggaagaagtgggctgaagaatttaatgatgaaactaatgtgagaggacgattatttatcatttctactaaagcaggatctctaggaattaatct

SEQ ID NO: 7157 - DNA, 559 bp, Homo sapiens
aaatggacttttctgtaagaatgtaaaactcaaaaatttgtcaagtatgtatctgatccacacaagtccctagaaaggttttctgtgtagtcttcattaacgcaaatctttgtgaatgtttcactcttactgtaggatcttgaatatgttttacaataatgaagctacaaagtttttatgcagtgcattcattgtaaactataaataacatttgtattaaaaggaaagctgggtaatacaaaaataggagagactctgaggagcaggcaatctgttgaggctcagtatatcttatttgctttgtagtctgctgtcattcctttcaaagagcacacagcacatgaggcatagtaatcatctgtcttgttaacctctctaatttagaaatctgttgttcgtaaaactggaccaattatcacaaactatcatttgcataattaaccgcaagtctgttacaaagcattttgttagtggtatcaacaaatgcaggaggatggacatttataaaaaatgggttttgttaagcttgccaactccttagatatcatggactatactg

SEQ ID NO: 7158 - DNA, 286 bp, Homo sapiens
  misc_feature (1)...(286): n = g, a, c or t
gtacaagcttttttttttttttttttttttttttcaggccanaccanaacatttttattggtttagtcacttaggcatgctaaggtccccctgggttaggganatttcanccgtgagtgtgcaggtgtgcatgcacatagggggatatntattgggatgcaaanaggtganagcagntcttnaaaancgctggcaaaanaanaatgngtnttgaaaccatgacgggttanaagctcctaactccacttccagggctgccttcanaaatcctttntnttgaccatgg

SEQ ID NO: 7159 - DNA, 485 bp, Homo sapiens
  misc_feature (1)...(485): n = g, a, c or t
aaatatagcattcanattgtaattggtatgtttttgccatctggtccactcaattgtatatttttattttgcaaaacaacccaaaacttactttacgttgctttgttcagtaccttttgaattcccccagaagagttgttttcaaaacaaacattccagaatgaatgtcgctcttcaatggaacgtctttattgtgcttgaagtatttcttctctggttgtaattctaaattacagagtcatttgagctttctcccctcccgctagtatctttacaggagcagggaagagcagtagaggatgtataattttgggcgaagttaaattacaatttatttgaggttattcctaaacctatttatttggtgttttggaggagatcacacactaagagaacgttgattgcctcggctattgtgctggctggacactttggtcactttttgaagcatgttaataaatgtcactgattaaaaacagacctgc

SEQ ID NO: 7160 - DNA, 291 bp, Homo sapiens
  misc_feature (1)...(291): n = g, a, c or t
aaaattgtttnngtcttttcttaaagcaatattcactgttacaccttggggacttctttgtttatccattcttttatcctttatatttcatttgtaaactatatttgaacgacattccccccgaaaaattgaaatgtaaagatgaggcagagaataaagtgttctatgaaattcagaactttatttctgaatgtaacatccctaataacaaccttcattcttctaatacagcaaaataaaaatttaacaaccaaggaatagtatttaagaaaatgttgaaataattttttt

SEQ ID NO: 7161 - DNA, 315 bp, Homo sapiens
  misc_feature (1)...(315): n = g, a, c or t
aaaactgtggattnttttttaagttacagaaaatccagttctgcaccacaatacaactgtaaaaaaatctgcatcatcttaaaactgtgcagtaatgccatttttataactgcataaattttattagcgttctaaacagttttgcaattnttttttgtattatatgcttgcaggttatatcttagtgcaattcagtcccaaatactttaattttgaaaagaaaaaaaaacatacatttttgagtgtaaaatacccctacaagatataaacaggggcgttttcccctcttaatactttggttttcaatacagtcag

SEQ ID NO: 7162 - DNA, 423 bp, Homo sapiens
  misc_feature (1)...(423): n = g, a, c or t
ctggcaacttanacgnngggagcanagaattcnnttatccaacatcaacatcttggtcagatttgaactcttcaatctcttgcactcaaagcttgttaagatagttaagcgtgcataagttaacttccaatttacatactctgcttagagtgcaagagattgaagaattctcttatccaacatcaacatcttggtcagatttgaactcttcaatctcttgcactcaaagcttgttaagatagttaagcgtgcataagttaacttccaatttacatactctgcttanaatttgggggaaaatttagaaatatnntggacaggattattggnaatttgtctatanngaatgaaacattttgtcatataagattcatatttacttcttatacatttcgataaagnaaggcatggttgtggntaatc

SEQ ID NO: 7163 - DNA, 321 bp, Homo sapiens
  misc_feature (1)...(321): n = g, a, c or t
tcttaatatccttccctataatttcaattatttggattaatnntagaaatnnaataggtttattctaaaattaatccaaataattgaaattatagggaaggatattaagaagagaaaagattacaagacagaggaaagcataaaagaaaataaggtaattaaaacttcaaatcaggaaaaaggttctcaaaaatctgactttgcctacccaggtacagttggtggctatcaaattaggactcagtaattacttgtgtcactgagtgaaagctgctcattgctgccnagaacctacagagaaggccaaggggctgacgtaca

SEQ ID NO: 7164 - DNA, 417 bp, Homo sapiens
aaatatttattttcaaaacccctaaaacactggagtatgcttcacctagaaacagattacaggacgaatagctataatgaataagcaatacaatttgtatttgggatgcaattgtgttgtaaagtttcaaataatcaatttataaatttgttgcttttacttttacaaaaatattcatttaacccataacatgagttgcaaaattatctccagacttctacagatgattataaactgtaattgtgtttcagttacacagcaggtgaaaaatttaactgaaccgttacttcaaaatacaatgcattaaaaataattgttacaatataggcaccaataaaaagaattttcttggcatacaacaccacaacaactttctcaagtatctgtattatgtaaattaaaaagaggatgtaatgg

SEQ ID NO: 7165 - DNA, 545 bp, Homo sapiens
ctgcaaataatgcttgaatacaagtggctaagccaacaacagaataaatacttttatagtagttttataatcctgaaattcgaaagctttcccaattgcacttgcatctaaacaaaactgttgcagtttttactctatttattttgttccccatgtttatgaaagtcctgcacagtttcaaaggcatggtaaataatatatcaatgtttatgtagtctgttacagaaacagctatagataacattatccagtgaagagcaaaattcaagctttagaaaatattcatgcatgcaattttgacatatctaaaaataggtttttgtatatttatggtgggaggtggttgggaacttttaacaaaatggggtgttaatttttgtacagtctgtgggcatttacacatttttaatgtattaaaatttggtaattatgtgtacattaaattaataaaagttacttctagttatgatttgtgaattccctaagaccttggattttttttaagtaactttatatcagaaatgatactgcatctttatattttt

SEQ ID NO: 7166 - DNA, 379 bp, Homo sapiens; identical to SEQ ID NO: 4720

SEQ ID NO: 7167 - DNA, 498 bp, Homo sapiens
  misc_feature (1)...(498): n = g, a, c or t
cccaacttgcccttcaagttctacttcagtttgataaggctataaatgcagcactggctcagagggtcaggaacagagtcaatttcaggggctctctaaatacgtacagattctgcgataatgtgtggacttttgtactgaatgatgttgaattcagagaggtgacagaacttattaaagtggataaagtgaaaattgtggcctgtgatggtaaaaatactggctccaatactacagaatgaatagaaaaaatatgacttttttacaccatcttctgttattcattgcttttgaagagaagcatagaagagactttttatttattctagaattgcagaaatgactacactgtgctataccagagaattccagtagaaagaaacttgtaactctgtagcctcttacatcacctttattatacagcatgaaaaaccataacttttttttaangacaaaagttgttgccttcctaagaaccttctttaataaactcatttt

SEQ ID NO: 7168 - DNA, 384 bp, Homo sapiens
  misc_feature (1)...(384): n = g, a, c or t
aaaacattgntttctaaacactaacaaaaaaaattaagggcaaactgaaaatacaaatgagatttacaggcactgtgtgtagaatgtgcaaaaattcacttagcttttcttttgtttttttggtgttgctttaagaaactttatcaaatatatttcttacaaatataaagctttctctcccaattgaaggcaattaaaaaaattcaaagtttatcaatactcagtacacaggtgaaccagtcaaattcattttctttctggaaaagaataacaaaccaatatttaggatgttcagagactcaacaaaaaccattctagaaatcacccagaacaattgttttctgttgccaaagccttttgttcttcaaaagtcaccatccacca

SEQ ID NO: 7169 - DNA, 509 bp, Homo sapiens
cacaatttttaacgcttatgtagtccgccatcaaaacatcaatgtactgaagattttaagcagcatgaggcaccatcacgtttttgtttcttccccctcatttccccgcccctaccagatctgtttttgatgtttagcctagaagtagcaagaaggatgaactgaagcagattagagatcgagctggtaatccagatgagaaataatgaaagtcttctctagggtaatagtggtgaggtaaaggcaaaaggatagctgacagacgttaggaggtgaaatggcacaggacttggtgaaaaactggttaggagaagaggaaagagaaaagcccaggttatcctcagatttatggtttggacaacaggaagaatagcaatttctccaagtcgagtcctattataaatattttcatttttgtattttcacttttgagtctcaatttaccaagataacttcctttcaatcagcaaaacacctgtttactacttactaacaatattaaagatgca

SEQ ID NO: 7170 - DNA, 515 bp, Homo sapiens
  misc_feature (1)...(515): n = g, a, c or t
cagaggcaactgtnccncgtcagaaaacagaaggaaagaacttctccagaggataattgtggagcttgttgaatttatatctcccaaaacccctaaacctggagaacttgggggaagaatatctgggtcagtggcttggagagtagcccgaggtgaaatgggtctacagagaaaagaaaccttgtttattccctgtgaaaatgagaagatttctaaacagctccacctttgttacaatattgtgaaagatcgttatgttcgagtttcaaataacaatcaaaccatttntggatgggagaatggcgtgtggaaaatggaatctatattcagaaaagttgaaacagactggcacatggtatatttggcccgaaaggaaggatcatcttttgcttatatttcctggaagtttgantgtgggtcagntttggcctaaaagtagatagcatttntattagaacaantagntcanacttttcagacttggaacagtngaatggaaattgcgatctgataca

SEQ ID NO: 7171 - DNA, 205 bp, Homo sapiens
gaaggaaagaacttgcatgttggtgaaggaagaagtggggtggaagaagtggggtgggacgacagtgaaatctagagtaaaatcaagctggcccaaggtgtcctgcaggctgtaatgcagtttaatcagagtgccattttttttttgttcaaatgattttaattattggaatgcacaatttttttaatatgcaaataaaaagttt

SEQ ID NO: 7172 - DNA, 460 bp, Homo sapiens
  misc_feature (1)...(460): n = g, a, c or t
ggcagtggtaccatgttttgttctcccatataaacatcacacatccaaaacatggtaccactgccgtaaatggatgtgtgatgtttatatgggagaacaaaaagctgatgtatagccctgtatacagtgtagatactatttttgtaaaaacacaaggctaaattaatgaacaagaatactgaatatttcatcattaaaaatttcttgtatttcttgtgcattaatctgacgataatttccctgtatattatgttcatttagctgtttgtaatttttgttaattagatcaggttgtctgcatttgttggtgtaagtgaacatcatcacagttatcctgagttgagtttaagccaaatacatgcatagaaaagggtcttcctattaatggaaganggtaatttttaggatgtgtattatttcagttttgtatgtttaactttttattaaataaagtgttttt

SEQ ID NO: 7173 - DNA, 361 bp, Homo sapiens
aaacagatcaactcaatagttaacgttatataataaagaatatggtaattttaatgacaaaaatcgtattgtgaaatagcgcactctatactgagatgaatgaggggaaaaaagtcaaaactcctttcaaaactatattcaaagcatcagaaaaaatttttttttctttttacaaagttatgtataagtcatagggaccaccaaatactgaaatatgaagactctatgaccaaagttcaaaactgattttaaggaactgtgtgaagcaagacaggaaaatttgtatttaacactctatagaacttcacagtaaagctggaatttagagactaatggcttaacaggagtactgccaacaagg

SEQ ID NO: 7174 - DNA, 417 bp, Homo sapiens; identical to SEQ ID NO: 4827

SEQ ID NO: 7175 - DNA, 365 bp, Homo sapiens
  misc_feature (1)...(365): n = g, a, c or t
cgtttatctcgnnctttaatttgctaaagctgtgcacatatgtaaaaaaaaaaaaaaaaagattattttaggggagatgtaggtgtagaattattgcttatgtcatttcttaagcagttatgctcttaatgcttaaaagaaggctagcattgtttgcacaaaaagttggtgattcccaccccaaatagtaataaaattacttctgttgagtaaactttttatgtcatcgtaaaagctgaaaaaatccctttgtttctatttataaaaaaagtgcttttctatatgtacccttgataacagattttgaagaaatcctgtaagatgataaagcatttgaatggtacagtagatgtaaaaaaaattca

SEQ ID NO: 7176 - DNA, 577 bp, Homo sapiens
tttggattttatttgagccaaaatatatatacttaattttagttatgccagaagtaagtataatttctcagtccaaggatgttaggaagcaacttacagagcatgcttcaaatagaattctcttggcctttgaaggtaactattttcaaacttaatagtagagtcaagcaagaatggacaattagagttttcaaaattgaaaaatattatgtattttatataatcattacctatggtttacagattttatttttatgatacatatctctaagtagtggtacactgaggacatagcaaatatgcaataaatacttattaagctgaagtgaactaacaaaaaccattaattacaccatttctaacaaccaaaccagctattgcttttcagtgttttggtgatacgttggagtaggaagtcatattcaaattggttagatccttggaagaaatagtagtatttgtttttagagtagaagactgcatcaattttaggcccgattccttggaagttcttggtaatcagtttgggataaccagggtccatcatctgtctcctttcatcatacctccaatactg

SEQ ID NO: 7177 - DNA, 571 bp, Homo sapiens
  misc_feature (1)...(571): n = g, a, c or t
aaagaacttttgcnctgtgctgaaaatgaaatatctcttgcagtaagtaatacaatgtgccaattcataaaatgtaagttaacaggtttctcaatttaacattttcaaagacgatattaaggtcaaaaatgtcacatctatggtagcacatatagaagggcattatagatatgatgtccatccctatgaagcttacaaatttgacaatgctcaataaaagcttttagaatcacatccaatagtgtcacagtcaaagaatcacaaatctgtgtcctgtaagttctctccttctaaaatcttcatgttaacttttctactcattgccatttgttaatactaacccttaaaaaaaagaaataggaaaagaaaggctgcaataaacttgatcaggtacagaaattattgctactatacttcactacaaagcttgtctatacagtatcatatgacctttgattatgaaaaaatcagaataaaaatctttagtgacataagccttacaatcntatacaacattcacatggcantattagacagttnagcacccaatacccatagttgacaaaatgtc

SEQ ID NO: 7178 - DNA, 399 bp, Homo sapiens
  misc_feature (1)...(399): n = g, a, c or t
aaagcactaatnnattgcagtctttattttagaaaaatgtgaagcatttttttctcccctaaaatgaatatatttagatgacaagtctttagtgctggtagaggaactaattgattttgtactatagtannaaagtgtttatatgtttcaccagaaataaaatatgtagggtttgtatgtaatcttctgtgtttatcctatgttgatttaccttaaatttgcaacatacatatccacataaatattcatgactttcttatatttcattaaaatgttttatggcttcttaaaatcatcactgtgcttctaaatatttttacgtaaaatcattgtataatgctatactgtgatatacatgaaagtttatcttgaacagtgctctttaacaatattaaattt

SEQ ID NO: 7179 - DNA, 198 bp, Homo sapiens
  misc_feature (1)...(198): n = g, a, c or t
aaattattancnncttaacagtttagtcccacctcttacttcctgcctcagtctgctttctctactgtctggattaattaggcagcctgctataaagttaaagtcacacatttctattttgcaaacactgtgattactctttgctttgtagtttgctttgctttgtagggttctgcttttaagtttttctctttttca

SEQ ID NO: 7180 - DNA, 357 bp, Homo sapiens
ccaagacactaatttttatgtataatcacaatattttatactcacctttattgactaaaaataattatgctacatgttgtcctgcatcagaagaattatttcttcttgccagtgttttgggatttgaagataatggttcactcaaagaacctattattttctctactgaggaacccaatgtagaacttgcactgatatttttattactgcctttatatgaatctataggtatctaaatgttaaggcatgtatgatctttgatcatttcttttttcaaattaaagttgtataaaagtttcaatatcttgccttaaattagttgcctattctttctaggattcaaatattgtgacattt

SEQ ID NO: 7181 - DNA, 342 bp, Homo sapiens
  misc_feature (1)...(342): n = g, a, c or t
ccacttgtgtgggtcctcacaagcaaagagagcactaaacttgacattgggggtccaccactccaactttgctttctgaaggttttggtgtacattgagccccagaaggaaaggagagtatctgtgagtgggggcctcccttgaccccagtacgaagtctatgccctgaatccccagagtagcccttcctggtgcccaactggcctggggacaaacagcgtccactacatctaggactgccggctaannggacacacttcttgacctnctaccaggaactttggtaaaagctagctttggggaaggggttgggtgtaaatatgagagggtggagggagacca

SEQ ID NO: 7182 - DNA, 451 bp, Homo sapiens; identical to SEQ ID NO: 2871

SEQ ID NO: 7183 - DNA, 298 bp, Homo sapiens
aaaggcttaatggcaataatcaggggaggaagaagagtatgtttattttacataactgacggaaaaataaattcaacaaatagtaaatagaatttaatatggtctcatgcgccctgaaggaggtggtgcccgatttggaggggtaattgctatgtccaagtaatctcctatctggaacttctgcgactgcagggtcatggaatcatcagtcccctttctgccagacatggtgctgccaatctccttaactcgatagccaggtcttttaacatctgtaaaaacgattgcaaaattgaag

SEQ ID NO: 7184 - DNA, 540 bp, Homo sapiens
ccaacatggtgaaactctgtctccaaaaatacaaaaattagctgggtgtggtggtgtgcacttgtggtcccaggtacttgggaggctgaggcaggagaattgcttgaacctgggaggtggaggttgcggtgagccgagatcgcaccactgcactccagcctggtgatagtgcaaaactccgtctaaaaaaaaaaaaaataataataataataaaaacaagtcctaagaaaaatgcccaggtgctttctggcatggtgatttgcaccacatagaactaaagacgatgtcagaccaagcttcttcctttctctctccccgcataggatgaagatttgataaagtggaaggcactgtttgaggaagtccctgagttactcactgaggcagagaagaaggaatgggttgagaaactgactgaagtttctatcagctctgatgccttcttccctttccgagataacgtagacagagccaaaaggagtggtgtggcgtacattgcggctccctccggttctgctgctgacaaagttgtgattgagg

SEQ ID NO: 7185 - DNA, 335 bp, Homo sapiens
gagccctttaagatgataaaggacccaatgcaggtaatcctgtttttggactcacgtaatgtagaatgcaaagtttagtgattatttaatctgggcctaagctagtgagagtatggaacaatggcccataaggactcctaagcgccgaagccaaggagcctcctcccttcctggttcaccccgcccaagggacctgcccccattcctgtggccctggggcccagcttccaatagtgtcagaagcaacttgtggctttgccttggttgtgagatgggtacattccaaaggagcagcctgggggagggggcaggctcagccagcccttggaggctca

SEQ ID NO: 7186 - DNA, 345 bp, Homo sapiens
  misc_feature (1)...(345): n = g, a, c or t
aaatattttggncntattttataataaaatattttggcaaaaataaaatataaggtttagtttattttctattaatggtagatctggagagtattttacatttctaaatagtatctacttaatttgactgctttcacatttgtttctgaaaacactgctattcgcttttcagaattttgagattaaaagcacctaaaaataagataaaataaaatttaagtaaaatatttgtttgatgctcgaaagttgacaaattcacaaacttactttaagtgtcttacatgatatatgccaccacagaaactttattgcctgctaagacttatttgactaaatctaatcttt

SEQ ID NO: 7187 - DNA, 226 bp, Homo sapiens; identical to SEQ ID NO: 6075

SEQ ID NO: 7188 - DNA, 405 bp, Homo sapiens
  misc_feature (1)...(405): n = g, a, c or t
aaaaatctggntataaaaaaagtaataacctaattttttattaaaaaagaaaaaagaatttttaccaaaacttcaatatagaagtgaatgtgcttagaatggtaatagaggatctaacttttaaccaggctatcaacttctggaatatttactttcaatttggaaaaatattgttattcagaacctgaaatacattataaaactggaaatggaatcttttaggtgaattctttctttcaaaccctcataaatcagaaaaaataagccaaatttgaaggcaaaagatctttacatttagggatagtttctaatgaaagaaatcaagataagaaaaatcaattaaaacaatgtggtttaagaaattatcctcctaatgtagggggtgggaaacagatattacatttt

SEQ ID NO: 7189 - DNA, 581 bp, Homo sapiens
  misc_feature (1)...(581): n = g, a, c or t
cctgtccagtctttgaaaacatcaagagatacttcaccctcaagtggttcagcagtttcttcatcaaaggtgttagacaaacccagtaggctaactgaaaaggaacttgctgaggctgcaagcaagtgggctgctgaaaagctagagaaatcagatgaaagtaacttgcctgaaatttctgagtatgaggcgggatccacagcaccattgtttactgaccaaccagaggaacctgagtcaaacacaacacatgggatagaattatttgaagatagtcagctaaccactcgctctaaagcaatagcatcaaaaaccaaagagattgaacaggtttaccgacaagactgtgaaactttcgggatggtggtgaaaatgctgattgaaaaagatccttcattagaaaagtctatacagtttgcattgaggcagaatttacatgaaataggtgagcggtgtgttgaagaactcaagcatttcattgcagagtatgatacttccactcaagattttggagagcctttttagatttttctgctcangctaaaaaaaaaaaaaaaaaacagtttctaaaaatttttttt

SEQ ID NO: 7190 - DNA, 410 bp, Homo sapiens
  misc_feature (1)...(410): n = g, a, c or t
aaaaactatttgnaatgtaattttaatgcattttttacaggcccagtaatggttaaatacgtcagcttactgaataattttaactatttattcttctaaggatacagcttgtctctggattttccagtcttaattttatattttattaatctattttaatgcttgcttttcccatttatagacgttgtagcagtaattgcaagaagttcttgagctgaattcctgttgtgacaacttcctataattacagtagataactttttcttttagtcgtatataacttnnctataacttgtgatggacaagagatatgcttatccaataaaataagcttaaatattagatgctcttgggtcaaaatgtccttttaccaaattgacctttttatgagttctttgggtaaatacttt

SEQ ID NO: 7191 - DNA, 181 bp, Homo sapiens
  misc_feature (1)...(181): n = g, a, c or t
aaaaatgtccccnaaaattgcaattcctacaaataaatgtcatagtgcaaataaatgtcaggatttagagaaggagcctaaactgaatttgtgttatttcagtaaaagttatggagttatgggtctagacgtgttaataagttagacagaactttggcactttagaacaaatgcatgagtg

SEQ ID NO: 7192 - DNA, 562 bp, Homo sapiens
  misc_feature (1)...(562): n = g, a, c or t
aaaagattgtagatgacattggaatctaatttccgtatttgggtgctttcctagtattgtaagaatatgcttaattaatgagtcgcaatgaataatctgtttgtcttgatttgctttctgaaaggtgatgagggttttgggaaatggactttgttcaggcttttgccctttgtggctgtgacatattaagatgttggcagtaaaattgagagccaccagaagatgttaactgtgtatatgggcgctgccagataggaaatccaaatgagtagactatagtgttattgttagctactatggggtgagacgtagacagataaccatatgtaaggcagctccctaaatgctgaaacaaagaaccgtctcttgacttactcctgatgttctcatggtacatggtagctgccccaaaagcttgcaattaattgaaacttctcatttgttaggtggcaggtangtaggttttgaacttggtagtgatattcagacgangagcaagattccactggcagttctgtgatgctaagtnaatgatgtgatcatatccgtgctttagaaagat

SEQ ID NO: 7193 - DNA, 501 bp, Homo sapiens
aaattattatcttcttaacagtttagtcccacctcttacttcctgcctcagtctgctttctctactgtctggattaattaggcagcctgctataaagttaaagtcacacatttctattttgcaaacactgtgattactctttgctttgtagtttgctttgctttgtagggttctgcttttaagtttttctctttttcagacaaattactgataaaaatgatattgctctatatgtaatatatcctgaaagcattattttttgttgaataggaaataaaattaatgaagacagaggctagaaagcatccattaattaatgagacacacttaactacttatctctaaaccatctatgcgaatatttgtaaaaataatgaatggactcatcttagttctgtatataaatatattttctttctagtttgtttagttaaggtgtgcagtgtttttcctgtgtattaaacctttccattttacgttttagaaaattttatgtatttt

SEQ ID NO: 7194 - DNA, 422 bp, Homo sapiens
cgcgagcgtctgggcgggtggtaggaacaatggcgctgtcttaagtggcacagtggagcagctctgaagatgcaaagatacacgaaaaaacttccagaacatctgggagaatatttaatggaaaatcgcttggttaaaacctgacacttttaacagtgaacagcgttctgagtgtggacgagtagccagtgaagataatgaatgtcgaatgtgactgactagcagcttcattttgaatgagggtcgctgtctgcccattgatagaggccagattgtcttggaagttccaaagttgcaacgatttctggctagtgccacgaggtttacttgactgttgtgtgaaaagctgataagaaaaccatccagaaaaaagctcttcgttttacaaacatgaaaataaaacatgtaattttggaacaaaa

SEQ ID NO: 7195 - DNA, 460 bp, Homo sapiens
  misc_feature (1)...(460): n = g, a, c or t
atgagttcttatctancgttgcaggccagcaaatacagaggtggtttaatcaaacagctctagtatgaagcaagagtaaagactaaggtttcgagagcattcctactcacataagtgaagaaatctgtcagataggaatctaaatatttatagtgagattgtgaaagcaaccttaaagttttgaagaagactgatgagactaggtgctttgcttcctttcatcaggtatctttctgtggcatttgagaacagaaaccaagaaacatggtaattactaaattatgaggctttgctttttgtttgcttttaagtagaaaaacatgttggcaacattgagttttggagttgattgagataatatgacttaactagttttgtcattccatttgttaaagatncagtcaccaagaatgttttgagttttttgaaagacccccaatttaagccttgccttattttt

SEQ ID NO: 7196 - DNA, 423 bp, Homo sapiens
aaatcatatttcattcattttctccctttagcaattttcattttatttctcataatttgaacagagacagttctcatacatgatcagatgctttttttttcttcttaccatcatttatgcatgacataggtaatgtgactaatttctccagttgattcaagaaactcattactttgcctcaaattatatgtaaaatatttgttttacttaggttacagttatcagaaaggtagtttttttcttctattaaaatataacattgtgaaagaaaataaaatttatgctattctttgctttgtttttataaatgaatttttcatagaatttacagtatattcaaaggaagaaagataaaattattggtcatcatttgtaccttagaagtacaagaatttaagtaaaagaaatgttcatttttgtttt

SEQ ID NO: 7197 - DNA, 585 bp, Homo sapiens
aaaaataaagaaaaaaataccacgactctttgctaatggcttttaagatttgcagacacagctaaatactcatctaacaaagtatccaggctatccaactatattgccatgaattcataagacagtaacacacatttataatataaaagtagtcaaaaaaataaaaagaaacagccacaggtaatttagggctaaaatgagtcctaataagggttacatgagaaataacatataagaccccaaataaattttagatacaaaattaaatgatgtggctttgttcaaacatacctaaaattcaaaatcaagttaaatacctaggctggcttttttatatcaccagctttcattagggctttaatcgctcttgccctcatctcaagttctagcagctccagttgctgtgcagaaggttgaacatcttctggtggaggaacagccagggtggctgctttgggttcgtttgggctagactctgccagtcctagaatctcattcacacttttctcaatgtctttctccaggtcatctatctgaccagcttcactttggactgtattttctggtgcctcgggagcagacctc

SEQ ID NO: 7198 - DNA, 146 bp, Homo sapiens
  misc_feature (1)...(146): n = g, a, c or t
aaaaaaattaannccctattaatttactaaatatttaggagataacagtgcattaagggttttttttttatataatacatacatatcacccctttgcagtgatagcatagaagagtaagtatggccttaggtacaacacgtttttt

SEQ ID NO: 7199 - DNA, 603 bp, Homo sapiens
  misc_feature (1)...(603): n = g, a, c or t
aatgtttctaggataggatattaaaaatgattgaaacccatgcatggtgttagacaatttttctaattattccattgagtcagttttttgtgattagtgattatcagagcaaacatcatgtagatagcacaagtatttggagaaacgttgtttgttttgttaccaaaatgttggaaaaatttatttcaataccttttagatttcataaagtgcagtgtatataatgcctactgaaagactgtaaaatattgaaattttctttcaagcaaagtgtaaaaaaatatattgagcctgtaaattgctctgtgactagacttcattgtcgtcttaatatattcttgcatgtgcatatatatacacacatgtgtatatatatgtgtgtgattatgtgacctatgcaatacaaattatgggaatgggcagctttggagtatatatcccataattcttttttcangaatagttgcagtatttacacagcagcatttcttctcaggcttttattgggtgctgttgcttgctatgtatgaagagaaatgtgtcagacaagttttagtgtgttctgaagaagggtgtgaacaacagtgttcatgggcttttaga

SEQ ID NO: 7200 - DNA, 399 bp, Homo sapiens
cctgtccctgcagacatgagagacagcaggtctcatgggggtgacaagctttttttttttttcttaaagaattttcaaaatcaaattccagaatgattttacggagatatcccaggaaaattaaggcttctcttaaacgctaaaaaggcatgtaattgcttgttagcaaaatggatatgacacatctctgatacttttttcattattggttgggctgagcagtcagaagacctggtcgtcgtcttgactttggcaaatgagccggagccccttgggcaggtcacacaacctgtcccagcgagggacaccgagtggcccttcatgtacatccatggtgtgctggcttaaaatgtaattaatcttgtaaatatactcctagtaatttaagattttgttttt

SEQ ID NO: 7201 - DNA, 402 bp, Homo sapiens
cctgtccctgcagacatgagagacagcaggtctcatgggggtgacaagcttttttttttttttttcttaaagaattttcaaaatcaaattccagaatgattttacggagatatcctaggaaaattaaggcttctcttaaacactaaaaaggcatgtaattgcttgttagcaaaatggatatgacacatctctgatacttttttcattattggttgggctgagcagtcagaagacctggtcgtcgtcttgactttggcaaatgagccggagccccttgggcaggtcacacaacctgtcccagcgagggacactgagtggcccttcatgtacatccatggtgtgctggcttaaaatgtaattaatcttgtaaatatactcctagtaatttaagattttgttttt

SEQ ID NO: 7202 - DNA, 417 bp, Homo sapiens
  misc_feature (1)...(417): n = g, a, c or t
ccattacatcctctttttaatttacataatacagatacttgagaaagttgttgtggtgttgtatgccaagaaaattctttttattggtgcctatattgtaacaattatttttaatgcattgtattttgaagtaacggttcagnnaaatttttcacctgctgagtaactganacacaattacagtttataancatctgtagaagtctggagataattttgcaactcatgttatgggttaaatgaatatttttgtaaaagtaaaagcaacaaatttataaattgattatttgaaactttacaacacaattgcatcccaaatacaaattgtattgcttattcattatagctattcgtcctgtaatctgtttctaggtgaagcatactccagtgttttaggggttttgaaaataaatattt

SEQ ID NO: 7203 - DNA, 361 bp, Homo sapiens
ccacattgatgataatttctagaactagtttctgagattgtcagccctttgtctaaaataatggcagtattaatgattgacttctgtcactgccatagttacctggattgtcagccttggtagcctttgtctaaagtcctaaagagttccaaaaaaaatgtgttgaaatttaattgctaaatagtggttggtgattctttacagtaggaattgtaataattttcttgcaaataagttatttactgctattgatattgaataatttgtcttttattcagatatatttcaaaaagcatgaatatatgattattcataaattgtatactttaccagtaagttttcagaggaaataaagactttt

SEQ ID NO: 7204 - DNA, 582 bp, Homo sapiens
aaataaactagttacttgcactttacctgctggcttttccatttggtagataacattctgaactccagcagagttttataatccccacgtgcttaaatatactaaatgttctttttccattaaggttaatgttcgtgaagaaattgaagagttttttccaagaatgtggaagataaatcaagataaaagaaggctaatgaaaagtattaaagatcagaaaattaaaattgaatgggggaaaaaattgaacagaagattggtcagatagaagcacttgaatatttttttaaggctattttgaattgtttgaattggggaagaatacacgaagtatgaaaaatgaaaaactcaatgaagaatgaagagaagtagaaagcaagagtgaagtagaattaaaagaatctggaagaatgaatgggtcctaggttaagtaaatgtatggtttatgttccagtgtctgtatgatcaagttgtagatgaatttgcatgattacttagttaatagagaattggtgatctggttcaagtagggaattattgaggacagttagcagtattaacagtgggttattattgagctga

SEQ ID NO: 7205 - DNA, 385 bp, Homo sapiens
ccattttaattttgcttttgtaataataccaagcccagtttctttcaacttgagagatgagctatttattcttttacttaatgaagatgtaagaaatgatcttctgttctaaaaaaaaaaaatttctctaatgtctcttgaccctgtagaaacacattcagtttctacactgcaaaacagagggatatctgtatggcttccctctttccatctttcctttcctcagggaaagccaggaaaaagaaatcttttctatcacagcagacacaccaaatctccctaagttgtaccgccttaattcctcagaatgcaattgtgtatgataccaagctacaacttgataagaaattgtgattttcttcttttattttcattctccaatttt

SEQ ID NO: 7206 - DNA, 537 bp, Homo sapiens
  misc_feature (1)...(537): n = g, a, c or t
caagctttttttttttttttttttttttttttttttgntcaatttcctttaatgagtacttgttacagtaaaagaggtataaagtcctgttcccaagtccaaaccactttttaacttaaatcttgagtttttctgaattactcaatttgaagtaattctctttatatctgaaaaatggttttattgaaacgtttganattaaaaaatatgcattgcaagaagcatatgacaaacattctgagagtacaaaattagttgtaaaaaataacataatttaccagtaaacccactcatatanaaatgtgcaaagccttttgatataaaaagttttgtacaccaagcacctatttttataacttancttcccatgganagataatggcttgcgtgcattttatgtatccataacatacatacaaggctcggtcttttcaatgggataacagttcacaactcttcgatttgaattgtaatgaatctggngacaaggatttttctctaatggattccaaagttagccagaacttttaatgtcaa

SEQ ID NO: 7207 - DNA, 251 bp, Homo sapiens; identical to SEQ ID NO: 4543

SEQ ID NO: 7208 - DNA, 564 bp, Homo sapiens
ctgcaacggagagactcaagatgattccctttttacccatgttttctctactattgctgcttattgttaaccctataaacgccaacaatcattatgacaagatcttggctcatagtcgtatcaggggtcgggaccaaggcccaaatgtctgtgcccttcaacagattttgggcaccaaaaagaaatacttcagcacttgtaagaactggtataaaaagtccatctgtggacagaaaacgactgtgttatatgaatgttgccctggttatatgagaatggaaggaatgaaaggctgcccagcagttttgcccattgaccatgtttatggcactctgggcatcgtgggagccaccacaacgcagcgctattctgacgcctcaaaactgagggaggagatcgagggaaagggatccttcacttactttgcaccgagtaatgaggcttgggacaacttggattctgatatccgtagaggtttggagagcaacgtgaatgttgaattactgaatgctttacatagtcacatgattaataagagaatgttgaccaaggacttaaaaaatg

SEQ ID NO: 7209 - DNA, 556 bp, Homo sapiens
  misc_feature (1)...(556): n = g, a, c or t
ctgaccatagtgctcatgccaagtcctgagcagggcatcttgaatggtggttccctcatgactacacacaccgttagggaatgtttcgttaagaggaaatcaagatgttctaacctgtgaaggtagaatagattccaggctacacaaacacatgaagtgtgccttatattgattactaaagaggttgctgccaagactgcttccaaagggcagaagatagccctaaaaaatgtttgcagtgtggaaatgcatttttaataagtcatattctagtaacaagttgcatttggtaagacacaaagaaacaatgttggtatgcagagtagaaatctctggaagatgatattgtcatatcagagatattgtcagtatcagagatactgaaatctctggaagatgatttttgtctcacatatggcattcacaagtaaaatgccaaactgcaaaattcatattatgtagtacacataggaagatatctaaatatccctgtaggctctgggatgttatttcttattcttaacctccntactagattcacttgtacaatgaaata

SEQ ID NO: 7210 - DNA, 525 bp, Homo sapiens
  misc_feature (1)...(525): n = g, a, c or t
gtcacattccccagngcagataatgggctgctgctggctctgtggtgtctgtctgcagaagatttgctcagtcaaggaaattcaagtggtgagacctttccgccatgggtggtaagagaaacctgccttcaccaaaatctctgaaggggaaggaagtggagagaaaggtttgcttcacttcggggactgcagtttgagaaataaaagggatacagagatatctgcactttgtagaaagggcaagattatttgcttatatctgaagggaggtgggtggttttgctggatgtttggtctgaaagagttacttttgataaagttaatctaattgtagttatattttctgtgtgcttttttttaattactaagaaaaaaattggtgagttcagtagctttggtattatgagtgcaaatcataatagctccaatgtgaaaaaaaaaatcaaaagtataacttgtcacttaatgttagaaaattgcctaaaatgcagtgtaataaataatctctgtaccaaatagtaattt

SEQ ID NO: 7211 - DNA, 321 bp, Homo sapiens
ctgtacgtcagccccttggccttctctgtaggttcttggcagcaatgagcagctttcactcagtgacacaagtaattactgagtcctaatttgatagccaccaactgtacctgggtaggcaaagtcagatttttgagaacctttttcctgatttgaagttttaattaccttattttcttttatgctttcctctgtcttgtaatcttttctcttcttaatatccttccctataatttcaattatttggattaattttagaataaacctatttatttctaaaattaatccaaataattgaaattatagggaaggatattaaga

SEQ ID NO: 7212 - DNA, 553 bp, Homo sapiens
aaaaacactttatttaataaaagttaaacatacaaaactgaaataatacacatcctaaaaattaccttcttccattaataggaagacccttttctatgcatgtatttggcttaaactcaactcaggataactgtgatgatgttcacttacaccaacaaatgcagacaacctgatctaattaacaaaaattacaaacagctaaatgaacataatatacagggaaattatcgtcagattaatgcacaagaaatacaagaaatttttaatgatgaaatattcagtattcttgttcattaatttagccttgtgtttttacaaaaatagtatctacactgtatacagggctatacatcagctttttgttctcccatataaacatcacacatccaaaacatggtaccactgccgtaaatggaaaaaacaaaaaacaggaaaaaagcaaacatacaaaaaacaaaaacaccttagaaaagggagctcatcctaaggtttcttacataaaactaagagtacataaaaataaaacagctagatcaattttagagatggccta

SEQ ID NO: 7213 - DNA, 451 bp, Homo sapiens; identical to SEQ ID NO: 3176

SEQ ID NO: 7214 - DNA, 422 bp, Homo sapiens
cgcgagcgtctgggcgggtggtaggaacaatggcgctgtcttaagtggcacagtggaacagctctgaagatgcaaagatacacgaaaaaacttccagaacatctgggagaatatttaatggaaaatcgcttggttaaaacctgacacttttaacagtgaacagcgttctgagtgtggacgagtagccagtgaagataatgaatgtcgaatgtgactgactagcagcttcattttgaatgagggtcgctgtctgcccattgatagaggccagattgtcttggaagttccaaagttgcaacgatttctggctagtgccacgaggtttacttgactgttgtgtgaaaagctgataagaaaaccatccagaaaaaagctcttcgttttacaaacatgaaaataaaacatgtaattttggaacaaaa

SEQ ID NO: 7215 - DNA, 443 bp, Homo sapiens
  misc_feature (1)...(443): n = g, a, c or t
ccaaggctgtttgcatcccggggatccccgtctgctgaccagctaaacaccaatttcttcctgcttttctccacttggtttggaaaatcacacagttttcaggctccatctgtttggagaaaatacattctgaagcatccccaattcaccttctaaaaactcatgtgcaggtttgataaacaccagaacagaagacagtgatgctgtattattttagatttattacatagatnnggaattcacttttttcatgacctagaaaaaaacattccagtgttcaactgttttatattattaaagggcttttaatttgtgaacttctgaaggcatgagtgttttctctttctacttttgtatatgcgcatgttttgtttcctctgacttggtatatgctcatctgagtgacggatatgtgaaatttgtagaactggttagtcaaatgg

SEQ ID NO: 7216 - DNA, 429 bp, Homo sapiens
aaatgctatgtgttaatatttcacttgcttgtattagaaaggcaaaatgtaagactttggtatgtgtgacatatgctttatttggctttattttacaagtacagtatctgcaaaaaacaaagtaaccttttttcatacctgccagttttgaatttatatatgttattgaacaaatagtaatagacgattcgctgttgaaacaagttgtccaagcaatgttatattcatttttatacttattgggaaagtgtgagttaatattggacacattttatcctgatccacagtggagttttagtaattatattttgttgatttcttcattttgttttctggtataaaagtagagataatgtgtagtcacttctgatttagtgaaaccaattgtaataattgtggaaatgttttgtctttaagtgtaaatatttt

SEQ ID NO: 7217 - DNA, 590 bp, Homo sapiens
  misc_feature (1)...(590): n = g, a, c or t
aaagtgaaggcatgactgaaactaaaatatttcataaggcttagctagaggcagagtaacgtgttttngttcattgggcttccttgtacttagttttttcatttaataattcaaaccaacacttttaaaaaaataattcagatgagactgagccatatctgcagtaagagaaatatttcttaatgttttggttacttatgatagagtacttttcttgatactgttaactttgtgctttttaaaaaaagtgattctctaacagacctcttaaattgtgacatgaaggtatgtaattagatttcagaaattggtttattagtgaggaatttttatcaataaatgtcatggggcgtgttcttcagaatatatagttattttcaacaaatgccaggctagattcctcacatgtggctatttcttatgtaagaagcttttaactgaagttggcatgtttcgtaaaacttgcgtgtcttttaaaaataataaaaggaagatgagtatttatgaagaatatgtgctgacaacagggcttatgangtctatgtaccttaatctcgtttctccttaccacaatcttaaatagatttcag

SEQ ID NO: 7218 - DNA, 508 bp, Homo sapiens
ctgtatacagacagcaaaagaagcaacattttgttacagcttagcacaaggcatccaacacaaacaggcatgagacaatgcatatttatgtagcattaaaaccagatgaataatatattgtggggcaggaggaggaaaggaggggaaaaaaaaatagaaatgaaagaccaatgtttctcaatgcttccaatatataatgctaaatttcccacctgattgatagcacatccaggtgcttcaaatgtcgtgcattacagtgagaatgttaagaatggaaaatcttatctgtgtacctgcctaatactaagtttggtcaaaacacattttcatagatcttctttcagtgataaatcgatttgaacatcttgtgaagttattgtttaataacttacttaacttaggctttatgctctctagatataaacaatgaattcttttccttttataaaaaaatatgctgcatgttttattaaaagaatatgcaatagttaccaatattaaaggtttt

SEQ ID NO: 7219 - DNA, 317 bp, Homo sapiens
  misc_feature (1)...(317): n = g, a, c or t
aaagaaattcaacnntatcctaaaacttgacctggtcaaacttattccatattatattcagttgctctaatatacagcaggttgatactaaaataatgacagaatttggctggtctaaacatacaaatatattttcccccttttctttctttgggaaaataagaaaaaaaacattactctgtttactcagaaagcaaggagagcagcaccttctcctggactccgtgactgtcagccatcttgtcatcacaaaaaggtgaggggtgccaggatttcactatgctgctccttcactggaaagggaaggaaatgctcca

SEQ ID NO: 7220 - DNA, 634 bp, Homo sapiens
  misc_feature (1)...(634): n = g, a, c or t
aaaatgatgcctnnnatttattgaaagcttaaatgggtgggtgtttctgcacatacctctgcagtacctcaccagggagcattccagtatcatgcagggtcctgtgatctagccaggagcagccattaacctagtgattaatatgggagacattaccatatggaggatggatgcttcactttgtcaagcacctcagttacacattcgccttttctaggattgcatttcccaagtgctattgcaataacagttgatactcattttaggtaccaaaccttttgagttcaactgatcaaaccaaaggaaaagtgttgctagagaaaattggggaaaaggtgaaaaagaaaaaatggtagtaattgagcagaaaaaaattaatttatatatgtattgattggcaaccagatttatctaagtagaactgaattggctaggaaaaaagaaaaactgcatgttaatcattttcctaagctgtccttttgaggcttagtcagtttattgggaaaatgtttaggattattccttgctattagtactcattttatgtatgttacccttcagtaagttctccccattttagttttctaggactgaaaggattcttttctacattatacatgtgtgttgtcatatt

SEQ ID NO: 7221 - DNA, 495 bp, Homo sapiens
  misc_feature (1)...(495): n = g, a, c or t
ctgctcccgaggcactagaaaatacagtccaaagtgaagctggtcagatagatgacctggagaaagacattgagaaaagtgtgaatgagattctaggactggcagagtctagcccaaacgaacccaaagcagccaccctggctgttcctccaccagaagatgttcaaccttctgcacagcaactggagctgctagaacttgagatgagggcaagagcgattaaagccctaatgaaagctggtgatataaaaaagccagcctaggtatttaacttgatnntgaattttaggtatgtttgaacaaagccacatcatttaattttgtatctaaaatttatttggggtcttatatgttatttctcatgtaacccttattaggactcattttagccctaaattacctgtggctgtttctttttatttttttgactacttttatattataaatgtgttgtttactgtcttatgaattcatggcaatatagttggatagcct

SEQ ID NO: 7222 - DNA, 410 bp, Homo sapiens; identical to SEQ ID NO: 4733

SEQ ID NO: 7223 - DNA, 195 bp, Homo sapiens
  misc_feature (1)...(195): n = g, a, c or t
attccccaaaaggtgtgtcaggactgagttaatcagtaagctaatagaaacaactgcaatagactagggatgagatttctcaaagcagtctgatataatatgcggcaactccttatgtactggagcgtatccaatacattctcaaaactcctaaattagctaaaatgcaaggtaaagagcagtngaaaaatgcag

SEQ ID NO: 7224 - DNA, 301 bp, Homo sapiens
  misc_feature (1)...(301): n = g, a, c or t
gtaacccaattatgataattagagagataattctatagtaaattaattcataaatattttctgaaaatagatgatttttcatcacagtaacatttttgaaagtataacaaaattccttcacagtctcctactagtgacaattaactcgttatgtaatgagcccatctaaaacaacaacaacagagaatatctgccatgaatcaaatctcagaaatttanaacctatccaaaaactgggaattgntgcatttctacttttataatcttaaactaccataaaaacgtancattcggtcacagg

SEQ ID NO: 7225 - DNA, 621 bp, Homo sapiens
  misc_feature (1)...(621): n = g, a, c or t
ctggcattccttccacttctctccagccgagcttcccagaacatcacatatcactgcaaaaatagcattgcatacatggatcaggccagtggaaatgtaaagaaggccctgaagctgatggggtcaaatgaaggtgaattcaannctgaaggaaatagcaaattcacctacacagttctggaggatggttgcacgaaacacactggggaatggagcaaaacagtctttgaatatcgaacacgcanggctgtgagactacctattgtagatattgcaccctatgacattggtggtcctgatcaagaatttggtgtggacgttggccctgtttgctttttataaaccaaactctatctgaaatcccaacaaaaaaaatttaactccatatgtgttcctcttgttctaatcttgtcaaccagtgcaagtgaccgacaaaattccagttatttatttccaaaatgtttggaaacagtntaatttgacaaagaaaaatgatacttctctttttttgctgttncaccaaatacaattcaaatgctttttgttttatttttttaccaattccaattttcaaantgtctcaatggtgctataataaatnaacttcaacactctttatga

SEQ ID NO: 7226 - DNA, 643 bp, Homo sapiens
  misc_feature (1)...(643): n = g, a, c or t
aaacagaagagacattcctttttccttgttacatccaaggggggcacaggggtgggtggaaaggaatgtctaaaaatgaaatcccttgatatagagggacctagacggacaggatatgctaaaataatttcaaattctagcacaattttagagtagaataagtcatttttttagactaataaaattaatggctgtcatgttcactctgaaaaaaatctaaatgactgaaatgtacagaaataaaaattagcaaacaattattctagggatattttcagattttacttcatttcttgaaatgcgtgtgccatatgcaattgcatttcttgtgccaagaaactaatagaacttatttcactttacctttttttacctgcccgggcggccgcccgggcaggtctgttctcatacagaaagtaaatcaagacgaaatatggaaaacatttatttcctttccttcaaaatttaacttacattccactttaatagctgttgaaggttaattaaaatgcagcaaagtataactacgttacacaagtgacttcagttattttaatgtgagaaaaatcagactatggtatcttacgagtcattatagaaatgttcatcattaaaaagcatttattangcactgaactgcatg

SEQ ID NO: 7227 - DNA, 332 bp, Homo sapiens; identical to SEQ ID NO: 4110

SEQ ID NO: 7228 - DNA, 506 bp, Homo sapiens
ttttttttttttttttttggccagaaaaagttattttaattttctattaaacattcttctcaaagcattattttatcctatatctcactgaattttaagaaataacattagtattagaaaaactaggaaaaaagataaatgcagataattaaacttacatgaaaaaggaaaattataacaaaggactgagaacgttataaattgaaatgagattataatttgaaaactgcatctgaaagcaaactttattgttcaattattcttaatgatggtgttttatgactaatacactgatttttcaataaggaaacccatgttaaaaatatttttattttaaaaataagcctgtgttcaagctctgatcatatttcttttattttgatttgggaagaaaatactgtttctgatagcatgaaatgcaaaatttttagatttttaatctcactaattttaagaactattgagaaattgattaatgacatgaagtgcacaacactaattactgg

SEQ ID NO: 7229 - DNA, 386 bp, Homo sapiens
  misc_feature (1)...(386): n = g, a, c or t
aaacttgtgataggcatatctatgaaacctttgtaaatttagtttattgctttaccattattttactaggtaaaattagagaacagattttgttctctaatttttaagccttatttacatatgcagaaacagcttaaatattttgactagattagacaaacagttaatagatccaccattaggaatcaatatattatgtcataataaacatcctttttctttcactgaaatttcttttagaaataaacttatttttgcttgttatgttttgaaacttgacataggatattttccctctggctacacattcacctacccttgttctctatttagattattcaaataaagttagtttgcttttatagcanaaaaaaaaaaaaaaaaaa

SEQ ID NO: 7230 - DNA, 654 bp, Homo sapiens
cctgcagcctgcaccaggaggtacaatgtgagactgaggaatgggaagaaggcattccatggagctctgagggcactgggtgcaagggccttgcacatgcaaagaccctgttgtgggttcaagccactgtgtgggagggacaggagagcctggcgtggctgcggccttgaaggaggggactgtgcacacagaattgcaagtgggggtctccgcggaagctcctggcagttttaagcaggattattagatgattcagtcaactttacaactcactttgctgaatggagggtggattaacgagggggtagttggaggctaccccttggagggcattctggacttatctaccaaaatttcaaatgcacataccctctgacccagcagttccacttaagtatttggtcctgaaatcttggtaaaagtgcccaaagatacagaacaaggatgttcactatagcatctcttagaatatggccccaaacaggaagcaaccccaacctctttcatgagggaggtcataaaattcctgcacatgcaacagtgccatcctctgcagcctgtcaaagaggcaggcagcactaactgctggactggatgttctccaagatataataaatgcatttgtttgaaagcagcttgcagcacagtgcgtca

SEQ ID NO: 7231 - DNA, 552 bp, Homo sapiens
ctgaatatactaaacattgctctattatctgttgaattgctgtatttcactttttcagcatttggggatcattatttaattgaatttgtagagatcgattttccagacaggtctctgttcttcaatgaacaaatgataagaaacaatttgactccttatatgacaatggaattaaataaattgacactcatctaggaataattctacaatcatctccatctctaagattacctactgcaaacaaagaattgatctttctttctcaaaaaccacatgggtaagatgatcattgtgactctgaatgcaagaataagtgagtggaagctacaaggggagattatctgccaacatagaaagaatctagaagaaaagattttattacaggtaacatgacatagcttggagccatctttttggtctcttgcatacattttctctgcatgtctaaggaagaattcacaaggtagcaagcaccaatactttctgctttggagtttcacaaattgaaaatttgtccctctcttgttaagtcaatcaaacatctaccaatgg

SEQ ID NO: 7232 - DNA, 481 bp, Homo sapiens
ctggtttcgtgctgacccttagggtgcgtctgttgggttttgttgggctagaaaaatgaaaattttcagatggcgttttcattcctctgactgatattgagctgctttggtgttaaaggtgtaatgtgtacagagttgtatttaacaataataaaagtaacttaagtttgctctatcagattttagttctgcacagaggttaagtgggaaaatgcagctgttgcaaaatgtatataaatagtatgttcatttttttcagtatattatctgatactgtgttagcagcaggtctgcttaaacctagtcttgttgttattgagtcatttcctctcctttgataactagaactgaaagcatttttaacattcttctcctggaagaaatgaattacttgaagcatgaaaagcacaccagggtggttgtttatttagcaattatgactgtagatttaaaaacaagcaaagaaacgacacctcagcag

SEQ ID NO: 7233 - DNA, 294 bp, Homo sapiens; identical to SEQ ID NO: 349

SEQ ID NO: 7234 - DNA, 365 bp, Homo sapiens
  misc_feature (1)...(365): n = g, a, c or t
tggcctcttacagtatttaagatatagcaaggacatggctgatttttttttataaaaattggcactaataagtgggtttattggtcttttctaattgtataatttaatttnntacaaagtttgtaaaatatcagaggatatatatatattgtttctacgacatggtattgcatttatatctttttactacagtgatctgtgacagcagcnncttcatgttgtattttttntactgaaattgtaaaatatccatcttaaagacatcaactattctaaaaattgtgtacaggatattcctttagtggtggaatnaaaatgtacgaatacttgctttttcaaaaaaatgtattttctgttaaaagttt

SEQ ID NO: 7235 - DNA, 417 bp, Homo sapiens
cctaagatggcattaaagttaaaggattcagggctctctccaagcatagttcagttaatagagttgaaaaataaaagtataggcccttggttggggagatcctggtttccccttctcagcccatgaaggagctgttgcttacagtagaaccaagcttctggaaggaagagagcagtgtggcagagggtgtgtctgtgtgtataggcagtatgctaacaggagacttgagggtaagaaatctagaggctgactttggttctgtttttaggtctttttcatttaactttgacctaagttccttaatttaggaaatgatagctttccacttgacagtctttgaagtctcttccaattttaatatccagatttagagtatgaacatagcttttcttcctgattccagagtttcctgcagac

SEQ ID NO: 7236 - DNA, 495 bp, Homo sapiens
aaaattttttcaaaatctggcttttctatttgagaaaagccctacggtgctctctcggaacccccttttgaaggatgaaacctcaaacttgcttctttaatcagtgggaggctactagaaaaaaaatcttatgttgaggttgctgttcaattccatttttacccaataaaaagtacagaaactatttgatggtgtgcataaatattacactccatgaatagcaaaaatattttttatttataatttacagttgcacagtgaaaaatcgtacatttttacacatacaatttcatttcgttaaatttgcacacatctacagaactttcacacaacaagcacctgaaactctgcaggcagtaggaaatgcaaatactaaaatgtatttattaaccaaatgatagctgaaggccctgcctcagccagacaatttatatagatatgtctatatatacataaaaaaattcttcaccttctagatccaacagcagctttttt

SEQ ID NO: 7237 - DNA, 200 bp, Homo sapiens
aaatggttatgtaagcaaagctgaactgtaaatcttcaggaatatgtattaagattgtggaatgggtgtaagacaattggtagggggtgaaagtgggtttgattaaatggatcttttatggccctatgatctatcctttacttgaaagcttttgaaaagtggaaaggtcattttgttgcatttccccatttcttgttttt

SEQ ID NO: 7238 - DNA, 641 bp, Homo sapiens
  misc_feature (1)...(641): n = g, a, c or t
aaagtcaattgnnnaccagaagtactgttattttggtgattaaaatccaaaactttagctgtatttcagtaacaaaaacataccttactagactgtgatggctcacacctgtaatcccagtgctttgggaggctgaggtgggaagattctttgagcccaggagttcaaggctgcagtgaattctgatcgcaccactgaactccagcccgtatgacagagtgagaccctgtttctaaaaacaaaacaaacaaacaaacaaacaacgtatcttactgactaaactggaatggaaatcttataattagtgttgtatttttctgcaaaatagtgaattggtacttgggagacttctgttctttgttgaaaaaattgcctttgttttgaaattatatcacctgtgttctgaactaaaatgatgggagttcattttgtatttactttgcagtaagtatcatgtaaatatgcaaatgttgaatgtaatatagattgtgttcctcattgagtttttgggtgatacagtttataaaatataacaattatacaccctcatacatttcgttctgattttgagcttgtaagatgagaactgctttttacacatttaataaaaaaaggtctctgaattatccgaaaaaaaaaaa

SEQ ID NO: 7239 - DNA, 396 bp, Homo sapiens
aaaatagcctttgccatcactgccattaagggtgtgggccgaagatatgctcatgtggtgttgaggaaagcagacattgacctcaccaagagggcgggagaactcactgaggatgaggtggaacatgtgatcaccattatgcagaatccacactagtacaagatgccagcctggttcttgaacagacagaaggatgtaaaggatggaaaatatagccaggtcctagccaatggtctggacaacaagctctgtgaagacctggagcgactgaaaaagattcgggcccgtagagggctgcgtcacttctggggccttcgtgtccgaggccagcacaccaagaccacaggctgccgtggccgcatcgtgggcgtgtctaagaagaagtaagtctgtagg

SEQ ID NO: 7240 - DNA, 108 bp, Homo sapiens
ccttaaccaataggttggaagacaagaccaattgaagagttaggaaatgtgagtttttgttacttctgttattccagtcttggtttcattgtctcattctttattttt

SEQ ID NO: 7241 - DNA, 427 bp, Homo sapiens
  misc_feature (1)...(427): n = g, a, c or t
aaagaattcgnntgaaaaaatagatccaatcagtttataccctagttagtgttttgcctcacctaataggctgggagactgaagactcagcccgggtggggctgcagaaaaatgattggccccagtccccttgtttgtcccttctacaggcatgaggaatctgggaggccctgagacagggattgtgcttcattccaatctattgcttcaccatggccttatgaggcaggtgggagatgtttgaatttttctcttccttttagtattcttagttgttcagttgccaaggatccctgatcccattttcctctgacgtccacctcctaccccataggagttagaagttagggtttaggcatcattttgagaatgctgacactttttcagggctgtgattgagtgagggcatgggtaaaaatatttcttt

SEQ ID NO: 7242 - DNA, 626 bp, Homo sapiens
ggagaacagacttgaaaagtttaggaaatcataatgtggcagaggtggtgggaagaagaaagttgagctttttccccttgagaaacttctgcatttagtttctatctttccaggcaaaacaaatgggtattcttttcatacaaccattttcaaatgaaccttagaaaagtcttaacatttaaggtattttatgcacagaatacacttagattgataggaaagaactcgtaatggagtttgagtaaagaaaatgactgatgtactaaacccagtaaaaattgttgaaaatgttaaaggtcagcatgttctaattgggaatctagatatagcttagatttcctattggcttagagtatttgctataacaaatgaagtgcaatgacaattatatattcctactcggtcatactggactggcttcgttctcttaatatactcagtaatgactcaagcctctggctattaacataccctagttgccgttttttaattgccatgagccaaatacttcttggtatacaattgatccatttattttaatggctgccttttcattttcatcttttcttgctgctacccatctatgtatgtattcattggggggaaaatgtagccacattttttat

SEQ ID NO: 7243 - DNA, 143 bp, Homo sapiens
  misc_feature (1)...(143): n = g, a, c or t
cagnggcaggaagnnataactccagctaagtactacagaaaaaagncncctanatcattactgcnctcagggagccctatgagnacntacacannataatgatacatggggagcagggcnccggggnncgttaaccnagaccg

SEQ ID NO: 7244 - DNA, 142 bp, Homo sapiens
  misc_feature (1)...(142): n = g, a, c or t
aacgcactgctgccggcagntccgtccctgngtggtggtggtggctaccnattncngacaacttttncancacaacttnanccgtntctnaacttcatancaccnggtnnatcacncatanttttccctangccggacacat

SEQ ID NO: 7245 - DNA, 150 bp, Homo sapiens
  misc_feature (1)...(150): n = g, a, c or t
accgctatnnaggtgacgcgatannccactcaagctatgcatcaagcttggtaccgagctcggaaccattannttcggccgccagggggctggggggnntggaaaaancaggagaaantggcaccgntcctcgngcanggcggcaagctt

SEQ ID NO: 7246 - DNA, 201 bp, Homo sapiens
  misc_feature (1)...(201): n = g, a, c or t
accccccacagtttgcgcnacnccgccacgtgangganatctgcagaacncangcaagctcgccgtttnatncgaggagcaggggacaatgggagactgagaaanccctgaatgccagcacactggcggccggtactagnggganccgagctcggnaccaagctngaagcatagctngagnattctaacgcgccacctaaa

SEQ ID NO: 7247 - DNA, 185 bp, Homo sapiens
  misc_feature (1)...(185): n = g, a, c or t
ggggaaccccccacagtttgngcaancncccgccagcgngaaggacancngcagaaccacgaancccgccgttnctttaggctgcaacaagagacaggggaatttgaanccactnacagaggcacagcaggaagcacactggngagaaaccataccagcgcgactccaaggactgcgaacgaagg

SEQ ID NO: 7248 - DNA, 216 bp, Homo sapiens
  misc_feature (1)...(216): n = g, a, c or t
tccatccctccgtggngggggtggttgcgcactgccggttagcggngcagcacnttttggctccggttctggacttcgcaccgccggntgtatccngataccaggtccctgggggggcccggnancccccncngganccgccgccgccgccgccgcgncgnactnctttataaaacangaaccganntgggggggggcaaaacccnacnaaaaanc

SEQ ID NO: 7249 - DNA, 126 bp, Homo sapiens
  misc_feature (1)...(126): n = g, a, c or t
cgtggncgcngttcgacgtctgtnnagtgggcttatantctggggnacncgcangacaggnacagatncttttccttgaggcccaaggccacanccctnctcntnttactttcttctccttgnaca

SEQ ID NO: 7250 - DNA, 124 bp, Homo sapiens
  misc_feature (1)...(124): n = g, a, c or t
gggccgaattggggccctctgggatgccatgcctacggaccggctcgcncagtgtgcatgcgcatatacttgccagnaattcggggtctngagangcgggccnacgttnccacccatnaccatt

SEQ ID NO: 7251 - DNA, 165 bp, Homo sapiens
  misc_feature (1)...(165): n = g, a, c or t
naatgggccaattgggcccttcccgtnaggaccggggccnccggccccaagggatgggttggnaaatgggggnaaataaattcccttggcccaaggnaaaaatttncgccncgccccnnctaaacntcggggtcnggngncgcggnttttaatctttaagcttgg

SEQ ID NO: 7252 - DNA, 246 bp, Homo sapiens
  misc_feature (1)...(246): n = g, a, c or t
ttggncccattgggcccttcntttaggnccggggccnccggcccccaggttgggttgggaaatgggggnaaatnaatacatngnccaagnaaaattttncgcangccccntctaacgtcgggncggggncnccgtttttntctttaagctggggnaatnccccgnagccgtgcggggntaacccaanagggcgtgtgggggcggttgatatncatgggggtncataangccttggtttcctggtgg

SEQ ID NO: 7253 - DNA, 108 bp, Homo sapiens
  misc_feature (1)...(108): n = g, a, c or t
aatcgccatctngatgcatgctcgagcggccgccagngtgatgganatctgcagaattcgcccttagcggggtctgttgccgaggtcaaagccntcttccaggaacaa

SEQ ID NO: 7254 - DNA, 216 bp, Homo sapiens
  misc_feature (1)...(216): n = g, a, c or t
tnaaataaaccggaactttcaccttatttagggggnccggaaaaatttgggggggcgcccnttctttaganaatggaccaattgncnttccggaagaccgggacncgncnccaagatggntggnaatngggtattatttccttgnccaagnaaaaattttcccaaagnccaacnaactttgggncngggggggngggngttactttaacaaanaga

SEQ ID NO: 7255 - DNA, 182 bp, Homo sapiens
  misc_feature (1)...(182): n = g, a, c or t
tagcgtggntngntacaagggcngctgatnnagacanaacggttgntggganangcntcatngaattngaccanggnaagagggtgctgcaggaggtcatgggagcctgantanacctgtacagacanaanggaccctgcancccccgganttcccacctnagacanacccaccccngccca

SEQ ID NO: 7256 - DNA, 207 bp, Homo sapiens
  misc_feature (1)...(207): n = g, a, c or t
tgnaaatacgaactcactttttagggggacgaaaattggggggcccctcttaagaatgncaatggccttccgaagccggggcccggcccaagtggtggaattntttatnatccttggccaagaaaaatttccgcccccttttaaaccgggggggggnttntttttnttttcaaaaaacnnaaccnttcncatcgccccccanccatg

SEQ ID NO: 7257 - DNA, 117 bp, Homo sapiens
  misc_feature (1)...(117): n = g, a, c or t
aaaaccacccacaatagggaaaacccggncngctagaancaagcccgagcggcccgccagngngatntattatccgcagaaacccccccncaaccggggggntnggtnaaaaggccc

SEQ ID NO: 7258 - DNA, 148 bp, Homo sapiens
  misc_feature (1)...(148): n = g, a, c or t
aaagttttnttntgaaaacncncanaatcaaangngttatccatgtnttngcancancaaaaaaacagngacagnggaccntccccntagggnacnnttatcntttggntaaactaattaaataagnggaagtnacccctnatcaatc

SEQ ID NO: 7259 - DNA, 718 bp, Homo sapiens
  misc_feature (1)...(718): n = g, a, c or t
ggccatcgtttttatgtccgnttaagccacactgggcacttagtagaaatgggttgatgtcagttcaattaaagagtgagtaacctctgctgggcccttgctgctcatctgtccacaggatggccggctcctgccagagttcaacatggcggagcctcccttgatcttcgaatgcaaccacgcgtgctcctgctggaggaactgccnaaatcgcgtcntnccaaaatgggcctnagggcaangggtgcagctntaccggacccgggacatgggctggggcgtgcggtccctgcaggacatcccaccangcacctttgtctgcgagtatgtttgggggagcttgatttcagactcagaanccgacgttccagaggaagattcttacctctttgatctcgacaataaggacggggaggnttacttgcatcgaccncgcggttctacgggaacgtcagccggttcatcaaccaccactgngagcccaacctggtgcccgtgcgcgtgttcatggcccaccaggacctgcggnttccccccggatcgccttcttnancaccccccttgatccaaggccggcgaacancttcggggtttgactattngaaaaacgcttcttgggacatcaaaangcaaagcttttnagaactttgcccggggcggcgcttcnaaagggncnaattcccancncactcctggngcgntanctaatnggatcccg

SEQ ID NO: 7260 - DNA, 502 bp, Homo sapiens
  misc_feature (1)...(502): n = g, a, c or t
tgagcgaaggaacgagtgagccgagccagtcagcagcattagtgtgatacgtgttgcttttcaattaaagctctctgcctctcggttgagcaactctgagagccggggtccccacccttctgtccccctcatggtgggtcttgtacccaacagcttgccagagcagagagccatgaatagggtttggtttcaggaaagatgaccangagacttannccagagtaagnctgagttcaaatcctggcccacgcttctgcttgtcaccctggcatgtgattcagttcttggttcttgtacatttgggtggaaactgacaactgcctgccatggggagaaccagcttgctgccttctgcaccacggctggcactgatcattagcaggttaaaaaaaaagctttgcaatacnnnnnnnnnnnnnnnnnnnnnnnnnnnnnnnnnnnnnnnnnnnnnnnnnnnnnnnnnnnnnnnnnnnnnnnnnnnnnnnnnnnnnnnnnnnactcg

SEQ ID NO: 7261 - DNA, 142 bp, Homo sapiens
  misc_feature (1)...(142): n = g, a, c or t
ccagggcgtgtaatgacttcagtattggcctcgtgttgttggtactcactatccgatccaggcagggaaatggtcagtgcgtgtgtgtcgggtggggtggggggatgagggtggagaggtnccatttcaagaggtntacaga

SEQ ID NO: 7262 - DNA, 116 bp, Homo sapiens
  misc_feature (1)...(116): n = g, a, c or t
aaataaaccgcaacctgcaaccttatttnnggggaccggaaaaatttggngggccgcccnttgcgttaganaatngacaaatggncctnccgnaagaccggggctccgacncnaag

SEQ ID NO: 7263 - DNA, 137 bp, Homo sapiens
  misc_feature (1)...(137): n = g, a, c or t
gacaaggaaaaacgaaggtgaaanncagcanctatncaccatgacctaagagtanacagaggaaacagttanaaanggccagnanacggcagggcgtcnnacccacaantcancanaccctgngncccacnanaacc

SEQ ID NO: 7264 - DNA, 183 bp, Homo sapiens
  misc_feature (1)...(183): n = g, a, c or t
tagccgtggggggtgcctaggnctggaagancaggctnacaanacaaataagcagcaagaaaccggccccaatgacnactgcaaataaaaatcttnttggttttganncccaaccttttnccttggccttccccaaanaactttngggtacctggggggtntangcanggtcctnancttgga

SEQ ID NO: 7265 - DNA, 215 bp, Homo sapiens
  misc_feature (1)...(215): n = g, a, c or t
cgtgntgnttgnatcgctnncggcgggcnngaaatggagctnttntnacgtacccctttnaccatcactggacnagtatcttggaaactccattccnatctgtcagatcaacttgnttgggatttgcagtgtgtacttgcttttcagacttgaaantggatcgtgaaatnatgnaaaaacggttcaacccaatctacatagtgtctgtagagaaa

SEQ ID NO: 7266 - DNA, 491 bp, Homo sapiens
  misc_feature (1)...(491): n = g, a, c or t
gcgcaggntnnttgaaatcncttcagggcggcgcggnaagagaagctaggatctacagatgctgtagttattctagaaactcanctgctctttactgggacttggcaagtgctaaattttggctcaatattggctaaatattcttggaataagaaatcccctactccagnatgtggaggataaagtttttcatgttctgatgacagggccagaagnattgtgtaggccatcaaggttttattggtnccccaaccccntgaaanaccagggnttagtcctgctaaccagnagagacaacaaccctacccagcttaaaggagcgggntgaggaaaagnattttaaactgatttggactaagnatnttgnactatagtatcacggctgntgctggaccgnngaccatcacgganactcgcggaccntangnaattcacacattgggcgtctagngatcgantcgnccacttgcgatatggataatnttttcttg

SEQ ID NO: 7267 - DNA, 451 bp, Homo sapiens
  misc_feature (1)...(451): n = g, a, c or t
atcgctnnggcgggcntgaaattgaacagtngaactttatttgtttgaccaaacaggatcaatcctgattgacatntgggttttnctatatacattgcttctaaggtgtctnattgttctanaagggccaagntggggcatggtatgctgnatccancttnaaggcaggagcgntattaggcagagtaaaacagctgntactggaacccanttctaaaancaaaatanctggtgggtgggcctgtatcccgtctcggaggtgngaggaaatacttgacctggaggagaggtgagtgactgaattgtgcctgtctcagctgagaacagagtgagattctntcacacaaccaaaaagataataggttattactgcccggnggcgtcangggaattcagncncttgggcgtctangatccactcggccacttgngatatggcatantgttcccg

SEQ ID NO: 7268 - DNA, 295 bp, Homo sapiens
  misc_feature (1)...(295): n = g, a, c or t
aatggcttntatgcncgcgagggtggtttnnaatcncttcggcgggcaggctgactctggactncctgtaggataggtaaactgtgcggacttgtgtgttgttgaggggtggggctcatccncttacgggtgtttgcttcagcntgccggtccggaaagactataacaacaangggcttgtggttgactctaagacggggaaagataccnggggancttggntactnatctggctganctggtctggtccactctgtatnccaacatcatccccagccctgggcccctngcncgc

SEQ ID NO: 7269 - DNA, 149 bp, Homo sapiens
  misc_feature (1)...(149): n = g, a, c or t
nnaaaattnacccccaacctttcaacctttatttaaggggggnccggaaaaatttggnccgcncgcccnttccttaagagattgnccaatggnccttccgnaagtccgggtctccgtcaccaagnttgnttggtaatagtgtttttatt

SEQ ID NO: 7270 - DNA, 119 bp, Homo sapiens
  misc_feature (1)...(119): n = g, a, c or t
ngnnaaaaatnccncaactttcaacttttttaggggganannaaaaatttngcncgccgcccttgctttagaaatggncnaattgncctnccgnagnccgggacnccgtctccagattg

SEQ ID NO: 7271 - DNA, 143 bp, Homo sapiens
  misc_feature (1)...(143): n = g, a, c or t
ttcaagctgggcctgaacttcngnacntaaggnnatccacccncnttggcntcccaaaagngntggnattatagngaatagccaccatgcccggtgagactcngagattcaanaacanagatgtgattnaaagaaaggggaca

SEQ ID NO: 7272 - DNA, 132 bp, Homo sapiens
  misc_feature (1)...(132): n = g, a, c or t
taaattgaatgcccatcaatangtgtctnaaataccactcgnatccttganctantactatatatttggctnntatnattaaantaaacaaagtaaattaccnaggntgacncaganggggctgtnaaacgg

SEQ ID NO: 7273 - DNA, 151 bp, Homo sapiens
  misc_feature (1)...(151): n = g, a, c or t
ttaaaaatttaaccggcaacnttccaaaccttnattnaagggggggnccggaaaaaatntggggggggnccgccctttctttaaganaaatggnccattggncctncggnaagaccgggacnccgncnccaagntggntcgagantggngc

SEQ ID NO: 7274 - DNA, 775 bp, Homo sapiens
  misc_feature (1)...(775): n = g, a, c or t
agataaccttcctttggcatgttgctctaaggaacatgaatccaacaggataaagatttcctaaacaaaatgcatgttaagttaatagtgcacaggccctgtgctctgctaacttggaactaacgcataatcagcaaataatcaacaactgctacaatgaaatcaaggtagagaaagggtggaagaatgaaaagaagataataaccaattgcttttttgaaaaatatttttttctttctaaaggcatctcagtggagacttgtgagaaggtaaacaggtgaagcttagtctcacctgtatatagtaaaaagtgcattctgcagcctcagtcaattcatcatctgctgaacaaagacagcaggtcataccatttctcacgcattgctcttagtgcaatcaaaatacctatttttaatggcagcagaaaacattaaggtgatagcatgaagacaaatccaatactactgcagttggcacaattagaaatggcagangaattctgngggggntttatctgaattgttaaaattcatgaataatgctagcaaaagggngtcatcaccaaaactcanggaagtgaagttgtntctcactaccaangaaaaaattgccnttccaaatcctggtggcctttgggctggattttgggacaagttntaacagctttctgcctttttaaactnttgggggncttttccacaggccnttacaaaaataatctggganaaggggngaagaaaaagcctttataaanaggggttaaccttgagggtgg

SEQ ID NO: 7275 - DNA, 665 bp, Homo sapiens
  misc_feature (1)...(665): n = g, a, c or t
ctgagcttccccaaaatcaagggagaatactaaatatctatttaatagaatcttggctttctctcggaggctgcccatccctggtgtgtcccttatcctccctgcagacatttctcatggataggagttccattgaccttgtcttttatgtctcccgggcaattaaacagtctcagtaccctgtacctggattgttcaatgactttcttcccttctcattgacttcactggagtagaaggctaaatataggcattcactctcatatctctcaggtctttccatgcagacagagttgttatcactagtagacggtgcttataagagagacatggaaaagtggaagaatggaaatagggatttggagtggtgctaaaaacaaagaaagaggcttctgaaagctttccatttaatatgatcaaacatagaagacaaaagatgtaacttaatgaccaaggatagggacatagccttgagaaaattacagaagtggaataaacgtcttggactccaaaaaanaaggaatggaaatgtantctgangcactaaagtcaataaaaccctctgatatatttactgtanaaanaaaggacatcttttaattcaaggtttgcaacttangtgactacaggggcnaagcatggaanggnaaagggtaaaaaantaa

SEQ ID NO: 7276 - DNA, 655 bp, Homo sapiens
  misc_feature (1)...(655): n = g, a, c or t
gtgacttgaagcancttgttgatcanaaaatacagtctctggaagaccgtctggggagcgttctcctacagatgaccaataacactggtgcagagctcagtcccccaggggcagcagccctgccaggagtgtcagggtcaggagatgaacgggtcatgatggaattaaaccacctgaaggacaaagttcaagttgttgaagacatttgcctgctgaacatccagggaaagcctcatggggatggaaggtgccttgccaaacangggaagaccgcgcagtacgcgacagcctgcaccttttgaaatctctcaacgacacgatgcacaggaagtttcaanaaaccgaacaaaccatccagaaacttcaacaggattttagttttctttattctcaattaaaccacacagaaaatgatgtgacttcatcttcaaaaggaaatgagcaattgtanagcaggtgaaaacgcttggcatgggtanggttcacttaaggtgggtgaaccaanaaaggacagtggacaccctgccgtccccccacaccccgtggntcattgctgcagtcanacctcggccgcgaccacgctaaccgaattcnncacactggcggccgtactatggatccnacttcggaccaacttggcggaatatggcgtaaa

SEQ ID NO: 7277 - DNA, 602 bp, Homo sapiens
  misc_feature (1)...(602): n = g, a, c or t
gtatatttggagaaggattaaagggaagaaaataataaaattgcaagaacgtcattaaatgcttaagaggaacatggcttgttcctcagtcttcaaagattgaacaataactgggcagaattttccaaactttgatactagtaacaattaacagcaacccttatggttgccaatataaaatcgagcaataaatcaatcaaatgcttgactcaatcaacttcttgttctttcttgtccataatatagtctagactagctttaatactgctttgaggnnnnnnnnnnnnnnnnnnnnnnnnnnnnnnnnnnnnnnnnnnnnnnnnnnnnnnnnnnnnnnnnnnnnnnnnnnnnnnnnnnnnnnnnnnnnnnnnnnnnnnnnnnnnnnnnnnnnnnnnntttttttttctaattagctgggtatggnggtgcacaccagttcttaagaggccgaggaggctgggcacagtggctcacgcctgtaatcccaatactttgggaggctgaacacctgcccgggcggccgntcgaaagccgaattccacccacntngngccgttctagtggatnccagctcggancaanctggcgnaatcatggcatag

SEQ ID NO: 7278 - DNA, 613 bp, Homo sapiens
  misc_feature (1)...(613): n = g, a, c or t
ccttttctcattagtctctgggtcaggcttgggaagatatatgtgttggtgatgatatacttgtctttaatcatgatttatgaagatttaggattgtgtgtgatttgtcaaaggttctgggaaaaggctggtgcatatttcattacttaatctgagattgattttatgatgctaagagatatcacactattgttcaaatgtgtgggaagtacaggtagacacaacatcccagctttttactgcttatctttgcaactgtcaaacaatgctgtaaactttaactgcttgtagttaacaattcctgttttaattataggcagattttttattctgtccaaaggggagaagtntcaatggttatttagctaaaatgcatagcaagacattataactatgacctggtatgaaatcatggacaaagnttggtaaatttcatgggttgggtcatggngaaaatataaaatttcatgggcttgccaanaataatataaaattcccattaaaatggngcaaataccttcggccgcgancaccctaagccgaattccacacactgncgggccgtactaagtggatccanctcgggaccaagctggcgtaatcatgggcatac

SEQ ID NO: 7279 - DNA, 583 bp, Homo sapiens
  misc_feature (1)...(583): n = g, a, c or t
ctgatgagtagtagagattggattcacacccaggttttctctctctgaagccctggtcacctgtttggccctggggtgatggggagaaggttctggctgtgtcttggctatctcctgcctctccctctgtggggaatgtgttcgaggatcacagctacagcttttcggataccctttcctttgtgaagcatgtgagaaccaacattgcatctcggcaagaattaaaaaggaattgttgatgacctgctgaaggtattttcattttgttcctggaaatgattaatcttgaggctttgtgatggcctttgtcacaaatagccttccttaatccataattttctcactttcctttaaggtaatattttgcatttaagaaataaaaacaagcaaaataatcctgcttgtgaaggatatgaaatgcagtgtttgtgtgtgggggtgtgtgtgttgtgatgctgaccaangnctaaattccctgaaatgaataanaaaacccctttttaaaataagntcagtttgcctttttttgtnctctattggcaatctaacccctcctttataatatttttccttcttcctctta

SEQ ID NO: 7280 - DNA, 704 bp, Homo sapiens
  misc_feature (1)...(704): n = g, a, c or t
acaaattatctttgaagtttaaacatgataatatatagaaaaagtggtctgaaagtatgaagcccgaagtgtgagtttgatgatgacttagttttgcacatacatgtgagactctgacataccattatatattatcttgatgacacataggcatcaataagattgaaacaatatttgtttaatgtgttttattcagcaccatgcatagtgctattcaaaggtaaatggttaaatggtgtatcattgtaatgagataaagatatagataatcagaccaatttttgaaacatttttacttttaagaacttaattctctcaggaatgagtaactgtttttgctttattttgaatggtctagatatcattctttttctagctgngttgtgaggtacatgttattttaaaaaccccacaggagatgaggaggtcccaagggagtgaggtctcgatgtcccctcaaacattaaccacacagctactcttttgctgtcaagatacaggggctctcaatacattttgtttgaagaaaggacctggatcttataataaccaatcagaaagtaattttctataataaaaagttctttaaaatctgtaagaacagaaatgtgngatttaaaaaatttntgagatatnttaaataacnttnctttaaaaantgatgntggctggcgcagggttncccttaatccaccnttggagcc

SEQ ID NO: 7281 - DNA, 450 bp, Homo sapiens
  misc_feature (1)...(450): n = g, a, c or t
ccacttttggagagtccgactatcacggnaggcacagaactctgccatgtnactagctgaatgacctcggatgtcacttcaactctganccttanaacttgtcaactgcaaagtggggcacttcaccgagctacatcattgagctacttcactgagctacttcattgaattgggaaaattaaaggagcaaatatgggagaaggatttgcccatagtaaacactatgactgtccgcttctgccatctttcagtanacccagtgggaattatatgaaggttgataggcacttaaaccaagaatatatgaacatctattctgtgcaaggatgtgtgcattgaactcagtcccanggacttganggggacaggaaggaagcaaacttggaaatcattgtctttagagatcaaggagcccannagatgaaacaagcctgggntccctaggtgata

SEQ ID NO: 7282 - DNA, 712 bp, Homo sapiens
  misc_feature (1)...(712): n = g, a, c or t
atttttgtcaaaatagtaggtgtaaaataatgtcttatggtttttatttgtatttacttgaatacaaataaatacaaggctgaggcttgagattgagattgagattgaggctgagcacctttctaatatttatggggcagttgtgtttccccttccatgaaatgtctgtacatgactttgcccattttaaaaaactgaggatttgnttttattaaaactttggtattatttatcctggatatttcctttataggttatatgtgtcccagtgtgtgacttatctttccctttttgtgatatgttgattaagcagtagttcttaatgaaattgaattagaatttttcttcattttatacttcttgggnctttctaaataaatctttcctaactcagggtataaagatatccctgctatgctttacctaaaagtttcctgaaatcttttgccttatcacccgttatgnaccttggacccatcttccagttgggtttttaatattatngggnatggggaaaangggaaataaatttgcccaatgnncctaacncctnnttttattgggaggaaaccatccctttnccccaggaaaccttnaccaaccgggcccttggggttnaaaataaattttncanaccanaaaantggttaacaaancttntccatttccngggggggnatttctgggtgcgggcccnnaaaaaanaataaan

SEQ ID NO: 7283 - DNA, 694 bp, Homo sapiens
  misc_feature (1)...(694): n = g, a, c or t
ctgtggctgnggggncgganaagcacatttttctgcngataattanaatggcttcccccatctctcacggactgtcccaagtctagaaaagaattgacntcctcttctattanncnaataaaanggaanagaatgtttgncttcctttcctttctgtagtgntaagaaaataaacgaacttaatggatnntaaattatcanngagcttaacnctgtactataaaccaaacattaccttttcaaaaagtcctttgaggngaaatattttgtatncgtaatacatagatgcacatataancccacncatatanaatctcaatattttaacncttctttgggtagttgcactaactcactaaccctgaggaaaaagttaacaaattgaaagtnttttcttcnaaagttgagatttancnataaaaggtnttactttgatanctaaaaggaactttattancctcttcctaaaataaacccnncctattctgaaaatggcncttgcnattaccaatttgccattntcaangctaccccttgaggtggacgccttttcttaaaccaaataccccttnttatttattggcagttccccccganagggnccccnaaccccatcttctancacaaccccctccatcaaattacccttccggtaaagctatngcctgctctanccccntttncaccncaatat

SEQ ID NO: 7284 - DNA, 481 bp, Homo sapiens
  misc_feature (1)...(481): n = g, a, c or t
tctgttggagggggccctncccaaagggtcctgnacccctcacaggggangaactgnacttgccgctcattcngacaaaggggggtgtggacgcanccctggaatatgccnacaccnggacccgctatgccaaggaactgcttgcctggnctgaaaacagagccacctatganctggagtttgctaanancaccatgaagatcnctgaagctggcaaggtntccattcaacagnagagccccatgcctcctgcagnacatctacnccctgtttctggagcaccatctcaccctgggaaccctgnncctccggcccacaccacccctaancccaattccancacactggcgcccntccctatccnatcccancctcgntnccccntctcgccncactcnncgccatngcctcgttncccnnccgacccccnccnctccccccntctnctacgcgcncctacccccaccgcccgccccccccc

SEQ ID NO: 7285 - DNA, 442 bp, Homo sapiens
  misc_feature (1)...(442): n = g, a, c or t
cctcctcnannggggcagggaacttnaatctgtataagtatctgcagttgctggaataatttgaagaccccatggagctaaggagattaagtggaggattttcattgtttcagaggggcaaggggcaaatccattgctaattctttaatgatgaaaaatggtaagaagttgttaaactcctttggggattttaaaaagtgatacctnaacanaacagagagagagagaganaaatcncactagtgangctaacnaaaataatgataaaaaggttagaacaacccangatacttactggatgcctacacaacntaaaaatatatttatanaanganccactgnaatttgaatataaaaggntatcngaannttaatgtgtngcatctgaaattcnaactntttccttttggctacnccancnaaacacttttnataaccccct

SEQ ID NO: 7286 - DNA, 125 bp, Homo sapiens
  misc_feature (1)...(125): n = g, a, c or t
ccttttgatangggnttttttaaaaaacaaaattatagaagtttaanaatttaattcaaatttggaggggttttnaggaaattttnacaaaatggctngttggtttnanctgtttcctacntttg

SEQ ID NO: 7287 - DNA, 518 bp, Homo sapiens
  misc_feature (1)...(518): n = g, a, c or t
tctaagancgggngtgttttncntntattttcctaactccatctcctaaaaaattccacctcattctgctcaacccaccacggcattcttgctgttcttgaacatgccaagcaggcccagggcctttgcattcactgtttattttgcttggaatgctctccccccanacaccttcntggcctcccttaccaacctcacatctctgctcccaagtcaccttctagataaagccaacactcatcacactaatgacaactacaacaatccctactgatactcactctanctttttacctgtcacatttgctgtcttctaacatactgcataatttacttatttattctctctccnttatnaanagttctaaaagagaagngacttctatctgttttgttcaaataccccaaggctcccttgttacnttgtcagncagtcaataattatttctcaaatgntaccngntttaagaaatgtgagctgcttttttacgaaaaccancaaatgttcctnccctata

SEQ ID NO: 7288 - DNA, 659 bp, Homo sapiens
  misc_feature (1)...(659): n = g, a, c or t
cctatgtcacgggggagagaagctcctgaaccaaccatttgtcaggtctggggacaagactggaagtattgactcatttgcaaggaaactaagtgggtcaacaatgaaagaaggtaataggacctcatctgcaatcctccaatttatctgcaggataaattaaatgcctaaaaaagaaacttattttttaaagtatctgctaccatcaggaaaccaaataaatagtcagtctattaatttcgttcttaaataattccgatcctttacctaatttcttgagccatttaatcatctcaactctaccttagaaccctcccaatgttttccaaatctgtcttactgggaaacaaagattaaaattcctaataaggattattttgtggatcttaatttctagattcccattttaaaattttaattccattaatttcttaataatagcattctattactgattgaatcatctctaataagccatcataatttccagaccatttctaagaacacgagctgatattgaaatgtttactaatgaccngccccgggcggcccgctcaaaacccaattccacncccttggcgccngttctaactgggatcccaacnncngaccccanncttgggnggaaaacnatgggccctaacccctggtnccccggg

SEQ ID NO: 7289 - DNA, 675 bp, Homo sapiens
  misc_feature (1)...(675): n = g, a, c or t
ccagagcagangngaatggttctgacttaaataggttgttgagcaaggagatctcacattttaaagaatattttcagagggagaatttgagaaggggggagaaaaaaacaaacaggaatgaacataaaagtataaaattctanacaacccactaaaccagttagcaaaaagaggagctcttaattgaaatagagaatttccccaaaaaaaggtctgaatttatttttaaaacattagatttggaaaatacctaatttgaaagtttaattttcatatatacgtcaaacctgcttttagggtagtttagtcaaagctgaaacaaaacaaataaaattctggcttatatatctgatacttgaataaggactctgaaaaaaaatgttcccgttttttttctcgtcngcctaagatatatttttgacattacataaatttcagtgatatgatctggctcctatttaacntttatgccctttctcttccaatgntaacttttaattttctcctcttcttctagctgggatcnttaaaaaaaacngaaaactcngtnctccccnagggtcatggggnaacnttttcancncntttccgggnccctttctattcctttaanaaccnctccccctccctttcctttttaccccccnattggncctttgnccnnaaaccgggggg

SEQ ID NO: 7290 - DNA, 474 bp, Homo sapiens
  misc_feature (1)...(474): n = g, a, c or t
ccacctggagacgttgattttgggcctattgaagacacctgctcagtatgacgcttctgagctaaaagcttccatgaaggggctgggaaccgacgaggactctctcattgagatcatctgctccagaaccaaccaggagctgcaggaaattaacagagtctacaaggaaatgtacaagactgatctggagaaggacattatttcggacacatctggtgacttccgcaagctgatggttgccctggcaaagggtagaagagcanaaggatggctctgtcattgattatgaactgattgaccaagatgcttgggatctctatgacgctggagtgaagaggaaaggaactgatgttcccaagtggatcagcatcatgaccgagcggagcgtgccccacctccagaaagtatttgataggtacaagagttacagcccttatgacatgttggaaagcatcaggaaagaggntaaaggag

SEQ ID NO: 7291 - DNA, 208 bp, Homo sapiens
  misc_feature (1)...(208): n = g, a, c or t
ccgnnagataaccttcctttggcatgttgctctaaggaacatgaatccaacaggataaagatttcctaaacaaaatgcatgttaagttaatagtgcacaggccctgtgctctgctaacttggaactaacgcataatcagcaaataatcaacaactgctacaatgaaatcaaggtagagaaagggtggaagaatgaaaagaagataata

SEQ ID NO: 7292 - DNA, 261 bp, Homo sapiens
  misc_feature (1)...(261): n = g, a, c or t
ngatagactcttcctcagcagcctggcaggcaggaaacagacataggaccccagcccagatctgaatggcatgggaggngctgcccttaaccatgacaccattgtaagagctgtccacatttgtatgttgtgccctggaatcagcctggttgagctcaaatcccaacttanccacgtntggcctgtgtccttgggcagnncacactacctctctgattttggttccttatctgnaaaatggtgatcatcataatacaactn

SEQ ID NO: 7293 - DNA, 184 bp, Homo sapiens
ctgagcttccccaaaatcaagggagaatactaaatatctatttaatagaatcttggctttctctcggaggctgcccatccctggtgtgtcccttatcctccctgcagacatttctcatggataggagttccattgaccttgtcttttatgtctcccgggcaattaaacagtctcagtaccctgt

SEQ ID NO: 7294 - DNA, 204 bp, Homo sapiens
gtttatttagtgtaatgaagataatttgatataaaaatattttgtgtatatatatatatttttactttgttttctaaattgctgtttgcagtaacagtaagcgcaaagcaaaatatataagttatgactgtatgatcagatgaagtatgagttcttttggtttgcatccttaaatagttagagatctctgataaaaactttgga

SEQ ID NO: 7295 - DNA, 180 bp, Homo sapiens
ttattcttccgtggagttaagggctccgtggacatctcaggtcttcagggtcttccatctggaactatataaagttcagaaaacatgtctcgaagatatgactccaggaccactatattttctccagaaggtcgcttataccaagttgaatatgccatggaagctattggacatgcaggc

SEQ ID NO: 7296 - DNA, 308 bp, Homo sapiens
ctgaggggacctgctaggctttgatgaactgagctgcatcttggatttcgcttcctcttctttctcagccgaggttacggtgattagcaagggcagttgctaccactgaaaggatagaaggaaaaaggcaagggaaaatgatacgtactaagatgcacataggagcactcgatagtagtctatggaccgggccctgggtactgccattatagagggaaggggaagaggagtggtaagggagagagaacactggactaagcctcagcattcagatgttcccagttacaacaccctgaacgatctctagg

SEQ ID NO: 7297 - DNA, 242 bp, Homo sapiens; identical to SEQ ID NO: 265

SEQ ID NO: 7298 - DNA, 209 bp, Homo sapiens
ctggaatgccttgatgatgcagaaaaaaaattaaacttggcccagaaatgctttaaaaattgttacggagaaaatcatcagagactggtccacataaaaggaaattgtgggaaagagaaggtactgtttctaagactctacttacttcaagggatccgaaactatcacagtggaaatgatgtagaggcttatgagtatcttaacaaggc

SEQ ID NO: 7299 - DNA, 200 bp, Homo sapiens
ctggttatccgagaagttccgaggattctccttggatttcttagggaaccagttgggatccccagagaagagcccatcatctcgggctactgccagcccacccagattcatcagcgtccgctgcacacaggccatgttctttccttcccagaggtccacagtttggaagatgtcagtggtgttaatgccatagcgctcag

SEQ ID NO: 7300 - DNA, 383 bp, Homo sapiens
tggttatcgaagtggtttactgtaaggctgagaaccatgcattaggcagcattcggcagctatgctgttgtctcttattttttctaacgtggaaatctgttttgtaacttgtagtaataaggtagaaattaaaaagaaaaagtattttcctgtacttgcttggctgcaaggtcaggaacacatagttccttagcggatccttggtaacgctatctgaaaaaccacatcgctgagaaatgagttctggagactctcttaacagtctgttgtccctaggaaggataagagcaagaaacagcaaatgcttttattaccttctcttttccctttaccatttctcactattcaagttttgttaagttcttgatttcccttcagtgcag

SEQ ID NO: 7301 - DNA, 427 bp, Homo sapiens
ccaagcgcttccagcccgacctctccctcccaaccaacgttcaggtggaggtcatcactatcgagagcaccaaaagtggtctgaagtcagagaagttggtggaacagctcactgaatacagcacagacaaggacgagcctccaaaggacgtctttgatgaattatttaagctggctccggagaaagtgaacgcagtgaaagaggccatcgtgaactttgtcaaccagaagctggaccgcctgggcctgtctgtgcagaatctggacacccagtttgcagatggggtcatcttactcttgctgattggacaacttgaaggcttcttcctgcacttaaaggaattctacctcactccgaactctcctgcagaaatgctgcacaacgtcaccctggcgctggagctgctgaaggacgagggcctgctcag

SEQ ID NO: 7302 - DNA, 540 bp, Homo sapiens
  misc_feature (1)...(540): n = g, a, c or t
ccatggcgcttcacgttcccaaggctccgggctttgcccagatgctcaaggagggagcgaaacacttttcaggattagaagaggctgtgtatagaaacatacaagcttgcaaggagcttgcccaaaccattcgtacagcatatggaccaaatggaatgaacaaaatggttatcaaccacttggagaagttgtttgtgacaaacgatgcagcaactattttaagagaactagaagtacagcatcctgctgcaaaaatgattgtaatggcttctcatatgcaagagcaagaagttggagatggcacaaactttgttctggtatttgctggagctctcctggaattagctgaagaacttctgaggattggcctgtcagtttcagaggtcatagaaggttatgaaatagcctgcagaaaagctcatgagattcttcctaatttggtatgttggtctgcaaaaaaccttcgagatattgatgaagtctcatctctacttcgtacctncataatgagtaaacaatatggtaatgaagtatttctgg

SEQ ID NO: 7303 - DNA, 217 bp, Homo sapiens
  misc_feature (1)...(217): n = g, a, c or t
ctgtgngttttgccacatgccccacgatgacaatgaccttccctttgaagttctggagcatagcagtgtaagggccctgggtaagctccccttctgcagtgaaggcagcactgaatggaatgttgatgcttcctgaaatgtgaccacgaataaagtcttcactattccggatgtcaaccgccagganctttggtttactggactttgttttcttgct

SEQ ID NO: 7304 - DNA, 316 bp, Homo sapiens
  misc_feature (1)...(316): n = g, a, c or t
tctcagctctcggcgcacggcccagcttccttcaaaatgtctactgttcacgaaatcctgtgcaagctcagcttggagggtgatcactctacacccccaagtgcatatgggtctgtcaaagcctatactaactttgatgctgagcgggatgctttgaacattgaaacagccatcaagaccaaaggtgtggatgaggtcaccattgtcaacattttgaccaacccgcagcaatgcacagagacanggatattgccttcgcctaccagagaaggaccaaaaaggaacttgcatcagcactgaagtcagccttatctgg

SEQ ID NO: 7305 - DNA, 127 bp, Homo sapiens
ataaatttacttgtgtcagaacaaataaaagaaagttggaaatacaaatctatcacttcaaatttaatctgacatgcaattattctgtctattccagaattgtatggcaatttaactgattaagtca

SEQ ID NO: 7306 - DNA, 235 bp, Homo sapiens
ccatgtaaataagatgatttaatgttgattttaatcctgtatataaaataaaaagtcacaatgagtttgggcatatttaatgatgattatggagccttagaggtctttaatcattggttcggctgcttttatgtagtttaggctggaaatggtttcacttgctctttgactgtcagcaagactgaagatggcttttcctggacagctagaaaacacaaaatcttgtaggtcattg

SEQ ID NO: 7307 - DNA, 470 bp, Homo sapiens
  misc_feature (1)...(470): n = g, a, c or t
ctgcgttacatgtaacaaaagatgcaaacaaaatagattcaagttgttttgcagacagcacaatgatacaatattaggactacagaatctcagagtaaaccacaatgatttaaaggtaagatacacagaaataaaatgattttaacagaaaaatatgacattcctgaccttaggtctgggcacatgatgtctgacccctatagaggcaccttggctaaaatgggaatgacctantgccatggctgacctcacttgtgcgttgctgagcccatatgtgaacaaatccccttgatacagcaccatggtaggcatgagaggagaagtgttttaactattctcttatgaattgtaaccaacccttattatctactgatggatggacagggggtggggtgatcatacaggatgggcagacattccaagtactcttcccccagtggtggacggaacagaatctggctacacggtgg

SEQ ID NO: 7308 - DNA, 241 bp, Homo sapiens
ctgagcagcactgaacagtgtccgaacgaaccggtaaatctgcttctgctctgggttgtgtttgtcataatctggtggcacttcggatttcgaaagagggtgaagattttcatcaaaaatatctaagagcatccttccatctgggtccctgtttttgatgtgataatatattgcaagagcgacacatttaattgtatacttgaggtttggttgactgactgtgctatcatctaggaaaatg

SEQ ID NO: 7309 - DNA, 166 bp, Homo sapiens
ggagtggcttcctaacggaaatggaacaggattaccaactagtagacgaaagtgatgctttccatgacaaccttaggtctcttgacaggaatctgccctcagacagccaggacttgggtcaacatggattagaagaggattttatgttataaaagaggattttccc

SEQ ID NO: 7310 - DNA, 483 bp, Homo sapiens
ctgagggctccatgccgaatccatacacaaggtttgtggttctcagaagagttttcagacaggaactgtttccaacttaaaatctttcaacagacaaatggaggtggaagggggatggtttacacaaagtattttcaaatgtaatcaggaaatggaagtgtaaattaaaaccgttttcaacatgtatctcctctttagaaatatcactgcttggagaatgttgtgacaagcaaccaaatactcaaaagaccttatccccagaatactggcaggactcacattactttgcatgtcataattaagaaaaatatccaaatttgatgccatttatagtgtgtcagtcaaaaatgtgtatgctgattttgatgagcaggagaaaggactgggtggtgaggaaacatgactatgcacacatgagacactgtgctgctcacgaaaccgacctccctatggagtgtccaactgaaacctctgatacacacc

SEQ ID NO: 7311 - DNA, 386 bp, Homo sapiens
ccatctgataataaacggaaataatttgatcacatgaaactttggtttgtggtatttatacacagttaaagagaagatataactttttccattactggaaattgttccagcaagcaaacttgacagaatctctcttatttccaatgtaaaatcgtcccatcatgaatttatactttatcactaccaaatttctctgaaatttctcttcagaatttttcccaaggtggaattggctgtgccaggtattaatctgtgccaattgctgtcagcctcatttacttgtactttttctcattataccattaccttgggagcaaggccctctttataatgagtgctatacaaacatgactttgaccagacctttctatctgtccatcttccag

SEQ ID NO: 7312 - DNA, 212 bp, Homo sapiens
cccccaacaaggggacaggacggtcactgtgccaatcctgtcatcaccctcctgtggatgtacaggcagtgctcaataaatgcttcgaggctgatgaggctgctggctcagggtgcgtgggttcctcaaggtggggatttctgagttctaagaccaagtctccatctgagactcccaaattgctccccacctcccatccctgtttttttttg

SEQ ID NO: 7313 - DNA, 230 bp, Homo sapiens
tggtacgcctcctgacttcatcctcaaggtggtaatagacaaacatcctgtccggttttttgtacataagaggccccatgtggatttcttcctggaagtggtgagccagtggtacgagctggtggtgtttacagcaagcatggagatctatggctctgctgtggcagataaactggacaatagcagaagcattcttaagaggagatattacagacagcactgcacttttg

SEQ ID NO: 7314 - DNA, 353 bp, Homo sapiens
  misc_feature (1)...(353): n = g, a, c or t
ccatcggtgctgaaattgagcattttaaatagtacagtaggctggtatacattaggaaatggactgcactggaggcaaatagaaaactaaagaaattagataggctggaaatgcttactttctgctctcattttctttcattttgtctgctgtctttttgaatgccaatactttcatttaaaatgttttgggagcacggcaacccaaaatgactgaaccggtggtccaaaaatccaaacccactgataattacttctcgaggtgataggaaaggcacangaagttaggactttggctgaaatgatgaaaacacatgttcgccattttagggatcaagcgcctcgactcctgcc

SEQ ID NO: 7315 - DNA, 101 bp, Homo sapiens
gggaggaagccgactaggcgaattcacttactgaccggcctgggctgctctgagacatggaggaagccagtgaaggtggaggaaatgatcgtgtgcggaac

SEQ ID NO: 7316 - DNA, 199 bp, Homo sapiens
ctgtcaacctttctttaactgaggaaacatttgagggctctgctgatgttctggctagctacactcaggcaacacatgatgaatcaatgacttatgaagatagaagccaactagatcacatgggctttcacttcacaactgggatccctgctcctagcacagaaacagaattagacgttttacttcccacggcaacatc

SEQ ID NO: 7317 - DNA, 101 bp, Homo sapiens
  misc_feature (1)...(101): n = g, a, c or t
ggagctttaatttattaatgcagacagtacctaacaaacccacaggtcctaaactaccaaacctgcattaaaaatttcggntggggcgacctcggagcnna

SEQ ID NO: 7318 - DNA, 130 bp, Homo sapiens
ctggcagaccccccaaccacatcagaggagttttcatttcttcctgggctgcttatctgggaagccttcaaagaattcgttacacatcatggcgatgcaggacaggaagacacagtactcttggaagtcc

SEQ ID NO: 7319 - DNA, 101 bp, Homo sapiens
ccttcaaagcctattatttctaacctaagtaaaggccccagtgaaaaacatactggggaaataaaacctctgagaaaaggttcaagcaccttttccaaatt

SEQ ID NO: 7320 - DNA, 101 bp, Homo sapiens
tgatactgtggggattcagtttaggcgctggcccgaggatatcccagcggtggtacttcggagacacctgtctgcatctgactgagcagaacaaatcgtca

SEQ ID NO: 7321 - DNA, 401 bp, Homo sapiens
  misc_feature (1)...(401): n = g, a, c or t
ttttttttcattataaaaggtacacttctgtttatatttaaacaacaaagaaaaaagcatctacacacttaaaaaattaattcaatattcctaaatctattttaactcattttaaaatactacatacagaagccagaatgcagagttaanaatggaataaggtggggagaagaaggggaccacgaagaaaaacacttagacaattacttgtctgttgtgggtaaaancaacaggaatcctgggagatacaagaaatcagnancaacctttgctcatanctgatatttttcccctcatgtttgttttttaataacgtccatatgggngctctctgtatgctcccttcctggcctancaggaggggctttcacgacggcctggncccattccagtcgtcctgg

SEQ ID NO: 7322 - DNA, 171 bp, Homo sapiens
  misc_feature (1)...(171): n = g, a, c or t
gtgacttgaagcancttgttgatcanaaaatacagtctctggaagaccgtctggggagcgttctcctacagatgaccaataacactggtgcagagctcagtcccccaggggcagcagccctgccaggagtgtcagggtcaggagatgaacgggtcatgatggaattaaacc

SEQ ID NO: 7323 - DNA, 226 bp, Homo sapiens
ctgtgcgtgctcacgggctcctcctgctggaagagagagagatgtgcacgccactcctatggcatgtctagcaggtctgagcagtgttcatagaagaaaaatgttttaacagtctcagattttgggaggtagggggaaaaaaatcattgaaatctgggaaagacatttttaagctgctgacttcacctgcaaaatctaacaggttggattagtttttttttttttt

SEQ ID NO: 7324 - DNA, 228 bp, Homo sapiens
  misc_feature (1)...(228): n = g, a, c or t
gagagacgcaggagcctacctgagggaggacgtgtggaaggacagacagcttcaggacaaagcaaaacgagcagaacacaaaaactgcaggggactgcgctgagaatccgggtgaggaaatcatcggcacactgaaccccctactcagaagtttacctatgaaacaatcttgcacatgtatgcttcaaaaacaaataacagttagggaagaaagagagaganagaaan

SEQ ID NO: 7325 - DNA, 111 bp, Homo sapiens
ccaacatggtgaaaccctgtctctactaaaaatacaaaaaagtagccggacatggtggtgggcacctgtaatcccagctactcaggaggctaaggcaggggaatcgcttga

SEQ ID NO: 7326 - DNA, 156 bp, Homo sapiens
gtatatttggagaaggattaaagggaagaaaataataaaattgcaagaacgtcattaaatgcttaagaggaacatggcttgttcctcagtcttcaaagattgaacaataactgggcagaattttccaaactttgatactagtaacaattaacagca

SEQ ID NO: 7327 - DNA, 120 bp, Homo sapiens
tcgacattctttttgttactgatacgtttaattgttttgtttgtaaggttccagaatatcttaaccatgtaagtaaacgcttagaggaagagggagacagagtaatcacttacttggacc

SEQ ID NO: 7328 - DNA, 186 bp, Homo sapiens
ctgagaagaaatggctttggaaagaatggcttcttgcagagccgcagttccagtctgttctccccttggagaagcacttgcaaagcagagtttgaggactcagacaccgaaaccagtagcagtgaaacatcagatgacgatgcctggaagtaggcatataaatgctcacagttaaatctgacccag

SEQ ID NO: 7329 - DNA, 123 bp, Homo sapiens
ccagggccatgacgggcaatgccggggagtggtgcctcatggaaagcgaccccggggtcttcaccgagctcattaaaggattcggttgccgaggagcccaagtagaagaaatatggagtttag

SEQ ID NO: 7330 - DNA, 231 bp, Homo sapiens
ctggtattttgcctaagatctatttaagataaccttttcttatattttttacttaatattgggcataatcgtatcattcaagattaagtctgggttatttctttgataagaactgaatgtggccgggcgcagtggctcacgcctgtaatcccagcactttgggaggccgaggtgggtggatcacaaggtcaggagatcgagaccatcctggctaacacggtgaaacccctg

SEQ ID NO: 7331 - DNA, 171 bp, Homo sapiens
cgcgtggagggaatatgtgttctggaagaatagagatcaaattccaaggacggtggggaacagtgtgtgatgataacttcaacatagatcatgcatctgtcatttgtagacaacttgaatgtggaagtgctgtcagtttctctggttcatctaattttggagaaggctctg

SEQ ID NO: 7332 - DNA, 472 bp, Homo sapiens
  misc_feature (1)...(472): n = g, a, c or t
ggagagggtgttttctcgtgtgaatgagggttttatgttgttaatgtggtgggtgagtgagccccattgtgttgtggtaaatatgtagagggagtatagggctgtgactagtatgttgagtcctgtaagtaggagagtgatatttgatcaggagaacgtggttactagcacagagagttctcccagtaggttaatagtggggggtaaggcgaggttagcgaggctttgctanaatcatcaaaaagctattagtgggagtagagtttgaagtccttgagagaggattatgatgcgactgtgagtgcgttccgtagtttgagtttgctaggcagaatagtaatgaggatgtaagcccgtggcgattatgagaatgactgcgcccggtgaagcttcagggggtttggatganaatggctgttactacnagggctatgtggctgattgaaantatgcaatgagcgattttangtct

SEQ ID NO: 7333 - DNA, 364 bp, Homo sapiens
ctgtgtccaagggagcaaagcaccccatattcttctgaacctaaaggggtttcctcctcaaagaagcatgttttcaatccctaaactttggggccagatacagctccaagtggcatttattgctctttggagagtcaaagccaagccaccatgagcacgaaagctgtctgagaccctcctcccctcctccccagcatggagagaataattgccatttcaccctccaaaatccgaaagaagtctcccccttccgtgggtttaagcatggacacaagccaagcaagcctcagatacccaggcctgtttgattgtagctatgttggtgtatctcgtgtacaagatggaaaagtgcttttgttgttct

SEQ ID NO: 7334 - DNA, 101 bp, Homo sapiens
ctgtacttgagattttggcagctcttggaaccggatttgcttgttccagtaaaaatgaaatggctttagtgcaagagttgggtgtacctccagaaaacatt

SEQ ID NO: 7335 - DNA, 380 bp, Homo sapiens
ccaacaacaccagtcaatagaagtcttagtggcacagctacagagagaaatattgactttgaacttgatatacgggttgaaattgatagtggaaaatgtgtactccacccaaccacccttctacaagaacatgatgatataagtttgagaaggagttatgatcgaagttccaggagcttagatcaagattcaccttcaaaaaagaagaagtttcaaactaattatgcttctaccacccatttaatgaccggcaagaaagtgccatcatctctacagacaaagcctagtgacttagaaacaacagtattttacattcccggagttgatgtaaagttgcattacaattccaagacgctaaagactgaatcacctaatgcctc

SEQ ID NO: 7336 - DNA, 221 bp, Homo sapiens
cctgtttgattgtagctatgttggtgtatctcgtgtacaagatggaaaagtgcttttgttgttctacctgatccagttgggggagcaggaatagggggtgcctgcctaacggcctctagcccatgtgcttatactgggatctgtcccgagggatctgcacctggttggcagtcattttgtggtggacgtggtaaatcgcgagtgttaccatgatgaccaag

SEQ ID NO: 7337 - DNA, 132 bp, Homo sapiens; identical to SEQ ID NO: 266

SEQ ID NO: 7338 - DNA, 384 bp, Homo sapiens
  misc_feature (1)...(384): n = g, a, c or t
ctgtttacagaaatatagttgcgagtatacaaatgttccaatagaagcaaaatatctttttaatatttaacaagttatcacagatagctaaaaacatagatgcaaatgaaattcccccagagaacaaactgaaaatatctggtatcagtgctctgaaatcccaactatgaaagccatatacacaaaaatgtaacccttatatcattgcaggacaatggaagaaaggcagttcagtggttgatcagnggctcaagcaaataaaattaaataaaaattaaaaatggcagaatggtagctaaaccacttgagaacaggttaatgaaattattggactatacttaaaacattaagtaaaagaagtgaatgaaactcatttaaagttgc

SEQ ID NO: 7339 - DNA, 190 bp, Homo sapiens
ccaggggaatgatgttccctgcaattaccatctcacctatacgtgcaagaaaggaacagttgcttgcggccagccccctgttgtagaaaatgccaagacctttggaaagatgaaacctcgttatgaaatcaactccctgattagataccactgcaaagatggtttcattcaacgtcaccttccaactatc

SEQ ID NO: 7340 - DNA, 215 bp, Homo sapiens
ctgactttcatatgagactcgggcttgatgtatgttagtgttctctttcttctaatagaatttctcattattggggtttaaatctttcctaaaatatttatagagtatggtttttagttttattatttttgtattcaaagacaaattaatcaaataggtttatattttacatgtgtacttcgtactcttatttgagatgggtaaaagtctgggtc

SEQ ID NO: 7341 - DNA, 130 bp, Homo sapiens
cttggaaagtggatctggaaaagtaacattccctaaaatgaagatccccaaatttaccttctctggccgtgagctggttggcagagaaatgggggtggatgttcacttccctaaagcagaggccagcatc

SEQ ID NO: 7342 - DNA, 268 bp, Homo sapiens
  misc_feature (1)...(268): n = g, a, c or t
ccanaattcttggagtttacagaattggttataagaactctcagaacaacactgagaagaagttnganctccttgtcatggaaaatcttttctacgggagaaagatggcncaggtttttgatttgaagggctctcttaggaatcggaatgtaaaaactgacactggaaaagagagttgtgatgtggtcctgctagatgaaaatctcctaaagatggttcgagacaaccctctatatattcgttctcattccaaagctgtgctgagaac

SEQ ID NO: 7343 - DNA, 214 bp, Homo sapiens
gttttattttattataatgaattttgtttgttgatgtgaaacattatgccttaagtaatgttaattcttatttaagttattgatgttttaagtttatctttcatggtactagtgttttttagatacagagacttggggaaattgcttttcctcttgaaccacagttctacccctgggatgttttgagggtctttgcaagaatcattaatacaaa

SEQ ID NO: 7344 - DNA, 281 bp, Homo sapiens
ccaacttcttggcccagacagaggccctgatgaggggaaaatcgacggaggaggcccgaaaggagctccaggctgcgggcaagagtccagaggaccttgagaggctgctgccacataaggtctttgaaggaaatcgcccaaccaactctattgtgttcaccaagctcacaccattcatgcttggagccttggtcgccatgtatgagcacaagatcttcgttcagggcatcatctgggacatcaacagctttgaccagtggggagtggagctgggaaagcag

SEQ ID NO: 7345 - DNA, 408 bp, Homo sapiens
cctagaaggaaacctccagatgcctggaattaagtcctctggatgtgatgtgaacctgccaggcgtgaatgtgaaactcccaactgggcagatttctgggcctgaaatcaaaggtggtctgaaaggttcagaagtaggtttccatggggctgctcctgatatcagtgtgaaggggcctgcctttaatatggcatctcctgagtcagattttggcatcaacttgaagggcccaaaaatcaaaggaggtgcggatgtttcagggggtgtcagtgccccagacatcagccttggtgaagggcatttgagtgttaaaggttccggggggtgagtggaagggaccccaagtctcctctgctctcaacttggacacatctaagtttgctgggggcctttaacactcaaatgccc

SEQ ID NO: 7346 - DNA, 255 bp, Homo sapiens
acaaattcatgaaatttgcagacaacaacaacaacaaaacagctcctcaagtcaggtgacagtaatgcccctctcttgcaaagagaacaaactgtcattagtgtaacatgaagagctggctttccagtgaattttactaataaggaaacacaaaaggttacagacttgagtgaaactactcaaggaacataaaagctaaaagccaactgataagtatgtcttcacacatttctcaggtgaatggactctttgaca

SEQ ID NO: 7347 - DNA, 429 bp, Homo sapiens
  misc_feature (1)...(429): n = g, a, c or t
ccttttctcattagtctctgggtcaggcttgggaagatatatgtgttggtgatgatatacttgtctttaatcatgatttatgaagatttaggattgtgtgtgatttgtcaaaggttctgggaaaaggctggtgcatatttcattacttaatctgagattgattttatgatgctaagagatatcacactattgttcaaatgtgtgggaagtacaggtagacacaacatcccagctttttactgcttatctttgcaactgtcaaacaatgctgtaaactttaactgcttgtagttaacaattcctgttttaattataggcagattttttattctgtccaaaggggagaagtntcaatggttatttagctaaaatgcatagcaagacattataactatgacctggtatgaaatcatggacaaagnttggtaa

SEQ ID NO: 7348 - DNA, 209 bp, Homo sapiens
ctgatgagtagtagagattggattcacacccaggttttctctctctgaagccctggtcacctgtttggccctggggtgatggggagaaggttctggctgtgtcttggctatctcctgcctctccctctgtggggaatgtgttcgaggatcacagctacagcttttcggataccctttcctttgtgaagcatgtgagaaccaacattgca

SEQ ID NO: 7349 - DNA, 372 bp, Homo sapiens
  misc_feature (1)...(372): n = g, a, c or t
cctgatctncaggtgccctggagggtccgactgctttcctcaggtactgactgtggacagcacatgagtacaggatgtagagtgcgcaggccagggcatagcctccccagttagaaacaccagcaatgacggcaaagtcagcctccacgtcgcaggcgatgacatccccgtgccgtatgtgcctcctcacagcctccttgactttacccatcccaagctcgttgcctccatcaccgactccagttgatgagattccaggaatcttcttcgcagcaagaaaaagatcgtcaatggggtcaaccaagtgcttgatgttcatcttccttgcattgtagtaattgccatcagcagctcttccggcacgctctatgg

SEQ ID NO: 7350 - DNA, 108 bp, Homo sapiens; identical to SEQ ID NO: 267

SEQ ID NO: 7351 - DNA, 393 bp, Homo sapiens
ccttaacccttgccctgggagcccccaaggataataacatccctttctggggcaacaaaactgggaccgagtgggtaactgatatttgacaggggaacctaaacagtctacggaagtgtcctgagatgggcgtaaagtcaaacagaccaagcacacaggtaacactgaaataggaaagagtaagagcttctgttcaggctggaggtgctcgtatggtgggacaggaaagggggaaaagagaaaggggcaacatggcagacataccacggttcctacagagattaggggcagccctggcccgggaagtacacagggcagagagctgactctcaggccaggaaggagtttagctctgacccatcctcagggaccacggctctcccccagcctcag

SEQ ID NO: 7352 - DNA, 208 bp, Homo sapiens
aaaaaactctggaacccatatccaggcttggtgaggttgctgccaacagtcctggcctcccccatccctaggctaaagagccatgagtcctggaggaggagaggacccctcccaaaggactggagacaaaaccctctgcttccttgggtccctccaagactccctggggcccaactgtgttgctccacccggacccatctctcccttc

SEQ ID NO: 7353 - DNA, 414 bp, Homo sapiens; identical to SEQ ID NO: 268

SEQ ID NO: 7354 - DNA, 461 bp, Homo sapiens; identical to SEQ ID NO: 269

SEQ ID NO: 7355 - DNA, 101 bp, Homo sapiens
ctcctcagcgcttcttctttcttggtttgatcctgactgctgtcatggcgtgccctctggagaaggccctggatgtgatggtgtccaccttccacaagtac

SEQ ID NO: 7356 - DNA, 125 bp, Homo sapiens
ccaagaacctcttccaccggaccatttctgagagtggcgtggccctcacttctgttctggtgaagaaaggtgatgtcaagcccttggctgagcaaattgctatcactgctgggtgcaaaaccacc

SEQ ID NO: 7357 - DNA, 238 bp, Homo sapiens
cctttggcgctcgttaggacagtggactattcagcaacaaaaaacccaagacgaaatgaaagaaaatatcatatttctgaaatgtcctgtgcctccaactcaagagcttctagatcaaaagaaacagtttgaaaaatgtggtttgcaggttctaaaggtggagaagatagacaatgaggtccttatggctgcctttcaaagaaagaagaaaatgatgggaagaaaaactgcacaggca

SEQ ID NO: 7358 - DNA, 153 bp, Homo sapiens
ctggagaatttctctacaaaaagctcttcagtcgtagagatccagaggaggatggaatgatgaaaagaagaggaagacaaggtccaaatgccaaccttgttaagacattggtttttttctttctagaaagtgagttacatgagcatgcagcat

SEQ ID NO: 7359 - DNA, 339 bp, Homo sapiens
ctgaatgtcagcaattgtttcagaggtgctcacaacttcaatgaggccagagcgatctcctgttgctaaacagccataaggcaacatccgaagatccaaaccagcttctttccagagtaaatccatcaagcgcaacatttggagtgtcaacatatcctgtcgtaaatcatcaccatttttaaaaatcactccaactgaatcctcaccaaataccttgttattgtataccagccacaaaggcttcattttggaatccatgtatttgcacttttcaacatagagttctgagaggataacacatgggttcaggggtgactgcaggtcagagagggcttcccg

SEQ ID NO: 7360 - DNA, 154 bp, Homo sapiens
cctggctcaacaaaagggctggggattggccctgaaaggagagagctgactgtcctggctgatggacaggagatcctcttagcactaccctaaggcaggcagttgggcattggtgtagacaacaggaaagtccaggctatagccgtactcaaaa

SEQ ID NO: 7361 - DNA, 125 bp, Homo sapiens
  misc_feature (1)...(125): n = g, a, c or t
nngcgacggcaccntcatccacctnaagtacccgntaaacctagccccaaacccactccaccttactaccagacaaccttagccaaaccatttacccanatnaagnataggcnatagaaattgaa

SEQ ID NO: 7362 - DNA, 101 bp, Homo sapiens
  misc_feature (1)...(101): n = g, a, c or t
gaggtctgagggnaattntttaactaaacatcagtacacaaaaaataccaggatagatggaatcaaaagactctgaagccaaaaggaggctagggagagca

SEQ ID NO: 7363 - DNA, 101 bp, Homo sapiens
  misc_feature (1)...(101): n = g, a, c or t
ctgggggnggctacatgactctgaaccccagggcacctactgacgatgataaaaacatctacctgactcttcctcccaacgaccatgtcaacagtaatnnc

SEQ ID NO: 7364 - DNA, 174 bp, Homo sapiens
ctgacagataataggcaggacatgttagttataaagtagttacagcctaattcacaaaagttaccaactgtttctctttctagaaagaagcaagaagttaagaaattccttgaattagcgcctggtgtgtcaggtgggagtgcagaggagggctgttagagcagtgtcaaaagg

SEQ ID NO: 7365 - DNA, 167 bp, Homo sapiens
ccataccatagatttgggatgatgtagtctgtgctaaatattttgctgaagaagcagtttctcagacacaacatctcagaattttaatttttagaaattcatgggaaattggattttgtaataatcttttgatgttttaaacattggttccctagtcaccatagtta

SEQ ID NO: 7366 - DNA, 118 bp, Homo sapiens
  misc_feature (1)...(118): n = g, a, c or t
ccatgctggncttgaactcctgacctnagatgatccgcctgcctcagcttcccaaagtgctgggatttgctaagtgtgagccactgtgcccggcctcttattcatttcttaacctatg

SEQ ID NO: 7367 - DNA, 376 bp, Homo sapiens
ccatcaactggaactatgtcattatttataaaacaggagcaatcacagggctgtggtgagaatcacatgaggtgacacatgtgaaatggtcctttcccctaagacatatataattgtgacaaggaacaaaatttacatagaaaataattacagaacaacgtaggaccatgtcttcatttctccctggagcggatgtaaaataaggtgattgatttgagcaacatgttatgaatatttagaaatgtcttctagggaagcaagctggcgctcaccgattttggtttgccaggcatatcagaaggcactttgtgacaggtgcagtagggacgcggagtgatctcttcacgtgtaggcaatgcccagcccgacacctagg

SEQ ID NO: 7368 - DNA, 128 bp, Homo sapiens
acaaattatctttgaagtttaaacatgataatatatagaaaaagtggtctgaaagtatgaagcccgaagtgtgagtttgatgatgacttagttttgcacatacatgtgagactctgacataccattat

SEQ ID NO: 7369 - DNA, 376 bp, Homo sapiens
  misc_feature (1)...(376): n = g, a, c or t
cctggacttcccctgccccatgcaataaagcaagttttatatacactccccatatttttttctaacattttcttatataaatttaaatattttacaaaaaaaggcttttttcctccaaacatataaatctgagtgaaacatagattccccacccgagaacttgtttcttcactaaaatataaatgttgtctgatattaagggtaaatgncttttgacccactggagatcactgaagtctgaattgcaccgtggagaagcacttgtgttttctgaggtctccagcaagtataagccgaattccagcacactggcggccgttactagtggatccgagctcggtaccaagcttgggcgtaatcatggtcatagctgntt

SEQ ID NO: 7370 - DNA, 127 bp, Homo sapiens
ctgatcttaaactcctgacctcaagcagtctacccccgttggcctcccaaagtgctgggattacaggtgtgagccactgcacccagccaagtttatgtatttttattctttttcatgaatgtgattt

SEQ ID NO: 7371 - DNA, 212 bp, Homo sapiens
ctgtcgtatttgggccacatgctgccgcacagcctcctgcaaatgcagtatgctgctgcgttgctcctctggattgctagagatctcaagctggaacctgacccgttgcttcttctcactatgttccttccgcttaggttctacatggagcagcaggttgttgacaatgtccaggatcatggcatactgagctgggttggtggaaaatttcc

SEQ ID NO: 7372 - DNA, 202 bp, Homo sapiens
ccttgttataaataagctgcataatcaataaatagaacaagggactttttgttgatattccaaatactcaaagtttacgtaatgaaaattatagcgtgtgtgcaaactcttgagggttgattatgctgcaatttagcatgttggaacgtctagggagaaggttgactttttgcacttctgtatatagtcaaaagagagaaac

SEQ ID NO: 7373 - DNA, 206 bp, Homo sapiens
  misc_feature (1)...(206): n = g, a, c or t
gttagngcaagtacagtctctcaaggagaattgattttgtggcacaaaaagggaacatgttttactctttgcacgaaactttcattgttaatgtatattattcagaaacattgtattgtaccataaaacttgtattatcaaactgttggatgttcatgtgtttgaacttttgcgcaccggatagaccccttgtatataaagtggtg

SEQ ID NO: 7374 - DNA, 101 bp, Homo sapiens; identical to SEQ ID NO: 426
  misc_feature (1)...(101): n = g, a, c or t

SEQ ID NO: 7375 - DNA, 101 bp, Homo sapiens
  misc_feature (1)...(101): n = g, a, c or t
cctnctatgggngttaaattttttactctctctacaaggttttttcctagtgtccaaagagctgttcctctttggactaacagttaaatttacaaggggat

SEQ ID NO: 7376 - DNA, 181 bp, Homo sapiens
tttggctggttgattccaatgcagttgatgagctatccactctccgaagggcaactggaccagaagacagccatgtcactcctgtggaagtcctatccccttgtttgcattgctaaggaactgattccagaagccactgagaaatacttaggaggaacagacgacactgtcaaaaagaaag

SEQ ID NO: 7377 - DNA, 101 bp, Homo sapiens
gaagagcggagcgtgtgagcagtactgcggcctcctctcctctcctaacctcgctctcgcggcctacctttacccgcccgcctgctcggcgaccagaacac

SEQ ID NO: 7378 - DNA, 193 bp, Homo sapiens
  misc_feature (1)...(193): n = g, a, c or t
ngtccaacattgcgaaaccctgtctctactaaaaaaaaaataaaaaatacaaaaattagctgggtatgatggcacatgcctctaatcccanctactgggaggctgaggcatgaaaatcgcttaaacctgggaggcgggtttgcagtgagccaanatagcaccactgcactccagcctgggtaacaaattgana

SEQ ID NO: 7379 - DNA, 116 bp, Homo sapiens
aaaagtcttgtgatttcctctcatcttttagagattcctgccaaaaattctaccaagcagagatggaggagcttgactttatcagcgccgtagagaagtccagaaaacacataaac

SEQ ID NO: 7380 - DNA, 351 bp, Homo sapiens
  misc_feature (1)...(351): n = g, a, c or t
ccacatcaatgtcatacagnttcttcacagcctgtttaatctggtgcttgttggctttaacatccacaatgaacacaagtgtgttgttgtcttctatcttcttcatggcagactcagtggtcagcggaaacttgatgatagcatagtggtcaagcttgtttctcctgggagagcnctttccgnngatatttgggctgtctccggagtcgcagtgtcttcggccgccggaaggtgggtgacgtgcggatcttcttctttttgtggctgtggacacctttcaacactgccttcttggcctttaaagccttcgctttggcttcagctttaggaggggcaggagcttccttcttc

SEQ ID NO: 7381 - DNA, 327 bp, Homo sapiens
  misc_feature (1)...(327): n = g, a, c or t
ctgcanaggccacctggattgtgcctaatgtgtttgagcatcgcttaggagaagtcttctatttatttatttattcattagttttgaagattctatgttaatattttaggtgtaaaataattaagggtatgattaactctacctgcacactgtcctattatattcattctttttgaaatgtcaaccccaagttagttcaatctggattcatatttaatttngaangtagaatgttttcaaatgttctccagtcattatgntaatatttctgaaggagcctgcaacatgccagccactgtgatagaggctgcggatccaancaaatgg

SEQ ID NO: 7382 - DNA, 348 bp, Homo sapiens
  misc_feature (1)...(348): n = g, a, c or t
ccacttttggagagtccgactatcacggnaggcacagaactctgccatgtnactagctgaatgacctcggatgtcacttcaactctganccttanaacttgtcaactgcaaagtggggcacttcaccgagctacatcattgagctacttcactgagctacttcattgaattgggaaaattaaaggagcaaatatgggagaaggatttgcccatagtaaacactatgactgtccgcttctgccatctttcagtanacccagtgggaattatatgaaggttgataggcacttaaaccaagaatatatgaacatctattctgtgcaaggatgtgtgcattgaactcagtcc

SEQ ID NO: 7383 - DNA, 325 bp, Homo sapiens
ctgaggttgtcagtacaatgaaaccaaactggcgggatggaagcagattattctgccatttttccaggtctttgagttgcacgtcaaatctggggctgatcaccccacacttgtttagcctgcctgtgaggttcacaacaattttcccagctctgtggtcatcaatgatttcaaattcgccaatgtaaccatgcttcatcatcacagtgagaaacccggacgatgactttggagcacggcctaataagcacctggcgtttgcctctcttttcggcattgttgatactcttgagagcatctgccaggacattcatgcgcaccattg

SEQ ID NO: 7384 - DNA, 393 bp, Homo sapiens
ccttggatgcagatcaatgctccaataaagttcattatcagctcctcctgccttgtgacaggatgatttgattttacaaaagtccctttgaaaacaagagtaaacgcagacagcttctagagaaaagtctggtgaagcagcagttgataatagattttcttttagtgatgaaattaatcttgttttggtaatctacagcctgttagggataggtggagggatgaagtccttaaaactaaattgttcctctacgaatcttcgacctgagcctgtggagagagtagccccaaatccatctctctgctgaaaggtcgcctgttttggtaggtgtgaggacattccgaaacacggccatccacattcttgatacatcgcttcttctgcatctgccag

SEQ ID NO: 7385 - DNA, 231 bp, Homo sapiens
  misc_feature (1)...(231): n = g, a, c or t
nggtcctttatcaacatttagntctttcaattaggaaatggagaatgaatgtttgagttnttaaggggaattaattgaatgatattttatcatttaagatgaaatcataacactanacacatagttgtatgttttangaggaaatttagcttttctatctgtgcttctcatgaatangagcacttcttgagactctggggtgatttaagccctttcccccactgagaccgc

SEQ ID NO: 7386 - DNA, 350 bp, Homo sapiens
  misc_feature (1)...(350): n = g, a, c or t
tgtgatttttgctacaggccacagtcaggagcacatgatagtagcattggcacaggccacggtggaccgtttttcagtgtacagntccancaaaacctggtattctccctgangaatagtaaattcaggattattgacaggcccagcatantaaatctgctctcctttccttcttcccagaaagaaaacttgggcagagccgcctcacagatgggatangagaaattcaaaacagatgagccttgagacatgagagctaggncaagaaaaagctctttgatgncctctctcacaataattccaaatctaatggtgatatttgantttaattgcttggacacttttcaaca

SEQ ID NO: 7387 - DNA, 396 bp, Homo sapiens
  misc_feature (1)...(396): n = g, a, c or t
natttttgtcaaaatagtaggtgtaaaataatgtcttatggtttttatttgtatttacttgaatacaaataaatacaaggctgaggcttgagattgagattgagattgaggctgagcacctttctaatatttatggggcagttgtgtttccccttccatgaaatgtctgtacatgactttgcccattttaaaaaactgaggatttgnttttattaaaactttggtattatttatcctggatatttcctttataggttatatgtgtcccagtgtgtgacttatctttccctttttgtgatatgttgattaagcagtagttcttaatgaaattgaattagaatttttcttcattttatacttcttgggnctttctaaataaatctttcctaactcagg

SEQ ID NO: 7388 - DNA, 238 bp, Homo sapiens
ctggagagaagagagactgagtgccacccatgagaactggtggctcctctgggagggaacctggatacagtgaggagaaaagagcactgtgaattagagccagacgcttaagtccaggtgagacaggttatgccatcttccaaagtgtctaattgcctcaggcgtgaaaccaattcctatttacttacccagctccatggggtactgagatacatggggccgaaaaggggtaatatgg

SEQ ID NO: 7389 - DNA, 128 bp, Homo sapiens
  misc_feature (1)...(128): n = g, a, c or t
ttgaaaaaaaaggaccaangttcnanctacttccaggggaatccancaanatcccccgtntgaggactgacctttttccaaanacaaaaatccaggacttgaatcgtatnttcccctttntgaggact

SEQ ID NO: 7390 - DNA, 183 bp, Homo sapiens
ctgtgagggctccataaccactgttttcttatcttgttaagaggacatggcatgtggcagccaacaccttgacttcaaggtgaatgctaaaggaagagccttgtatttaaaatgaaatgaaagacaagcaacaagtcctgggcagtccagagattgtattctctacagatggcctgtttgcaa

SEQ ID NO: 7391 - DNA, 189 bp, Homo sapiens
ccatggacaagctgaggaagatgctggttccctgcccacagaccttccaggagaatgacctgagcaccttctttcccttcatctttgaagaagaacctatcttctttgacacatgggataacgaggcttatgtgcacgatgcacctgtacgatcactgaactgcacgctccgggactcacagcaaaaaa

SEQ ID NO: 7392 - DNA, 101 bp, Homo sapiens
  misc_feature (1)...(101): n = g, a, c or t
gacntgctgtanaccctggttnccanngcacagggtgaccgtgtgatggtggtgctgggcccacagactggaagggtgggacatttgctnagccgggacag

SEQ ID NO: 7393 - DNA, 206 bp, Homo sapiens; identical to SEQ ID NO: 270

SEQ ID NO: 7394 - DNA, 182 bp, Homo sapiens
  misc_feature (1)...(182): n = g, a, c or t
nctgacatcccagagatcagtttcctttctgggagggactcctcattgaggggggtgcagaagacctgcagacctgcatcaaccctggtctttgaggcttcaactccagcacactggcggccgttactantggatccgagctcggtaccaagcttggcgtnatcatggtcatagctgtttcc

SEQ ID NO: 7395 - DNA, 284 bp, Homo sapiens
  misc_feature (1)...(284): n = g, a, c or t
nctaaaacactctttacgccggcttctattgacttgggttaatcgtgtgaccgcggnggctggcacgaaattgaccaaccctggggttagnatagcttacttaaactttcgtttattgctaaaggttaatcactgctgtttcccgngggggtgtggctaggctaancgttttgagctgcattgctgcgtgcttgatgcttgtccttttgatcgtggtgatttaganggtgaactcactggaacggggatgcttgcatgtgtaaacttactaagactaatagaaa

SEQ ID NO: 7396 - DNA, 101 bp, Homo sapiens; identical to SEQ ID NO: 662
  misc_feature (1)...(101): n = g, a, c or t

SEQ ID NO: 7397 - DNA, 373 bp, Homo sapiens
  misc_feature (1)...(373): n = g, a, c or t
ncctacaggtgtgcactgaattattcccaaaaccattcacccttccccacaccgtctctgcaccaagcaccaaaaatttgataaaaactattacttattgaaaaccacttaaaattgcaatgaaaaaaattttaaatccttaccaaaacagagaaagaaaaaacaaaatgcttaccaagcccccaatatagctttcaagatatttagattaaactctaacctattgtatcttaagcacataataaggcacataataagaaattaagtaaatacacagtaattctgagtaagtattagagattataggtggtcaaaaaacccttgagattaatttttttctaaaagnaagaccttaccaaaaataactttttaa

SEQ ID NO: 7398 - DNA, 339 bp, Homo sapiens
ctgatataatacaatccagctttattcgaaagataagtattctaactcttgttcggtgtttattcaaacttgtgtttgcatgtatttgtttggactataaattttgagactatagtgagtatgtttttgactataatattttaaatggaagatgaaatttaaattaagtatttgcttgtttctttttacaataaaataggtagctttgcagtttggggagggctgttttccatgattgactgtagtatggttcaagtcagaggaaaggaagatccctggaactccatcacaagtgggccttaacgggagccatactggcagcaagaaatggaccagtgg

SEQ ID NO: 7399 - DNA, 467 bp, Homo sapiens
  misc_feature (1)...(467): n = g, a, c or t
nttttgaataaatccctccgngtgccagctatcacattcaaatttgaatnctaggatgngaaggccataataaaagcagaaaacactttttnccaaaaaccacaataaataattttcaaaccagacattgtacaattttaaattatttttcaagtaaaatntacctacatggtaaatttcatttattcangtgaaattaagtctttgtttggtgagcctttagccacaataaagagaaacaagtaatacccaagtgtagtagggaatagagtaactttgtntcccctaatgccatgctcattagctggggtaagcctgacaatgtcttgccccttaccatggncaagcccccactcaggagccccccgccctgctccatcaagccatgggtcatgcccacaaggcatgtccaatgnctggaccccatactgggctgaaaaactgctatcctgtgaagaggaaggggt

SEQ ID NO: 7400 - DNA, 421 bp, Homo sapiens
  misc_feature (1)...(421): n = g, a, c or t
nggttcgactttgccaatgtccaggagcaggcttcctgggtgtgccagtgtgatgacaacatggntcanagactanaaacagacttcaagatgactcttcancagcagagcaccctggagcagtgggctgcgtggcttgacaatgtgatgatgcaagcactganaccctatgaaggaagacccagttttcctaaaccgncaggcagtttctgctaaaatggtctttctacaggtatcatctaggtttttcctaggctttcttcttcatattctgcaaatatgtgtgtgnatgtgntngtatatgcttctgtgacaaaagaaaaganagnaataaanactttagtttgtggaaactccctgttacaactaccttcaacccaactnaggngattacccaccatggaaatgtaccangaaactt

SEQ ID NO: 7401 - DNA, 112 bp, Homo sapiens
ccaacatggtgaaaccccgtctctactaaaaatacaaaaaaattagctgggtgtagtggcaggcacctgtaatcccagctactcgggaggctaaggcaagagaatcacttga

SEQ ID NO: 7402 - DNA, 379 bp, Homo sapiens
  misc_feature (1)...(379): n = g, a, c or t
cgaaaggcggcaaaaagggagccaagaagaaagtggttgatccattttctaagaaagattggtatgatgtgaaagcacctgctatgttcaatataagaaatattggaaagacgctcgtcaccaggacccaaggaaccaaaattgcatctgatggtctcaagggtcgtgtgtttgaagtgagtcttgctgnttttgcagaatgatgaagttgcatttaaaaaattcaacctgattactgaagatgttcagggtaaaaactgctgactaacttccatggcatgggatcttacccgtgacaaaatgtgttccattggtcaaaaaatggcagacaatgattgaagctcacgntgatgtcaagactacccgatggttcttgctt

SEQ ID NO: 7403 - DNA, 288 bp, Homo sapiens
  misc_feature (1)...(288): n = g, a, c or t
nccaggttccataggatcccatcagagcagattcaggtttggcttgagttatcgatattagggtcctactaggattctctaantttatatcaaagttcagcctctcttcaaactctcctgattccttttgcctcaagaaagaaagaactccaggatccttgggctgcaggacaaatatgccatactccttgtgggtggacaatatcataggattttctgtatagctgctccagatttcagatggagcatcccctggcttcatgcaaagtaacttcaaatctgctttgg

SEQ ID NO: 7404 - DNA, 152 bp, Homo sapiens
  misc_feature (1)...(152): n = g, a, c or t
nccaggctggtttnnaacttctgacctcaggtgatccatcctcctcggcctcccaaactgctgggattacaggcgtcaactaccacgcccggcactccagcctgggtgacagagtgacactctatcaaggaggaaaaaaaaaaangaaanga

SEQ ID NO: 7405 - DNA, 391 bp, Homo sapiens
cctggcccccaagaacacagtgataggattcagcatttggtgtttctaattatacaatgactacatatatatcatagacttgctctcatccattctccaccataaagtttcaatttcctcttaaaatatggcagtcaagtttagtctcattcaaaatcttatctggtcctacagcatattacagacttagactcactcttctgttttaattgatgttactgtgtagcccgaagattttaaaaaaagatttatagatatacacttgaaattctgcagtcttgaaatactacaataaatttttcttacttatgaaaagccaacaacaacaaaaaaggccaggccaggcataagacagaggggaagggaagatgaggagggaggtttgagagtc

SEQ ID NO: 7406 - DNA, 341 bp, Homo sapiens
cgagcttacattttaggagttaagttctagaggccaatgatcctttgtttggggtattgaatattatctagtatatccagtacaggtttaagagtagttgctattttataaatgttcaacatggaccagaaaagcatcagtctataaatggattccttgggcccagagctctgacagaagaaaagtttgagtgtttgggggtagtggggtggtgactgcattactatattactgcagcatttctggtttatgtacagtagcactcaataaatatatgtttactttaattgagtaggcataaatagcattcaccagaaatcctttgctggcagccagacctc

SEQ ID NO: 7407 - DNA, 219 bp, Homo sapiens
  misc_feature (1)...(219): n = g, a, c or t
gncttgcttcttacctctatgggttcacgtcattgtatcgcctccctttggatctctcccttattttgggtggaggagcttctttggctggagcctatgctgatgggaccaacgttagagctttgatgcagagaaaaatntaaattctgcaggtacatactgttcttccttcccttctttgccatctttgtagaacctgggccttttattgcagaaggg

SEQ ID NO: 7408 - DNA, 355 bp, Homo sapiens
  misc_feature (1)...(355): n = g, a, c or t
ccactgcactgaaaaaattgaaaagtcttggtttaattcatgctgatctcaagccagagaatattatgttggtggatcctgttcggcagccttacagggttaaagtaatagactttgggtcggccagtcatgtatcaaagactgtttgttcaacatatctacaatctcggtactacagagctccagagattatattggggtngccattttgtgaagccatagacatgtggtcattgggatgtgtgattgcanaattatttcttggatgggcccgctctacccangagccttggagtatgatcagattcgatacatttctcagactcaagggttgccagggagaacaagttgttaa

SEQ ID NO: 7409 - DNA, 168 bp, Homo sapiens
  misc_feature (1)...(168): n = g, a, c or t
nccactgtcacggtgtccccagccccccaggtggctgcgcactgcatcctcagtgtccagtggaaagatcgtccagtccgtgaggatattggaactgagagtcaggttagaaaccaaacccttaaaatcgttgatatatgcaccatagttcacacgtcccatgttctc

SEQ ID NO: 7410 - DNA, 440 bp, Homo sapiens
  misc_feature (1)...(440): n = g, a, c or t
nctgactatgtcactcttatgagttctgctcaggaacaagcataaaactgaataatatgacatcacagtccaagacctggtaagagttggtttctttttatttggaaataactatggtcaactttcattaatgtggaagttgactgataatgttaagagtcaaagtgaaaaagaaagcccgatcccatattcaacagtgctttcagttacaacattttttgaatttccttctctaaaacattcacagcagaggtgtccatttcacttgcctgtttcacctctagataccaccacagttgctggggtcatgtgaggtaaaggaatatatccaattgactgttagcccaacatgactatctgcaattctgatagaaaagctactttcagccatgtcttacaaagtgcttaaaagctggacagaagactttaaataaagctta

SEQ ID NO: 7411 - DNA, 319 bp, Homo sapiens
  misc_feature (1)...(319): n = g, a, c or t
nctgccggctcagcattgttcaagattcttttaaaggactggggggattttaatatccagaaaatgttaaagcagcaaaagaaaaaataaattaaaaagtcattgcaattggagatattaccaaggatgtgcttactataaagtcttcttgacatgttaattataaaatcttccaacctttggtattaaaaaaaatcatgtgaatagttgtcctatattgccttgtcatctataatttataacatagaagaaatttgctgatttttttaaaaagatggcaaacatgaatcatgactcattcaaataaaatacaaccagc

SEQ ID NO: 7412 - DNA, 121 bp, Homo sapiens
  misc_feature (1)...(121): n = g, a, c or t
tttttttttnttcagngaagtttatttcaaaaccattgaacagtatgatatttgctcatttataaatattcccatttaaataatctgagcttatatattttcagngttaattaaaggactt

SEQ ID NO: 7413 - DNA, 304 bp, Homo sapiens
ctgctgtacgtgctgctcacagactgctatgtctacctgctccggaaaggggccacagagaagccatacctggtggaagaggccgtttcttacaatgaacttgactatgtgtcggttggccttgaccagcagacggtgaagctggtgtgcaccaaccgcaggaagcagtttctgctggacacggctgatgtggcgctggctgagttctttttggcttctttgaagtcagccatgatcaaaggctgtcgagaacctccctaccccagcatcctgacggatgccaccatggagaagctggcactgg

SEQ ID NO: 7414 - DNA, 434 bp, Homo sapiens
  misc_feature (1)...(434): n = g, a, c or t
ctttgccgttgaagctgctaactaccaagacactattggccgcctgcaggatgagattcagaatatgaaggaggaaatggctcgtcaccttcgtgaataccaagacctgctcaatgttaagatggcccttgacattgagattgccacctacaggaagctgctggaaggcgaggagagcaggatttttctgcctcttncaaacttttcctccctgaacctgagggaaactaatctggattcactccctctggttgatacccactcaaaaaggacacttctgattaanacgggtgaaactagagatggacaggttatcaacgaaacttctcagcatcacgatgaccttgaataaaaattgcacacactcagtgcagncaatatattacccagcaagaataaaaaaganatcctatcttanagaaacagctttcaag

SEQ ID NO: 7415 - DNA, 363 bp, Homo sapiens
  misc_feature (1)...(363): n = g, a, c or t
ngttgatgtcgaaaggatggaagaagccaaaactgaacttcacaaaataactaggatatcagaaaatcagggagtccctgtacttatagttactaacaaacaagatttgaggaactcattgtcactttcagaaattgagaaattgttagcaatgggtgaactgagctcatcaactccttggcattgcagcctacctgtgcaatcataggagatggcctaaaggaaggacttgagaaactacatgatatgatcattaaaagaagaaaaatgttgcggcaacagaaaaagaaaagatgaatatcaatacctattatatctgtgtgggagtaaggntttctctggtctgattttgacaaataagaa

SEQ ID NO: 7416 - DNA, 143 bp, Homo sapiens
ctggatatgttttggatcatctaacactactctacatcctgttagaacttccattattacaattccaaagctgtagacatctgttttaatggaaagtttcccctgtctgatgtactcttctggcatgtaccacagatgtttac

SEQ ID NO: 7417 - DNA, 459 bp, Homo sapiens
ctgaatttctgaaagtgtttccttacaatggtggtacctggctcagggatgggcaggggtagccaaaccctccccgtgctgcccagttcgctgagggtgggagtaggaacaaaagtttaaggctgaggccactgccatgccctggatgtaacaaccaggaaaatcatgttaatcaaggaaacaaaaattcctctagactctgcaatactgcactcttaacaaaaatcaaatgaaaacaagacgtgtctgccacaggtctcaggataacagatgccctgtccactgagagcggcagttctgcagtcagagttctttgatcagccctggacccatttatcacatgggggaggaagggagggtgccctctcgcctggtcccatgatcctggcatggtgcaggttccagcgatgtcccaggcagggtggcaaagggacacccggtaggatgaggcactcagtg

SEQ ID NO: 7418 - DNA, 469 bp, Homo sapiens
  misc_feature (1)...(469): n = g, a, c or t
taaatatgcatgtgaacattcagactgggaaatgggaacctgatccaacaggcaccaagagctgctttgaaacaaaagaagaagttcttcagtactgtcaggagatgtatccagagctacagatcacaaatgtgatggaggcaaaccagcgggttagtattgacaactggtgcncggggggacaaaaagcaatgcaagagtcgctttgttacacctttcaagtgtctcgtgggtgaatttgtaagtgatgtcctgctagttccagaaaagtgccagtttttccacaaagagcggatggaggtgtgtgagaatcaccagcactggcacacggtagtcaaagaggcatgtctgactcagggaatgaccttatatagctacggcatgctgctcccatgtggggtagaccagttccatggcacttgaatatgtgtgctgccctcagacaaagattattggatcttgtgtccaa

SEQ ID NO: 7419 - DNA, 486 bp, Homo sapiens
agcgctggagctttccttattagagaaagtgaaacattaaaaggaagcttctctctgtctgtcagagactttgaccctgtgcatggtgatgttattaagcactacaaaattagaagtctggataatgggggctattacatctctccacgaatcacttttccctgtatcagcgacatgattaaacattaccaaaagcaggcagatggcttgtgcagaagattggagaaggcttgtattagtcccaagccacagaagccatgggataaagatgcctgggagatcccccgggagtccatcaagttggtgaaaaggcttggcgctgggcagtttggggaagtctggatgggttactataacaacagtaccaaggtggctgtgaaaaccctgaagccaggaactatgtctgtgcaagccttcctggaagaagccaacctcatgaagaccctgcagcatgacaagctcgtgaggctctacgcttggggtcac

SEQ ID NO: 7420 - DNA, 452 bp, Homo sapiens
  misc_feature (1)...(452): n = g, a, c or t
nccactaatgtgccatcttgagttggaaaacaaaccccctccccccaaaaaaaaccctgccgctttggtgtcctatttatatatttttaaaaacattcattaaaaaaatcaaatctataataaaaatgtccctgtttgttttaaaaaagcattagtaggcatcccttatctactaaaaccatttgtttttcctaagatgcctggaagcagaaaagcgagtgagattaactcactgcgcaattaattaaaattagaattctttcctctaaacaacttccagagcaccagaaagaagaaggggccccatcaaagggagaaataaagcccttctgactcacaggagatgaaatgttcagccagagttctaacacattctggctgcatcaaaagtctttattggattactcagaaaataactcaaggctattttaaaaatgaaagatacaggcagc

SEQ ID NO: 7421 - DNA, 396 bp, Homo sapiens
ctgccaggggggacctagagcaacttactagtttgttgcaaaataatgtaaacgtcaatgcacaaaatggatttggaaggactgcgctgcaggttatgaaacttggaaatcccgagattgccaggagactgctacttagaggtgctaatcccgatttgaaagaccgaactgggtttcgcttgtcattcatgatgcggccagagcaggtttcctggacactttacagactttgctggagtttcaagctgatgttaacatcgaggataatgaagggaacctgcccttgcacttggctgccaaagaaggtcacctccgggtggtggagttcctggtgaagcacacggccagcaatgcggggcatcggaaccataagggggacacccgcctgtgatttgg

SEQ ID NO: 7422 - DNA, 294 bp, Homo sapiens
  misc_feature (1)...(294): n = g, a, c or t
gggggggggagataaattttaaaaggtaagaaacaaaaatcctctatccaaataaattacaatctagagacacgaaacttacatacataggaaaaacttataactcaccaatgctgaacagcgatgaaaccatactgtaactagagagatgggagccaaaagagtatctacatggggtcatgttaacggnctgagtttctgtctccctgctatagaatctaaaagtaaatgaactggctggctgatgatatgccatcaaagcaggaaaaaacttgtttactgagctccttgagg

SEQ ID NO: 7423 - DNA, 414 bp, Homo sapiens
ctgtctctctctctaaataaaaacagtattttaaaaatatttatttggcttgttccatgtgtaattttttaaattgcaagatgctttaaaaaatgcatatatcaaagtcctatttccacataggaaatcaagaatggtgatgattaccaaacactactcactttatttataacactttcccctcttggtgttgtcacttttatttctgatgacaaaattctcctcagggagagatcccactgattttatttgagccattccatcttacgcttttaaaggagtaaaataaagcagattaaactgccaaggacacatccaggataagggcagggaaaagaaaagctggtactcaaggtatctaagttatttcatgtgtaaagggttttacgatgagtttaacttttggtagttaat

SEQ ID NO: 7424 - DNA, 158 bp, Homo sapiens
ctgaaccctcgtggagccattcatacaggtccctaattaaggaacaagtgattatgctacctttgcacggttagggtaccgcggccgttaaacatgtgtcactgggcaggcggtgcctctaatactggtgatgctagaggtgatgtttttggtaaaca

SEQ ID NO: 7425 - DNA, 187 bp, Homo sapiens
  misc_feature (1)...(187): n = g, a, c or t
ncnagacttcagttttcttnggggaagaagaggtttggtattttagggtagatataccctcagggctggaggctctacagcttctcagtaatttgtactgagagtgaaaattaatcttcactcactcactcatgtgtttaaatagcttttctttagtcccctcctatgtgtaacaaaatcatccaag

SEQ ID NO: 7426 - DNA, 423 bp, Homo sapiens
  misc_feature (1)...(423): n = g, a, c or t
gggggggctgangcaggagggtcgcttgagcccaggaaagttcgagtccaagctgggcaacagagcaaaaccttgtctcttaaaaaagaaaaaaaatagagttcagaatagataaaagagttgttattctaagaaaatagactactgaagggagaaaggctttaataatattaaaaatagggcaaggtaatgcttttcatagtatagtaagatttgcctaataccatcttatttctttgattaaaagttacttagcttcagcatgcgtgtacattcaaaatacaaaattaaagcatgagttgtcattaatttgcagaattctatgattgaagcctctaaatgaattgtgcaggaaagggagtttgtaaacaactgactacnnacattcccattgggtcatctttaaaanctggactctgcttt

SEQ ID NO: 7427 - DNA, 278 bp, Homo sapiens
  misc_feature (1)...(278): n = g, a, c or t
ccagtcattttaattngnngttctatttacattcccaaggtaaccacgttcagtaactctctagaggctaagctgttaaaatttccatttttatacaaatagcaaagatatttctttctctttctttctttctttctttctttctttctttcttttctttctctctttccttccttccttccctccttccttccttcctttctttctttttgtttgagacagagtttcgctcttgaccccgaggctggagtgcagtggcctgatcttggctcactgca

SEQ ID NO: 7428 - DNA, 166 bp, Homo sapiens
  misc_feature (1)...(166): n = g, a, c or t
ggagagaacgcggtctgagtggtatagtgatgccagcagctaggactgggagagataggagaagtaggactgctgtgattaggacggatcagacgaanaggggcgtttggtattgggctatggcagggggttttatattgataattgttgngatgaaattgatggn

SEQ ID NO: 7429 - DNA, 364 bp, Homo sapiens
  misc_feature (1)...(364): n = g, a, c or t
ctgtggctgnggggncgganaagcacatttttctgcngataattanaatggcttcccccatctctcacggactgtcccaagtctagaaaagaattgacntcctcttctattanncnaataaaanggaanagaatgtttgncttcctttcctttctgtagtgntaagaaaataaacgaacttaatggatnntaaattatcanngagcttaacnctgtactataaaccaaacattaccttttcaaaaagtcctttgaggngaaatattttgtatncgtaatacatagatgcacatataancccacncatatanaatctcaatattttaacncttctttgggtagttgcactaactcactaaccctg

SEQ ID NO: 7430 - DNA, 299 bp, Homo sapiens
  misc_feature (1)...(299): n = g, a, c or t
gaatattgtgaacctgctgggggccgtgcacnctgtcaggaccaatttacttgatttttgaatactgttgctatggtgatcttctcaactatctaagaagtaaaaganaaaaatttcacaggacttggacagagattttcaaggaacacaatttcantttttaccccactttccaatcacatccaaattccagcatgcctggttcaagagaagttcagatacncccggactcggatcaaatctcagggcttcatgggaattcatttcactctgaanatgaaattgaatatgaaaaccna

SEQ ID NO: 7431 - DNA, 282 bp, Homo sapiens
agagttgcatacagaccaatttctgcatcagtgttatctcgaccagaggctagtaggactggagagggctctacggtatttaatggggcccagaatggtgtgtctcagctaatccaaagggagtttcagaccagtgcaatcagcagagacattgatactgctgccaaatttattggtgcaggtgctgcaacagtaggagtggctggttctggtgctggtattggaacagtctttggcagccttatcattggttatgccagaaacccttcgctgaagcagcag

SEQ ID NO: 7432 - DNA, 233 bp, Homo sapiens
  misc_feature (1)...(233): n = g, a, c or t
ctaagttggtaatgatgcanaagctactcaaatgcngtcggcttgtcctggctcttgccctcatcctggttctggaatcctcagttcaaggttatcctacgcagagagccaggtaccnatgggtgcgctgcaatccagacagtaattctgcnaactgccttgaagaaaaaggaccnatgttccaactacttccaggtgaatccaacaagatcccccgtctgaggactgacctt

SEQ ID NO: 7433 - DNA, 112 bp, Homo sapiens
  misc_feature (1)...(112): n = g, a, c or t
ctgttggagggggccctncccaaagggtcctgnacccctcacaggggangaactgnacttgccgctcattcngacaaaggggggtgtggacgcanccctggaatatgccnac

SEQ ID NO: 7434 - DNA, 269 bp, Homo sapiens
  misc_feature (1)...(269): n = g, a, c or t
gtacttgtagaagcaaggccagtccagcatcagaaggcagaggcagcatcagtgactcccagccatggaatgaacggaggacacagagctcagagacagaacaggccagggggaagaaggagagacagaataggccagggcatggcggtgagggactgaggcccctaaattttggtcccaggggaaaggaagaggccagttggtccagttttgatggctatggggaagggaatgtattantaagcatgggggagaggatgccngcaggc

SEQ ID NO: 7435 - DNA, 264 bp, Homo sapiens
gggctccttaaccccactggtgagcctaagttgggaagcaattggctaataactggcctctcataattggattgtaatctatccctccaacagagactgacgtaagtctcctctttctcatgaaatattctgtaacttcctgcctttcttgattccttctttttctgacctcacctaccattcacaatctgtcacaccatacacctactgtgtaactatatgtttagtatgacaactgtatttgattgtgttaatgttagctgg

SEQ ID NO: 7436 - DNA, 262 bp, Homo sapiens
  misc_feature (1)...(262): n = g, a, c or t
attcttaaaacttaancatggtaaaatgttaagctgttttcatccactgatattattctactataaaaagcccttcttgagcagatttgatgataaaaaggagaacatttctaaggtataattagagaagctgttgcatgagaaatcatgtctccntctccattttgctatgcgttatctgaggattgtttctgaaagagatctatttaggcagtgtatgtatgtgtcagcatgtaaaaantaaagaactgaaaatagacaa

SEQ ID NO: 7437 - DNA, 300 bp, Homo sapiens
  misc_feature (1)...(300): n = g, a, c or t
agtggtataccaggaaattctgttctactcgtcacaaatctcaatcctgatcttatcacaccacatgggctttttatcctatttggagtctatggtgatgtacatcgagtgaagattatgtttaataagaaagaaaatgccttggttcagatggcggatgcaaatcaagctcagctagcaatgaaccatctaagtggtcagagactttatgggaaagtgcttcgtgctacnctgtccaaacatcaagcagtacagcttcctcgagagggacaagaagaccaaggtctgactaaggatttc

SEQ ID NO: 7438 - DNA, 322 bp, Homo sapiens; identical to SEQ ID NO: 596
  misc_feature (1)...(322): n = g, a, c or t

SEQ ID NO: 7439 - DNA, 376 bp, Homo sapiens
  misc_feature (1)...(376): n = g, a, c or t
aggtgattatcctgaaccatccaggccaaataagcgccggctatgcccctgtattggattgccacacggctcacattgcatgcaagtttgctgagctgaaggaaaagattgatcgccgttctggtaaaaagctggaagatggccctaaattcttgaagtctggtgatgctgccattgttgatatggttcctggcaagcccatgtgtgttgagagcttctcagactatccacctttgggtccctttgctgttcctgatatgagacagacagttgcggtgggtgtcatcaaagcngtggacaagaaggctgctggagctggcaaggtcnccnagtctgcccagaaagctcagaaggctaaatgaatattatccctaat

SEQ ID NO: 7440 - DNA, 357 bp, Homo sapiens
tcctactcacttaaagcccgcctgacagaaaccacggccacatttggttctaagaaaccctctgtcattcgctcccacattctgatgagcaaccgcttccctatttatttatttatttgtttgtttgttttattcattggtctaatttattcaaagggggcaagaagtagcagtgtctgtaaaagagcctagtttttaatagctatggaatcaattcaatttggactggtgtgctctctttaaatcaagtcctttaattaacactgaaaatatataagctcagattatttaaatgggaatatttataaatgagcaaatatcatactgttcaatggttctgaaataaacttccccccc

SEQ ID NO: 7441 - DNA, 285 bp, Homo sapiens
  misc_feature (1)...(285): n = g, a, c or t
aatctgtataagtatctgcagttgctggaataatttgaagaccccatggagctaaggagattaagtggaggattttcattgtttcagaggggcaaggggcaaatccattgctaattctttaatgatgaaaaatggtaagaagttgttaaactcctttggggattttaaaaagtgatacctnaacanaacagagagagagagaganaaatcncactagtgangctaacnaaaataatgataaaaaggttagaacaacccangatacttactggatgcctacacaac

SEQ ID NO: 7442 - DNA, 219 bp, Homo sapiens
  misc_feature (1)...(219): n = g, a, c or t
atttcaagannggngaagaatggaaagtgggcattaactgaancagacacctcttgaggtaagatttgtggaanaagaggttaaagtgtgccagaaatttgggttaccctcctctagaaagaaattccagtaatggatctgtttaagtgttaagggagcanaagagaagacggtgaatgtacttcaatattttgaacatttttagaaataggaattctt

SEQ ID NO: 7443 - DNA, 121 bp, Homo sapiens
cctctctgccggggaaaggagggagctgcggctctttgacattaaaccagagcagcagagatacagccttttcctccctctccatgaactctggaaacagtacatcagggacctgtgcagt

SEQ ID NO: 7444 - DNA, 316 bp, Homo sapiens
  misc_feature (1)...(316): n = g, a, c or t
ccagtcatgtattcntttcagcttatttccaactcngctatccttggctctgaaaagctgtcatcactggcatcactgtatctatcactacattaaaanaggaactaatttagcaaggtataaanaaaaacctggacaattattcaatttgcnatttcanacacattccatattaaccccttagtatgaganaaaatactaannaatattcttttaccactttctagtcaccacaggaagaggtcantccaatcacatncaatggcctctttctttggccncagaaactgatcacttattttcatccgtaaactgg

SEQ ID NO: 7445 - DNA, 332 bp, Homo sapiens
  misc_feature (1)...(332): n = g, a, c or t
ggaatcctngggnnanggttatcctacgcagagagccaggtaccaatgggtgcgctgcaatccagacagtaattctgcaaactgccttgaagaaaaaggaccaatgttcgaactacttccaggtgaatccaacaagatcccccgtctgaggactgacctttttccaaagacgagaatccaggacttgaatcgtatcttcccactttctgaggactactctggatcaggcttcggctccggctccggctctggatcaggatctgggagtggcttcctaacggaaatggaacaggattaccaactantagacnaaagtgatgctttccatgacn

SEQ ID NO: 7446 - DNA, 339 bp, Homo sapiens
  misc_feature (1)...(339): n = g, a, c or t
catcgataagtccaagccctggctactgctgctggagaggcaaaggaacaatcttgcctttcagcgccgtcggaaagctcgagatattctccangcattgggttcctcatagcggttgtacaagggttcaagacgctgntgcttcttctgtttgcttancttagttgggtctganaccttgaagaaggctggggcaaactccacaagccaccgagggtcgatggtggtaacttcncncatgtattccttggtggtgagcaccagctcatggtacaccncccattctggctgtctgttnaanagggcactggaaggatngatatagaccacctgctggtc

SEQ ID NO: 7447 - DNA, 375 bp, Homo sapiens
gctcgcgaaccatcatgtcatatgcatcgggcttgggtttttcctttttgtctctgttctctgacttgggagttttgtgggacaggagagtctgaatttctttccagtcttggtctagcttctccgtgagctcgagggcatcttctcgttgagcttgtctctccctcttctcttgttttgacttggcaatgagctcttcaatcagctctttccgggacttcggtttctcccgctcctcgccttcctgttgagtcttcttgtgaaggagcccaccgcctcctccaaagtgggcagcagtcagctcagcagacaacgttcctcgatcctcagcatcgctgtcactgtccacaatgtcattatgcttctcgatgtctg

SEQ ID NO: 7448 - DNA, 262 bp, Homo sapiens
  misc_feature (1)...(262): n = g, a, c or t
catccccccaccaagcacggtntcagattaggttattacaaagggcgagggggaggagggcatcccangagtctaacatccnacccnacctatgcagaatgacgggtgaccncgccctgacccagccacacncttgaaccctgggacttcagtgaggtangtggtatcacccccatttcacangtgggcaanctgaggcacaatgaaatgcaatanctcgtttttaataacaacatacnaaagtgtggagaaagcccccaaa

SEQ ID NO: 7449 - DNA, 361 bp, Homo sapiens
ctgtttcataggggttgttggtttcttcaagttgtctctttctgatggcaatcatttgacgtccaggtggctcaaattgggcagccttcacaggatcagtggaattggctgaaatccgctttttcctgcagtagatcaaggccactacagcagcaacaatggctgctacagcagtcgcaatgaccacagccacaatgatccccatcggtgaagagctgcccatgctgggcacttggacagtgatggtcacaggcttggatgagaacagcgtgtagcctatgtttcctgtgcagtggtaatcaccactgtgactgtggtttgcttgtgggatggagaaggtgggatccaaatgggagaattt

SEQ ID NO: 7450 - DNA, 101 bp, Homo sapiens
  misc_feature (1)...(101): n = g, a, c or t
ccatttaagggggngtagtaaaagactggttaatgataacaatgcatcgtaaaaccttcagaaggaaaggagaatgttttgtggaccnctttggttttctt

SEQ ID NO: 7451 - DNA, 326 bp, Homo sapiens
gttgtttcagaggtgctcacaacttcaatgaggccagagcgatctcctgttgctaaacagccataaggcaacatccgaagatccaaaccagcttctttccagagtaaatccatcaagcgcaacatttggagtgtcaacatatcctgtcgtaaatcatcaccatttttaaaaatcactccaactgaatcctcaccaaataccttgttattgtataccagccacaaaggcttcattttggaatccatgtatttgcacttttcaacatagagttctgagaggataacacatgggttcaggggtgactgcaggtcagagagggcttcccg

SEQ ID NO: 7452 - DNA, 160 bp, Homo sapiens
tacctcccacaaggattaccccttccatgaagagttttgaagctgtggttgcctgctcgtccccaagtgacctatacctgtgtttcttgcctcatttttttccttgcaaatgtagtatggcctgtgtcactcagcagtgggacagcaacctgtagagtgg

SEQ ID NO: 7453 - DNA, 347 bp, Homo sapiens
  misc_feature (1)...(347): n = g, a, c or t
caaagcaccccatattcttntgaacctaaaggggnntcctcctcaaagaagcatgttttcaatccctaaactttggggccagatacagctccaagtggcatttattgctctttggagagtcaaagccaagccaccatgagcacgaaagctgtctgagaccctcctcccctcctccccagcatggagagaataattgccatttcaccctacaaatccgaaagagtctcccccttccgtgggtttaagcatggacacaagccaagcaagcctcagatacccaggcctgtttgattgtagctatgttggtgtatctcgtgtacaanatggaaaagtgcttttgttgttct

SEQ ID NO: 7454 - DNA, 101 bp, Homo sapiens
  misc_feature (1)...(101): n = g, a, c or t
ngantngggggnttttaaaaaattagaggnaattaaatagtgatttattntanctataagtaaaggtttaaaaagagganagatgatttnananaangaat

SEQ ID NO: 7455 - DNA, 353 bp, Homo sapiens; identical to SEQ ID NO: 427

SEQ ID NO: 7456 - DNA, 376 bp, Homo sapiens
cagcactttgggaggctgaggcaggcagatcacttgaggtcaggagttcgagaccaacctggccaaactactttcatcgaagttgctggaagcctttctctggttttggcccctgtaggaagttaatctcatattcccttagcaataatataaggtcactgtttcagtcctacacacttttatattcaatgggcttcttagtttatcacataaggactggcacttttttcaaaagaatattgctaacagggttaaatgagtgctaatggctgaacgtttgccaaatgcttacttctgcgatagtataaatatggattattaaagttgtctactcaagtataaaatatatgcaaaactctcataggcaaaatgttca

SEQ ID NO: 7457 - DNA, 245 bp, Homo sapiens
  misc_feature (1)...(245): n = g, a, c or t
ctgacagcggggncttgcatttntttacccgngnatntacanatatcatttcttgtgtatgccatgacttgaaaaagtttgggaagctctttagcaatatcagctaaaangatatgaaatcacangtgatagcagttgncattcagtaatttcctacaagcagcaccccaaaggaaatatagtcctaatctttactatccacttctaaatttaatgtgaatttcatacatgttattagttgtttt

SEQ ID NO: 7458 - DNA, 316 bp, Homo sapiens
  misc_feature (1)...(316): n = g, a, c or t
tttagaattaggggtaaaaaggcanaattagtatagagtacattcattaaacatttttgtcaggattatttcccgtaaaaacgtantgagcacttttcatatactaatttagttgtacatttaactttgtataatacagaaatctaaatatatttaatgaattcaagcaatatatcacttgaccaagaaattggaatttcaaaatgttcgtgcgggtatataccagatgagtacagtgagtagttttatgtatcaccagactgggttattgccaagttatatatcaccaaaagctgtatgactggatgttctggnt

SEQ ID NO: 7459 - DNA, 305 bp, Homo sapiens
  misc_feature (1)...(305): n = g, a, c or t
ccttttgatangggnttttttaaaaaacaaaattatagaagtttaanaatttaattcaaatttggaggggttttnaggaaattttnacaaaatggctngttggtttnanctgtttcctacntttgntnttgnagnaaatgggnacaggnttgnagtcaaaacactngnaattttgnatcttgatgtctttgttaaaactgctgaaaaatnattttttttnttttataataaggaataaacccccacctttattccttnntttcatctnccattttctggtcttggggntggctgtggcangcccc

SEQ ID NO: 7460 - DNA, 178 bp, Homo sapiens
aggcacactcagtattgcacttcattaaaatttcaggctcaaacttaacctagaagtttaaatgaaattgcatttgtaatttagtaattcttatacaggacaaacattgatatgtttatatacagtgtgatacttattacatttatatgctgtcctaacacaatgttttttttttttt

SEQ ID NO: 7461 - DNA, 144 bp, Homo sapiens
  misc_feature (1)...(144): n = g, a, c or t
tattttcctaactccatctcctaaaaaattccacctcattctgctcaacccaccacggcattcttgctgttcttgaacatgccaagcaggcccagggcctttgcattcactgtttattttgcttggaatgctctccccccanac

SEQ ID NO: 7462 - DNA, 116 bp, Homo sapiens
  misc_feature (1)...(116): n = g, a, c or t
aaataggaactacaaatttanatgactctcttttgggttttatcaattttcatctgctgttacattagtattatgngcactgaattaaggtattgaaattcaatcacttcattgat

SEQ ID NO: 7463 - DNA, 355 bp, Homo sapiens
  misc_feature (1)...(355): n = g, a, c or t
ccagtgatgctggngctgtgacttttgcagatcagatatttggaatatttaactggataattccactgtcagttgcattatcctgttttggtggcctcaatgcctccattgtggctgcttctaggcttttctttgtgggctcaagagaaggccatctccctgatgccatctgcatgatccatgttgagcggttcacaccagtgccttctctgctcttcaatggtatcatggcattgatctacttgtgcgtggaagacatcttccagctcattaactactacagcttcagctactggttctttgtggggctttctattgtgggtcagctttatctgcgctggaaggagcctgatcg

SEQ ID NO: 7464 - DNA, 528 bp, Homo sapiens
  misc_feature (1)...(528): n = g, a, c or t
gtgcttctgccacctatggggtcgaggcaggtgtggtgccttggctaagtccacagacttctgagaggcccacgctttcttcttctccagaaataaaccctgaaactcaagcagctttaatcagagggcaggattccacgatagcagcatcagaacagcaagtggcagcgagaattcttgattccaatgatcaggcaacagtaaaccctgtggaatttaatactgaggttgcaacaccaccattttcccttctggagacttctaatgaaacagatttcctgattggcattaatgaagagtcagtggaaggcacggcaatctatttaccaggacctgatcgctgcaaaatgaacccgtgccttaacggaggcacctgttatcctactgaaacttcctacgtatgcacctgtgtgccaggatacagcggagaccagtgtgaacttgattttgatgaatgtcactctaatccctgtcgtaatggagcccttgtgttgatggttttaacacattcaggtgcctctgncttcc

SEQ ID NO: 7465 - DNA, 486 bp, Homo sapiens
  misc_feature (1)...(486): n = g, a, c or t
gttgtgtgtctgcaaacaatatgtgagccgaacatcaccaatgcctcctgaaaatgggctctgactcacttcctttttttgccaagataggttttgctttgttgtttttttctaaattgtttttgcaaacagggcataacaggtaaaaaaatactttgtaagaatattattttanaaaacccaacacaaaactgcaaatacagctccggaagcccttctcttcaactgtggttagtttgtttttgtaccttttaccccaaaggaaaaaagntggcatcttgttacttatttttatccattacattcagcacctcatccaaaagtgagggcccaagatcaagctgcagggagaggagggaacctgtaaggtcagagagggactcctctgacttannctttcccttgatgagctccnatggggtgggatggtcaaacntgtcctcggntggacctgccgggccgggccgctcgaaagcccaattcccc

SEQ ID NO: 7466 - DNA, 384 bp, Homo sapiens
  misc_feature (1)...(384): n = g, a, c or t
tatacaactatagaggatgnaatttttgacctattttaaatattgtcattctaaaataagcatgtaatatcactttcaggatatattcagtggaatctaaatatcatagtggtttnacctcttacatcattcttttaaaagtagtcttttattaagagtcnaaaattttatatttttgntttcnntggactaattctaaaatntaacttcctcttacngaatgttatcaaanattatatagctatatgcttanaantcttctattgattaagccctccaacttaagtacntcaaaatttgtactttnaagnttaaatncttttttccttgtgaacataatcctataanctaaaattttcctggaccnagctatttttgtagctc

SEQ ID NO: 7467 - DNA, 436 bp, Homo sapiens
atcccaaaaattacccaaagaagaagatggaaaagcgatttgtcttcaacaagatagaaatcaataacaagctggaatttgagtctgcccagttccccaactggtacatcagcacctctcaagcagaaaacatgcccgtcttcctgggagggaccaaaggcggccaggatataactgacttcaccatgcaatttgtgtcttcctaaagagagctgtacccagagagtcctgtgctgaatgtggactcaatccctagggctggcagaaagggaacagaaaggtttttgagtacggctatagcctggactttcctgttgtctacaccaatgcccaactgcctgccttagggtagtgctaagaggatctcctgtccatcagccaggacagtcagctctctcctttcagggccaatccccagcccttttgttgagccagg

SEQ ID NO: 7468 - DNA, 453 bp, Homo sapiens
  misc_feature (1)...(453): n = g, a, c or t
aggggacttccacacctcctgcctttaggccatgggtggaaagtgctcagtgaagtacacctgtgtggcccagttctgaaagctttatacagttgaattttaagtggggttgataacaccttggactgttagtgttaaaaatctantgggttgacctttaaatgcaacagtttttaaaatatattgctgcattttatagaatagtaaaggtaccattatacttganattttcctccatttttatttcttccngaacntagagnttggggccgaaaatgtttttaaagtatgtgtttgagttaaatataaagttggttcncttcaaagctaaaaaattgttaaacttgcngcttggtattgcaganaagattttataanaattttgctttanagaatgccctttggctgaactaccantgtangccnccattataatttataaatacngcatac

SEQ ID NO: 7469 - DNA, 219 bp, Homo sapiens
agggaggctctaagctaggggcactgcatggtgggacaggatggccccttgaggactgaaccctggggagaagacaaacagtaataataaaaacaaataacaagtactttaagaatggattgtatgacctatagtgacagatgacatcactaatactgaaagcttcttatattaataattttggcaaaatgtcattttgtaatatagtatatgctttcc

SEQ ID NO: 7470 - DNA, 273 bp, Homo sapiens
  misc_feature (1)...(273): n = g, a, c or t
tggataattctctaccctcaccccacagagccatctctctccagaccaaaagctggaaggagagttgctttgagagcttgtttttacaactgcatgtttattatgatactttctctccaaaggaaacttttaaatcaatgggaacaattagcaacagaaagagcacagtccctgcttttgactgggttcctattttaagcacaaatgagagctctggagccagaatgccngggttctaacttcagcattcacttactagctgtatgatcttgg

SEQ ID NO: 7471 - DNA, 553 bp, Homo sapiens
  misc_feature (1)...(553): n = g, a, c or t
gagagaagctcctgaaccaaccatttgtcaggtctggggacaagactggaagtattgactcatttgcaaggaaactaagtgggtcaacaatgaaagaaggtaataggacctcatctgcaatcctccaatttatctgcaggataaattaaatgcctaaaaaagaaacttattttttaaagtatctgctaccatcaggaaaccaaataaatagtcagtctattaatttcgttcttaaataattccgatcctttacctaatttcttgagccatttaatcatctcaactctaccttagaaccctcccaatgttttccaaatctgtcttactgggaaacaaagattaaaattcctaataaggattattttgtggatcttaatttctagattcccattttaaaattttaattccattaatttcttaataatagcattctattactgattgaatcatctctaataagccatcataatttccagaccatttctaagaacacgagctgatattgaaatgtttactaatgaccngccccgggcggcccgctcaaaacccaatt

SEQ ID NO: 7472 - DNA, 465 bp, Homo sapiens
  misc_feature (1)...(465): n = g, a, c or t
ggcactacagttactaagcagcctttggattctttgtttttgaagttagatcttttcagctattagtggaaaatgtgcctcactctactccaggattaccaatagaaatgaaaggacagaaatggcattagtgtttagagaagattatgtatatatggctgtgtgaacactgaaaattatgagggtcaacataaaatcagcattacaggtactaaaacataaatcctgatggctttcaccgttttcttaagagcaaaattgcaaaaagtgatattaacagtcatcctagacgaatatgagcaaatgatttgtttttccttaaaagagcctccaagtgtattgtgatcattttcacactgatcaaagagagcacccttctgtcaacaggtatctgcngttttcaggacctggcanaaattcttctatgttctgcctttaaaggtcaggtaccaaaagcagagacag

SEQ ID NO: 7473 - DNA, 500 bp, Homo sapiens; identical to SEQ ID NO: 271
  misc_feature (1)...(500): n = g, a, c or t

SEQ ID NO: 7474 - DNA, 531 bp, Homo sapiens
  misc_feature (1)...(531): n = g, a, c or t
aatggttctgacttaaataggttgttgagcaaggagatctcacattttaaagaatattttcagagggagaatttgagaaggggggagaaaaaaacaaacaggaatgaacataaaagtataaaattctanacaacccactaaaccagttagcaaaaagaggagctcttaattgaaatagagaatttccccaaaaaaaggtctgaatttatttttaaaacattagatttggaaaatacctaatttgaaagtttaattttcatatatacgtcaaacctgcttttagggtagtttagtcaaagctgaaacaaaacaaataaaattctggcttatatatctgatacttgaataaggactctgaaaaaaaatgttcccgttttttttctcgtcngcctaagatatatttttgacattacataaatttcagtgatatgatctggctcctatttaacntttatgccctttctcttccaatgntaacttttaattttctcctcttcttctagctgggatcnttaaaaaaaacngaaaact

SEQ ID NO: 7475 - DNA, 251 bp, Homo sapiens
  misc_feature (1)...(251): n = g, a, c or t
tcaccatggagtggtgagggtccgaggctgagacgtgtgcagatggaggagaatgggcagaggagcctgtgggttttctctgactctaggtccccactccagcaagacagcgccgctgcagcttggcccagcaagttcctccttgcagtttgggggtcaaagccacagttcatatgaaacaaaatgttcctctgcctggtctggtcctctctttgtgtattttcctanaggacctcacagtgggtgagtgg

SEQ ID NO: 7476 - DNA, 450 bp, Homo sapiens
  misc_feature (1)...(450): n = g, a, c or t
tgaatagcgtttccagccgaaccaaacaccgaacaaaattatcaaaatcgatgatgagctggtcatctgcaaaccgagcaacgatgacttggtggagttgacagggcatcttgaaacctgcttcttctaatgccttccgcatttcataggaattcatggtaccagacctgtcaacgtcgatttctcggtaaattttttggtatttttgaatcttcntccagagaatgtagaactccttcagccccagcttgccactcccgtccgaatctagcatgtcaaccataattttgcatgtctcgatgctgaagccatctgacttgatatcttggcgctttgctanaacccttctcaggatggtctgcagctcaaaggcaganatctccgcatcctctcctgccaactgggcaaacagtctcctgaatccatcatcaatgtcatccctcgcttgat

SEQ ID NO: 7477 - DNA, 477 bp, Homo sapiens
  misc_feature (1)...(477): n = g, a, c or t
gaagacagcatctaagctgtgttcagccctgactctttctggtcttgtggaagtgaaagagctgcagcgggagcccctaacccctgaggaagtacagtctgttcgagaacaccttggtcatgaaagtgacaacctgctgtttgttcagatcacaggcaaaaaaccaaactttgaagtgggttcttctaggcagcttaagctttccatcaccaagaagtcttctccttcaggtaaggctggcctagggacattcttctgtttgaatgggcttagagggacatgttagaaattgagccagcaataaatgagatggtgatatttttagaggattagtcctttgatttctgccatttccacaaagaagaatacttaatgtattattatcatgggcatattaggatccaaaactgaaataatacataggtattatctagttcagctncttcttctgcaccagaagatacccgaggacctcgc

SEQ ID NO: 7478 - DNA, 420 bp, Homo sapiens
gcacccaaaatggcaccacccaaaaaaacacaacctatgtcgggttcggatttttaagaagttatttcagttaagcagacactaaagtacaattatacttggcttcttgtggcataaatgatcttgaattttaagatcatttggcttttacctatttagaacaaaacagtctatattttcctgtacttagaagttggaaatgaaataatttttaaagcccacaggagattaatttgtactaagtcattactatgtatcaggcattgtgcttggtgctttctagtcactgaaggagtattaaatatgtgaaatgcctgtcacagtgacttgcatgtggcaatcactcaaagatccccttctttaaccaatgtggtgaggttgtagtattattataaatttttaattatataacaactgagg

SEQ ID NO: 7479 - DNA, 389 bp, Homo sapiens
  misc_feature (1)...(389): n = g, a, c or t
tgtaacccacctcagggtgggaattctttgcatgggatcgttcaaagttctgagaaaagcccaatgtaggtcagacacgactgctccttggactggggaagactttccttggttgtcagtccatagtgggcaggcggtcggctgcacagcggaatcccagattcnaagcacanctatcaggtgtgttctggctccgagcagcacagcgatacctgtaacaataagacctatggcacatgtaggatccacctttcttcnctcggtctttcccagaagggggaccttttgggttaagcgtttcttcaacagaatgatgaacagtccaccagtctgaagnccattcccatgcgttccccnctatgttgnatangccataaccattgggaggg

SEQ ID NO: 7480 - DNA, 511 bp, Homo sapiens; identical to SEQ ID NO: 272
  misc_feature (1)...(511): n = g, a, c or t

SEQ ID NO: 7481 - DNA, 101 bp, Homo sapiens
  misc_feature (1)...(101): n = g, a, c or t
atgtgatggtgtccaccttccacaagtactcgggcaaagagggtgacaagttcaanctcnacnagtcntaactaaagganctgctgaccccnggagctgnc

SEQ ID NO: 7482 - DNA, 117 bp, Homo sapiens
  misc_feature (1)...(117): n = g, a, c or t
ataggtggaggnatcccatattctccacatttttanctctgtcangctgctccctttccnccagtcctatccantgatactgcagacaaagggtgaggcaacaggagacatcatacc

SEQ ID NO: 7483 - DNA, 101 bp, Homo sapiens; identical to SEQ ID NO: 273
  misc_feature (1)...(101): n = g, a, c or t

SEQ ID NO: 7484 - DNA, 415 bp, Homo sapiens
  misc_feature (1)...(415): n = g, a, c or t
aatactctaatgggagaaggaatttgttcacttgttgaacttttcgttcagttggcaagggacttaaaattggggccttatgtagatcattactatagagactacccaacgcttgtcagaactactggacnagtgtgcacaattgatccaggtcaaacaggatttatgcatcntccatcattttttacctctgagccnccaagtatttatcagtgggtgagttcttgtctgaagggtgaaggaatgccnccttatccttacctccctggaatctgtgaaagaagcngacttgtagtcttgagtattgcactgtacatacttggtgatgagagcttgntttctgatgaatcctcacagtatttaaccccaataactatacccccccnnaagttgccagtagaacaagaggaaaaca

SEQ ID NO: 7485 - DNA, 176 bp, Homo sapiens
  misc_feature (1)...(176): n = g, a, c or t
gctatgacctggantttgctaacagcnccatgaagatccctgaagctgncaaggtgtcccattcnacagcacagccncntgcctctgcantacatctaccccctgtttctggagcacgatctcancctgggaaccctngacctccgncgcgaccacnctaaccccaattccagcac

SEQ ID NO: 7486 - DNA, 180 bp, Homo sapiens
  misc_feature (1)...(180): n = g, a, c or t
gtacctccttatactgagtgtgaccaccctcagcctcttgctcgccccggtgctgtggagagctgcaatcaccgaggtgtgtgcccagaccggagagacggtccagcctctgatggctcngagatgatggaccgtggaagggaagcntctgtggggagtgagcgcttanatggccagcag

SEQ ID NO: 7487 - DNA, 224 bp, Homo sapiens
  misc_feature (1)...(224): n = g, a, c or t
agccacatgctgggccctctaggtctctccngcccactctaaggacccaanaaatgcanccccagtccatntctcttttttctctccttccgggggaccaaggtaccttctggggcatacaacatggcagcagggccctcnggaagaggggtaggaggaccnagcaccattctctgtanaggaagacnggaaaggagaccctcttggcncacatttatggaggg

SEQ ID NO: 7488 - DNA, 176 bp, Homo sapiens
  misc_feature (1)...(176): n = g, a, c or t
tcccagggcacacactgttcttgcccttttctccattggggttggatttaaagatcacataggtggctgctcanaggagctgaggagaanctccatcctccccatgcaccttcaccaggtggcctaaagagcttccctgaaccccacactcagtagcaagatgaggcttcattctt

SEQ ID NO: 7489 - DNA, 352 bp, Homo sapiens
  misc_feature (1)...(352): n = g, a, c or t
cctgagactggatctgttcaaacagcaaacgcccacagatggcccagaggtggtggtantcanggtgtgtgggtgtttttanggttctttactgttgtttctttcacccaggggtggtggtcccacccagtttgntgctgacggngacaggaaattanaatctgtttgcaaattgtccnacccacccccctcaacatgaggggcttccattttctgtgttntgtaaggnaactgtttccttcatgcccccatgttcctgatnttacttctgatttctttttaaccnatgttatcatgattaacaaaatttccccccctttaatgacctccgccgcgaccccctaancccaat

SEQ ID NO: 7490 - DNA, 382 bp, Homo sapiens
  misc_feature (1)...(382): n = g, a, c or t
cctgcaataaccatctcacctataccctgcaagaaaggaacagttgcttgcggccanccccctgttgtagaaaatgccaagacctttggaaagatgaaacctcnntatgaaatcaactccctgattagataccactgcaaagatggtttcattcnacgncnccttccaactatccggtgcttacgaaatggaanatgggctatacctaaaattacctgcatgaaccccntctgcntaccnaaggacttattctatgaaatactttaaaaattcctcntcaccaaaggacaattcnataaatacctcccaacctnatcntccttggagcccgaggtggcangagtccacgccctgatccctaaaatggccaacatgtgttttc

SEQ ID NO: 7491 - DNA, 117 bp, Homo sapiens
  misc_feature (1)...(117): n = g, a, c or t
aaaataaaaatcntcaataattttatcncccaccaaacaatcacttttaatgtgctggtacaggttagtctattttaacntttctgaaatcntatacatttacatgattgttctcac

SEQ ID NO: 7492 - DNA, 101 bp, Homo sapiens
  misc_feature (1)...(101): n = g, a, c or t
catgancaccctgcnataattagagtttccccaataantttacccaactatcaacctttattactacttatggcttatngtntnntttaatgtctttttta

SEQ ID NO: 7493 - DNA, 160 bp, Homo sapiens
  misc_feature (1)...(160): n = g, a, c or t
gtaagactaaatatttccatgtgaaantcttccgacatcaacttgaaagagaaatttgtaaggaagaangtcattaccatatctnattactctgaatgtaaaggagtaatggaaataaaggaaccntcatctgtgtctgactttaatcaaaattttgagg

SEQ ID NO: 7494 - DNA, 184 bp, Homo sapiens
  misc_feature (1)...(184): n = g, a, c or t
ttcagcgagggaccatcaactgcaactttgcgggggttgccttgggtgattcctgnatctcccctgttgattccgtgctctcctggggaccttacctgtacagcatgtctcttctccaanacaaaggtctggcanaggtgtctaangttgcacaccaagtactgaatgccctaaataacgggct

SEQ ID NO: 7495 - DNA, 297 bp, Homo sapiens
  misc_feature (1)...(297): n = g, a, c or t
aaaacccaaactaggctgatactcctgtnttgacctgaggtcattctgtgcctgtcaaaccaaatancacattcaatcttttgtatattttgaagactcacaaacccanaaatttttacaacctctttctcactctaattaaaacctactgctctgtcaatgggaaagaatgagtccnaacnttctgaaaaccgtacaaatgtgtttacattttagtgggggcttcctgcatctttaacctctttaaattnacatacgtaanatcttgtgtaataacccntttncaaatatgcagat

SEQ ID NO: 7496 - DNA, 111 bp, Homo sapiens
gtagtaaaaaaaaaactcaggctgtctttctggaactttcatgctacatggaattaactgttccaactgggtagcaaatgctatggtcactgacataataaaggactcacc

SEQ ID NO: 7497 - DNA, 134 bp, Homo sapiens
  misc_feature (1)...(134): n = g, a, c or t
atggtctccgatctcctgacctcatgatcccgccaccttggcctcccaaaatgctggnattacaggccgtgagcgaccgcccccggccaattcaaactatctttttaaagntatatgagtgatggaatgctaac

SEQ ID NO: 7498 - DNA, 101 bp, Homo sapiens
  misc_feature (1)...(101): n = g, a, c or t
tgtaatngtgggttctgatnatacncatagcccctaattgacagcctttagtacttgttaccttctgttctaagagttttatgtntattaactcaccnaag

SEQ ID NO: 7499 - DNA, 392 bp, Homo sapiens
  misc_feature (1)...(392): n = g, a, c or t
atggaagagccgggaacngagaagtgtggggaagagataggaaccngcaggatggcaggggcaaagggctcaagggtgaggaggccantgggaccccacngagttggggagataaaggaacattggttgctttggtggcacctaagctccttgtctgtctccngcacccngaatctcattaaagcttatttattgtacctccaccgnctgtgtgcnatggggtcttttgtggaaatcaaggancncacaggnttcatgtgtactgtcnccncntgggatggaacccgaggcntggaancaanaccctaaatgaagagggcctaacggctgnnattccccgcccccttacgaacnncttgtctttttttttcctctccnnaaaaaatgtttaa

SEQ ID NO: 7500 - DNA, 350 bp, Homo sapiens
  misc_feature (1)...(350): n = g, a, c or t
gggacatctatttggggatcaacatcnccnacngcgaggaagtggcagtgaagctagaatctcagaaggccaggcntcccccagttgctgtaccagagcaagctctataagattcttcaaggtggggttggcatccccncatacggtggtatggtcaggaaaaanactaccatgtactantcntggatcttctgggacctancctccaagacctcttcnatttctgttcnanaaggttcacnatgaaaactgtacttatgttagctgaccnnatgatccgtagaattnaatatgtncntaccaacaattttatacnccgagaccttaaacccgataacttcctaatgggt

SEQ ID NO: 7501 - DNA, 104 bp, Homo sapiens; identical to SEQ ID NO: 428
  misc_feature (1)...(104): n = g, a, c or t

SEQ ID NO: 7502 - DNA, 117 bp, Homo sapiens
  misc_feature (1)...(117): n = g, a, c or t
aagcgtgcatggcagaagtggagagtaagtaacacccaacaagtcngggtgggcactggatcaattttggggaccngatggaccccagtgggaatgctggctctgccactgcaatgc

SEQ ID NO: 7503 - DNA, 373 bp, Homo sapiens
  misc_feature (1)...(373): n = g, a, c or t
gtcaagtatacggtatgctctcaaaaaaatgttagctgtggtttttattgncttattataattagtaattctttcnaattaataatataagcttttacacacatatcataaaagttattaaaattattanagatattttgagtagngacgctgaagaaagtaaaagtggaattcctaantcatacttgaaagtatcnattatatttatagaagatcagtcctactttcaaccnccaagcccngcangaattgaaaacccactggtcaacatatgtcnatgcacatggaaaaaggatacnactgtctttaaattccctaaagaaagctgagtggagagccttctggtcactgcagtccnacctatcattacncn

SEQ ID NO: 7504 - DNA, 409 bp, Homo sapiens
  misc_feature (1)...(409): n = g, a, c or t
ttaggtggttttagctcttatctggggtatgaaagcaatttagctcatctcacagaaacaaaagcnggtgctgaatcatgaaaacctcaattatttttancatgcctcttaatttttctttcccctggtttcttgtcgtctgtgcttgattcttgaacaggtaaccacttgagaggatgccggcgatagatgggccntggaggaagtgtcancaaacatgaaaaagcaaatccggccntaactatatagacagtccaccccaactgttcagccacgtacccntagataaatccnactattgcagaaaaaagaataattccctgaaacatctgttcnnctagcttctggcccttgtaatccatctgctgggcagcgagctcagatgctccagcntggntggctgaggagg

SEQ ID NO: 7505 - DNA, 321 bp, Homo sapiens
  misc_feature (1)...(321): n = g, a, c or t
ctttaagaatgagagcctgggcatggcctttctgcacctctgtcacctccctctccgccntggcatcccccctggaggaggtggccntatgtgtaacctgtaccnaattaanctgttttaaatttacagactacaagcaactgaacccnaatgtctaaatgtacnttcttttctgtactacatttcacctaatattgcagaactaatgacaattttaaaagttnctattacccnattctgtctactgtagcaagataccttaagttacaaccaaatcttacctgccccgncngccnctccaagccccaattcnncacccct

SEQ ID NO: 7506 - DNA, 191 bp, Homo sapiens
  misc_feature (1)...(191): n = g, a, c or t
gagtgaacagccccgcttggctgtggcatctcagtcctatttttgagtttttttgtgggggtacaggagggggccttcaagctgtactgtgagcagacgcnttggtattatcattcnaagcagtctcctcttatttgtaagtttacatttttaccggaaactacnaaattattttgggtgggttcagccca

SEQ ID NO: 7507 - DNA, 441 bp, Homo sapiens
  misc_feature (1)...(441): n = g, a, c or t
tcaggtgattatcctgaaccatccaggccaaataancgccggctatgcccctgtattggattgccacacggctcacattgcatgcaagtttgctgagctgaaggaaaagattgatcgccgttctggtaaaaagctggaagatggccctaaattcttgaagtctggtgatgctgccattgttgatatggttcctggcaagcccatgtgtgttgagagcttctcagactatccacctttgggtcgctttgctgttcgtgatatgagacagacagttgcggtgggtgtcatcaaagcagtggacaagaaggctgctggagctggcaaggtcaccaagtctgcccagaaagctcagaaggctaaatgaatattatccctaatacctgccaccccactcttaatcagtggtggaagaacggnctcagaactgtttgtttcaattgg

SEQ ID NO: 7508 - DNA, 548 bp, Homo sapiens
  misc_feature (1)...(548): n = g, a, c or t
gacaatatcctggttaatgaatccaaanctattttaaagctttgcgattttgggtcngcttcacatgttgcggataatgacacaacaccttatcttgtcagtagattttatcgtgctcctgaaatcattataggtaaaagctatgactatggtatagatatgtggtctgtaggttgcaccttatacgaactctatactggaaaaattttattccctggcaaaaccnataaccatatgctgaagcttgcaatggatctcaaaggaaagatgccnaataagatgattccaaaaggtgtgttcaaagatcagcattttgatcaaaatctcnacttcntgtacatagaanttgataaagtaacanagagggagaaagttactgntatgagcaccattaatccnactaacgacctgttggctgacttgattgggtgcccgagacttcctgaagacccacgtaagaaagtacnccanctaaaggacttgttgggaccncattctgatgttggacccccctaaaccnaattagccatcaacccaggncccctacc

SEQ ID NO: 7509 - DNA, 476 bp, Homo sapiens
ccttattaaagagcaacttctatttccagtcgggggagtaacactaaagctacaagaaatatgtaataatgataggtaataatgtgttccaaagctttttcaaactagaataaggaggcaaatagaagaatgagatactgatgtccacagttcattggcagaatctaaccccttctgttatcttttttaatactatttttgtttagatagaagtttcaaagaagataaaaatgcttgaagagcctgagagtaaaaagattatgctgcaaagctatgatataaactgctcttgcagtccaaagggatacctgattaaagaagtttcttatttaaacatctcagacgcaaaaattacattaaatttttgtatatttcaacaacattttaaatgtattttgttatgtttgtattatataggataaagcaaatgtcaagttaaaatgtattgtgttgtttgtaaagtaagaagttactgg

SEQ ID NO: 7510 - DNA, 476 bp, Homo sapiens; identical to SEQ ID NO: 7509

SEQ ID NO: 7511 - DNA, 642 bp, Homo sapiens
  misc_feature (1)...(642): n = g, a, c or t
gagggtcaatagtgcagtcagtggtgacatttttctttattttgcaaaatgcttttaaaaccaaaggctgctctagttgatggacagtatcagtcttgatctaaattgtaggacactttttcatgtaacataacatttggggattgggtttatttagtgtaatgaagataatttgatataaaaatattttgtgtatatatatatatttttactttgttttctaaattgctgtttgcagtaacagtaagcgcaaagcaaaatatataagttatgactgtatgatcagatgaagtatgagttcttttggtttgcatccttaaatagttagagatctctgataaaaactttggaatctttgcaaaacaatacaaaaatgccaaaatgtgagcatgtcaatgaaaactaaagacaaatacttcactctttttcatactattataagttattctggtattaaatatgttaataaaagtgtttttgtttttacatatttcagttaaatgaatgaatgctggttgtattttatttgaatgangtcatgattcatgtttgccatctttttaaaaaaatcagcaaattcttctatgttataaaattatagatgacaaggcaatataggacaactattcacatgattttttt

SEQ ID NO: 7512 - DNA, 251 bp, Homo sapiens
tcggggtcagctagtgtcctctctgctcggccgcgggctcccggaggactgcaggcaggatgacgcaaaacacggtgattgtgaatggagttgctatggcctctaggccatcccagcccacccacgtcaacgtccacatccaccaggagtcagctttgacacaactgctgaaagctggaggttctctgaagaagtttctttttcaccctggggacactgtgccttccacagccaggattggttatgagcag

SEQ ID NO: 7513 - DNA, 636 bp, Homo sapiens
ccatcttaagttaaagaccctttatcataaaatatatggttttaaattttactcaaattgaatttataatccctatgacttccctacatatacataacaaaagagtgtagtaaaattagcaaatactaaactatattgataatttatcattcttagtttgtggtttttagaaacagtacacgcacctaatatatgtcgattccttggcttattagttgcagtgtacaatgcaacaaaatacaaaatacatgcttggtgaacattcgttcatatctacaagacggcagctagagattaggtttcaatactgaccatttactatcctacaagcaattagcattacatcataatatgccatcaaggcaactttttttatactgaaaaaatcaaaataaaaaccgttatttgtaaacttttatacgaaatgtaactcttcaagtggaaataaaaaataaaatttgtctatttactattgaatacacataggatttcaattttcattataccgagaaaaaagctcttttgtgttgggaaaataatgcttcaaaaaataattagtagaaaaacccctagtataatgttttgtcctttcaatgccagcacagatttgggaacatactggaggatgaagttata

SEQ ID NO: 7514 - DNA, 640 bp, Homo sapiens
ccaactctagtcatacttggacctcgtggaaacatgttgttttctttgattggagagggacacaaagataaattatttttatatacttcaattgctttaaagtattacaaagacagggagcagatcagagataataaaattggaataaaactctataaagattctttgccaccttcaccattgctatttcctggcaaagtaacagtagaccaagttactgatagattggtaatagcagacactggacatcatagaattttggtcgtttggaagaatggacaaattcaatatagcattggaggacccaaccctggaagaaaagatggaatattttcagaatcaacttttaattctccacagggtgtagccataatgaataatatcatatatgtggcagacactgaaaaccaccttataagaaagattgacctagaagctgagaaggtgagcactatagctggtattggaattcaaggtacagataaagaaggtggagcaaaaggagaacaacaacccattagttccccttgggatgtagtttttggaacatcaggttcagaggtccaaagaggtgacattttatggatagccatggcagggactcatcagatatgggcacttctgctggactctggcaaac

SEQ ID NO: 7515 - DNA, 383 bp, Homo sapiens
ctgtagagtgggcttatcatctttcaacacgcaggacaggtacagattcttttccttgaggcccaaggccacaggtattttgtcattactttcttctccttgtacaaaggacatggagaacaccacttgttgctccatatcctgtccctggaggtggagagctttcagttcatatggaccagacatcaccaagcttttttgctgtgagtcccggagcgtgcagttcagtgatcgtacaggtgcatcgtgcacataagcctcgttatcccatgtgtcaaagaagataggttcttcttcaaagatgaagggaaagaaggtgctcaggtcattctcctggaaggtctgtgggcagggaaccagcatcttcctcagcttgtccatgg

SEQ ID NO: 7516 - DNA, 301 bp, Homo sapiens
ccagtcggggtactgttcggacaggctggaggagtggctgtctctgccttggctggactgagatgcagaaccgctggagccccacgaggtgtctccctggtggactgtcccattctccaacagactgcttttctcctgagctttttcctccatgacgggctcgcagctaagcctgggcagctttgctggcccgaaggactcctgtttggaattaaatgtcactggtgacaataagggcaacatgagagcttgggatcctccaatggtcgggagggagatggcatttttgagcaccggggag

SEQ ID NO: 7517 - DNA, 582 bp, Homo sapiens
  misc_feature (1)...(582): n = g, a, c or t
ctgntgtcatttacatggtggacccgttcacgtatgctgcagaggaggactccacttctgggaacttttggctgttgagcttgatgcgctgctacacagaaatgctggataatttacctgagcatatgagaaattctttcattctccagattgtgccttgccagtacatgctgcagacaatgaaggatgagcaagttttctacattcaatacttgaagtccatggcattttcagtgtactgccagtgcaggcgaccactgcctacacagatccacattaaatccctcacgggatttgggcctgcagccagcattgagatgaccctcaagaaccctgagcggcccagcccaatccagctttactcccctccctttatattggccccaatcaaagacaagcagacagagctgggagagacgtttggtgaggcgagccagaaatacaatgtgctcttcgtgggctattgtctgtctcacgaccagcgctggcttttggcttcctgcactgacctccatggggaattattagagacctgcgttgtaaatattgctttaccaaacaggtcacggaggagtaaagtat

SEQ ID NO: 7518 - DNA, 306 bp, Homo sapiens
ccaatgagatcattgtgaaggcaggggaatgtatgtgcacatctgttttgtaactgtttagatgaatgtcagttgttatttattgaaatgatttcacagtgtgtggtcaacatttctcatgttgaaactttaagaactaaaatgttctaaatatcccttggacattttatgtctttcttgtaaggcatactgccttgtttaatggtagttttacagtgtttctggcttagaacaaaggggcttaattattgatgttttcatagagaatataaaaataaagcacttataaaaaaaaaaaaaaaaacc

SEQ ID NO: 7519 - DNA, 191 bp, Homo sapiens
ctgcaagataatgaggcacactcagtattgcacttcattaaaatttcaggctcaaacttaacctagaagtttaaatgaaattgcatttgtaatttagtaattcttatacaggacaaacattgatatgtttatatacagtgtgatacttattacatttatatgctgtcctaacacaatgttttttttttttt

SEQ ID NO: 7520 - DNA, 565 bp, Homo sapiens
  misc_feature (1)...(565): n = g, a, c or t
ccacatttaagtcttaaaaatttttaaattttgttgttgatgtttgtagacagccctgttgttgaaatcatggctttattcattttatttattttttaaacttgcctgaatttgttctaaaggaatatttaagagacataattttcttctctttaccataacattacacaaaactttttcctaaaacacggttgtgaggtactgatgaggtgtaagtggagctgttaaaaacagcagtgctgtattgcagttatgtatattcgtgtacagtatgtttagatcccaggtaaacatattcttttctgagaggataaatacctgcattcagatattccaggtaaatataattgagtcagggagtagtaaatctgatggagaattcactttggggaggggaaaaagaatagtatgcaagacccttattggcttttaattatacctgaaaccaaaatggatatttttagtctctctgcatgtgagatttggtgtaacaagatagaactataatatatacagtatatggaaggatagatatagtgctttgntcattttaattgcaaagctg

SEQ ID NO: 7521 - DNA, 403 bp, Homo sapiens
ccacagaacagtccctttttgagtaaagcagcaaggttgcttaatgacatgctatgtggttaacaagattcaactgccacatcaaggactttaaataatttcaagattttaaatgtatttatgaaatgaactcattacagcagctaatcaatgcaaactttgtcctttttctttgtctttctaagagaaactgaatttaatttaaatttaaattacagtgtctaaaacttggtaaaatattttaaatttgaataagaggaaaaaaaaaacatgaatttatttatgatggagcttcatacccaggacagtagcttcttaaatgttagtaaaataattatgttaagcattaaaacaattttgaatatgtaattaagcatttatgttaaaaaacatgtttcttacg

SEQ ID NO: 7522 - DNA, 350 bp, Homo sapiens
  misc_feature (1)...(350): n = g, a, c or t
tggagtaagtctggcagtatgttcaaggttgtggagtgtaactccagaattttccttcttcagctcattttgtctctctcacattaagggagtaggaattaagtgaaaggtcacactaccattatttccccttcaaacaaataatatttttacagaagcaggagcaaaatatggcctttcttctaagagatataatgttcactaatgtggttattttatattaagcctacaacatttttcagtttgcaaatagaactaatactggtgaaaatttacctaaaaccttggttatcaaatacatctccagtacattccgttcttttttttttttttttttttttttnaaaaaa

SEQ ID NO: 7523 - DNA, 281 bp, Homo sapiens
ccaattgatttgatggtaagggagggatcgttgacctcgtctgttatgtaaaggatgcgtagggatgggagggcgatgaggattaggatgatggcgggcaggatagttcagacggtttctatttcctgagcgtctgagatgttagtattagttagttttgttgtgagtgttaggaaaagggcatacaggactaggaagcagataaggaaaatgattatgagggcgtgatcatgaaaggtgataagctcttctatgataggggaagtagcgtcttgtagacc

SEQ ID NO: 7524 - DNA, 500 bp, Homo sapiens
  misc_feature (1)...(500): n = g, a, c or t
cctgtttgattgtagctatgttggtgtatctcgtgtacaagatggaaaagtgcttttgttgttctacctgatccagttgggggagcaggaatagggggtgcctgcctaacggcctctagcccatgtgcttatactgggatctgtcccgagggatctgcacctggttggcagtcattttgtggtggacgtggtaaatcgcgagtgttaccatgatgacgaggcccaagatgagccccaaaatcaggggcaaggtttcttccagttgctcccgctcatccactgggcatttatgctcttcactgaagacaaaatctgagataatgtcaaaaggttggatgtggaccgcagacaggatcatggtgaccgtcttctgcggatcactagaggccagtgaaatggtttgttgagcttgacactcataggacttcccagcgggggtgaccaaggcaganaggtggtgcgagttggctgtgtgcttccaacactgactgcgtctttga

SEQ ID NO: 7525 - DNA, 304 bp, Homo sapiens
ctgttaaagagtggaggacacccttgaccctaacaaggaaaacaaattaagcctttatgtacaagcaaatttagagctcttttaagtgtccaaagctattaattagtttaattaaggcattaaactaattctgaattaacatttttataaccaagaactaaaatgttcaaattttttctagtacaaaaaaattaaatttgctttagttataaaagagctctgtcaatatacacaaactatatacttcagacattcacaaaaatgtgagcagaaggcttatcaaaagacatttaatacaattagt

SEQ ID NO: 7526 - DNA, 436 bp, Homo sapiens
  misc_feature (1)...(436): n = g, a, c or t
ccacgtacatcctcccccagaaataggataaataaagagtattaatgagaattaactgccttgagacatttctattatttcttgttgagagaaccattcctaaagtcttcttgatcactattagcatatggacattataaaataaataacctgacaacttgacctgcagttcctggaggatgagtaaacaaaactgatgttaacccactgagtncactcttgtaagagtaatactgtagtgatgagagtactcccacatacacaaacatcacagtaaaaggtgcctatgattttcaacttcattgttcaaataaagggttcgctaagtgatcacaagacagcaggcttggttgcttccacatattgacttcctagagattacatatgaagnttaatctggtctggctgtacactatatgtgtataacggtgagtan

SEQ ID NO: 7527 - DNA, 534 bp, Homo sapiens
ctgggatcatgcaagaggcagtaccttcctctctaagtcatagcagtgaataggaagacaagaaaaactgtctttcgagcaccctatatccaagtcagaattctgaaggttttttccagtagatccaatgctataatggttaggttcccaggctagcctaaaaaattccacttacccaaaataatccttttcattttgcagaaataaattttgtgagatagtttagaaacctaccatcatttagtccttcattttttaagaataattctaaatatgtactaccaattaacaataaatgtagggagttagggactaaatgtaaggtaaataaacacagccaaatcttttctctacctattctcccagaagctccattaatactaatctgtatcttttctcgtaggttcaccatcaaaacttatcaaatgagtgtgaagacacacacatggacacaaacacacacacaaacgcatgtgcacgaagcttcatttctgaagtgaatctgtagttgagtttttaaggatgtccctggca

SEQ ID NO: 7528 - DNA, 562 bp, Homo sapiens
ctggcaatgacaagactgggagtatcaaactaggattgttagttcaattaaaatttcagataaacaataatgtacttatactaaaaaattatttgttgtttatctgaaatgaaaatttaactgggtacccaattgtttgtttgtttaatctaaaaaccctgattgaaatttatctaataaaacatcatttaatatctaaaataaaataaatttactataacatctttataactattcaatcaatgattcatcttctatttttccaaattcttgcacaaatatttgatgcttaaataaatacataaataataaataggttaataagttacacttgaaaataatttatgttatgatgaaaaaacttaaagtgcttccacatgtcctcacaacatcactgtgaggtaagatggtggctaatactttttccacttagaaataaaggagaaaccaaggcacagtggaacaaggacttgtggatcctggctagcagactaggggttgccagatttaacagaaaaaaatccaggatttccagctaaatttgactttatggcaaaattta

SEQ ID NO: 7529 - DNA, 616 bp, Homo sapiens
  misc_feature (1)...(616): n = g, a, c or t
ccaagatggttggggcataccttggttttatacattttagggagacataagacattaatcaatatatgtaagaagaacattggttcagtggggagggagcttccaggtcacagataggtgagacacaaacagttgcattcttttgagtttctgattagcctttccaaaggaggcaatcagatatgtatctatctcagtgagcagagagataactttgaatagagtgggaggtgggtttgccctaagaagtttccctaagcttgagttttccttagtgattctggggccccaagatattttcctgtcacagttgacatccccaacacagtgtttagggctcagaaaaagataccctaaaatagggtgctttggcatgctgaatgctttgaataaaggaggctgaagggcctcagaaataagagaacaaaggtctgtctctgacccactgctgcccacctcccttcccttccaaagcacagggagggattttctttgaagttctcttatttgattaagggaagtttcttccagaaggaaggtaattgtcctggacaccccttnctgggaatctacatcgatcagagaagaataactcatattgcaggacgggagaata

SEQ ID NO: 7530 - DNA, 554 bp, Homo sapiens
ccaagtaaatttgagaaatgaattaaaattaagaccattcattgcaggactcttcaatgtccttaatgtgtgttgtgatctctaagggtggttatgggggtatgatatgaagtatttcccaaacttactttaccctggaacccttcagtggaccacctctggggattaatgttcaatgggaacacattttgggaaaggctgtccaagcatacacttttgtgttagatacaattaaaaatgacatctaaggttaagaaatgacaaaacatggcaagaatatgttttagaaatggtaatgttcacttaaaaatactaatcttctaaaactataatatttaaccagcactgagtcagtttgtaacttgatatggaaagagtaagcaagcccaaatggcccattttacccgaacaaaaagtgagagaagactttatattaacatattagtctgaaaaaaaatttgtgcttaagtgtgccaaggaggtaaaggataagaaaggcaagacagttttctggctgccgtgtgatggctcacacctgtaatcccagcactttg

SEQ ID NO: 7531 - DNA, 445 bp, Homo sapiens
  misc_feature (1)...(445): n = g, a, c or t
ttctctggtaaatgcttngattgctaaatagtgatggtanatgaanacaaantaatagggggccaagctnttgngaaacaaaggtataggtntggnttncattgctctggaaattttactctcattcctgaaaagcataagcagggatgaaaaatagcttntaaaantttactttccttccagaaataaaggatcnattcctacctgtccaaaactttcanatggagtagtaggttccggtaaaaatttctatcttgacttcagttcccanagaggtttgctcttaagaagcgtatgaggtgactttggaacaaggaatatgcatgaccaacatctggtgtanacagagtctgggtcctgaaaatgtcagcaaatgagatttacaatattagagcttggaaataacctcagaaaacatctagaccangcncattacatcacagat

SEQ ID NO: 7532 - DNA, 663 bp, Homo sapiens
ccataatcctagatgcacgcttctaattcatgtacctgcacatgtgacctttgtgaacagaaatttgcatgtataatttgtgtttacttgtaactttctggttatatactgcttatatctgtggattcaagttactgaagtgaataccaataaaaagaaaaccctaggccatgttaattggttatacatgtttggaatattaaccaacgtatttgtcagttgtggtttttattcgctcttaaactttgtgcatgctttaacaatttattacttttaaatctagagtgaattctaaagactgccgctaaagatctgagttttaaaaatgttgttgctggtggatttcttgttcctgttacataactaaaagtgaggccatttgtggtttttaaaaaccttatgaattaaaaatgctacaggtgaacaaacagaagcttatgtttagagatattgatgacttaacagtacaattggaagtaatacggatgagcaagaattagttctgcagcttttcaaaataattacgtagagactcttggtatattggattatctgttgtaaacaattttttttcttccctgacacagggtctcactctgtccccagactggagtgcagggcacagtctctgcacctcacctttgggctcaaatgaccctccta

SEQ ID NO: 7533 - DNA, 608 bp, Homo sapiens
ctgggaaatactttatttaagatattttatatggttttctcccttttacagaatgaaacagtgattcagagtgcatataaaagcctcatacaacacttggaagaaataagggttttagtattagcaactcattttgaacatttgaaatggaatgatatgatggaagaggtattaaaatttttatttctttaaataaaagtttgatagaatttggtaaatgagaatgaacttgtgattagttcagtccttagaccagactaaagggtgccatatacctccttagtacatgtatactatctgaatcttagaatgtcatgctctcagagtaccttgaattcatcggatggcatatgtaattttatatgcatttccggaagccatattttaaaacagactctgggaaactagaaaattgtagtacttaatgcaacagtaatgtttattttccagtattcaaattgaggagggctctaagatatcatttgccatataaacggtcaaaatgtggaattaattataccttaagtctaattttctgattatcttctcaagctatgctttatactactatttatcatgatggattactaagaacctctttctttttt

SEQ ID NO: 7534 - DNA, 417 bp, Homo sapiens
ctgaaccctcgtggagccattcatacaggtccctatttaaggaacaagtgattatgctacctttgcacggttagggtaccgcggccgttaaacatgtgtcactgggcaggcggtgcctctaatactggtgatgctagaggtgatgtttttggtaaacaggcggggtaagatttgccgagttccttttactttttttaacctttccttatgagcatgcctgtgttgggttgacagtgagggtaataatgacttgttggttgattgtagatattgggctgttaattgtcagttcagtgttttaatctgacgcaggcttatgcggaggagaatgttttcatgttacttatactaacattagttcttctatagggtgatagattggtccaattgggtgtgaggagttcagttatatgtttg

SEQ ID NO: 7535 - DNA, 414 bp, Homo sapiens; identical to SEQ ID NO: 600

SEQ ID NO: 7536 - DNA, 620 bp, Homo sapiens
  misc_feature (1)...(620): n = g, a, c or t
cctatgtcacaggggagagaagctcctgaaccaaccatttgtcaggtctggggacaagactggaagtattgactcatttgcaaggaaactaagtgggtcaacaatgaaagaaggtaataggacctcatctgcaatcctccaatttatctgcaggataaattaaatgcctaaaaaagaaacttattttttaaagtatctgctaccatcaggaaaccaaataaatagtcagtctattaatttcgttcttaaataattccgatcctttacctaatttcttgagccatttaatcatctcaactctaccttaaaaccctcccaatgttttccaaatctgtcttactgggaaacaaagattaaaattcctaataaggattattttgtggatcttaatttctagattcccattttaaaattttaattccattaatttcttagtaatagaatgctattattaagaaattaatggaattaatttcttaataatagcattctattactgattgaatcatctctaataagccatcataatttccagaccatttctaagaacacgagctgatattgaaatgtttactagtgaatatagctaatgtaattactctttaaaacttaataggnta

SEQ ID NO: 7537 - DNA, 612 bp, Homo sapiens
  misc_feature (1)...(612): n = g, a, c or t
gttagtaataaatgtagccattacctattctactggttattagtacaaaaaaacccagccttttcagccattcatttccaaacactgatggtttccactgccagactatacacaagtttctaatggtccacagtaaattgagaatgagaacaatgcagtaaattattaataaaactacattcttttcttttttaaaaaaaatactatttgtcttatggtttaattataaacataattttacttaaaaaataaaaagcaaccttatttgaaaattggctggtaccaattttattttaataactttattgatctgaaatcttagtacgtttaggttaagttataaacacctacttcacttaggcactgggccaggaaaagaacataatggcatataagaactttccactggagtgcttcttcattcacttagataattactaacatccaccatactagacccctaaagtgatgaaacacacaataaatagcaatataggctattcagtaattacacctaggtaattcncgtcattttataataaaattatgattttagggaagtactccatgttctccatgagccttactctgatattcacttaccacacccta

SEQ ID NO: 7538 - DNA, 645 bp, Homo sapiens
ctgggaagccacgagaatattgtgaacctgctgggggcgtgcacactgtcaggaccaatttacttgatttttgaatactgttgctatggtgatcttctcaactatctaagaagtaaaagagaaaaatttcacaggacttggacagagattttcaaggaacacaatttcagtttttaccccactttccaatcacatccaaattccagcatgcctggttcaagagaagttcagatacacccggactcggatcaaatctcagggcttcatgggaattcatttcactctgaagatgaaattgaatatgaaaaccaaaaaaggctggaagaagaggaggacttgaatgtgcttacatttgaagatcttctttgctttgcatatcaagttgccaaaggaatggaatttctggaatttaagtcgtgtgttcacagagacctggccgccaggaacgtgcttgtcacccacgggaaagtggtgaagatatgtgactttggattggctcgagatatcatgagtgattccaactatgttgtcaggggcaatgcccgtctgcctgtaaaatggatggcccccgaaagcctgttttgaaggcatctacaccattaagagtgatgtctggtcatatggaatattactgtgggaaatctt

SEQ ID NO: 7539 - DNA, 481 bp, Homo sapiens
  misc_feature (1)...(481): n = g, a, c or t
ctgtgacagggcttttgtgtcccgccagactttgtacatagcataacctgtttaaatcccatatgatgcaggttccgtctctgctcacacttatcagtatactgtatggtttgcaaacaaataagctggttatctcttctgtgtgaccatagagatgtatttgagtctccatttctatttctgatggctgaaattttaaaattaagtatgagataaaaaccacaacaaaaagtactctagtatagtatctcaaaaataaaacaaccaaagtgactcaaatggtcttctcaaacatatcattcttcaatcctattcagagtaaaacaaagaaagaaattaaaaaatttttaattcctcataatttccagttatctggntttcatttttgtctattcttgtccaatctttgttcaaatatacatgtatttttatagttgtaatattgccacataaaaatttcctattttatattttacatatt

SEQ ID NO: 7540 - DNA, 561 bp, Homo sapiens
ccgaactttaatttcaggaattgaatgggtttgctagaatgtgatatttgaagcatcacataaaaatgatgggacaataaattttgccataaagtcaaatttagctggaaatcctggatttttttctgttaaatctggcaaccctagtctgctagccaggatccacaagtccttgttccactgtgccttggtttctcctttatttctaagtggaaaaagtattagccaccatcttacctcacagtgatgttgtgaggacatgtggaagcactttaagttttttcatcataacataaattattttcaagtgtaacttattaacctatttattatttatgtatttatttaagcatcaaatatttgtgcaagaatttggaaaaatagaagatgaatcattgattgaatagttataaagatgttatagtaaatttattttattttagatattaaatgatgttttattagataaatttcaatcagggtttttagattaaacaaacaaacaattgggtacccagttaaatttcatttcagataaacacaaataatttttagtataag

SEQ ID NO: 7541 - DNA, 411 bp, Homo sapiens
  misc_feature (1)...(411): n = g, a, c or t
nggncgaggtccaaattgctcactttctaatgatagcctaatagttgtaaagttgttctggaagaaagcaggggaagagagcagactttaagactcaactcactcaatcaactaacaatggaataatacaacatggactcacgatcaaaatgatagcatttcaactactactgcattcttgtacatttagtactaggagactgtcaacagtaccaaatatttatttctgtaggttattaaaagaatcttttgtgtgtttcccacattcattcttagcttactatcaattaccaagatcttagttgttgcaattactcaggttttagggtacactccttgtttcctgtcacaaatctcattttgaaatatggcagagtaggaccacataagctattacttatatgaattcag

SEQ ID NO: 7542 - DNA, 423 bp, Homo sapiens
  misc_feature (1)...(423): n = g, a, c or t
ncgaggtctggcctaggtgaggagaggcaaggggtgcagtcgtgttagtaaagttctgggggaaaaggcgtagttgttcaagttaaggcatggaaaatcatgcgacgaaaaggattcttgaagtagaatcctattctgatcttatctagaatgggtgataaggctggaaagttanaatgacataaggtaagttgttgatccanatattagaattctgattgctaagtgactaaaagtttagggcatgggcaaaagatacataaaattatgtatctgagccctttcctatttccaaggccacccaaaagtagaagaagccacatggtaagaaaggtagtggaactctggaaagagcagagtctggtctggaagtcaggagacctccttagacctcagctctgtgattcaccagtggtggggtct

SEQ ID NO: 7543 - DNA, 306 bp, Homo sapiens
  misc_feature (1)...(306): n = g, a, c or t
ccaatatggggatgtggaatttttatacaagttataagtgtttggcatagtacttttggtacattgtggcttcaaaagggccagtgtaaaactgcttccatgtctaagcaaagaaaactgcctacatactggtttgtcctggcggggaataaaagggatcattggttccagtcacaggtgtagtaattgtgggtactttaaggnttggagcacttacaaggctgtggtagaatcataccccatggataccacatattaaaccatgtatatctgtggaatactcaatgtgtacacctttgactacag

SEQ ID NO: 7544 - DNA, 385 bp, Homo sapiens
gtctgtaatattcctaaaaggaatatctacatactatagcctatcaaatataatctgcattttgcaaatcaatacaaaaatctatccatcatttatacattttatatttatatactttttaaaaattagattttattgctagggtgaatttggaattcaaattaaatttggaaacttaataatgctcttctcataaccttctccccattctttttttaatttttaaacactggaagcaaatgattatcaaaatgagactgcaacttaaggcattttaaaagaaaaaataattaggtgccatatagcattttatttcaaaagtatattttgtcccacttttctcactagcaagagtaaaacacaaaccttttttcataaatatgac

SEQ ID NO: 7545 - DNA, 369 bp, Homo sapiens
ctggaaatccacagaggctggctactactgcaggtctccagcagagtcttcacggaaggagaacctctggccttgaggtgtcatgcgtggaaggataagctggtgtacaatgtgctttactatcgaaatggcaaagcctttaagtttttccactggaattctaacctcaccattctgaaaaccaacataagtcacaatggcacctaccattgctcaggcatgggaaagcatcgctacacatcagcaggaatatctgtcactgtgaaagagctatttccagctccagtgctgaatgcatctgtgacatccccactcctggaggggaatctggtcaccctgagctgtgaaacaaagttgctcttgcagagg

SEQ ID NO: 7546 - DNA, 292 bp, Homo sapiens
ctggtgaaagaatgatgctcgagttgctgcaactgaagctctgccccaggggtgcttggagatctcgaagggatgcattctgagccgagaatgtccactgtgctgcgtgggggaaggacacattgtactccacccgccatgtagctcaggtagacaaccttctgctggaggtcctgcatgaatccaaagctgaggtgtccataggggaatgagagaagcaggtggggatgggcaccctcacagcttccctggaccttggttttgttggggttcagtacagagatgccccagg

SEQ ID NO: 7547 - DNA, 442 bp, Homo sapiens; identical to SEQ ID NO: 663

SEQ ID NO: 7548 - DNA, 476 bp, Homo sapiens
ctgaccggaccggtcatgcccgtccggaacgtctataagaaggagaaagctcgagtcatcactgaggaagagaagaatttcaaagccttcgctagtctccgtatggcccgtgccaacgcccggctcttcggcatacgggcaaaaagagccaaggaagccgcagaacaggatgttgaaaagaaaaaataaagccctcctggggacttggaatcagtcggcagtcatgctgggtctccacgtggtgtgtttcgtgggaacaactgggcctgggatggggcttcactgctgtgacttcctcctgccaggggatttggggctttcttgaaagacagtccaagccctggataatgctttactttctgtgttgaagcactgttggttgtttggttagtgactgatgtaaaacggttttcttgtggggaggttacagaggctgacttcagagtggacttgtgttttttctttttaaaaagtaa

SEQ ID NO: 7549 - DNA, 567 bp, Homo sapiens
  misc_feature (1)...(567): n = g, a, c or t
ctggcattggtctagagctttataaggccattcagcgagggaccatcaagtgcaactttgcgggggttgccttgggtgattcctggatctcccctgttgattcggtgctctcctggggaccttacctgtacagcatgtctcttctcgaagacaaaggtctggcagaggtgtctaaggttgcagagcaagtactgaatgccgtaaataaggggctctacagagaggccacagagctgtgggggaaagcagaaatgatcattgaacagaacacagatggggtgaacttctataacatcttaactaaaagcactcccacgtctacaatggagtcgagtctagaattcacacagagccacctagtttgtctttgtcagcgccacgtgagacacctacaacgagatgccttaagccagctcatgaatggccccatcaagaaagaagctcaaaattattcctgangatcaatcctggggaaggccaggctaccaacgtctttgtgaacatgggaggaggacttcatgaagcccagtcattaacattgtggacnagttgctggaggcagggatn

SEQ ID NO: 7550 - DNA, 566 bp, Homo sapiens
  misc_feature (1)...(566): n = g, a, c or t
cctttcaaacaagttttaacattgaaaacacccatccttcaaagagcttgaagccccaagtgtccatcttccaggatgcacaagactccccaagccttcatcctcccattactatttaatatccacactacattgttcggcacttggtttccctccagtatgcaccgtggcagccagtaagacacccccagggagcacaaccgcagctcactatttttctccccatgctcaataagttcagtaagtgcttgatgattgactagcatcaggaataaactaggagcattttacattcacactatctagttaaacattccaaatgacagatttccagaaaaatgttgcaacaaatgtaagtatttatagacatgcctggtaaggtatgtagcatttggagaaataataactagaacagagtactgtacaaaagaaaatggtacacttttgtatgagtctaagatatattggacaaatgggtattcctattggtaaacatggacatcttaataaaaatacaaaattactacataaagaagcattacatccttcaactcattgggnggacc

SEQ ID NO: 7551 - DNA, 490 bp, Homo sapiens
  misc_feature (1)...(490): n = g, a, c or t
atttgatataaaattgaaaatgttaaaaaatcattttttttcctcagagttaaaattatttccctcatactaatgcttaatggcaatgattactccagagttttttaatttttacactggggcaatagactaggaggtctctgatttcttcttggtctaaagtgttttgattttatttctacataatagctttggtattcatgtatatacatgcatttaattgtgattttatcacctttcccatttctttccccacaagctggcatttcagtagttgcttttgaataatggttttggttacctgggaaggcaggcccagaacccatttccttgacttgcagttccgggctgtgttcacatgactgctgtctagctgatgcatttttcacatttgtcaactctggttagaaacaggtcctcaggagtattctctaacctgatattttctaaaaagatatgttgattcaactttgtttancatcctactttc

SEQ ID NO: 7552 - DNA, 558 bp, Homo sapiens
  misc_feature (1)...(558): n = g, a, c or t
cctgacagccgtttgggtcgctcgaaatcggtttgctgtcctagatcggatgcattcgcttctgatcaagaatctgaagaatgagatcaccaaaaaggtacaggtgcccaactgtgatgagatcttctatgctggcacaggcaatctcctgcttcgagatgcggactctatcacactctttgacgtacagcagaagcggactctggcatctgtgaagatttctaaagtgaaatacgttatctggtcagcagacatgtcacatgtagcactactagccaaacacgccattgtgatctgtaaccgcaaactggatgctttatgtaacattcatgagaacattcgtgtcaagagtggggcctgggatgagagtggggtatttatctataccacaagcaaccacatcaaatatgctgtcaccactggggaccacgggatcattcgaactctggatttacccatctatgtcacacgggtgaagggcaacaatgtatactgcctaaacagggantgtctccccgggtactcccattgancccctgagtnaaattcagctggccc

SEQ ID NO: 7553 - DNA, 565 bp, Homo sapiens
  misc_feature (1)...(565): n = g, a, c or t
cctagaatcaggcattcctccaaggaactggttcttttaagtaggttgctgncacctttttgtttttttagctctgaaacatttgtctaattttaaaaatattctcaaccatttttcattgggttttttctctctcctgaaattcttattatttgtatttaggcatgcttttctctcttctctacattatttaactttaatattttctactttttaatttccttcttgtctcctgggaagttctacaaccagctctcataattaatatgtaaattcttctgtaatttgattttaataaacctactactcttctcttttaaatattctctagcagtgtttgaaagagagttaatggcctatgctggttctccatcttgtcctgtttattatctttttcaaaagcatatatttgtaagtgtgcttcatgttttaaaatgtaaaaatacnagtcttattaaaaaaacttcagctttaattttcatttattttcattataaaaagntaaaggtnatatatgggangaaataaaatcaactananataactacntaatcacaggagtngg

SEQ ID NO: 7554 - DNA, 564 bp, Homo sapiens
  misc_feature (1)...(564): n = g, a, c or t
cctgcacgagcagacacattccgaatactaaaattccttaggaaaattagtcattgcccatgtgtgatagctgttttccattttgaattttaaccattttgggaaaaggaagagaatgggaaataccagtatagtccgaaaagcccttaaaaaatgagtgcgaaaagtggaagggtggagtggacataggaagatgatgaacttgtcattttttcctttccatagcttcattttattgtgtcaaagttgcagaaagcacttcactttcatcgaggctctttttaggcagggtacagccaagaaaacttttttatggctcagatgtaaatcctagaaaacgtagtagaaatgatggcaggatctctaactgtaaaataacagtagtgntagtagtaagtgtcattataataacgttatagaactctgcacatcaaaaataccacattttatcatgatctctgcaagagatttctgttggtagtcattctaacttctaataaataataccttgagtnnggaaaggttctgtgaggatccaataataatgaaaatgacagtggtgat

SEQ ID NO: 7555 - DNA, 564 bp, Homo sapiens
  misc_feature (1)...(564): n = g, a, c or t
ctgtagatcatttgcattcattggcatgtaatcataaagggccacaacctttttcagctcacttgtggagactggtgctgctgctggctcaggcggtagtggctttttcaagatctggtcctcctcaggcgttgggggaagaggcttttttgtcttccggtgagaactcccaggttttaagcttccattcctgttctccaaaatttggcagcccatagcatttttggctgtctgagagcagcagagatactgcccatcgatccagaagcaagggtgatatttctgaaccagatcactgttgtaccggattacgtttttgagctggtgaatccaccgcttccttagttcttcagttggggagaagacgtagagaggcccttcatcatatacaacctggaagggataagggaacctttcaatgattgaaatttgctccatttcactggactcttcacctcttctcggaatctgtctttctggaggaggatttttttcaggaaccactgtttcaacacaagtgatcttctcaacatctattgaacccttcttactgctcttcttccn

SEQ ID NO: 7556 - DNA, 457 bp, Homo sapiens
  misc_feature (1)...(457): n = g, a, c or t
ccaccttatatataattatatattctaccataaatgctggccttcttcaaattatgattttggaaaatctaacccatacagagggataaaaaattgacatcccttggacaacttctccttgtttttttttgttttgttttgtttttaacattccaagctctctctggtcccctatccaaggagaaatgctagggcctcgaggatgtccgctatatatttttataactaaatgataaatttatattcaaattgtttgaatacgtttccaaaactttcagagtacaagtcattgttaagtttgcctttactttaaaaactaaaagaatacatttctatataaactagcagtcaggaatttgcctgttttctagcttcttcatctatctaaaatatatatttagctaccagaattatgggnctcctaataaaatcttaataaaatagcatataaaatcaa

SEQ ID NO: 7557 - DNA, 509 bp, Homo sapiens
  misc_feature (1)...(509): n = g, a, c or t
gttgcttcctggtatctgatttagaaataacatttaaatgccaagtatctgggggattgaaggaagggtctatatgagcaggtgaattagcagtactgtttttgtttagtggatattgttagtgactttttgtgtgtgttttgctttgggacctttttattttggtgttgcaaaaagtaacatattttcatcattgcttcatacgacatggagttaggacagggaaaaatcattcaacactccttatgcattaaatgatcaaataaaccagtgtaggatattaagactatcaattggtgggattaggcttgacattttatttttataaatatatattttttctgaatgtgtctgagtccaagagtgggcaaaaaataattttctactttggactaatctatagaggtttttgaaagtctgcattactaacttgttgaattcatgatattctgcctatggccaaattgtnaacctttgtttttctaaaataaagtaattgaaaacctgcn

SEQ ID NO: 7558 - DNA, 536 bp, Homo sapiens
  misc_feature (1)...(536): n = g, a, c or t
ctggggtgggcttctcctactccgatgacaagttttatgcaactaatgacactgaggtcgcccagagcaattttgaggcccttcaagatttcttccgcctctttccggagtacaagaacaacaaacttttcctgaccggggagagctatgctggcatctacatccccaccctggccgtgctggtcatgcaggatcccagcatgaaccttcagggactggctgtgggcaatggactctcctcctatgagcagaatgacaactccctggtctactttgcctactaccatggccttctggggaacaggctttggtcttctctccagacccactgctgctctcaaaacaagtgtaacttctatgacaacaaagacctggaatgcgtgaccaatcttcaggaagtggcccgcatcgtgggcaactctggcctcaacatctacaatctctatgccccgtgtgctggaggggtgcccaccattttaggtatganaaggacactgttgtggtccaggatttggcaacatcttcctcgcctgcca

SEQ ID NO: 7559 - DNA, 329 bp, Homo sapiens
ctggaaatgaacctaaggaattttgctgaaattatcgaagctgatgaagtacttctttttgagagagctacttttctgaccaagtttagatgtgactgaacattttcactgagcggggtgaagtcaagcaagggggatttgttcttccactggtatagaaattatgttttgaaattttcacattgtctcatggaatttccctgagttttcttctggtgagtgactcagttttgcttcctactagacactctgcatctgtatattcagcctataggtaatacttgtgtggttttattaaaatctgaaaaagttagaaaaagtattttcag

SEQ ID NO: 7560 - DNA, 519 bp, Homo sapiens
  misc_feature (1)...(519): n = g, a, c or t
tcttaaagtaggttgaggcttgaggctgggctttcgggtttttttgttttttgttttgttttgttttgttttgttttcttgtacttaaacctgcttgcttcctaccacagattctttattttcccaaacactacaaaaaaacttttaaaactttgccatttcatctgtttacactctttgccactgattagcagtatttaaatcttgcaagaatattttgtgctttctttagaaacacaagagtatagatttttctcactgaaaagtgagagttacgcattgcagccatgaagggatgctaggatcaattatggcagtaccttttttcccctcctgttcttgaccagttgtctcttttgttttgggtcccacttaggattaatggatgtaaggtattttcctgtgcctttattttntgtcttctattggaaggaggtgtaacggcagaatagcacccgtgttgggggttttccnttcaacactgcaagtgaatattgccaccatgtgaaccctcaaaat

SEQ ID NO: 7561 - DNA, 455 bp, Homo sapiens
tcgactcgcttaggcccttgtttattccctatctagtgcaaagccacgaattggcagcatgttttctgacctttggtttggttggtttaaaatggtgttctagattttaaaatcgtttaagtgaccagttagatactcattcagagcagactcgggcggatagatagggaatactgtatgggtatatctttgtgtctagactttttgagatcgccctgaaggactgtttttgttttgttttgtttgcttggcatagccccttcaaggaatttaatctctcggccatattcttgtctgattttacggaggttgatgtcgctactgtgttaaataaccagtactttggttttcattccgttactaagtactttaaggtcttatatgtcataattttattgctaacatcaaatatttattttattttttaaaaaaataactaaacatggggcaaagga

SEQ ID NO: 7562 - DNA, 446 bp, Homo sapiens
  misc_feature (1)...(446): n = g, a, c or t
gttgaaatcatanaanatgcaaatgacctttcaaaatcaacacaatgtgttctgaaactttcgtgactaataccatgcatctgtgatcaatgaactatgtggttttgaatcggatgtagaccattagtactactacttgagctaaacttctgcatggttcataatttttaaagtgtgtagttaatatgcatgttatcgtcctttcttccattcttaccagtatgtgcccatttgcaaaacaaaaatgctaataatcagnaatagtcctataaaagatgttaactctgtttagtcattgactgattttgctctaaccttaaaattttgtgattattgacctctgttgcatttattctaaagccccccaaaaattatctagccgtttcgaatatcaacattaccctggtgtattcactgctgtatgcattattgntctttnntgctgt

SEQ ID NO: 7563 - DNA, 336 bp, Homo sapiens
ccaccaacaccccccacagcaccctgagcgtcaactggagcctcctgctatcccctgagcccgatgggggcctgatggtgctccctaaggacagcattcagttttcttctgcccttgtttttaccaggctgcttgagtttgacagcaccaacgtgtccgatacggcagcaaagcctttgggaagaccatatcctccatactccttggccgatttctcttggaacaacatcactgattcattggatcctgccaccctgagtgccacatttcaaggccaccccatgaacgaccctaccaggacttttgccaatggcagcctggccttcagggtccagg

SEQ ID NO: 7564 - DNA, 428 bp, Homo sapiens
  misc_feature (1)...(428): n = g, a, c or t
cgaggtccaatctaatttcttaagatggataataggtcactatttttgagtccttttttttcccctaaatatttatttaaggctataaaatcactacatctctcaagttttaatttggcatattcttattgnttcattcaaatatgctttaattnctcttgcgatttattttttaacccttgaattatttagaaggncactgtttaattttcaaacactgatttttttatggnttttaaaaattaggnttccattattgcattgggatcagnagaaaatatcctaaatggntttaatcctacaatgtcatctggcttcgngaccagtttgttgtcatttagtttaaatgttctgtgtgcacatgagcattttgtttaatgcattctgtacagggccttggatttgaatgattatgtaaatganggttt

SEQ ID NO: 7565 - DNA, 406 bp, Homo sapiens
cctttctggggcaaagtatcaacgcaagaagcaagaactcctaaggaaggcatctgtaagtctgtctggagcttaattcccagatggtctgacacagggcgtggccacagcgccagcctcagactggagggcaaggggttcccttgagggctgcagttctactcaggctggtggagaactctggcttttggaagcgagagtaaaaagctaatgacgaggaaccgaaaaatcgcgagtgtttcgcgggtaactggggttgagggccaaaatatttggaatgaaggactttggccctatttaaggcagattttacagagcgcacctcaaacgtacaagtcagtaggactccttatttggcgtgacccgacctggccgcggagcctgcatttcctcgcagcctctcagt

SEQ ID NO: 7566 - DNA, 555 bp, Homo sapiens
ggcaagtcaggcgtcctgtttctcggatggatacccattaccatcttggacctggaagaagtgttcagacaagtctcccaactgcacagaagagatcacagaaggagtctggaatagaaaggctaacagaaaagtgtttggacagtgggtgtcgagcagtactctaaacatgagtgaagccataaaagggttcctggtcaagtgctgtgcatacaattcccttggcacatcttgtgagacgatccttttaaactctccaggccccttccctttcatccaagacaacatctcattctatgcaacaattggtgtttgtctcctcttcattgtcgttttaaccctgctaatttgtcacaagtacaaaaaggtaaaagcaaaggtaaaaattcattattctttcctctatctgcagaaactgcctattcctaactgactcatcatttcatctctgaagcaatttaggtatgaaagccagctacagatggtacaggtgacccggctcctcaaataatgagtaccttctaccgttgatttcagagaatatgaatatgatct

SEQ ID NO: 7567 - DNA, 392 bp, Homo sapiens
ctggcagatgcagaagaagcgatgtatcagaatgtggatggccgtgtttcggaatgtcctcacacctaccaaaacaggcgacctttcagcagagagatggatttggggctactctctccgcaggctcaggtcgaagattcgtagaggaacaatttagttttaaggacttcatccctccacctatccctaacaggctgtagattaccaaaacaagattaatttcatcactaaaagaaaatctattatcaactgctgcttcaccagacttttctctagaagctgtctgcgtttactcttgttttcaaagggacttttgtaaaatcaaatcatcctgtcacaaggcaggaggagctgataatgaactttattggagcattgatctgcatccaagg

SEQ ID NO: 7568 - DNA, 564 bp, Homo sapiens
  misc_feature (1)...(564): n = g, a, c or t
ncgaggtttttgagggtaggtaaaatagctatattacttaaaagtcaaactttataaaaaggtaaagcggagatgtctgtctcccaatcccatctattcctccttcaccctgttccccatctatgagaaattatatttattagtgtcatggttattttttcagtgtttctatatgtaatactcattatatgttatacaaacacaaatatacatatacataatttccttccatttttatcaatttccttcctttctcactgtcctgctcctagctttaattttaccaattaataaaacatactaaagatttttttcatatcagtgcatgaagcttttcctcttttttctttcaactgcataatattccactatgtggaaatatcatggtttatttaaataaattcttatcagggaatatttgagttgttccagggttttctttctttctttcttttttgctgngaaaaacaatgttacagtgaataactaacatcatttctcatttcatatgtggacaaagtatctgtgggatagagttccagaactgaaattgctgcttgaagg

SEQ ID NO: 7569 - DNA, 534 bp, Homo sapiens
  misc_feature (1)...(534): n = g, a, c or t
ctgtatgagtttgatatcaaagttccactgttggttcgaggacctgggatcaaaccaaatcagacaagcaagatgctggttgccaacattgacttgggtcctactattttggacattgctggctacgacctaaataagacacagatggatgggatgtccttattgcccattttgagaggtgccagtaacttgacctggcgatcagatgtcctggtggaataccaaggagaaggccgtaacgtcactgacccaacatgcccttccctgagtcctggcgtatctcaatgcttcccagactgtgtatgtgaagatgcttataacaatacctatgcctgtgtgaggacaatgtcagcattgtggaatttgcagtattgcgagtttgatgaccaggaggtgtttgtagaagtctataatctgactgcagacccagaccagatcactaacattgctaaaaccatagacccagagcttttaggaaagatgaactatcggntaatgatgtacagtcctgttctgggccaacctgtcgcactt

SEQ ID NO: 7570 - DNA, 463 bp, Homo sapiens
  misc_feature (1)...(463): n = g, a, c or t
nggncgaggtctggcttcactgctcaggtgattatcctgaaccatccaggccaaataagcgccggctatgcccctgtattggattgccacacggctcacattgcatgcaagtttgctgagctgaaggaaaagattgatcgccgttctggtaaaaagctggaagatggccctaaattcttgaagtctggtgatgctgccattgttgatatggttcctggcaagcccatgtgtgttgagagcttctcagactatccacctttgggtcgctttgctgttcgtgatatgagacagacagttgcggtgggtgtcatcaaagcagtggacaagaaggctgctggagctggcaaggtcaccaagtctgcccagaaagctcagaaggctaaatgaatattatccctaatacctgccaccccactcttaatcagtggtggaagaacggtctcaaaactgtttgttcaattgg

SEQ ID NO: 7571 - DNA, 187 bp, Homo sapiens
ctgtccaactgcagcggctacgtgtttccatggagacaaacttggtgtctcaagttcagggcttcgaaagtcccgaatatttgtttgtcccgagagaagagttttgactttgaagaggtccaggtgggactcgctgggggtggggtgctccgggattagttcagagggaggtgttctggaagactcc

SEQ ID NO: 7572 - DNA, 281 bp, Homo sapiens
  misc_feature (1)...(281): n = g, a, c or t
ccattgatcttgaatttgccctctcctagtgctgcagtcccacttcaaagccattttctgaggaggatggtttaggtctggcaattgtccttgaaaaatcccacccatgttgtaccaccttggtgagtcatatgccactcatcagcttgggaatgatggctgccaactcccaatctcccaggaaggcagggggcagaatctttttttcacttggcctgctacctccattaaaaaaccattctcttacagtttaaaaaaaaaaaaaaaaaaaaangntttcc

SEQ ID NO: 7573 - DNA, 336 bp, Homo sapiens
ccacttcaccagaacctctgtgtcagaaaaatttctcttccttttaaaatgatgagggggaactttcagacagtgtctgattagggtgggtggagagaggggcttcctagaaagtcaggcagggcagggctgaagccctctgggttaactgagtgcttttgatatgaaggcaggtaagactggacaggtgggggtgttagtgaggggatggtgtagggtgtgctgaagaactccacttgagctctgcacaccagggaaaatgaccataaaacatcccatcttcactgctcagagaaggctagatctgctgtgagctagaaagccatgtgggggcag

SEQ ID NO: 7574 - DNA, 495 bp, Homo sapiens
ctgtgaagcatacataaataaatgaagtaagccatactgatttaatttattggatgttattttccctaagacctgaaaatgaacatagtatgctagttatttttcagtgttagccttttactttcctcacacaatttggaatcatataatataggtactttgtccctgattaaataatgtgacggatagaatgcatcaagtgtttattatgaaaagagtggaaaagtatatagcttttagcaaaaggtgtttgcccattctaagaaatgagcgaatatatagaaatagtgtgggcatttcttcctgttaggtggagtgtatgtgttgacatttctccccatctcttcccactctgttttctccccattatttgaataaagtgactgctgaagatgactttgaatccttatccacttaatttaatgtttaaagaaaaacctgtaatggaaagtgagactctttccctaatttcagtttagagcaacttgaagaaga

SEQ ID NO: 7575 - DNA, 526 bp, Homo sapiens
ccaactaggtagacaaagccttatgtttttccattgttctgtatgaaccaggaggatcacggctcgtattggttcctgctatgcacagcttgattaatgggtaaggtgtactccatatctacaaaccttcaggtagtttacagacattcttggtgcacccctaactatgccagatcattggctgggcactaaagatacaggtggagtaaaaaattaattgtcaaaataactggctaatttaaaatttacaattgcctagaagaccatctttgatgttaagaaggaacaattaagtaaatactaggatggcaaacaggttccataatttcattttgttgagacaacagttttgctcatgtcaccaggctgaagtgcaatgttgtgatctctgctcactgcaacctccacctcccaggttcaagcaattcttgcctcagcctcctgagtagctgggattataggcatgcaccaccatgcccaggtaatcttggtatttttagtacagatggggtttcactgtgttggg

SEQ ID NO: 7576 - DNA, 337 bp, Homo sapiens
ctgcagaggccacctggattgcgcctaatgtgtttgagcatcacttaggagaagtcttctatttatttatttatttatttatttatttgtttgttttagaagattctatgttaatattttatgtgtaaaataaggttatgattgaatctacttgcacactctcccattatatttattgtttattttaggtcaaacccaagttagttcaatcctgattcatatttaatttgaagatagaaggtttgcagatattctctagtcatttgttaatatttcttcgtgatgacatatcacatgtcagccactgtgatagaggctgaggaatccaagaaaatgg

SEQ ID NO: 7577 - DNA, 509 bp, Homo sapiens
  misc_feature (1)...(509): n = g, a, c or t
ccaccctcagggttcaaagagactggcccaggggtacacaattgctggaatattctctgcgagtcatgcacacgtgcgggggtgaggtgcagttatatggtgacacacacagtgttactgtgagctctcagggtgcacagagggcaggtgacaagggcatcagctaatctgtcccacctggtccagcccatccagttcaggggcatcaagggggctgaggccccggtagccactgtagaccctgtgactatcactgacaccgtcactgggctccattgggcaaatgtagtccgtcgattcatcgaacttcttttttcttatgtttccgaagtgtgaaaatcctagtttccttggccggactttggctgtggtggtcagtgggtgtgtaagctggtgaggccattttctctcgcttttcctgttcagcctccggaccaatcaaggcattgaacttggtggtcaggtggcgcctgangagcgtcttttgtggggggatgttgagaacatan

SEQ ID NO: 7578 - DNA, 446 bp, Homo sapiens
ccacagctaacatcattgcagcacctttactccttcggctttttgccagcaccaacattggcctttgcagtccccctgactttcttcattctgttcttgcgttcctttcgttgctttcttgaggtctttttcttctcatacaggccatgtcttgcaagtctatgtttgggttcatttttctttgcataatccagggaatcataaatcatgccaaagccagttgtcttgccaccaccaaaatgagttctgaatccaaatacaaagatgacatccggtgtggtcttgtacattttggctagtttttcccgaatttctgtcttaggcactgtcgccttcccggggtgaaggacatcaatgaccatttgtttcctctgaagtagtcggttggtcatgaactttctagtgcggatagttacggtgtcgttcatgatggcgatctatcttca

SEQ ID NO: 7579 - DNA, 507 bp, Homo sapiens
  misc_feature (1)...(507): n = g, a, c or t
ncgaggtaaaaagagtgttgcctccaaaaccgaagttaaaaaaacccgacgaccaagatctgtgctgaatactcagccntaacagaccaatgcnggggaggtggnctcctcactctcaagtactgaaattcggagacntagccanaggcggcacacaagtgcggaagangaatagccacccgcctgttaaaatagcctggaaaactgcggcagcaaggaaatccttaccagcttccattacgatgcacaaagggagcctggatttgcagaagtgtaacatgtctccagttgtgaaaattgaacaagtgtttgctcttcagaatgctacagggggatgggaaatttatcgatcaatttgtttattcaacaaagggaattggtaacaaaacagaaataaantgtcaggggggcaagacaggcttataatttctacaccaaaccagagaaatgaaaagccaacgcagagtgtatcatctcctgaagccaccttctggttctacagggctc

SEQ ID NO: 7580 - DNA, 561 bp, Homo sapiens
  misc_feature (1)...(561): n = g, a, c or t
ccaccatgcacatttccaacacatgcacactcacagccctgaaaacagtgttaggtttcagttaatacatttattacagcaggtctttagtcattattgccattaaaaagttttcatgaaatttcacaaaatcttttaggctattagtattagctttctttttatggagtgacactttgttaatttatgaaatatttacagcatttacaaaaagtaagagaatgtctaataaaatttcttatacttacaaaattcatacattatactactgtatttgagatgtcttacttggtagaccaattaaactatgacataaaataatttacaaagatatatttaatctttcttaattcattgaaaacaaaaccatattagttataaatagtcctttacaaatcattgtaaaacacttcattgttttaactcgagccttagcttttacaaatatacttaataaatgaattagttcagatagcaaatagaactgtgnatttaaaatttcacttaatactataaaaacaaaacacctgaaaaancaaacggcctggtacttcaagtaaa

SEQ ID NO: 7581 - DNA, 473 bp, Homo sapiens
ctgctcatcgtgggcgtctcggctgccatctacagcaagggctacggccgccccagatactgctggttggactttgagcagggcttcctctggagcttcttgggacctgtgaccttcatcattttgtgcaatgctgtcattttcgtgactaccgtctggaagctcactcagaagttttctgaaatcaatccagacatgaagaaattaaagaaggcgagggcgctgaccatcacggccatcgcgcagctcttcctgttgggctgcacctgggtctttggcctgttcatcttcgacgatcggagcttggtgctgacctatgtgtttaccatcctcaactgcctgcagggcgccttcctctacctgctgcactgcctgctcaacaagaaggttcgggaagaataccggaagtgggcctgcctagttgctggggggagcaagtactcagaattcacctccaccacgtctggcactgg

SEQ ID NO: 7582 - DNA, 573 bp, Homo sapiens
  misc_feature (1)...(573): n = g, a, c or t
ctgaaaaatcctcagtgcaagaaggcaatagaggtgatagattcagagtatatttaggaggtagaccagcctagcagatattgttaggaccccacatatgtccctcactgttcccatgccctttacagcttgcccctgcaagtatctctgagtctttacctgaagacactaaggtttggtttgtacaaagggtaagccaagaattaccagggagttagcatccctggcagtggtcctcaaccagtgtcagatggaagtcagtggataaataccccaggtttgcttgcccttcaaatgggacagttctgaggaatgctttaggcagaggactcagatggcagagtgccaaccgcccacagtggaaacctgctcattaacataccccatactanctctcttcccttcctggtttcatttccccattctcatatcggtatttcctggaatcatctcccatataaactgcttgcattcagatctttgtctcaaagtccactttgtgggaacccaacttgagacaaacagaaaaaacttttanacaagtagatgatgaaaaatgaagactcaaatatg

SEQ ID NO: 7583 - DNA, 320 bp, Homo sapiens
ctggctgtgcaagaccctggcagggccctcgcctcctgagaaaccgagagtcagaaccaaagccaggctgtcctggttggagactgagccagaaagggtggctcacctcacggtgaggctgtcgagtgacctgagaacctcagaccctcacgtcagccggatgtcgcaccagcctgctgttgccaccaaaatgccagaagagatggacaagccactgatcagcctccacctggtggacagcgatagtagccttgccaaggtccccgatgaggcccccaaagtgggcatcctgggtagcggggactttgcccgctccctgg

SEQ ID NO: 7584 - DNA, 252 bp, Homo sapiens
cctgactgaagtgcttcccacactccccacatgtatagggtttttctcctgtgtgcaccctctgatgcatgtcgaggttcaagctccacttgaagccctttccacactccccacatttgtatggcttttctccagtgtggactttttgatgggcttgaaggtgtgcactccgactgaagctcttcccacactcttcacatttaaatggtttttccccactgtgaactctctgatgggttagaagatgcgagg

SEQ ID NO: 7585 - DNA, 526 bp, Homo sapiens
catttcaaaaccataagctctagccagaaaatcagtagatgaggttgttgtttcgttaatttctgctgttgaagaattcttgttagagtcttgttcagttatggtttgtggtctactagtctggatttcttctgcccacctgacagtctgattttgaggatgtcccgatgtccgtggagaaagggagaggtgccaccgtgggtccttctgctccagtgtcacttaaaatttctattaatgttgtgctggttactgacccactaccttcaaagatgtctgtttgagatacgagtggtccaacttcttttgccacattttccattctgttatagtcttcaattttgtcacttgaggtactttccacttgagaagtgtggggatataatgtgttattgatttgttccacttcagtaaaattcactgactctgttggtagagtaggtaaaacttcttctcctgatcccagtccagagaataagactcagtatctgactcttgaattgttggcctcatgcctttcggaaaa

SEQ ID NO: 7586 - DNA, 391 bp, Homo sapiens
  misc_feature (1)...(391): n = g, a, c or t
ctgccgctgctcgttgttttttctgcaatgatatttgggactattacaaatcaagatctgcctgtgatcaagtgtgttttaatcaatcataagaacaatgattcatcagtggggaagtcatcatcatatcccatggtatcagaatccccggaagacctcgggtgtgcgttgagaccccagagctcagggacagtgtacgaagctgccgctgtggaagtggatgtatctgcttccatcacactgcaagtgctggtcgatgccccagggaacatttcctgtctctgggtctttaagcacagctccctgaattgccagccacattttgatttacaaaacagaggagttgtttccatggtcattttgaaaatgacagaaacccaanctggagaat

SEQ ID NO: 7587 - DNA, 452 bp, Homo sapiens
cggcaggaagcaggacatcggcgacatcctccaccagatcatgaccatcaccgaccagagcttggacgaggcgcaagcaaagaaacatgccctgaactgtcacagaatgaaaccagcgctcttcagcgtcctgtgtgagatcaaagagaaaacaggcatgtaatgaatttactacacatgtgatgaaccttctccgagaacagagtagaacacgtcccatttctccaaaagagattgaaagaatggtgggcatcatccatcgaaaatttagttccattcagatgcagctcaaacaaagcacttgtgaagcagttatgattttaagatcaaggttccttgatgccagacggaaaaggcgtaacttcagtaaacaggccacagaaatcttgaatgaatatttttactccacctcagcaacccctaccccagtgaagaagccaaagaggagctgg

SEQ ID NO: 7588 - DNA, 542 bp, Homo sapiens
  misc_feature (1)...(542): n = g, a, c or t
gggncgaggtccacaccataagtcaggggcaaactggaactgtgggaaggagctgcagcctgtacttccccttcagttagagcctgaagctggaggagcttctttagcaagtacctgagatcaggaaggaaaggagcagagaaatgaacttccgtattgtctcaattcagtattttactcaagtactgggaaaagccagaattatatacaaagattactatactcataaaagaaaggttcttattaggccctatgaatcataaagccctggaggataatcaatacttcaagaggccaaggataagaactgtagcttatctcttgcatctggacggttcctctaccttgatgttggacggtgttaggcttctgaaaggcacattatttacacatgtatatatacccattgtgctttgcacagaatagtacgtacagaataaatatttgtagaacgagaggcagttgcttttatcacttggcttttataattgggccataagattaaataatcttagtaagattatttattagatgtggcaaga

SEQ ID NO: 7589 - DNA, 545 bp, Homo sapiens
  misc_feature (1)...(545): n = g, a, c or t
ncgaggtggccctttaaatttgtaaattaaactttaatttcttcctaagttataatattgatgtaatcacagaccggacacactagttttagcattctaatccatctgttaaaattatgttgtttgtgcatcacctgaaattgccatgggtactgctggtagtgtgcttacccctcactgagaaatacttacctctgctttttgctatgtggagttgaatagtgctgaaggctgcattaactcgttcagatggcagttcttcccatataatgtataacatctttgttactctacttagcaccttagtgaatacagagatggctgtacagcctccagaaatgctaagttggttggttgtatatggaaatctctgttaatatttgggacaaaccctgggaataattgtgtgagcaaacttatttactaaagaactgcattgctaattatggacttgttgacaccagtggagcccaggggaagaagttgtggttttgggcaaggggttctttcttatcaacttcaaacttacagggtgaagttagcca

SEQ ID NO: 7590 - DNA, 287 bp, Homo sapiens
ctgttcttggaggtcctgcccctgggacttgtccggctcatccggagtgaggagggcctggagatgctcattcaatgagcgggaggcatctctcccttcccgtaacttctcctttaactgcgtcagctctcgttcctgagagtgaaccaggactttatattgcctgagctcctcagcttgcttgagctgctctgcaagcttctcctccttgaactgtcgctcattcctcagcataaattttatgaggtctttacactcttcatacttgtatttcttctgtcggttgg

SEQ ID NO: 7591 - DNA, 579 bp, Homo sapiens
  misc_feature (1)...(579): n = g, a, c or t
nggncgaggtgtctccagggccagtgtctgctgcgatcgagtcccaccttccaagtcctggcatctcaatgcatctgggaagctacctgcattaagtcaggactgaggtgaactccagaaagaagaagctatggccgcagtgattctggagagcatctttctgaagcgatcccaacagaaaaagaaaacatcacctctaaacttcaagaagcgcctgtttctcttgaccgtgcacaaactctcctactatgagtatgactttgaacgtgggagaagaggcagtaagaagggttcaatagatgttgagaagatcacttgtgttgaaacagtggttcctgaaaaaaatcctcctccagaaagacagattccgagaagaggtgaagagtccagtgaaatggagcaaatttcaatcattgaaaggttcccttatcccttccaggttgtatatgatgaagggcctctctacgtcttcttcccactgaagaactaaggaagcggtggattccccagctcaaaaacgtaatccggtacaacagtggatctggttcanaaatatcacccttgcttctggatcgatgg

SEQ ID NO: 7592 - DNA, 393 bp, Homo sapiens
ctgtgaagcatacataaataaatgaagtaagccatactgatttaatttattggatgttattttccctaagacctgaaaatgaacatagtatgctagttatttttcagtgttagccttttactttcctcacacaatttggaatcatataatataggtactttgtccctgattaaataatgtgacggatagaatgcatcaagtgtttattatgaaaagagtggaaaagtatatagcttttagcaaaaggtgtttgcccattctaagaaatgagcgaatatatagaaatagtgtgggcatttcttcctgttaggtggagtgtatgtgttgacatttctccccatctcttcccactctgttttctccccattatttgaataaaagtgactgctgaaa

SEQ ID NO: 7593 - DNA, 439 bp, Homo sapiens
gcaccggcatcggctgacactgctgcctccagctagttatttcgtcctcttccgttcttcacccctacaccttggaggtgaacttctcacctgagggctgtaaagactcgtttgaaaatggagagccaagaaccaacggaatcttctcagaatggcaaacagtatatcatttcagaggagttaatttcagaaggaaaatgggtcaagcttgaaaaaacaacgtacatggatcctactggtaaaactagaacttgggaatcagtgaaacgtacaaccaggaaagagcagactgcggatggtgtcgcggtcatccccgtgctgcagagaacacttcactatgagtgtatcgttctggtgaaacagttccgaccaccaatggggggctactgcatagagttccctgcaggtctcatagatgatggtgaaaccccagaagcag

SEQ ID NO: 7594 - DNA, 473 bp, Homo sapiens
cgaggtcctggacctgtgtaaaccttcaaacactcttttttacattaggtcatgaagttaaattttttactgtttctgtgctacagactcttcaaaggaaaatagttaagtcaatttcaaagaaaatgaccagcacatttttaaaacattagaaatgatttgactttgactatctactgccaaaaaaaggttaaggaatttgtaatgagaagctaaaaactttaaggaattttaaggaactcaaaacaaaaactcattaaatgtaattaaagtgaattctacaaataaagcctcttaatacatttctataatagtcacttaagacttaaattcaaacactagcaaaccacaaaatcagactgtatgactgacatccaaaagataaatataaatcaaaatccgaccccagcattagccaagggggtaggtgttcctcttgaggaaggcaggaattcctcttctgcccctgttgg

SEQ ID NO: 7595 - DNA, 336 bp, Homo sapiens
gcgtgccctctggagaaggccctggatgtgatggtgtccaccttccacaagtactcgggcaaagagggtgacaagttcaagctcaacaagtcagaactaaaggagctgctgacccgggagctgcccagcttcttggggaaaaggacagatgaagctgctttccagaagctgatgagcaacttggacagcaacagggacaacgaggtggacttccaagagtactgtgtcttcctgtcctgcatcgccatgatgtgtaacgaattctttgaaggcttcccagataagcagcccaggaagaaatgaaaactcctctgatgtggttggggggtctgccag

SEQ ID NO: 7596 - DNA, 366 bp, Homo sapiens
ccattttaccagataattatttcagtgaatttgaatttagtgtatttgtcacttaaggaagcttataggcttgggccatatacttcttttttggatatgttaaagaaaaaaaatgttttaggcttgttgtacccctgaagttggagcattgagaactttgtttatatttgtatattaaaattgttcccacccccaaattattaaattggtgattaccttttttccctctccaggaagtatttatccatgtagataatacgttttgaagggctttggatatcaggggctgtgtatgaatccctatcttgtcaaagaaattatttttttaaaactttattttgaatttttataattctagttattcag

SEQ ID NO: 7597 - DNA, 519 bp, Homo sapiens
  misc_feature (1)...(519): n = g, a, c or t
nggncgaggtccaagaacctcttccaccgggccatttctgagagtggcgtggccctcacttctgttctggtgaagaaaggtgatgtcaagcccttggctgagcaaattgctatcactgctgggtgcaaaaccaccacctctgctgtcatggttcacttgcctgcgacagaagacggaagaggagctcttggagacgacattgaaaatgaaattcttatctctggacttacagggagaccccagagagagtcaaccccttctgggcactgtgattgatgggatgcttgctgctgaaaacacctgaagagcttcaagctgaaaggaatttccacactgtcccctacatggtcggaattaacaagcaggagtttggctggttgattccaatgcagttgatgagctatccactctccgaagggcaactgggaccagaagacanccatgtcactccttgtggaagtcctatccccttgtttgcatttgctaaggaacttgattncagaagcccctgagaaaata

SEQ ID NO: 7598 - DNA, 449 bp, Homo sapiens
  misc_feature (1)...(449): n = g, a, c or t
ctggagagtgtngatcccaaaaattacccaaagaagaagatggaaaagcgatttgtcttcaacaagatagaaatcaataacaagctggaatttgagtctgcccagttccccaactggtacatcagcacctctcaagcagaaaacatgcccgtcttcctgggagggaccaaaggcggccaggatataactgacttcaccatgcaatttgtgtcttcctaaagagagctgtacccagagagtcctgtgctgaatgtggactcaatccctagggctggcagaaagggaacagaaaggtttttgagtacggctatagcctggactttcctgttgtctacaccaatgcccaactgcctgccttagggtagtgctaagaggatctcctgtccatcagccaggacagtcagctctctcctttcagggccaatccccagcccttttgttgagccagg

SEQ ID NO: 7599 - DNA, 359 bp, Homo sapiens
ccaaagaatttgttacatcagcaccaaaaccatctgacttgtattatgaaccttctggagaaggatctggagaagtggatattgttgattcatttcacacttctgcaactactcaggcaaccagacaagaaagcagcaccacatttgtttctgatgggtccctggaaaaacatcctgaggtgccaagcgctaaagctgttactgctgatggattcccaacagtttcagtgatgctgcctcttcattcagagcagaacaaaagctcccctgatccaactagcacactgtcaaatacagtgtcatatgagaggtccacagacggtagtttccaagaccgtttcagggaattcgaggattcc

SEQ ID NO: 7600 - DNA, 250 bp, Homo sapiens
  misc_feature (1)...(250): n = g, a, c or t
ccaagacggnctcaatctcctgacctcgtgatctgcctgcctcggcctcccaaagtgctgggattacaggtgtgagccactgcacacanccaaacattanactttcaaaccaaatttagatatagtgtttataagaactcgtggngtatctcttcaaaacctggcatcttgaaaccaanatctggtaaacagaaacatcagtatgggggcctttgatangggaatactgaattgcangcctacncagcga

SEQ ID NO: 7601 - DNA, 380 bp, Homo sapiens
ccaaagcacacatatcggcttttctcactatatatctaaaattgctattgaggaaagtaggccaaatttcaatgagagctatttgaagaagggagagagaaattactttcacctgactgaaagaagtggtagaggtgtacatagctttttattcttaattatctagtctggcaaaagacagtaatctcaaatacaacaatacactctaagaaaaggttcccctcccggctctcacaacgtctcccttcctaataaattttaaaagcataagggtcacagggccagttacatagtatgtattcaataagatttgttaaatgaatggcacttcaagttcttattaagaagctaggtctcttttttccccctatccttcccaa

SEQ ID NO: 7602 - DNA, 297 bp, Homo sapiens
cctttgtatcagggcaggtctcctgcagagtcttctctttgtcatgggagaagcttcattgtgcgttgaggctacttctgtgttattgaggagtctgggcttttttctgataccacgtttcttttctttcctgggccattgtagcaagacactaagggcgactaccagaaagcgctgctgtacctgtgtggtggagatgactgaagcccgacacggcctgagcgtccagaaatggtgctcaccatgcttccagctaacaggtctagaaaaccagcttgcgaataacagtccccgtgg

SEQ ID NO: 7603 - DNA, 248 bp, Homo sapiens
ccatcatctccaactctttaccccaacctggcaccttgtagggggctagaagggtgaggggaggtgtctttcacttatgcttaggtcactcttagaggactatcctcaaacttgaggtgacagggaactcttcacgggggcaggatttgatgttttgtttttagccatgtttgtcaatgacaatgtcaatttctagttccaatttgtacccttgtctcatttctacattaaaaacaaaaaacaatcat

SEQ ID NO: 7604 - DNA, 167 bp, Homo sapiens
  misc_feature (1)...(167): n = g, a, c or t
ccaagaacctcttccaccgggccatttctganantggcgtggccctcacttctgttctggtgaagaaaggtgatgtcaagcccttggctgagcaaatttctatcactgctgggtgcaaaaccaccacctctgctgtcatggttcactgcctgcnacagaagacggaa

SEQ ID NO: 7605 - DNA, 384 bp, Homo sapiens; identical to SEQ ID NO: 527

SEQ ID NO: 7606 - DNA, 333 bp, Homo sapiens
  misc_feature (1)...(333): n = g, a, c or t
cgcgtggatggatacagagcggcttctacacggcgccatcaacattctctttatgaacgtgagtggattctccaggcaaactatgcactatttcatggtcggaaagaatcaaaggaagtttaaatgagggtggagttaaactgtgctaaattacagtagtgcttattagtaactagatttcaaaaggttacagaaaatttacattctctacacaaaaactgcatctcctgcacagacaacatcgacatcgacacaggaaggaaactgattgtccattctttgcccangaagnctcngtactttatagattcgnctttacctnttttttgttnc

SEQ ID NO: 7607 - DNA, 127 bp, Homo sapiens
  misc_feature (1)...(127): n = g, a, c or t
ccatgcaggagttcatgatcctcccagtcggtgcagcaaacttcagggaagccatgcgcattggagcagaggtttaccacaacctgaagaatgtcatcaaggagaaatatgggaaanatgccancct

SEQ ID NO: 7608 - DNA, 207 bp, Homo sapiens
ccactgtgtagcaccttctaattcaatttcatcggcagttgtaataacagttccagcctcaggtgttttaatggtgggaaacatcttgattgcttctccagaaacttgaccataggttttgttttggaaatcttggagaatctcagttccttccacagcaataagttctgtgggagaagcttccatttcttctaataactcaggttt

SEQ ID NO: 7609 - DNA, 169 bp, Homo sapiens
  misc_feature (1)...(169): n = g, a, c or t
ctgtgctgccctgggtcctggataaaccaaaatgctttggattctggaaaacgtattgaagaggcatttataccactattaactaggaggtattttaggtgtggctaaggctctgaagtaatctcaattttcaaaatactgagattttcttccctctccggggtctatn

SEQ ID NO: 7610 - DNA, 212 bp, Homo sapiens
  misc_feature (1)...(212): n = g, a, c or t
ccagtgtatggaatggtatacgatgagcacctgcccccctgaaaattgttcaggctactgtacctgtagtcattgcttggagcaaccaggctgtggctggtgtactgatcccagcaatactggcaaagggaaatgcatanangattcctataaaggaccagngaatatgccttcgcaagcccctacaggaaattantatccacnncccctgc

SEQ ID NO: 7611 - DNA, 312 bp, Homo sapiens
ccaaagctctgtgtcccagatggtgtatggcccataatccacccaacagcagcaaaggaccaggcaaaggagaacaggagcagaagcctcccagccactagccttttgggctcagtctctccaataatcctggagaggggcttcgttgggtctggacacctaccatgcattctgtgacctttccctagcttccaataaataactgtttgacgcccagagtacaggataccacaatgcactcttcctgcgtagagcacatgttcccatctgctcccattcctcaggaaccttgaattctactctgctggcctt

SEQ ID NO: 7612 - DNA, 313 bp, Homo sapiens
ctggggaaagggttgcagcagcaaggcatccgtggccgcattcagaggctggcccccctccttgcctttactctcgagtcttacttaacctaaaagacaaactgggtcaacttggtaaatgaacacagtcaaagacttagccataagaggtaagggaccagtcaatactcccaaggctggttaggcccttcaacatgtaggtggatgtgtatatgtatacatcgctacactaacatacagatctagccctatgggtatatatacgcatttatggctatatagaaaaactatgccaatactaaccacacagaac

SEQ ID NO: 7613 - DNA, 374 bp, Homo sapiens
  misc_feature (1)...(374): n = g, a, c or t
ctgttggtgttancagtgctcttgccgcttggggcattgccattgtaaanacttgggaaatccctagaaatganccantatatgcgcttttacattttanntggagaaataaacatatgancatatatttcattacacananaaaaaganagctaggcttggccatgaacattcctttatcttcctacttaatgatanggaaatttnatggtcttctgatgggaaataccctcctgatttgcttcctgtcatcatagagatggaggngcttcatcctatggngagcggnatcagctcactcaaaggcggtaatacggttatccacagaatcaggggataacgcatgaaagaacatgtgagcaaaangccagcaa

SEQ ID NO: 7614 - DNA, 290 bp, Homo sapiens
ttttcacacttctagtaagcctctacctgcacgacaatacatgaagtgtgaaaacgtaggcttggattaaggcggcagcgatttctaggatagtcagtagaattagaattgtgaagatgataagtgtagagggaagggcttctatttcgaccgcgatgatgtggctctggaaggcgtgagccacttcttccgcgaactggccgaggagaagcgcgagggctacgagcgtctcctgaagatgcaaaaccagcgtggcggccgcgctctcttccaggacatcaagaagccag

SEQ ID NO: 7615 - DNA, 159 bp, Homo sapiens
ctgagggaccagctctacttccacctggagttgcacagtctcaggctgggggcctcaggagaggtcacagcccctcagtctcttctccttcccctgcctgcaacaggctgcctgccccgccttccccaacacctcgctccatatgatagagcgtggcag

SEQ ID NO: 7616 - DNA, 263 bp, Homo sapiens
  misc_feature (1)...(263): n = g, a, c or t
ccacactctacttctgcttctgccacctatggggtcgaggcaggtgtggtgccttggctaagtccacagacttctgagaggcccacgctttcttcttctccagaaataaaccctgaaactcaagcagctttaatcanagggcaggattccacgatagcagcatcanaacagcaagtggcagcgagaattcttgattccaatgatcaggcaacagtaaaccctgtggaatttaatactgaggttgcaanaccaccattttncct

SEQ ID NO: 7617 - DNA, 252 bp, Homo sapiens
  misc_feature (1)...(252): n = g, a, c or t
ctgatcaggtcgaggtaacccaagaggacatgcagccctggacgccacgagaaatcctgttgtctgtcagttgagtggatcaaaggtgcaccggcccagaaatggcctccagcaacaggtgcttagatgttctgttctaggggtgccagcgagatggtacagtcattgtttaccactgccttttcccatgaaaacaacgaacaactccatggggacaggaatttgncttttattctttgccatatncccagt

SEQ ID NO: 7618 - DNA, 317 bp, Homo sapiens; identical to SEQ ID NO: 664
  misc_feature (1)...(317): n = g, a, c or t

SEQ ID NO: 7619 - DNA, 317 bp, Homo sapiens
  misc_feature (1)...(317): n = g, a, c or t
ccattctgtctagctgtaaagttaggctgtgctatccaaaagagctttactttagagtcatgagaagcagcactgatctttgcaaaacttaccccaaaaaatggggagagagaaaaacaggaagaaaagtctctttcttaggctaccagtcagttaacaaagtatcttagattaagatttggaaaccaaagaatgcataattaggagtgtaccatatcatgcaaagtctatgaaatactaaataaggtaaaacagttaatcatttaaagcacgatgagcaaattctcttatcatacggctattctnatcccgnacga

SEQ ID NO: 7620 - DNA, 287 bp, Homo sapiens
  misc_feature (1)...(287): n = g, a, c or t
ccagaaaagatgaaatatttgaacttatccagcacacgaatacacagtgtaacaggctgcattcccaagacactggaaattttagatgttagcaacaacaatctcaatttattttctttgaatttgccgcaactcaaagaactttatatttccagaaataagttgatgactctaccagatgcctccctcttacccatgttactagtattgaaaatcagtaggaatgcaataactacgttttctaaggagcaacttgactcatttnacacactgaagactttggaagc

SEQ ID NO: 7621 - DNA, 196 bp, Homo sapiens
  misc_feature (1)...(196): n = g, a, c or t
ctgcatggctcccgctctccctccttcaagtctctgctcaatgncacttcattaaaggcaccttctataaactaccttgtataaaatattatttattttctctatcccggcattctaatttctcttatcctaatnaattgttctttagccnttattttgatgactattatgnntgaatacaggcagccctcacttt

SEQ ID NO: 7622 - DNA, 288 bp, Homo sapiens
ctgctcccaaatggcgaattttttttcaattacctttactggatctgccaagtttgttttgaacaatcctggttcaatgcatgagacgtgcacaccaaaagctttcatgtcccgtcttaagctgtcattgaaaccttccactgcatatttggatggagtatagccccctccaacgattgcaaggcgacctccaacactggagacattaataactctcccttgagctttcttgaccaaaggaagcatatttagtgtcacactgatgagtccaaacaggttcacttcaat

SEQ ID NO: 7623 - DNA, 272 bp, Homo sapiens
ccttgcttactgcctgcaaattttgagaaatttaaaaataagcattctaacacttttattcccacagaaaaattccaagtcaaattatcaaatcaaacacaaaaataagtcttacctcttgtataagcatgttgtactaaaaaaaaattttgaaacattttgtatattggagatctctctcatcttactgttctttgctttaaattcctggcacttctttttactgtctataagagaaaacctatcataagcccaattttttttttccactt

SEQ ID NO: 7624 - DNA, 224 bp, Homo sapiens
  misc_feature (1)...(224): n = g, a, c or t
cctgagccaccgtgccttgccacaaactatttttaatcattaaaaaagaaaaaggaaaataaggcaggccggcttctcacattacatgcttttagaaaaaggtctcatccttgaagcagctttgttatatgcagagcacagtactggcttcaaaaaatatataaaggttctgtgcactggcactgnttacatgtgaacaatngccatcaacttctgngaaaatt

SEQ ID NO: 7625 - DNA, 275 bp, Homo sapiens
  misc_feature (1)...(275): n = g, a, c or t
ctgctatgcaaagttctaaggcccgagtcaaatcctgggcatctccacagatgtgtggtagggcacgggctccagctcttgtgtaagaaagaacaggaatgagaacagctttattttgtagcgccaaggtctcactatgctcacacctgtaatcccagctttgagaagaggatctggcaccagaagggtctggtagaagaaagtgggaaaggtgaaggacaggaatcttttcctttctgctacaacctaaggacagaggcacatgactccagcna

SEQ ID NO: 7626 - DNA, 121 bp, Homo sapiens
ctgtagagtgggcttatcatctttcaacacgcaggacaggtacagattcttttccttgaggcccaaggccacaggtattttgtcattactttcttctccttgtacaaaggacatggagaac

SEQ ID NO: 7627 - DNA, 357 bp, Homo sapiens
ccacattggagatgtcaccttctgctctcacgcaaccacaattactgaagatgtttgtggtttcttttccagctacatgaatcacccgcaaaagatcaatcactctttccagcaagccagggaaaacctgcagatagccgagcagctcagtattcacagtcatttcgcacaggacgtcgagaagcctaattgtagccagtgcctcctcatcatcaggaggctcctcagaggccagcttgagcacagtcttgcactgatccacaaaggtgcttgcaatcaactcagcatgccgcaaaaacacagggatgtcatccttggtgagtggctcatcactcgttatcttggctatcataaggt

SEQ ID NO: 7628 - DNA, 185 bp, Homo sapiens
ccgggatgatgagaacaataacccagatatccaggatgtgcttgggaagcacgacttccatggggacttggctgactgcatccatgttgcttcactcccagatggcggcgagtctgcggaaagttcctgggtcagggatggctcggtgcttctcagggtccccaggactgcacgggatctggcag

SEQ ID NO: 7629 - DNA, 197 bp, Homo sapiens
  misc_feature (1)...(197): n = g, a, c or t
cctatgatttatttgaaggtagcttttgtgtctggtgtgaggtaagggttgaggttctttgtgtgcgtatgaatctccaattgttctaggaccatctcctcaaaatcccagcaatagcttccctttcttttttggcgagctcactacgcttgaaatattttttattttccaccagcaggttcctgtnctccaccana

SEQ ID NO: 7630 - DNA, 246 bp, Homo sapiens
  misc_feature (1)...(246): n = g, a, c or t
ctgcaccatccccctggctgtcttcaatttattccagtttgatcccagtagggtttgagagcagaaatggaagatttcttcttcaaggatcagctcagaaagccgggatgggggcggtcactaaaggggtaggatagacggccagggccactatccctaccctctgtgtgttcctaaagtgcttatgagaggtggtggggaggggtgtcatcttcactatccccactttacggatgancagactga

SEQ ID NO: 7631 - DNA, 384 bp, Homo sapiens; identical to SEQ ID NO: 434
  misc_feature (1)...(384): n = g, a, c or t

SEQ ID NO: 7632 - DNA, 219 bp, Homo sapiens
  misc_feature (1)...(219): n = g, a, c or t
ctggctgtgatttttgctacaggccacagtcaggagcacatgatagtagcattggcacaggccacggtggaccgtttttcagtgtacagttccagcaaaacctggtattctccctgaggaatagtaaattcaggattattgacaggcccancatagtaaatctcctttccttcttccacagaaaganaacttgggcagagccgcctcacanatggnata

SEQ ID NO: 7633 - DNA, 236 bp, Homo sapiens
  misc_feature (1)...(236): n = g, a, c or t
ctgttgattactatactattctgtctcttcagtttaattttatgagatgatgccaaatctattttcagcatttttactttttttgccaatctgatatatgttaacagtagttcattattttaaaaattatatattttgtggtcatctttcttccacagtacttttaggcactaangaaaaatgcttctaagtatttctggtgattaccacgttttaagttttcaggaaatcatnta

SEQ ID NO: 7634 - DNA, 325 bp, Homo sapiens
  misc_feature (1)...(325): n = g, a, c or t
ctgtccattgagaacctggaccagtctctggctcactatggccggcccaagatcgacggggaactcaagatcacctcggtggaacggcgctccaagatggacaggtatgccttcctgctcgacaaagctctactcatctgtaagcgcaggggagactcctatgacctcaaggactttgtaaacctgcacagcttccaggttcgggatgactcttcaggagaccgagacaacaagaagtggagccacatgttcctcctgatcgaggaccaaggtgcccagggctatgagctgttcttcaagacaananaattgaagaanaagtgga

SEQ ID NO: 7635 - DNA, 153 bp, Homo sapiens
  misc_feature (1)...(153): n = g, a, c or t
ctggcctgtcatataaaacatactgtcattgagcttaagctccgcttgttctgaggtttcacctccatgtgtttcattggtgcaaaagtggatctcttaactggtcacttanttctttctttttcanaaagatagtatgttcactggtatatt

SEQ ID NO: 7636 - DNA, 197 bp, Homo sapiens
  misc_feature (1)...(197): n = g, a, c or t
ccatcgtgcctctttgggcttccatgggcnnctacatcaccaggatggcgcagaagtaccatgagtactcccactacaaggagcaggatgggcaggggatgaagcagcggcctccgcggggctcccacgcgccctatctcctggtcttccaagccatcttctacagcttcttccatctgagcttcgcctgcncccag

SEQ ID NO: 7637 - DNA, 326 bp, Homo sapiens
  misc_feature (1)...(326): n = g, a, c or t
cctcctaatcctctgtggttttctgtggactcgtaaaggaaaactaaagattgaagacatcactgataagtacatttttatcactggatgtgactcgggctttggaaacttggcagccagaacttttgataaaaagggatttcatgtaatcgctgcctgtctgactgaatcaggatcaacagctttaaaggcagaaacctcagagagacttcgtactgtgcttctggatgtgaccgacccagagaatgtcaagaggactgcccagtgggtgaagaaccaagttggggagaaaggtctctggggtctgatcaataatgctggngttc

SEQ ID NO: 7638 - DNA, 111 bp, Homo sapiens
gctgccgtgaaggacacacagcctgaggacggggtggaaatggacactcggcagagcccacacgatgaagacccccaggcagtgacgtatgccaaggtgaaacactccaga

SEQ ID NO: 7639 - DNA, 278 bp, Homo sapiens
  misc_feature (1)...(278): n = g, a, c or t
ctgaaggtttttttattctttctttttttaaagtgagcccatgatttggtgtctttcccagattatcccctttgcgacaacacaagcaaaaatatttacaaaggtaaggcatagtcaaactacataaagagaaaaaatcatgaggaaaatacatgaaaaagactaaagacttcgccataacaaggtcttagtgataatagtgtccgtaaagatgtcatcanaattggtaaagtcaaccatgctgcaaatataccctttggattacaaaagagcacaat

SEQ ID NO: 7640 - DNA, 211 bp, Homo sapiens
ctggtattttgcctaagatctatttaagataaccttttcttatattttttacttaatattgggcataatcgtatcattcaagattaagtctgggttatttctttgataagaactgaatgtggccgggcgcagtggctcacgcctgtaatcccagcaccttgggaggccgaggtgggtggatcacaaggtcaggagatcgagaccatcctgg

SEQ ID NO: 7641 - DNA, 273 bp, Homo sapiens
  misc_feature (1)...(273): n = g, a, c or t
ccagccccactgaggagacacagcagttctaatgggtgactatgctggaggtctggtggtgccggctgtcagaggctaacagtgctgggggtcccctggctttggcttgcagaaggcagcacaagcattccactgatgtttgctgggctttcagcaagcanaaccaagctgtggagacttctatgaaactgactgaattgtttccnatagtttgcattattagtctgggcaatacctcacatctntttcttctccaaatcatattcctatctt

SEQ ID NO: 7642 - DNA, 276 bp, Homo sapiens
  misc_feature (1)...(276): n = g, a, c or t
ccactgacaagtttcaggcatagaatgaaaactattcttactgatatcaatgttagtcaagtttttcagagtgagcaaagtctctccggttttttccaatgatgccaaatgattttgccttaaaattaaagtttgtagagagggccaggcatcctcacaggctgaatttttcaagtattcttcaaccatcaaattttcactgagatccaagtattctaatgattttaaatgttgtnaaagnaaacaaggaaccanaaaaactttactgtnntctac

SEQ ID NO: 7643 - DNA, 127 bp, Homo sapiens
  misc_feature (1)...(127): n = g, a, c or t
ctgtcaaccgggaatactatcgncaacagatggaggaaaaggctccgcttcccaaatatgaagagagtaaccttgggctgttggagagcagngtgggggactcnaggctccccctggtcttgagaaa

SEQ ID NO: 7644 - DNA, 290 bp, Homo sapiens
  misc_feature (1)...(290): n = g, a, c or t
aggtctgactgagggatggctctaaatagcgggctgcccggtcttccaactcccancacagccgcccattctgttcaccccttcaactgtacaaatagccctggttgctttttttgtttttgtttaaaaaaaaagaagactcggtctttgtcattgagtccaggtattttaaaaacaccagcaaaggctataaccaggtcatgaaaatgttgaatattatcaaagacgatactaaaatattcacaaagatatttacaaaagcgattcttaaaataattgatttgcatact

SEQ ID NO: 7645 - DNA, 261 bp, Homo sapiens
  misc_feature (1)...(261): n = g, a, c or t
ctgaacgcaaatcagccactttaattaagctaagcccttactagaccaatgggacttaaacccacaaacacttagttaacagctaagcaccctaatcaactggcttcaatctacttctcccgccgccgggaaaaaaggcgggagaagccccggcaggtttgaagctgcttcttcgaatttacaattcaatatgaaaatcacctcggagctggtaaaaagaggacctcggcgacctcngtcgtaccacgctaagtcgaattn

SEQ ID NO: 7646 - DNA, 349 bp, Homo sapiens
ccaagcagtccctgcaaatgggacttacgagtttggttatcagatgcactttatttgtaatgagggttattacttaattggtgaagaaattctatattgtgaacttaaaggatcagtagcaatttggagcggtaagcccccaatatgtgaaaaggttttgtgtacaccacctccaaaaataaaaaatggaaaacacacctttagtgaagtagaagtatttgagtatcttgatgcagtaacttatagttgtgatcctgcacctggaccagatccattttcacttattggagagagcacgatttattgtggtgacaattcagtgtggagtcgtgctgctccagagtgtaaa

SEQ ID NO: 7647 - DNA, 136 bp, Homo sapiens
  misc_feature (1)...(136): n = g, a, c or t
cgcagcgggattctcacacctanaccgtcgcgagcgggttctcaagttaggggagagtntcgagaatcagccgcgctgcgccttccacactgggcgctatgacttcaancctgcttctattgacacttcttctgaa

SEQ ID NO: 7648 - DNA, 217 bp, Homo sapiens
  misc_feature (1)...(217): n = g, a, c or t
gtttatttcttgaactttcagaaattcaagcttaaagcatcacacgtttttctaatattgtgtggcattttctgtcattttacttttttaacctttatatggaataacaaccatcagccttgtctttcagatgtgccatttgggggtgctaaagctggtgttaagatcaatcccaagaactatactgtaaatatganagtgatacttgttttttttt

SEQ ID NO: 7649 - DNA, 162 bp, Homo sapiens
ctgggggaggggcaggcacatgcattaagccccttccgtaggcagagccatggatggacagccccatgggggccttgaaggcagaggccctggaagcagcaaaaacggggctggataaagctactaatgggagggatggtagagcccagctccccagtcccc

SEQ ID NO: 7650 - DNA, 260 bp, Homo sapiens
  misc_feature (1)...(260): n = g, a, c or t
ctggcagcctgcttcctgcatgtattctctttatcaaccacctatttatgcagtcagcatgcctcacacctgagatgactgtgaaacaaaaaaggagactgttgctcttgccaatttttttccttaaccctgcatctcaaactcgaggcgtatacctaagtaganaaagtcccaccgcaccaaattaaccaaacgattttgttactgtgaaaagtcatctttatgtaacaaatgagaagaatagttatttataaataatg

SEQ ID NO: 7651 - DNA, 138 bp, Homo sapiens
  misc_feature (1)...(138): n = g, a, c or t
ctgggggccctcaggtggagagagctgcgatccatccaggccaagaccacagctctgtgatccttccggtggagtgtcggacaagagagcttgccgacgatgccttcctgtgcanagcttgggcntatcctttacgcc

SEQ ID NO: 7652 - DNA, 264 bp, Homo sapiens
  misc_feature (1)...(264): n = g, a, c or t
ctgtgccataagagcattaggtggttttagctcttatctggggtatgaaagcaatttagctcatctcacagaaacaaaagcaggtgctgaatcatgaaaacctcaattatttttagcatgcctcttaatttttctttcccctggtttcttgtcgtctgtgcttgattcttgaacaggtaaccacttgagaggatgccggcgatagatgggccatggaggaagtgtcagcaaacatgaaaaagcaaatccggccataactatatn

SEQ ID NO: 7653 - DNA, 272 bp, Homo sapiens
cgggaaatgactgtctggttttattatggtttataaattaataaatgggctatttaattctgtatataaatttacagcaagtaccgtacactggaataaatgaggcaatcacgttacaccaaatcagcagatcaaaagacaaacacatatttctgagacttgaaggtccacatccccccgccccctgccaagatggagtcttgctttgttgctcaggctggagtgcagtggcgcagtctcagctcactacaacctccatcccccgggttcag

SEQ ID NO: 7654 - DNA, 130 bp, Homo sapiens; identical to SEQ ID NO: 7318

SEQ ID NO: 7655 - DNA, 251 bp, Homo sapiens
  misc_feature (1)...(251): n = g, a, c or t
gagccatttctaatctttctctggggggaacaggccacagaactgtgttagaggtgaaccatcttaattactagttctattacctaattcagcttccttgtttggtctgctgtggatctgccttattgcatatgccatgcatcacataatggatgcatcanataatggtgttagacaaagcttcattgtgaacaacctaatgcattttacagaaacantctcatcacattttttntagcctttcctacatt

SEQ ID NO: 7656 - DNA, 256 bp, Homo sapiens
  misc_feature (1)...(256): n = g, a, c or t
aacttatggaagcacattaaaagttacataaatattaccagagagcctgatgctctctgatagctgtgccataagtgcttgtgaggtatttgcaaagtgcatgatagtaatgctcggagtttttataattttaaatttcttttaaagcaagtgttttgtacatttcttttcaaaaagtgccaaatttgtcagtattgcatgtaaataattgtgttaattattttactgtagcatagattctatttacaaaatgntt

SEQ ID NO: 7657 - DNA, 345 bp, Homo sapiens
ctgatggaaaacatcagcgtgcatttgggttcctaaatcatttcaaaacattaatcaggaagactcacagcacccagtcctatctaagccatagattcctcatttagggaatgggatgatctcacattcacatgatctgtaagggctctatttatcccagcacagttcaattaggctgaattgcaggaggcataagaaatgataatcaggagagaaattatggcaaaggcagttcaactccctacaaaggggaaaaactacaagctccagaaaggccaagtgccagtccacattacacaatggtatttgccggaacaacaagcagattacagccctgcacggtac

SEQ ID NO: 7658 - DNA, 124 bp, Homo sapiens
cctagaagatgctggaaggtaccaccatctttgttgggaagggaatgcgatgacgagctggaaggttcctgttctcgtctgtaaaatgactgtttgaaggtgaaaaacatccatgttttcttca

SEQ ID NO: 7659 - DNA, 298 bp, Homo sapiens
  misc_feature (1)...(298): n = g, a, c or t
ggacacactgtgcagtgggtgattcacagcgtgggcccaccttagctgctgctctagagtactgctgttcccactcactaagtgattctttttttaatattctcaaattgatgatgctaagaacatcttcacggattgaaggaagtgcaaaataaggtcaaatcctgagttggcaagtacttctgttcttaagattgtttatactanctggtcttattgttgtaataagtaggaaaaggtccttttcaaatttcattcngcctancttttcctttatgtgataattctttgttcaaag

SEQ ID NO: 7660 - DNA, 188 bp, Homo sapiens
cctgagttcataccctggttctgcatttagcttctgttacctgtaaagacttgaaaaatttactcaacctttctaacctgttctctcataattgtgatgttaattgctagttgaaagaacagcatggtgtatgtgagacatatggaatagtccgtggcagataggagtactcacctatgtatattcca

SEQ ID NO: 7661 - DNA, 284 bp, Homo sapiens
  misc_feature (1)...(284): n = g, a, c or t
ccaccccggagatgacacgaggctcacatgactctagacacttggtggaaagtgaggcgagaaaaacaatgacttgggccaattacacgactgcaaagctagagctgccaacagggctccagggagcttggcttctgtagaagttctaaggaagcggtacnaactccacggcggtggggcgctaactagcagggacccctgcaagtgttggtcgggggcctcganctgcctgagctgacacgangggangggtctgcgtagccaacaggngaccgaagggcttg

SEQ ID NO: 7662 - DNA, 246 bp, Homo sapiens
ctgacaaggaaaagatcacatctcttccaacagtgacagtaactcaggaacaagttgatatgggtttagagtgtccagtatgcaaagaagattacacagttgaagaggaagtccggcagttaccttgcaatcacttctttcacagcagttgtattgtgccgtggctagaactgcatgacacatgtcctgtatgtaggaagagcttaaatggtgaggactctactcggcaaagccagagcactgagg

SEQ ID NO: 7663 - DNA, 416 bp, Homo sapiens
ctggaaggacaagcctctggtcaaggtcacattcttccagaatggaaaatcccagaaattctcccatttggatcccaccttctccatcccacaagcaaaccacagtcacagtggtgattaccactgcacaggaaacataggctacacgctgttctcatccaagcctgtgaccatcactgtccaagtgcccagcatgggcagctcttcaccgatggggatcattgtggctgtggtcattgcgactgctgtagcagccattgttgctgctgtagtggccttgatctactgcaggaaaaagcggatttcagccaattccactgatcctgtgaaggctgcccaatttgagccacctggacgtcaaatgattgtcatcagaaagagacaacttgaagaaaccaacaatgactatgaaacag

SEQ ID NO: 7664 - DNA, 208 bp, Homo sapiens; identical to SEQ ID NO: 278

SEQ ID NO: 7665 - DNA, 258 bp, Homo sapiens
  misc_feature (1)...(258): n = g, a, c or t
ctgaaaaatatttagatctacttgctctaagaataaggtcaacattaaacattctcagatgaaaagcttgctggatgaaatagtgcaccatcagaataaagcatgcaatatatttacagtcagatgaaacaagtgtgtccataaatcaaccaaaagaccatctcctcctttangaaatacatgtattgcttagccannaccaataagttaacgtcntgtgaataattttgggtattctggccttcctgaatctcatac

SEQ ID NO: 7666 - DNA, 463 bp, Homo sapiens
ccactggctcaccagcttcccaccctagcattcattgctagcttaccaatcttaaggctaataattttatcgcacattcaacttcaaaacacaccagtgtttaccattaccactaatcactgaatgccatgaagccatggcactgaaccaggagctttcaccttttatgtgaatttaaaatggtactgtggaggctgaggcaattttcttcaggctaacccagattttctaaagcccaacttaaaaggtctacacctgccaaactaaaaaaaacgcagccacttgaaaataaaccagcagagcattgccatcactccgataaagctgcaggtttcatcacatgcaccagacaaatctacagggctagtttcagttctctccttttaaagaatttattaagcctgttataccacacagtatgttttatacactgacatacaactccctaataagataaagcaaa

SEQ ID NO: 7667 - DNA, 279 bp, Homo sapiens
ccacaacaactgacgcggcctgcctgaagcccttgctgtagtggtggtcggagattcgtagctggatgccgccatccagagggcagaggtccaggtcctggaaggagcacttcatctgtttagggccatcagcttcaaagaacaagtcatcctcattgccactgtaataagccatcatttcactggcgagctcaggtacttctgccatggctgcttcagacacttgagcaatgaagattggctgaagagaatcccagagcagcctgttgtgccttgtgc

SEQ ID NO: 7668 - DNA, 448 bp, Homo sapiens
  misc_feature (1)...(448): n = g, a, c or t
gtttnaataaatgttgtggacttccatttgtcaaanaccaaaacaaaggaaccccaaccttacatgtaatacaaacttaactcaaaatggatcatatatctaaatgnaaaatggaaagctataaaactgaaaacanactatntttacaacctatgcgtaggtatagtttttagacattacaccaaaagcacatgccgtaaaagaaaaaatagataaattgnnggatttcattaaaatnaaaaaactttttctctctgaaaaatcctgttaagctgggcgctgtggttcatgcctgtaatcccagcactttgggaggctganttgggaagaaattaatagcttgaggccaggagttcaagatcatcctgggcagcaaagtcatacactcttgagggaagagagagaccttctcatattgttttatattgttttatactcagtacctgtt

SEQ ID NO: 7669 - DNA, 297 bp, Homo sapiens
ctgtgttggtagtgctgtgttgaattacggaataatgagttagaactattaaaacagccaaaactccacagtcaatattagtaatttcttgctggttgaaacttgtttattatgtacaaatagattcttataatattatttaaatgactgcatttttaaatacaaggctttatatttttaactttaagatgtttttatgtgctctccaaattttttttactgtttctgattgtatggaaatataaaagtaaatatgaaacatttaaaatataatttgttgtcaaagtaaaaaaaaaa

SEQ ID NO: 7670 - DNA, 161 bp, Homo sapiens
  misc_feature (1)...(161): n = g, a, c or t
ccactgcttgngaagctaaaggtggtgaaggcanacacaggcaatggggccaggagcatatgcctttcaattccttcctggcaaccttcctgtcttctcctccactgactcttccctctcatcaccctctctatggtgccaaaataggcttattgnantgc

SEQ ID NO: 7671 - DNA, 388 bp, Homo sapiens
  misc_feature (1)...(388): n = g, a, c or t
attggctggaacattttaaaccttttcagcatcgatcctatttaaatactttgtagtacccttcatgagcaatgattaagactacaaaacaaaggaagaggtataataaggatggttcccatctgcctattttcttaatctatttgtctactctggcttccctagattgtgcctgctttctcagaatgaaaagaaaattaataagtgtttcaaaagtatgtactcaagagccagtttgccagagtacacgtcattcttgccattgcttagactggttccacattgtaaaaaaatgtagtgctaatcctgatcaaatgaatatgcctcccacatccatctcccttttacctgttacaattgnctaagactaattctcattnctttattt

SEQ ID NO: 7672 - DNA, 468 bp, Homo sapiens; identical to SEQ ID NO: 435
  misc_feature (1)...(468): n = g, a, c or t

SEQ ID NO: 7673 - DNA, 315 bp, Homo sapiens
  misc_feature (1)...(315): n = g, a, c or t
ccagaaaggaaactgacgagcaggtcacataatcaggagccagactcctgagttgtaactgggcccccaactttccgtgtgattattaaaagagcccttcttcttttctaaaacttagtgccaaatgctgaggagcataatgtaggtgagaatttttttttttgggggggngaaaattaagctaaagcttnttgaagtacctantttccaggggctttttattgtatttttccttatggccctaaaatgacatcaacttggaaatgaagcttttgntgaaaaanctggaggtgatantggtggtgattttggnag

SEQ ID NO: 7674 - DNA, 414 bp, Homo sapiens
cctctctccataccgagccttgctggactctctacagcttggtcctgattccctcacggtccatctgatccatgaggtcaccaaggtgttgctggtgctagagcttcaggggcttcaaaagaacatgactcggttcaggattgatgagctggagcctcggcgaccccgataccgtgtaccagatgttttggtggctgatccaccaatagcccggctttctgtctctggtcgtgatgagaacagtgtggagttaaccatggctgagggaccctacaagatcatcttgacagcacggccattccgccttgacctactagaggaccgaagtcttttgcttagtgtcaatgcccgaggactcttggagtttgagcatcagagggcccctagggtctctttctcggataaggttaatct

SEQ ID NO: 7675 - DNA, 266 bp, Homo sapiens
gaaaatcattcaaccaagagaagagtcaagtgaatatcgtttgtttatttgctagtgagtttctttgtaacgttgattttattaaatgataatatttggttagtatgtcctatgttaataaaaatgaacaaaattaattttgctatgttcaggtgtcttgataaaataacaatgctccagtgttgttgcttacatttagcactaaattttaacacagggtcagtgagtccaggttttaacttcttcatgcctggatgggataaaat

SEQ ID NO: 7676 - DNA, 376 bp, Homo sapiens
  misc_feature (1)...(376): n = g, a, c or t
ccagtggaatgatgntccctgcaattaccatctcacctatacgtgcaagaaaggaacagttgcttgcggccagccccctgttgtagaaaatgccaagacctttggaaagatgaaacctcgttatgaaatcaactccctgattagataccactgcaaagatggtttcattcaacgtcaccttccaactatccggtgcttaggaaatggaagatgggctatacctaaaattacctgcatgaacccatctgcataccanaggacttattctatgaaatactttaaaaattcctcatcagcaaaggacaattcaataaatacatccaaacatgatcatcgttggagccggaggtggcacgagtcaaggcgctgatcccta

SEQ ID NO: 7677 - DNA, 227 bp, Homo sapiens
ctggctttctgtatgttgcaaaataatctattcacagtagcaataaaaactcaaaagtacttaataaatttaataaggaatatgcaatactttaataaaacattataaaaggacagataaagcctgaataaaaagagccacatcatattcttggatgggaagacccaatatggtagaaatgtccattttctcccaaattactccctacatttattctgatttattca

SEQ ID NO: 7678 - DNA, 101 bp, Homo sapiens
ctgggaagccacgagaatattgtgaacctgctgggggcgtgcacactgtcaggaccaatttacttgatttttgaatactgttgctatggtgatcttctcaa

SEQ ID NO: 7679 - DNA, 317 bp, Homo sapiens
  misc_feature (1)...(317): n = g, a, c or t
ctgggtgtggacatcatggataagggggtagagacgctcccctgtgtggaacaccttctaatggcttgtgcacggcctagctcacaccccagcatcccagggctcgtatggagtggagcactgaggacatctgggttcttctcccanaactgctccttctaggctatgacatttaacacttgatcttctaacatcaggtacttttaatgactgggcctggtattggtggtcagcccatctcagcaatgtgtccagggcccagccaggactgggtgccttaagtgggggcggaaaggatcgtcccatgaagaaagtga

SEQ ID NO: 7680 - DNA, 258 bp, Homo sapiens
  misc_feature (1)...(258): n = g, a, c or t
ccaactctagtcatacttggacctcgtggaaacatgttgttttctttgattggagagggacacaaagataaattatttttatatacttcaattgctttaaagtattacaaagacagggggcagatcacagataataaaattggaataaaactctataaagattctttgccaccttcaccattgctatttcctggcnaagtaacagtagnaccaanttactgatacgattggcaatagcanacncctggacatcataga

SEQ ID NO: 7681 - DNA, 396 bp, Homo sapiens
ctgcacctccacctccgtcttctcctctgccaagcaaatccacatcggctccacagatgtcgcccggatcttcagacaaccagtcctctagccctcagccggctcagcagaaactgaaacagcagaagaaaaaagcctccttgacttctaagattcctgctctggctgtggagatgcctggctcagcagatatctcagggctaaacctgcagtttggggcattgcagtttgggtcagagcctgtcctttctgattatgagtccacccccaccacgagcgcctcttcaagccaggctccaagtagcctgtataccagcacggccagtgaatcatcctctacaatttcatctaaccagagtcaggagtctggttatcagagcggcccaattcagtcga

SEQ ID NO: 7682 - DNA, 185 bp, Homo sapiens
  misc_feature (1)...(185): n = g, a, c or t
tggttaaagttcacgttctctttggggaattttacaatttaagtttaanagcttttaattaaacgtaaatgtacaccaatctactcancagagatatattaggatcacatttcttttttaaaatggatnttattttaatgtgtaacaaaaagattttgnttncctatttaaaaaatacaatacac

SEQ ID NO: 7683 - DNA, 271 bp, Homo sapiens
  misc_feature (1)...(271): n = g, a, c or t
cgaggtccttggatgcagatcaatgctccnataangttcattatcagctcctcctgccttgtgacnggatgatttgattttacaaaagtcnctttgaaaacaagagtaaacgcagacagcttctagagaaaagtctggtgaagcagcagttgataatagattttcttttagtgatgaaattaatcttgttttggtaatctacagcctgttagggataggtggagggatgaagtccttaaaactaaantgttcctctacgaatcttcgacct

SEQ ID NO: 7684 - DNA, 280 bp, Homo sapiens
  misc_feature (1)...(280): n = g, a, c or t
ncnggaccacagataaatcctagttaaattttatagttatcttaatattatgattttgataaaaacagaagattgatcattttgtttggtttgaagtgaactgtgacttttttgaatattgcagggttcagtctagattgtcattaaattgaagagtctacattcagaacataaaagcactaggtatacaagtttgaaatatgatttaancacagtatgatggtttaaatatttctctaatttttgaaaaatcgtgccaagcaataagattnatgnatat

SEQ ID NO: 7685 - DNA, 326 bp, Homo sapiens
gaattctggttgtttgtgcaataatcatagtgatttacattgcttttcttctttcagagcaataagaaagttatttggggtagtacttgaaataattcatatacacagtcatttaacatagatcgtttctagtcgagtatgagcatacattcatgggaacaatctgtttcattcttcaaagtatgtttgtactttggaatgaaggagaaattctagggaaaaattaattcagaaatcttttgaaataagacagttcaaacctaggaccaggtaaccacattgcattgcctcccagtgtgatatgactgtgcttccaagtatgcatc

SEQ ID NO: 7686 - DNA, 252 bp, Homo sapiens
  misc_feature (1)...(252): n = g, a, c or t
gtcctttgcttctaatgacaaaactgtgagagctagatgtcctatgggcaattaggtagtataataaaggtaaatgaaggtacaatttttaaaccattattttcaccctgttggggtaaatgttttaaagagtgagaaaacataaattgagaaagggtgataaagtaatagataacttttagtttaataataattattgttattatactactaataatagagcacttgtaagcactaanttatctttatcca

SEQ ID NO: 7687 - DNA, 388 bp, Homo sapiens
cagacatcgagaagcataatgacattgtggacagtgacagcgatgctgaggatcgaggaacgttgtctgctgagctgactgctgcccactttggaggaggcggtgggctccttcacaagaagactcaacaggaaggcgaggagcgggagaaaccgaagtcccggaaagagctgattgaagagctcattgccaagtcaaaacaagagaagagggagagacaagctcaacgagaagatgccctcgagctcacggagaagctagaccaagactggaaagaaattcagactctcctgtcccacaaaactcccaagtcagagaacagagacaaaaaggaaaaacccaagcccgatgcatatgacatgatggttcgcgagcttggctttgaaat

SEQ ID NO: 7688 - DNA, 369 bp, Homo sapiens; identical to SEQ ID NO: 7545

SEQ ID NO: 7689 - DNA, 124 bp, Homo sapiens; identical to SEQ ID NO: 436
  misc_feature (1)...(124): n = g, a, c or t

SEQ ID NO: 7690 - DNA, 210 bp, Homo sapiens
  misc_feature (1)...(210): n = g, a, c or t
ccaatatgcctttggagcacagcctatggtttatgtttcttttatgaccacctttaatatctgtcaaacgactagacatgctatagctttacccgaaggtaatttgattgactgtgctctgctagaagatggtgtatgggtccctctcgacgtaactgccaataaatgataagnggtatttgttttagatantgcctctacctcagncgg

SEQ ID NO: 7691 - DNA, 264 bp, Homo sapiens
tcgaccctgaataaggtggtacaactaaggcatattatggaaaactggcattattgcttaatgtaacatgagggattggaatttctttaaagtaattttaagatatgattatttagcagaaatattcactggagcattttacttttagaaattatcgtcacacaaggaagcctttataggaccgactacctaattgcagtcaaagatctcttgaatgaatgaacacacacacacagaagaacacacattttaagaatatagcgg

SEQ ID NO: 7692 - DNA, 314 bp, Homo sapiens
  misc_feature (1)...(314): n = g, a, c or t
ccatataaagggcgtcctgaaaacaaaagcttcctttatgagatagtatctaataaaagaaatggcattgatgtggacaaatgggattattttgccagggactgccatcatcttggaatccaaaataattttgattacaagcgctttattaagtttgcccgtgtctgtgaagtanacaatgagttgcgtatttgtgctagagataaggaagttggaaatctgtatgacatgttccacactcgcaactctttacaccgtagagcttatcaacacaaagttggcaacattattgatacaatgattacagatgcttt

SEQ ID NO: 7693 - DNA, 255 bp, Homo sapiens
  misc_feature (1)...(255): n = g, a, c or t
cccaatcaagggaagaaggaggaatgctggactggaggcccctggagccagatggcaagagggtgacagcttcctttcctgtgtgtactctgtccagttcctttagaaaaaatggatgcccagaggactcccaaccctggcttggggtcaagaaacagccancaagagttaggggccttagggcactgggctgttgttccattgaagccgactctggccctggcccttacttgcttctctagctctctaggacct

SEQ ID NO: 7694 - DNA, 186 bp, Homo sapiens
ccatgtggagaaatcagatcactgcttaatgaaaggaattgaccaccgtcagctcgaaaatccacccacagtctagaattgggtgtttatcaggcagaagttctctccaaagacatttttagcatgtatctagtcaacaaactataagagagaaaacccaaagcttaaaggagggtgtgtaagggg

SEQ ID NO: 7695 - DNA, 161 bp, Homo sapiens
cctttcttgtctggccccctaaagaggacccaagatcaggaaaactccccagtttaaaaaaatatctgtccatctgtatataaaatacctattattagctggagttgcacacatgcaggaccaggagagactgcctgaggttctgcctggaccgaaggagg

SEQ ID NO: 7696 - DNA, 217 bp, Homo sapiens
ccacatcttcttcctgagcctactattcatattgccttatattcacaaagcaatggtgccaaggaaagagaagttaaagaagatggaataatccatttccctgcaggtggcctgtgcgggactggtgcagaaactactcgtctcccttttcacagcactcctttgccccagagcagagaatggaaaagccagggaggtggaagatcgatgcttccag

SEQ ID NO: 7697 - DNA, 220 bp, Homo sapiens
  misc_feature (1)...(220): n = g, a, c or t
cgaggtttgcagtttaagtattgnaatttcacaaaagacataggacttaactggaaaatgaaaaaaaaaagaaaaagaaaaaactaaacaaaaaatccctctaggtagtttaggtgaaaaatgtcccttttattttggctttggttgtgatttcaaagcataatgctatgtttttttgtctttttactatgtttttcggatttttaagtccgtaagtgca

SEQ ID NO: 7698 - DNA, 224 bp, Homo sapiens
ctgggcaagaaatgcctcaggaggtttttatttttcctcttcagatagatgttgcttcctgccaattgcatcctgtacccactgttccttctggattccatgatttaccatccagcagggcttttctgagtcgtctccagaagatgtgccgccccaggacactgtcctcccactccaggtaagtgttcctgctgagaaggcggtacagctccacctgctgcctg

SEQ ID NO: 7699 - DNA, 232 bp, Homo sapiens
  misc_feature (1)...(232): n = g, a, c or t
cctgaacaaatgtttcatttggatccttctttgactcatacaatatttaatccagaagtatttcaaccacagatggcactgccaacagcagatggcccataccttcaaatattagagcaacctaaacagagaggatttcgtttccgttatgtatgtgaaggcccatcccatggtggactacctggtgcctctaccgaaaagaacaacaagtcttaccctcangtcaaaatct

SEQ ID NO: 7700 - DNA, 246 bp, Homo sapiens
  misc_feature (1)...(246): n = g, a, c or t
cctaatgaaaattgtacacttcaacacaaggtaattgaaaccttccttttgactgaaaccagtgtttgtagcactagtatattcctgcagacagacttgtagttacttgtagttattgtatagtctgtatagtctgttatttttttttttaagcanaaagtcaaaaaaattgttttatgtaaatatatataaaangtgaaggtacaggagggactatggcactgtgtgtgatgnaaaagggtattg

SEQ ID NO: 7701 - DNA, 152 bp, Homo sapiens
cgggattctgttatttgaggctcagcacagccagagaaacccccaagatgcagccgggaggtgaacagcggagaggacaatgcacccttcagcgtggtggagcctcagggacagatctgatgatcccagaaggctctggaggacaatctagg

SEQ ID NO: 7702 - DNA, 418 bp, Homo sapiens
  misc_feature (1)...(418): n = g, a, c or t
cgcgtttcccgcaacccgataccatcggacaggatttctccgcctcagcccaacggggagatctctggaaacatggctacagaacatgttaatggaaatggtactgaagagcccatggatactacttctgcagttatccattcagaaaattttcagacattgcttgatgctggtttaccacagaaagttgctgaaaaactagatgaaatttacgttgcagggctagttgcacatagtgatttagatgaaagagctattgaagctttaaaagaattcaatgaagacggtgcattggcagttcttcancagtttaaagacagtgatctctctcatgttcagaacaaaagtgcctttttatgtggagtcatgaagacttacaggcagagagaaaaacaanggaccacagtagcagattcta

SEQ ID NO: 7703 - DNA, 176 bp, Homo sapiens
ccagataaaatagtaacaaaaaaagtaaagagatataaaacaaactgtacactattacaaagtagtggttctctgtatgtctatgtgtatatatgtatatataaaactatacagatacatgtgtgtatataaacatacatatgtatatatacacacatatacttaattctaaagtt

SEQ ID NO: 7704 - DNA, 458 bp, Homo sapiens
ccttggtcctagcacccactcgagaattggctcagcagatacagaaggtggtcatggcactaggagactacatgggcgcctcctgtcacgcctgtatcgggggcaccaacgtgcgtgctgaggtgcagaaactgcagatggaagctccccacatcatcgtgggtacccctggccgtgtgtttgatatgcttaaccggagatacctgtcccccaaatacatcaagatgtttgtactggatgaagctgacgaaatgttaagccgtggattcaaggaccagatctatgacatattccaaaagctcaacagcaacacccaggtagttttgctgtcagccacaatgccttctgatgtgcttgaggtgaccaagaagttcatgagggaccccattcggattcttgtcaagaaggaagagttgaccctggagggtatccgccagttctacatcaacgtggaacga

SEQ ID NO: 7705 - DNA, 253 bp, Homo sapiens
  misc_feature (1)...(253): n = g, a, c or t
cctactatgggtgttaaattttttactctctctacaaggttttttcctagtgtccaaagagctgttcctctttggactaacagttaaatttacaaggggatttagagggttctgtgggcaaatttaaagttgaactaagattctatcttggacaaccagctatcaccagactcggtaggtttgtcgcctctacctataaatcttcccactattttgctacatagacgggtgngctcttttagctgttcttacg

SEQ ID NO: 7706 - DNA, 275 bp, Homo sapiens
  misc_feature (1)...(275): n = g, a, c or t
ctgtcatcctatggcataaattccacttttattccctaagtgctttgagggctctatttggcaaatattacaacagatgctgaaatacaggagttgtgagtactacaatttgtcatctataccacacaaccanaatctgtatataaganatctacaaatcaaaatgnacgaggccantttctcatgcttcaccanctacacaaagcagtaaagacagacaatatacaagatttattangtaaaacanaacagactgcatgatatgctattccant

SEQ ID NO: 7707 - DNA, 163 bp, Homo sapiens
caggtcctgtttgattgtagctatgttggtgtatctcgtgtacaagatggaaaagtgcttttgttgttctacctgatccagttgggggagcaggaatagggggtgcctgcctaacggcctctagcccatgtgcttatactgggatctgtcccgagggatctgc

SEQ ID NO: 7708 - DNA, 334 bp, Homo sapiens
ccaggaggagtcttagaggtgctaaatggctttcagacattccaatgacatctgagtcaagataattttccattttagaattagcctgtagatctgtaaagtcgcaggaaatgatacctgtatactgctaaatacaaatttaagaactttctagacatgtctgtacttgaaagggttctgtaatacattttaagtaatgtgtttactccaaaagctgctttccgtgaacatttaagtatctcataggtgaagttaaaaatcacagtcattcccacccttacccctgtacctatattatataagccatacctacccttacaaatgcctctctgga

SEQ ID NO: 7709 - DNA, 327 bp, Homo sapiens
  misc_feature (1)...(327): n = g, a, c or t
ccaggccgatctcgaacttctggcctctagcgatctgcccgcctcggcctcccaaagtgctgggatgaccagcatcagccccaatgtccagcctctttaacatcttctttcctatgccctctctgtggatccctactgctggtttctgccttctccatgctganaacaaaatcacctattcactgcttatgcagtcggaagctccagaagaacaaagagcccaattaccagaaccacattaagtctccattgttttgccttgcgatttnagaagagaattanagagggctgtattgattggngtgaagactganctatcccggggtc

SEQ ID NO: 7710 - DNA, 275 bp, Homo sapiens
ccttggtgaaggcagatcccgacgtgacgctagcgggacaggaagccatcttcattctggcacgagccgcggaactgtttgtggagaccattgcaaaagatgcctactgttgcgctcagcagggaaaaaggaaaacccttcagaggagagacttggataatgcaatagaagctgtggatgaatttgcttttctggaaggtactttagattgattgccgagcggggcagttttgtgagccttcatctaaagccttcagttcacccctctgcacagg

SEQ ID NO: 7711 - DNA, 281 bp, Homo sapiens
  misc_feature (1)...(281): n = g, a, c or t
ctgatcataaatagagcaagagaagatggggagcaatagagaaagatgttgaaagaaagacatcttcatcaagtgtaaggtgagaaggaaccaattggtggttcatgcacataataccaaaacagagaataaggacttcggcaggctttttaaagcacanactccatgtagtttctagctggctaancaaacaaaacaaatgtattataaggaggtgttaattacaaaagtgaccagttcttgccatgaattttanagcaccccaacagttctaacgtctc

SEQ ID NO: 7712 - DNA, 273 bp, Homo sapiens
caatgtggttggtcttcagcttgcagttagccaggttccataccttgaccagcttgtcccagccacaggagacgatgatagggttgctgctgttgggcgagaagcggacacaagacacccactctgagtggctctcatcctggacagtgtatttgcacacacccagggtattccatagcttgatggttttatctcgagatccagagacaatctgccggttgtcagaggaggaggccacactcagcacatccttggtatggcccacaaatcgcc

SEQ ID NO: 7713 - DNA, 351 bp, Homo sapiens
  misc_feature (1)...(351): n = g, a, c or t
cctttcatctgatgaagagcactgaattattcatactagggtttgaccaacaaagatgctagctgtctctgagatacctctctactcagcccagtcatattttgccaaaattgcccttatcatgttggctgcctgacttgtttatagggtccccttaattttagtttttagtaggaggttaaggagaaatcttttttttcctcagtatattgtaagagagtgaggaatacagtgatagtaatgagtgaggatttcttaaatgtacttttttttgttctaggaatgagggtaggataaatctcanaggtctgtgtgatttactcaagttgaagacaacctccaggccattcc

SEQ ID NO: 7714 - DNA, 282 bp, Homo sapiens
  misc_feature (1)...(282): n = g, a, c or t
ctgaagatttggtatcacaggtttttaatgactattcacaattcaatagcaagtgggaagtgaggttaagaaaggggattaaactccacaactgcaatgagtatctgaaatccttggttttagatgcggggatgggggtgaacaaaaaggatgacagagcaaagtgctaccaggaggagaagtccagtctgcatgaagatttgtctttaataaataacttcataaactgtggccttcttatccccanagccantgacaatgtatttgtcgccacggagatgt

SEQ ID NO: 7715 - DNA, 250 bp, Homo sapiens
  misc_feature (1)...(250): n = g, a, c or t
ccaatttcttcactctcctgacactttgaagtaaccactcaactccacagacttcttgttgagacttttttgcatggaaaacagatattttgggggggggcattatatgctaccgatattaggataaaatgtgtttacctagaggtttctaggagagagtactgttctcttctggtgagggaagagaggattgtgaaaatatttctccttgaagcatcagcatgtntcanatcaaaatcttgacccgagg

SEQ ID NO: 7716 - DNA, 218 bp, Homo sapiens
  misc_feature (1)...(218): n = g, a, c or t
cctactgtaaagagatgatgcatggtaaaaggaaaatggcagctctatgttattaccagtagtgaaggtgaatgatanattgttacatacagagtaagacttaaatgttgtgaagtttcctacagtttgacaaccaaaacatctaaaaaattcaaataaattttaaggtaatcttgatcttggttgnnagttgcaccaganaggacaccttattttta

SEQ ID NO: 7717 - DNA, 451 bp, Homo sapiens
ctgtctgaccatggggaccttctgtctgaagaggagctggatgaatgagactctgggaatcatctacacaggaccaaacccaacaggcgccctggcaccggggaggcgggtagttgtactctgcttgtacagtccttgagcccagtttacagatctggagagcaggaggccaggacaaggacaaaggctggaggatggagtaggacccaggggctctgccatcctaggcatcattcaaggtcttttatgaagactttacagatgtcctctgtaagtagcatcgagagtggagttcagctcctttctctacttttttttggtctgatggcacatatttattgttctgtggtctaatcacagtgtttctaaatgtaaaaagtgcatatgttggtgtagctagtcccgcgacattgagctcctctgcatgaagacactgggctcctgcatccag

SEQ ID NO: 7718 - DNA, 101 bp, Homo sapiens
ccagtggggcagcccttccccattggggtttccattgcgagcaaagttggcccagaatttcatcaccatcttgctaagtctgatctcctcttctgaggcac

SEQ ID NO: 7719 - DNA, 139 bp, Homo sapiens
ccaagtcagtcccagccagaaggctgtgtctccagggagtggctgacctgatccttcttgcccattcttggggttctgggacttggaggaactcaagtcttcgctgtaagaaaatccctccaggacaacaaactgttaa

SEQ ID NO: 7720 - DNA, 390 bp, Homo sapiens
  misc_feature (1)...(390): n = g, a, c or t
cctcttggctctggagaaggcatccttagcatcctcttctgaagggtgatcataagccccaagttaattaaataggcccaatgtctgcctgctctttctgtattcccttcctgaatctagttcatgtcaacaaatgtgtactattattgtagaaaatcgaatgctctcatacttttaataggtttgcttcttggttaatatgcccaggtcaggaagtggcttatatttcaggagtgctctctaatacttattgcagatattcaagcatttattctctcacacacacgcacttaaaaaccgcacactacctcacactctgcaataatccgatagtatggtggtcatcatacccacatatatacatganaagatagaatgcattgcttaaat

SEQ ID NO: 7721 - DNA, 149 bp, Homo sapiens
ctggctagtggcttattacttgtgactggacctctggtcctcaatcgagttcctctacgaagaacacaccagaaatttgtcattgccacttcaaccaaaatcgatatcagcaatgtaaaaatcccaaaacatcttactgatgcttactt

SEQ ID NO: 7722 - DNA, 208 bp, Homo sapiens
  misc_feature (1)...(208): n = g, a, c or t
cacaactgcttacagaatggatcatgtcccccttatgttgaggtgaccacttaattgctttcctgcctccttgaaagaaagaaagaaagaagactgtgtttttgccactgatttanccatgtgaaactcatctcattacccttttctgggtttgaagctgctgtctctanaagtgccatctcaattgtgctttgtatcanncagtgct

SEQ ID NO: 7723 - DNA, 331 bp, Homo sapiens
  misc_feature (1)...(331): n = g, a, c or t
ccttgggaannnagaaagacagaatccattgatgtaatggatgcggttggaagtaatattgtggttagcacaagaactggagaagtgatgaggattttgccacgtatgcatgaggacatcaatgaagagtggatctctgataaaaccagatttgcctatgatgggctaaaacgtcaaagacttaccgagccaatggtcanaaatgaaaaagggcttttaacctatacttcttgggaggatgcgctctctcgcagtagctggaatgtttgcagagttttcaaggcaaanatgtggcaccaattgcaggtggcttggtggatgctgaagccct

SEQ ID NO: 7724 - DNA, 232 bp, Homo sapiens
ctgctggttcttctttttggggctctccattactgggctcctgggactggctgtgtggttctgtgtttgtgtgtgtcgctcatgccgtccctctcctggtcccgtctggggagtccagaatcttctgtcggggttccaggtgcttctgggactcggatacccccaacagcaccccagcttcgcctgagcccctccactcctcggccctccttcctccctagttatggccgtg

SEQ ID NO: 7725 - DNA, 205 bp, Homo sapiens
aaaatgaaaaagcaatacattccttgatgcatttgcatgaaggttgttcaactttgtttgaggtagttgtccgtttgagtcatgggcaaatgaaggactttggtcattttggacacttaagtaatgtttggtgtctgtttcttaggagtgactgggggagggaagattattttagctatttatttgtaatattttaaccctttat

SEQ ID NO: 7726 - DNA, 434 bp, Homo sapiens
ctgtgatccatgagaacgcatctcagcccgaggtgctggtccccatccggctggacatggagatcgatgggcagaagctgcgagacgccttcacctggaacatgaatgagaagttgatgacgcctgagatgttttcagaaatcctctgtgacgatctggatttgaacccgctgacgtttgtgccagccatcgcctctgccatcagacagcagatcgagtcctaccccacggacagcatcctggaggaccagtcagaccagcgcgtcatcatcaagctgaacatccatgtgggaaacatttccctggtggaccagtttgagtgggacatgtcagagaaggagaactcaccagagaagtttgccctgaagctgtgctcggagctggggttgggcggggagtttgtcaccaccatcgcatacagcatccggggacag

SEQ ID NO: 7727 - DNA, 383 bp, Homo sapiens
ccacgaacactaccatgatgggaaaaacaaggcaaagaaaccactcgggatcttttagctccaatgaatttgaggaagaattagtgtctccatcgtcatcagaaactgaaggcaactttgtctatcgcacaggtaagtccgtgctttctgtagtaattcctgcgatacctgtttaaagcacaattaaaactgcatcagagggatttattttaacaggtataaagacatcagattattcacatattgcccataattcagttttaaagctttcgttttgtttagaattgccaatggatacatttgttagtagattatggtcttactgagaaattttcagttttcatattaaagacaggaagttttattctttttatattttttaa

SEQ ID NO: 7728 - DNA, 449 bp, Homo sapiens
  misc_feature (1)...(449): n = g, a, c or t
ctgctgaagttcaggttggtggtgctgctggtggtgatgttgcattaactgatacaaaaaggcttgatgttgttccttaggcaaaaaacatgtgagagaaaatgagttcccaagcacggaattcagcagtcagatgagctgccttatgttttctttcctttaatattagatatttgcaaagaaagaaaacaagtatctcatctagaaaaatatgctgcactagataataaccatctactataaaatgtcagtatcttcagcaaacagcttattttcaaaacaggacacacataggagagctctattaggttatccgtgatgatcaatcaggaagtgcnncancttaagagaaatcaaggtggacatttgaatgcatcatgcgtggtcaaaccctttcccaacttaaaacaaccttaaagttcccgtttctgcctgtnattagggngctt

SEQ ID NO: 7729 - DNA, 382 bp, Homo sapiens
  misc_feature (1)...(382): n = g, a, c or t
catggggacatttgcggaaatttatggattgtatgttactactgtatcgatgttaaatttcttgagtattataccttgtttttaggagatgcatgctaaagaatttatgcataacgaatcccataatgagaatgcaaatgtggctagatgttaaagtttgtgatctagctgggtgcagtggctcatacctgtaatcccagcactttgggaggctggggcaggcagattgcttaaacccaggagtttgagaccagcccaggcaatatggtgaaactccatctctataaaacataaaaaaaattagcttggcatagtagcacgtgcctgtggtcccaccactgnggaggctgaggtgggagaaacgcttgagcttacnaagtcg

SEQ ID NO: 7730 - DNA, 294 bp, Homo sapiens
cctttgaacagcgccgtctggaagctatccaccaggacagtaatcaccaggttgaggaagatgaagtactggatgatgatgtaaattatgaggatgggaatgatgtaccaggcgccctgggcacggctgtccatgtagatgagggaccagtcatccagcgtgagcaaggtgaagagggtgaagatggtggtgaagatgttctggaagcgcttggggtcagatttgcggaacagtgcccggaggaccgcggagaagaggaagaggcaggtaaacatgaggatgaggatggctgcg

SEQ ID NO: 7731 - DNA, 241 bp, Homo sapiens
  misc_feature (1)...(241): n = g, a, c or t
ctgcatcacttcacaagaagaatttgaatcctcactagaaggggtaccatcctcttccagttcatacttcccatatccaacaacatgaacgctgagcattttacttcctggccctctatgggccttgaaccatgtgaccaagtctgattttgagaatgacttcagtgcttcaatctcctgggcaaggcggtcaaagaggtactgctgtgtaaccacttcattccagttcctatccncctcc

SEQ ID NO: 7732 - DNA, 338 bp, Homo sapiens
  misc_feature (1)...(338): n = g, a, c or t
gaaggcggcccgggtcatcatagaaaagtactacacgcgcctgggcaacgacttccacacgaacaagcgcgtgtgcgaggagatcgccattatccccancanaaagctncgcancangatagcaggttatgtcacgcatnngatgaancgaattcngagaggcccagtaagaggtatctccatcaagctgnangaggaggagagagaaaggagagacaattatgttcctgaggtctcanccttggatcaggagattattgaagtagatcctgacactaaggaaatgctgaagcttttggacttcggcagtctgtccaaccttcaggtcactcanccta

SEQ ID NO: 7733 - DNA, 433 bp, Homo sapiens
  misc_feature (1)...(433): n = g, a, c or t
cctggctcaacaaaagggcnggggattggccctgaaaggagagagctgactgtcctggctgatggacaggagatcctcttagcactaccctaaggcaggcagttgggcattggtgtagacaacaggaaagtccaggctatagccgtactcaaaaacctttctgttccctttctgccagccctagggattgagtccacattcagcacaggactctctgggtacagctctctttaggaagacacaaattgcatggtgaagtcagttatatcctggccgcctttggtccctcccaggaagacgggcatgttttctgcttgagaggtgctgatgtaccagttggggaactgggcagactcaaattccagcttgntattgatttctatcttgntgaagacaaatcgcttttccatcttcttctttgggtaatttttgg

SEQ ID NO: 7734 - DNA, 348 bp, Homo sapiens
  misc_feature (1)...(348): n = g, a, c or t
ctgcataccnctgggtacangagagagttcctggaataccaccgccctccaggagctttgcatacctgcgggggcccgggggcattccacctcatcgtgcacctgaaggcgggagatgcagtcaacgtcgtggtgactgggggcaagctggctcacacagactttgatgaaatgtactccacatttagtggggttttcttatatcctttcctttcccacctctaaggtggctggggagatgtcaggggaaagatagatagttgtaaaaactctaaagctttaatatattcggtttgtatgtaatggaagcacggggctagagtttccacataggccccaacataaagg

SEQ ID NO: 7735 - DNA, 471 bp, Homo sapiens; identical to SEQ ID NO: 429
  misc_feature (1)...(471): n = g, a, c or t

SEQ ID NO: 7736 - DNA, 522 bp, Homo sapiens
  misc_feature (1)...(522): n = g, a, c or t
ccacactctacttctgcttctgccacctatggggtcgaggcangtgtggtgccttggctaagtccacagacttctgagaggcccacgctttcttcttctccanaaataaaccctgaaactcaagcagctttaatcagagggcaggattccacgatagcagcatcagaacagcaagtggcagcgagaattcttgattccaatgatcaggcaacagtaaaccctgtggaatttaatactgaggttgcaacaccaccattttcccttctggagacttctaatgaaacagatttcctgattggcattaatgaagagtcagtggaaggcacggcaatctatttaccaggacctgatcgctgcaaaatgaacccgtgccttaacggaggcacctgttatcctactgaaacttcctacgtatgcacctgtgtgccaggatacagcggagaccagtgtgaacttgattttgatgaatgtcactctaatccctgncgtaatggagccacttgtgttgatggttttaacaca

SEQ ID NO: 7737 - DNA, 450 bp, Homo sapiens
  misc_feature (1)...(450): n = g, a, c or t
ccaccggcctgatggaanncgacggcaagcctcgtgccccgcaggcacccctgcactcggtggtacagcaactccatgggaagaacctggtttttagtgacggctacgtggtaaaggagacaattggtgtgggctcctactctgagtgcaagcgctgtgtccacaaggccaccaacatggagtatgctgtcaaggtcattgataagagcaagcgggatccttcagaagagattgagattcttctgcggtacggccagcaccccaacatcatcactctgaaagatgtgtatgatgatggcaaacacgtgtacctggtgacagagctgatgcggggtggggagctgctggacaagatcctgcggcagaagttcttctcagagcgggaggccagctttgtcctgcacaccattggcaaaactgtggagtatctgcactcacagggggttgtgc

SEQ ID NO: 7738 - DNA, 501 bp, Homo sapiens
ctggggtgggcttctcctactccgatgacaagttttatgcaactaatgacactgaggtcgcccagagcaattttgaggcccttcaagatttcttccgcctctttccggagtacaagaacaacaaacttttcctgaccggggagagctatgctggcatctacatccccaccctggccgtgctggtcatgcaggatcccagcatgaaccttcaggggctggctgtgggcaatggactctcctcctatgagcagaatgacaactccctggtctactttgcctactaccatggccttctggggaacaggctttggtcttctctccagacccactgctgctctcaaaacaagtgtaacttctatgacaacaaagacctggaatgcgtgaccaatcttcaggaagtggcccgcatcgtgggcaactctggcctcaacatctacaatctctatgccccgtgtgctggaggggtgcccagccattttaggtatgagaaggacactgttg

SEQ ID NO: 7739 - DNA, 488 bp, Homo sapiens
  misc_feature (1)...(488): n = g, a, c or t
ctgcatcccatgtgcgtcgatgggcaaagtatttgtagcactgcccttggaatttgtgccagccatagtcacatgtctcggtatcttgctcacaaagtgcaccaacataacttggaaggcagaggcacctgaatgtgttaaaaccatcaacacaagtggctccattacgacagggattagagtgacattcatcaaaatcaagttcacactggtctccgctgtatcctggcacacaggtgcatacgtaggaagtttcagtaggataacaggtgcctccgttaaggcacgggttcattttgcagcgatcaggtcctggtaaatagattgccgtgccttccactgactcttcattaatgccaatcaggaaatctgtttcattagaagtctccagaagggaaaatggtggtgttgcaacctcagtattaaattccacagggtttactgttgcctgatcattggaatcaagaattctngctgccacttgctgt

SEQ ID NO: 7740 - DNA, 451 bp, Homo sapiens
  misc_feature (1)...(451): n = g, a, c or t
cctgtctgactactttgccnncttttgtngcatataggngatgttngctcttgtttttattaatttatatgtatatttttttaatttaacatgaacacccttagaaaatgtgtcctatctatcttccaaatgcaatttgattgactgcccattcaccaaaattatcctgaactcttctgcaaaaatggatattattagaaattagaaaaaaattactaattttacacattagattttattttactattggaatctgatatactgtgtgcttgttttataaaattntgcttttaattaaataaaagctggaagcaaagtataaccatatgatactatcatactactgaaacagatttcatacctcagaatgtaaaagaacttactgattattttcttcatccaacttatgtttttaaatgaggattattgatagtactcttggtttttatac

SEQ ID NO: 7741 - DNA, 490 bp, Homo sapiens
  misc_feature (1)...(490): n = g, a, c or t
cctgatagatctgggcatangagcttcaggaataaaatgcatgtgaatgcggtgtttcccagggagaattaaccgcattctcgccttcaaatctgaatacctgagagtcataaccagcccagtagggtagactatgaaatgtatagcaaaattttcaaaaccagctcctcctaccagacaagaaaattaacattttttagggcacagaactgaaagcatttttactgaaatctaatccaggatgaaacctaacagttaaacattcttttccttctctgcttctttggctctctatcccagcacaccttgtcccaggctaacttgagtaaacatacacatgtgaccacatgagggcgggaagaacaccaagtgggggtggtgaaattctgaatggaatgcagccccagctagttagggggccccgggctganacctctggcactggcagtanacttatacaggcaaagaagccaaaacaatgagctcatgg

SEQ ID NO: 7742 - DNA, 230 bp, Homo sapiens
gcgccgacaggatgggcaagtgtcgtggacttcgtactgctaggaagctccgtagtcaccgacgagaccagaagtggcatgataaacagtataagaaagctcatttgggcacagccctaaaggccaacccttttggaggtgcttctcatgcaaaaggaatcgtgctggaaaaagtaggagttgaagccaaacagccaaattctgccattaggaagtgtgtaagggtccag

SEQ ID NO: 7743 - DNA, 345 bp, Homo sapiens
  misc_feature (1)...(345): n = g, a, c or t
ctgtagagtgggcttatcanctttcaacacgcaggacaggtacagattcttttccttgaggcccaaggccacaggtattttgtcattactttcttctccttgtacaaaggacatggagaacaccacttgttgctccatatcctgtccctggaggtggagagctttcagttcatatggaccagacatcaccaagcttttttgctgtgagtcccggagcgtgcagttcagtgatcgtacaggtgcatcgtgcacataagcctcgttatcccatgtgtcgaagaagataggttcttcttcaaagatgaagggaaagaaggtgctcaggtcattctcctggaaggtctg

SEQ ID NO: 7744 - DNA, 413 bp, Homo sapiens
  misc_feature (1)...(413): n = g, a, c or t
ccactgtggncttagggggngccctccccgaggcctggtgtggtggctcacgcctgtagccccagctattgcaccactgctctccaagctgggcaatggagtcagattctctttcttaaaaaaccacaaaaaagctggatttccagttctctaatattcttagtaccacaagatatgtcataggtatctttaaatgaaattcttagctggaaaagtgactaaaaagtttttctcctgctacctagtaataaacaaatcattgtttattactggtcacttagaaaattaaaagggatagggccaggcacagtggcttatgcctgtaattgcagcacttttagaggccgaggcaggcggatcacctgaggtcgggaagtggatcgcctgaggtcaggagttcgagaccagcctgg

SEQ ID NO: 7745 - DNA, 457 bp, Homo sapiens
  misc_feature (1)...(457): n = g, a, c or t
ctgggaattgctctattgtacaaatacagttttgtacaaaaaaatcacaaaatgttacaaaataaaaaaagtacaaactgcattacttaataaatatgactaaaagtagttaaagtggcaatgagattgattttaagttggaaacattgtttgacccagcaaaccatacaagctctgtttacagacatttctacatcaatacagggcaatcctattttgccttttgaaagaatgtaaagaaatattaagacagtgttctcctgctataactgccaagnttggctccagacatttatgccattagtttataaatctcttagctggattcaagaagttatataaagcaggaggcttatcttgtcacagagttttataccatgttaacattctcttacaacaacgtgacaaatgtaaataaaaacaactgagagcaccagacaatctactctacacatca

SEQ ID NO: 7746 - DNA, 240 bp, Homo sapiens
cctggatcttctttactggggcctgcccctcggggtacagtgcattaatgagcccacatagcaccgtgccatccttgagccagttctggaagttctcgcgtccaggctggggccggcccacatcctttcggcactgggtggtgatccactggatcaggatctgctccagatctgcatcatattgtttctcaatcttctgctgcacctcccggctcaggccatatgcaggtcccctgttgg

SEQ ID NO: 7747 - DNA, 294 bp, Homo sapiens
  misc_feature (1)...(294): n = g, a, c or t
cgagctggatccagagntgcatacagaccaatttctgcatcagtgttatctcgaccagaggctagtgggactggagagggctctacggtatttaatggggcccagaatggtgtgtctcagctaatccaaagggagtttcagaccagtgcaatcagcagagacattgatactgctgccaaatttattggtgcaggtgctgcaacagtaggagtggctggttctggtgctggtattggaacagtctttggcagccttatcattggttatgccagaaacccttcgctgaagcagcag

SEQ ID NO: 7748 - DNA, 607 bp, Homo sapiens
  misc_feature (1)...(607): n = g, a, c or t
tcgacatcagtgacagtgatatgatgctgaacatcatcaacagctctattactaccaaagccatcagtcggtggtcatctttggcttgcaacattgccctggatgctgtcaagatggtacagtttgaggagaatggtcggaaagagattgacataaaaaaatatgcaagagtggaaaagatacctggaggcatcattgaagactcctgtgtcttgcgtggagtcatgattaacaaggatgtgacccatccacgtatgcggcgctatatcaagaaccctcgcattgtgctgctggattcttctctggaatacaagaaaggagaaagccagactgacattgagattacacgagaggaggacttcacccgaattctccagatggaggaagagtacatccagcagctctgtgaggacattatccaactgaagcccgatgtggtcatcactgaaaagggcatctcagatttagctcagcactaccttatgcgggccaatatcacagccatccgcagagtccggaagacagacaataatcgcattgctagagcctgtggggcccggatagtcagccgaccagaggaactganagaagatgatgttggaacagg

SEQ ID NO: 7749 - DNA, 90 bp, Homo sapiens
  misc_feature (1)...(90): n = g, a, c or t
ctcctttatttctaagtggaaaaagtattanccaccatcttacctcacagtgatgttgtgaggacatgtggaagcactntaagttttttc

SEQ ID NO: 7750 - DNA, 395 bp, Homo sapiens; identical to SEQ ID NO: 430
  misc_feature (1)...(395): n = g, a, c or t

SEQ ID NO: 7751 - DNA, 382 bp, Homo sapiens
  misc_feature (1)...(382): n = g, a, c or t
ccaacaggnggcagaagangaattcctgccttcctcaagaggaacacctaccccttggctaatgctggggtcggattttgatttatatttatcttttggatgtcagtcatacagtctgattttgtggtttgctagtgtttgaatttaagtcttaagtgactattatagaaatgtattaagaggctttatttgtagaattcactttaattacatttaatgagtttttgttttgagttccttaaaattccttaaagtttttagcttctcattacaaattccttaacctttttttggcantanatagtcaaagncaaatcatttctaatgttttaaaaatgtgctggtcattttctttgaaattgacttaactattttcctttga

SEQ ID NO: 7752 - DNA, 406 bp, Homo sapiens
  misc_feature (1)...(406): n = g, a, c or t
gtttcataagaattctgttgatangaaatacactgttatcttcacttttataagaaataggaaatattttaatgtttcttggggaatatgttagagaatttccttactcttgattgtgggatactatttaattatttcactttagaaagctgagtgtttcacaccttatctatgtagaatatatttccttattcagaatttctaaaagtttaagttctatgagggctaatatcttatcttcctataattttagacattctttatctttttagtatggcaaactgtcatcatttacttttaaactttgattttatatgctatttattaagtattttattaggagtaccataattctggtagctaaatatatatttttagatagatnaagaagctagaaaacaggcaa

SEQ ID NO: 7753 - DNA, 550 bp, Homo sapiens
gacggctctagctaggtgagcggctccggccagttcccttttagactatggcgacatacctggagttcatccagcagaatgaagaatgggatggtgtgcgttttagttggaacgtgtggccttccagccggctggaggctacaagaatggttgtacccctggcttgtctccttactcctttgaaagaacgtccagacctacctcctgtacaatatgaacctgtgctttgcagcaggccaacttgtaaagctgttctcaacccactttgtcaggttgattatcgagcaaaactttgggcctgtaatttctgttttcaaagaaatcagtttcctccagcttatggaggcatatctgaggtgaatcaacctgccgaattgatgccccagttttctacaattgagtacgtgatacagcgaggtgctcagtcccctctgatctttctctatgtggttgacacatgcctggaggaagacgaccttcaagcactcaaagagtccctgcagatgtccctgagtcttcttcctccagatgctctggtgggtctgatcac

SEQ ID NO: 7754 - DNA, 598 bp, Homo sapiens
  misc_feature (1)...(598): n = g, a, c or t
ggcttgcacagggtgaaagctttgcttctctgctgctgtaacagggactagcacagacacacggatgagtggggtcatttccagatattaggtcacagcagaagcagccaaaatggatccccagtgcactatgggactgagtaacattctctttgtgatggccttcctgctctctggtgctgctcctctgaagattcaagcttatttcaatgagactgcagacctgccatgccaatttgcaaactctcaaaaccaaagcctgagtgagctagtagtattttggcaggaccaggaaaacttggttctgaatgaggtatacttaggcaaagagaaatttgacagtgttcattccaagtatatgggccgcacaagttttgattcggacagttggaccctgagacttcacaatcttcagatcaaggacaagggcttgtatcaatgtatcatccatcacaaaaagcccacaggaatgattcgtatccaccagatgaattctgaactgtcagtgcttgctaacttcagtcaacctgaaatagtaccaatttctaatataacagaaaatgtgtacataaantttgacctgctcatctatacacgg

SEQ ID NO: 7755 - DNA, 387 bp, Homo sapiens
  misc_feature (1)...(387): n = g, a, c or t
ccactgtgtagcaccttcnaattcaatttcatcggcagttgtaataacagttccagcctcaggtgttttaatggtgggaaacatcttgattgcttctccagaaacttgaccatcggttttgttttggaaatcttggagaatctcagttccttccacagcaataagttctgtgggagaagcttccatttcttctaataactcaggtttaccatcatcttctgaaggttctaattttgtgtcaggagataaagagggaggctcagttatgtgaaggtattcctcacttgatggtttgaaagtcgcttcaatatttacatgaatttccttaaaagaatcctgtggggacattacagatgagccgacgtctattcctggcagagcactggg

SEQ ID NO: 7756 - DNA, 477 bp, Homo sapiens
  misc_feature (1)...(477): n = g, a, c or t
ccttttcctgtctgcctttcttctgcttgggctcttcaaggcactgggctgggctgctgtctacctgtccacctgcaaggattcaaagaagaaagcagagtgagggcactcactgccatcctgtggaagccaccatcatctctggcccaagcttctgtagtagctccctaaaataataccctatcatctgctcctaatccctccaatctctctccactgagtggctggaatgcttttttttttttctttcacttatataagggataatttttcttttttttttttttnganacggagtctcactnttccgcccaggctgcagtgcagnggcatgatcttggnttactgcaacctccgcctcctgggttnaagcaattntgnggcttcagcctccggagtagctgggattacaggcacatgccaccacacccagggaatttttgtntttttagtananacggggtttcaccatgttgg

SEQ ID NO: 7757 - DNA, 410 bp, Homo sapiens
cctactatgggtgttaaattttttactctctctacaaggttttttcctagtgtccaaagagctgttcctctttggactaacagttaaatttacaaggggatttagagggttctgtgggcaaatttaaagttgaactaagattctatcttggacaaccagctatcaccaggctcggtaggtttgtcgcctctacctataaatcttcccactattttgctacatagacgggtgtgctcttttagctgttcttaggtagctcgtctggtttcgggggtcttagctttggctctccttgcaaagttatttctagttaattcattatgcagaaggtataggggttagtccttgctatattatgcttggttataatttttcatctttcccttgcggtactatatctattgcgccag

SEQ ID NO: 7758 - DNA, 484 bp, Homo sapiens
ttataatgtacattctgacaataaactctccgagatgcttagcctctttgaaaagggactgaagaatgttaagaatgaatatgaacagttaaattatgcaaaacaactgaaagagagattggaggcttttacaagagattttcttcctcacatgaaagaggaagaggaggtttttcagcccatgttaatggaatattttacctatgaagagcttaaggatattaaaaagaaagtgattgcacaacactgctctcagaaggatactgcagaactccttagaggtcttagcctatggaatcatgctgaagagcgacagaagttttttaaatattccgtggatgaaaagtcagataaagaagcagaagtgtcagaacactccacaggtataacccatcttcctcctgaggtaatgctgtcaattttcagctatcttaatcctcaagagttatgtcgatgcagtcaagtaagcatgaaatggtctcag

SEQ ID NO: 7759 - DNA, 445 bp, Homo sapiens
  misc_feature (1)...(445): n = g, a, c or t
gaggagagaantcagactttgttttttgaaatcgattgggatcgaaagcctgaaataaatattcatactttccatagaactgagcacttggttgctatttattttaaaggcagggttatttccccccagggagtggggcaagcggggaagttgggatgagtgcgtgtgggagcaaagagttaaaaatcactatgctaagtttggttgatgctactggggggaaaaagttgaaactactggtgaccactgttgggagaggaaacatctgttttatagatttagcatggccttcccatcaaaaatacactcgtaccatgacgttttgtttttgttttttaagtagccacttttaattactcagtattaatcctaggtgcatgtgttaagatttcggttttcatcgagctgcttatactgatagtgaaaaacttggatgtgtgtgaga

SEQ ID NO: 7760 - DNA, 347 bp, Homo sapiens
  misc_feature (1)...(347): n = g, a, c or t
ctgtcctcngttactcacnnacagttccaaaactaagcgattatataagcacatccatattttagggctactctaagttaaaaaccttttctcttgtttcagagttatttacatnaaattaagacatttacaaattgttcatagtatacaatagcccaaatatgattttcacctatgctgtgtaaagaanttaagcattcgtaagtttgtctaataaatncagtgcacttttttccataacacgagctattctaaatgttttacatttctttcantgcatatttccaaattcattaaacngaatgaaatcanngttattaaatggctatatcataatattcangcnt

SEQ ID NO: 7761 - DNA, 392 bp, Homo sapiens
  misc_feature (1)...(392): n = g, a, c or t
ctggcagatgcagaagaagcnatgtatcagaatgtggatggccgtgtttcggaatgtcctcacacctaccaaaacaggcgacctttcagcagagagatggatttggggctactctctccgcaggctcaggtcgaagattcgtagaggaacaatttagttttaaggacttcatccctccacctatccctaacaggctgtagattaccaaaacaagattaatttcatcactaaaagaaaatctattatcaactgctgcttcaccagacttttctctagaagctgtctgcgtttactcttgttttcaaagggacttttgtaaaatcaaatcatcctgtcacaaggcaggaggagctgataatgaactttattggagcattgatctgcatccaagg

SEQ ID NO: 7762 - DNA, 413 bp, Homo sapiens
  misc_feature (1)...(413): n = g, a, c or t
cccatacccacttcctgatnctttggttctctttcctgctcaggtcccttcatttgtactttggagtttttctcatgtaaatttgtataacagaaaatattgttcagtttggatagaaagcatggagaataaaaaaagatagctgaaattcagattgaagaaatttatttctgtgtaaagttatttaaaaactgtattatataaaaggcaaaaaaagttctatgtacttgatgtgaatatgcgaatactgctataataaagattgactgcatggagaagtcttcatcaagactatttttctaacacgattacattcagtaacaaaagtagtcagcagttttaacagtttttctagacaatggagagactgagaaatgtacattttgtttcatacataatgttggttactgctt

SEQ ID NO: 7763 - DNA, 544 bp, Homo sapiens
  misc_feature (1)...(544): n = g, a, c or t
ctgcatcccatgtgcgtcgatgggcaaagtatttgtagcactgcccttggaatttgtgccagccatagtcacatgtctcggtatcttgctcacaaagtgcaccaacataacttggaaggcagaggcacctgaatgtgttaaaaccatcaacacaagtggctccattacgacagggattagagtgacattcatcaaaatcaagttcacactggtctccgctgtatcctggcacacaggtgcatacgtaggaagtttcagtaggataacaggtgcctccgttaaggcacgggttcattttgcagcgatcaggtcctggtaaatagattgccgtgccttccactgactcttcattaatgccaatcaggaaatctgtttcattagaagtctccagaagggaaaatggtggtgttgcaacctcagtattaaattccacagggtttactgttgcctgatcattggaatcaagaattctcgctgccacttgctgntctgatgctgctatcgnggaatcctgccctctgattaaagctgcttgagtttcagg

SEQ ID NO: 7764 - DNA, 449 bp, Homo sapiens
  misc_feature (1)...(449): n = g, a, c or t
cctggctcnncaaaagggcnggggattggccctgaaaggagagagctgactgtcctggctgatggacaggagatcctcttancactaccctaaggcaggcagttgggcattggngtagacaacaggaaagtccaggctatagccgnactcaaaaacctttctgttccctttctgccanccctagggattgagtccacattcagcacaggactctctgggtacagctctctttaggaagacacaaattgcatggtgaagtcagttatatcctggccgcctttggtccctcccaggaagacgggcatgttttctgcttgagaggtgctgatgtgccagttggggaactgggcagactcaaattccagcttgttattgatttctatcttgttgaagacaaatcgcttttccatcttcttctttgggtaatttttgggatctacactctccag

SEQ ID NO: 7765 - DNA, 592 bp, Homo sapiens
  misc_feature (1)...(592): n = g, a, c or t
ccagtggaatgatgttccctgcaattaccatctcacctatacgtgcaagaaaggaacagttgcttgcggccagccccctgttgtagaaaatgccaagacctttggaaagatgaaacctcgttatgaaatcaactccctgattagataccactgcaaagatggtttcattcaacgtcaccttccaactatccggtgcttaggaaatggaagatgggctatacctaaaattacctgcatgaacccatctgcataccaaaggacttattctatgaaatactttaaaaattcctcatcagcaaaggacaattcaataaatacatccaaacatgatcatcgttggagccggaggtggcaggagtcgaggcgctgatccctaaaatggcgaacatgtgttttcatcatttcagccaaagtcctaacttcctgtgcctttcctatcacctcgagaagtaattatcagttggtttggatttttggaccaccgttcagtcattttgggttgccgtgctcccaaaacattttaaatgaaagtattggcattcaaaaagacagcagacaaaatgaaagnaaaatgagagcagaaagtaagcat

SEQ ID NO: 7766 - DNA, 443 bp, Homo sapiens
  misc_feature (1)...(443): n = g, a, c or t
ctgggccgcttgacacctcgtagcagccgtctcattctctcgtcttgctgcgtcctgtctgtggagtcctcagtcactctgctgttggagagtgctggaggaaatgcacttttactgtgctgcactttttatagagctgcattgtcggtgattccaatttaaaaatccatattcaaaaataccctcacacatccctgcatcagtgattctaatgatcagctttgactggacctcagctcacacgaatctccaaggaaaaactctacagagcatcttttagagcaaganattcatacaggccaagtgatganagggggagtcaccaaggcttcagccccaagggcatntncagcctnaggccggcaggtcctatgtccttgacacaaacgcttcttgntgaaatcctccctantgatgctgcgantgctgttggtcccanttct

SEQ ID NO: 7767 - DNA, 451 bp, Homo sapiens; identical to SEQ ID NO: 274
  misc_feature (1)...(451): n = g, a, c or t

SEQ ID NO: 7768 - DNA, 478 bp, Homo sapiens
  misc_feature (1)...(478): n = g, a, c or t
ctgaaaaaccaagaacagnttttagtgactatttacatccacagtataaggcacctacagaaaaccatcataatagaggccctactatgcaaaatgatggaaggaaagaaaagccagttcactttaaagaattcagaaaaaatacaaattcaaagaaatgcagtcctgggcatgattgtagagaaaattctcattctttcagaaaggcttgttctggtgtatttgattgtgctcaacaagagtccatgagcctttttaacacagtggtgaatcctataaggatggatgaatttagacagataattcaaaggtacatgttaaaagaactggatactttttgtcactggaacgaacttgatcagttcatcaataagtttttcctaaacggtgtctttatacatgatcagaagctcttcactgactttgttaatgatgttaaagattatcttagaaacatgaaggaatatgaagtagataa

SEQ ID NO: 7769 - DNA, 341 bp, Homo sapiens
  misc_feature (1)...(341): n = g, a, c or t
gctgaaattnagcattttaaatagtacagtaggctggtatacattaggaaatggactgcactggaggcaaatagaaaactaaagaaattagataggctggaaatgcttactttctgctctcattttctttcattttgtctgctgtctttttgaatgccaatactttcatttaaaatgttttgggagcacggcaacccaaaatgactgaacggtggtccaaaaatccaaaccaactgataattacttctcgaggtgataggaaaggcacaggaagttaggactttggctgaaatgatgaaaacacatgttcgccattttagggatcagcgcctcgactcctg

SEQ ID NO: 7770 - DNA, 437 bp, Homo sapiens
cctgaagtcttctcctccatgaacatcatggactgagctgggggaagaagggatatctactgtggtctgggcaccacctctgtgggcactggtgggccattagatttggaggctacctcacctgggcagggatgatggcagagccaggctgttggaaaatccagaactcaaatgagccccttcatccgcctgtgggcgcatactacagtaactgtgactgatgactttatcctgagtcccttaatcttatggggccggaaggaatgtcagggccaggtgcagaccttgggggaagactttaaaccacctagttctccccgatggggcatcggtctaaagctttgggggagtgggcgcagtggctcacacctgtaatcccagcactttgggaggccgaggtgggcagatcatgggtcaagagatcgagaccatcctgg

SEQ ID NO: 7771 - DNA, 303 bp, Homo sapiens; identical to SEQ ID NO: 431
  misc_feature (1)...(303): n = g, a, c or t

SEQ ID NO: 7772 - DNA, 513 bp, Homo sapiens
  misc_feature (1)...(513): n = g, a, c or t
ccaacatactgaaaccccnnccttactaaaagtacaaaaattagccaatgtggtgatgcatgcctgtaatcccacctactcgggacactgaggcaggagaatcgcttgaaccagggtggcggatgttgcaatgagccgagatcatgccactgcactccagcctgggcgacacagcaagactctgtctcaaaaaaaaaaaaaaaaaaaaaaaaattntgagacaaattaaacacccaacaattgagagaaaaaaatattctgttttttgaaaaaatttgtatagaacattgccttctattctataacaagtcctcagttgagcatttagagtatgtttaatgaaagcatgcagaggggaataaaacctgttcatcatctaaattaatcccctttatgtatccaatgtactttctatttgacacacaaaagtatgagtgattaggaaaatactaattgagctgaatgacataaattgtattaagtggatgatcacaaattcagatgctatatacg

SEQ ID NO: 7773 - DNA, 579 bp, Homo sapiens
  misc_feature (1)...(579): n = g, a, c or t
ctgataccacacattgaaaggtaaacattaatatttcaaatctgatgtctaactaaaaatgtacagaatgaaaactagaaaatttcaaccccagattatcttcaaccttgctccctccaccaatcatactttgacatttatctatttccttctccacttatggatgtaattggcttgctatagaaactacagttcagatgctttgaatgtatgaactacaatgaacaataaagtcctcttcttttgaagcatattttggcttcagctttaagataatcttatgacaagaagggtcacactgattcacttaataaattccattcttacctaacacaaggtttagttgataagcacttggacaaaaataatacttttcaaaaatgtaaagcaaactagtgaggacaaaggattttgtcctcatctcaacaatgatcagctattggaactgcatgaaactgaacaatttaaacctggagctggtaatgttcttaagaccaattcagaacaaaggcaggttgcccttaaaacaggtttgaccttttccttcactcttcctcctgtcccaccctctgngagtga

SEQ ID NO: 7774 - DNA, 458 bp, Homo sapiens
  misc_feature (1)...(458): n = g, a, c or t
ccttagtcanncttagctccctgtatcttctcactctgacccactgcgcgttccttcaagcagagagctgcctcccatggctacctcctcaatataaacttgctaactaatctcttagcaaacacttgaagaaaacctgaagagtggaaagagaggcagagggggaacananacccagcgtanataaagctcangacacattcaacgggacgctggaatctaaatttagnaccaaacttaagatttctttagataggcgagctgttgcctctggaacagggattttcataacaattattttgtttttaagtctcaatcttaattcttctgctatctcttaaatagggctcactttaacataaactcccttgatttttttttctctcagtggtgatgtgcctacccttataggtattcttataggctttcttttattactgaatatctctttaataatt

SEQ ID NO: 7775 - DNA, 422 bp, Homo sapiens
  misc_feature (1)...(422): n = g, a, c or t
gttggggcnnnccttggttttatacattttagggagacataagacattaatcaatatatgtaagaagaacattggttcagtggggagggagcttccaggtcacagataggtgagacacaaacagttgcattcttttgagtttctgattagcctttccaaaggaggcaatcagatatgtatctatctcagtgagcagagagataactttgaatagagtgggaggtgggtttgccctaagaagtttccctaagcttgagttttccttagtgattctggggccccaagatattttcctgtcacagttgacatccccaacacagtgtttagggctcagaaaaagataccctaaaatagggtgctttggcatgctgaatgctttgaataaaggaggctgaagggcctcagaaataagagaacaaagg

SEQ ID NO: 7776 - DNA, 554 bp, Homo sapiens
  misc_feature (1)...(554): n = g, a, c or t
cctaggggccgcaagacggctaatttattataatttctccttttttagtacatgcacagaaagcctgacagccaagtgtacatgaacatacacacacacacacacacacacacacagaggccaatttccagtgaggaacaggctccacagaagaagctgataggcaggggggatcaaacgctgctcccctgctcaccgatctacttctccaaatacaatatcttgggtacctatgatggcaacgacatctgccaacatgtgtcccttagacatcttgtccaaaccagccagatgggcaaaaccaggagccttgatcttgcatcgataagggcggctgctgccatcagacaccaggtacaccccaaactctcccttgggagcctcaatggcagtatatgtggctcctggaggaacttggtagccctcagtatacaacttaaagtgatgaatcagtgactccatggaagtcttcatctctgctcgcttaggtggagacactttggcatcatcaaccttgatctccccaggaggcatcttgtttagacactgngcga

SEQ ID NO: 7777 - DNA, 474 bp, Homo sapiens
  misc_feature (1)...(474): n = g, a, c or t
cctgctcacnggtgaatcnnttctctgggtccttctccatcaagtgccggatgaaatctttggcagagtcagagatgtcgtcccagtaaggagagtcaaactcgtactcggccttcaaaatctgttcaaagagtttggcatcattctcgtcatagaagggagggtaaccgcagagcaagatgtaggcgatgacacctatggaccagcaatccacagccttgctgtagggcttctgggccaggacttcaggggccacgtatcccggagttccacaggcggtggagagcacactgcccgggtcctccatcttggagaggccaaagtcggagatcatgattttggagtcttcatccaggctgtagtacagcagattctctggcttgagatcccggtgtacaatgcccaggtcatgcaggtatttcacagcatccagcacctggaagatgaggcggctggcgtcccgctccgtgtaga

SEQ ID NO: 7778 - DNA, 518 bp, Homo sapiens
  misc_feature (1)...(518): n = g, a, c or t
ccacttttttttttctgcnaacctcaaatgaaacagaatctcacagatgtggggtccccctcctaattgtaataaacgttagagaaatgctccagaaaggaacaaagggagaccctctcagatcagcctaaaaccagagtggaatagggctcctctgggcggtttaagggcacagaaaggaccctcagctactcctggcctccccgggtctctttcccagaagacacaactttccaggctgccaaaagtaatagaagtcaaaaccctcaaaaccaccactgctctcgggaagtttttgagtaggatgaggaagaaagaagagagccctccttcattttgttacacgatctcaaggccaagagcaagtagaagatgtctaaagagaacaaaagaggtttcttcctggtactgtactacagatcagcaacagtttcacagggaggcgttggctcaggttctggtacatttgaagataactgaaggccaangacttanccaaggaaggacaccagcagaac

SEQ ID NO: 7779 - DNA, 518 bp, Homo sapiens
  misc_feature (1)...(518): n = g, a, c or t
ctggcctgtcctgtcgggtgaagcacagcagtctagagggccaggacatcgtcctctactggggtgggagctacacctccatgggcttgattgccttggcagtcctggcgtgcttgctgttcctcctcattgtgggctttacctcccggtttaagaggcaaacttcctatcagggcgtcctgtgactcgccttgccacatctgtgtctctggaacccaggacctctggacctcaggttcccaagacttcagtcctggtctgctcaggaattgaagatgtaaggaattgaagataggagagataccttgaaaaagtagagaacagtcatgaggcagctttcatcacacccttttaacatttatctaaaagaatttaaattctttttcaaaaattacactacaagtttataagcccaaatggctctgtgaaatcagaagtgcaaaggtgtgcaaacttgtatctgaagacctaccagggacaagcaggtaaganctgatgtgantgtgtgtgatgggatc

SEQ ID NO: 7780 - DNA, 564 bp, Homo sapiens
  misc_feature (1)...(564): n = g, a, c or t
cctcagaacagtcaagaaagttttgtcacttggactcgaccttaatagcagttttcatctgtcaggtgtgtcaatgatgccattttctttcaatgaatcaaagcaggcgattactcgtccattttcaacttggcagcttttcgaaggatgtgcaaatttacattccgtgtctggccgtgagcaagtccccctctggaactctctacatacttccagtgttagccattttgtgtcccgaattggtgtgacactaacagccatgtttagattttacaggtagttaaatgtttcagtgaaaccaacaaacccaacccccccaaaaaagagcaacaaccaaaaaaaaaaagctgaactgatgatgaaaatgtcccctcaaaatacttttccccactccctgctttaaaagtacatggaaaattgtgtcgtcaatatcaaggaaaagatctcccactagaaattcacagcatgaaactgttaattcaaagaggttttggtttttagagaaatactaggattgtaagtagatgaacgtttaaaagtagggcctggtatcanccttgtgct

SEQ ID NO: 7781 - DNA, 195 bp, Homo sapiens
  misc_feature (1)...(195): n = g, a, c or t
cggagtttcgctctgtggcccaggctggaatgcagnggcgcaatctcggctcactgcaagctccgcctcccgggttccacaccattctcctgcctnagcctcccgagtagctgggactacaggcgcccaccaccatgcccagctaatntttngtatttttttttancananatagggtttcaccgtgttagccag

SEQ ID NO: 7782 - DNA, 477 bp, Homo sapiens; identical to SEQ ID NO: 432
  misc_feature (1)...(477): n = g, a, c or t

SEQ ID NO: 7783 - DNA, 260 bp, Homo sapiens
  misc_feature (1)...(260): n = g, a, c or t
gtaagactccnnctcaaaaccaaaccaaaccaaaccaaaaaaagaagtgagttggcactttcaacattctgcctggaaatctccttaccaaacctataagatcattaggtatattttctgcactttgtattgtgacaggtgacagtgttaccaaactttttaccaggacataatagggtctgcctttcttctagttgctaacaatttcccccaagtccatcttgcctgcactaacagtctcctttagacctctcctctcc

SEQ ID NO: 7784 - DNA, 467 bp, Homo sapiens
  misc_feature (1)...(467): n = g, a, c or t
cctggacctgtgtaaaccttcaaacactcttttttacattaggtcatgaagttaaattttttactgtttctgtgctacagactcttcaaaggaaaatagttaagtcaatttcaaagaaaatgaccagcacatttttaaaacattagaaatgatttgactttgactatctactgccaaaaaaaggttaaggaatttgtaatgagaagctaaaaactttaagnaattttaaggaactcaaaacaaaaactcattaaatgtaattaaagtgaattctacaaataaagcctcttaatacatttctataatagtcacttaagacttaaattcaaacactagcaaaccacaaaatcagactgtatgactgacatccaaaagataaatataaatcaaaatccgaccccagcattagccaaggggtaggtgttcctcttgaggaaggcaggaattcctcttctgccacctgttgg

SEQ ID NO: 7785 - DNA, 537 bp, Homo sapiens
  misc_feature (1)...(537): n = g, a, c or t
ctgctgcancctgctttgcctgcacacaggaaaaagtacacatttggggcagaccttaatgaggacgtataaatatctggcccctgatctgacatatctgaagtgtgatctccactattaccagagttcccctgagggactatgtccatgggactttgtttatctcacatccttacttgctgtccttccctgtgccatttcctcactcatgggaatgctttctagtacatcactgtctcatgaaaccttgtcttagcgtctgcttattgggacagtgatggcaacttaagtcatacgtaattgttaaacctaggattggcaaaactgagaatcactgggcaattttatataaacgcttttccagagaagagtgaaaagaaattcttctagttggtatctctggtagataccataaagtaataaagaaaagctaaaataaaccccagagtctaactcagcatgattctacactttctgtangcttctgtaggcttctagaaattccctggaaagggaattgncaaaatataaaaaaca

SEQ ID NO: 7786 - DNA, 529 bp, Homo sapiens
  misc_feature (1)...(529): n = g, a, c or t
ccacctggagacggtgantttgggcctattgaagacacctgctcagtatgacgcttctgagctaaaagcttccatgaaggggctgggaaccgacgaggactctctcattgagatcatctgctccagaaccaaccaggagctgcaggaaattaacagagtctacaaggaaatgtacaagactgatctggagaaggacattatttcggacacatctggtgacttccgcaagctgatggttgccctggcaaagggtagaagagcagaggatggctctgtcattgattatgaactgattgaccaagatgctcgggatctctatgacgctggagtgaagaggaaaggaactgatgttcccaagtggatcagcatcatgaccgagcggagcgtgccccacctccagaaagtatttgataggtacaagagttacagcccttatgacatgttggaaagcatcaggaaagaggttaaaggagacctggaaaatgctttcctgaacctggttcagtgcattcagaacaagcccctgtat

SEQ ID NO: 7787 - DNA, 368 bp, Homo sapiens
cctttcttgtaagtgaagaaaaaggaatgcagcaaagaagagttcgacattggagtccttagttccatcaggatcccattcgcagcctttagcatcatgtagaagcaaactgcacctatggctgagataggtgcaatgacctacaagattttgtgttttctagctgtccaggaaaagccatcttcagtcttgctgacagtcaaagagcaagtgaaaccatttccagcctaaactacataaaagcagccgaaccaatgattaaagacctctaaggctccataatcatcattaaatatgcccaaactcattgtgactttttattttatatacaggattaaaatcaacattaaatcatcttatttacatgg

SEQ ID NO: 7788 - DNA, 346 bp, Homo sapiens
  misc_feature (1)...(346): n = g, a, c or t
ccaagaancagtggccnnattgcatcccaaaccacgcctcttgaccaggctgcctcccttgtggcagcaacggcacagctaattctactcacagtgcttttaagtgaaaatggtcgagaaagaggcaccaggaagccgtcctggcgcctggcagtccgtgggacgggatggttctggctgtttgagattctcaaaggagcgagcatgtcgtggacacacacagactatttttagattttcttttgncttttgnnaccaggaacagcaaatgcaaaaactctttgagagggtangagggtgggaaggaaacaaccatgtnatttcagaagttagtttgtatatatta

SEQ ID NO: 7789 - DNA, 362 bp, Homo sapiens
  misc_feature (1)...(362): n = g, a, c or t
ggcaacgctgaaagtacgngaccgcgtccggaccaagatggagagagacatcctggctgatgtaaatcacccattcgtggtgaagctgcactatgccttccagaccgagggcaagctctatctcattctggacttcctgcgtggtggggacctcttcacccggctctcaaaagaggtgatgttcacggaggaggatgtgaagttttacctggccgagctggctctgggcctggatcacctgcacagcctgggtatcatttacagagacctcaagcctgagaacatccttctggatgaggagggccacatcaaactcactgactttggcctgagcaaagaggccattgaccacgagaagaagg

SEQ ID NO: 7790 - DNA, 272 bp, Homo sapiens
ttgaattacggaataatgagttagaactattaaaacagccaaaactccacagtcaatattagtaatttcttgctggttgaaacttgtttattatgtacaaatagattcttataatattatttaaatgactgcatttttaaatacaaggctttatatttttaactttaagatgtttttatgtgctctccaaattttttttactgtttctgattgtatggaaatataaaagtaaatatgaaacatttaaaatataatttattgccaaaaaaaaa

SEQ ID NO: 7791 - DNA, 541 bp, Homo sapiens
  misc_feature (1)...(541): n = g, a, c or t
ccaccccaccctaatcttattatgcaaatgagctttggctgacactatgttgcctgctttttactgtacacatggctggcaaagagaagggaacttggagccgccattttggacatgcctagtctaggtagctttttcctattggcacagttgccagcattcacccgtggaagcttccagcttgcttgtctatgtctgcagctcgattttacaggctgttctttgttagaaaagaaaatgattttgggggctgcttttcattaaacagaaaacctcactgaggacttcctacccttgctatttgcctaaatgatttctccttaactcctatatcatcaccatgcttggctaatttttaatttttttttggggtagagatggttctcactctgttgcccacactggtctcaaactcctgggcttgagccatcctcctgcctcaccctcccaaagtgctaggattacagggcatgaactgtgccatacccatcttcgaggntttatggncatgtanaatttctgttcaaggaaagcagataac

SEQ ID NO: 7792 - DNA, 434 bp, Homo sapiens
  misc_feature (1)...(434): n = g, a, c or t
ctggtcacntcatgctgnntagaatgacatctctttcgtctcctattttgttacccaactcttcctatttttgttaccaatcactgtgctctctgccgccccctggctccaggctaatttttctggaatgaattgagaaggtggcgtgctggcctgagctgatggaccacttggtgttttgcgttttggcccatgtttgctgcctctatctggtctgccttgcccgtttgcctgttcctattcagtgtcttttctattttttcctctctcgttcatgccttctgttttgctcttgtccctggagcatatctgcctaattaagatgttgccttttagttgaatgccactgaagagctgtgatagcatgtttcaaagctgaactctacagagcgagtgctganacagtatttagggtttctgggagtgaggctggt

SEQ ID NO: 7793 - DNA, 550 bp, Homo sapiens
cggaagaggagctcttggagacgacattgaaaatgaaattcttatctctggacttacagggagaccccagagagagtcaaccccttctgggcactgtgattgatgggatgctgctgctgaaaacacctgaagagcttcaagctgaaaggaatttccacactgtcccctacatggtcggaattaacaagcaggagtttggctggttgattccaatgcagttgattagctatccactctccgaagggcaactggaccagaagacagccatgtcactcctgtggaagtcctatccccttgtttgcattgctaaggaactgattccagaagccactgagaaatacttaggaggaacagacgacactgtcaaaaagaaagacctgttcctggacttgatagcagatgtgatgtttggtgtcccatctgtgattgtggcccggaaccacagagatgctggagcacccacctacatgtatgagtttcagtaccgtccaagcttctcatcagacatgaaacccaagacggtgataggagaccacggggatgagctctt

SEQ ID NO: 7794 - DNA, 367 bp, Homo sapiens
ccttacccccacaccaccccccagtctcaaagaattgctcatcaaggaggtgctggactaacccttgcctagatttaagccactgtgaggagaggggttgccccagaaggcaggggaaggacctgatgagaacagaatagctgggaggctgcagagggtgctgggagcccctagaagttccaaaagagaatgtgaagcagatcaaggaaacttctgttgagctaggctcagggtgagctttggctggggttgcccttgtgtagtacagggaagtctgacacagcctctccagcctataaacagccgggggactgtggcacaggttggggcaatgttcccttgttggtgggcccccaagctggcaagg

SEQ ID NO: 7795 - DNA, 385 bp, Homo sapiens
  misc_feature (1)...(385): n = g, a, c or t
atgcagaanaagcgatgtatcagaatgtggatggccgtgtttcggaatgtcctcacacctaccaaaacaggcgacctttcagcagagagatggatttggggctactctctccgcaggctcaggtcgaagattcgtagaggaacaatttagttttaaggacttcatccctccacctatccctaacaggctgtagattaccaaaacaagattaatttcatcactaaaagaaaatctattatcaactgctgcttcaccanacntttctctanaancngtctgcgtttactcttgttttcaaagggacttttgtaaaatcaaatcatcctgtcacaaggtaggaggagctgataatgaacnttattggagcattgntctgcatccaagg

SEQ ID NO: 7796 - DNA, 564 bp, Homo sapiens
  misc_feature (1)...(564): n = g, a, c or t
tggatattgccaatatctggattttatgtatctatcataaaatttgtcacataggagatggtagaagaccatagttaatgtggagtaacgttttatatagctaatctctacttaagaaacctttcattcagagtatgaagaaaatgatttaaaattttgtggaggtccccttatttctgttacagtaatagttttactgtattttgtgaaactctacagtctctttaaaaaaatgattatgttgtttatgataattgttttgatgtcatttttattttcatcaaaatcaatgtgaaatgtattagaaaaaggcatagaaattcataggcgtttcatttacttcctcaactctagatgtctttcagaatacctatattggtgagcatagaacgaatgcgtcggaatgattttcctctacttgaagcctaccttctttaaaaagagcctgacttgagggccaaaattcatactgaggagaggctgacagatcctttgttttgcaggggctccagancttgatatatttctnggaatttggaatatgctaaactagatttctgccct

SEQ ID NO: 7797 - DNA, 317 bp, Homo sapiens
ccagaagcaggtattcaaagcagagaacaatccctgggtgacccccattgcagaccagttccagcttggcgtgtcccatgtttttgagtatatccgttctgagacatacaaatacctctacggcagacacatgcaggccaacccagaaccaccgaagaagaataatgacaaatcgaaaaagatcagccggaaacccctggcagccaagaacagataaggaagggattggcatcggctggccttccagcaccttctctctccaacacttcattctctcttgccctgtctctcaaataaacccaatgctgcgtgtgagg

SEQ ID NO: 7798 - DNA, 472 bp, Homo sapiens
  misc_feature (1)...(472): n = g, a, c or t
attacgggttggaacccannccaatgtaatttcaatcgtgttaagaaagtaatggtgacttnacatgttattgtagttagttacattatagaatattacttatttttcttgttaaaatgtagtttttcatttcctacatttattagattttcattttctattaacaattgaataccatttcagtttatagacttgttttattagattttaccaatgaatttttcaaaatacaaagaaaagtagtttttccttcataacatactcagttttgaattacatgtagtgtcacatgaatattcgtattgttaactaaatgatttatattttactgatttaatattacagtgtaagaatgtcagtcattgttagttcttgtctagttttcattaaaagaacaaagatcttttatatggatatcttataaatatataatcattgctaantaagaagttaagttgttgctatcgcaaca

SEQ ID NO: 7799 - DNA, 573 bp, Homo sapiens
tcgaccagcattatccttgcaggaaaccagaaaagcaaaatcttcatcaccaaaaaaacagaatgatgtccgagtcaaatttgaacatagaggagaaaaaagaatccttcagttccccagaccagttaaactggaagatctgagatctaaagctaaaattgcctttggacagtctatggatctacattataccaataacgagttggtaattccattaactactcaagatgacttggacaaagctgtggaactgctggatcgtagtattcatatgaagagcctcaagatattacttgtaataaatggaagtacacaggctactaatttagaaccattgccatcactagaagatttggataatacagtatttggagcagagaggaaaaaacggctatctataataggtcctactagtagagatagaagttctcctcccccaggttacattccagatgaattacaccaggttgcccggaatgggtcattcactagtatcaacagtgaaggagagttcattccagagagcatggaccaaatgctggatccattatctttaagcagccctgaaaattc

SEQ ID NO: 7800 - DNA, 558 bp, Homo sapiens
  misc_feature (1)...(558): n = g, a, c or t
cctcacgcnnaaactagtncagttcatgaaaacccgagatactctgccagcttcttgaggaagcagtgttgtcacacttttctgagcttcagtgattcacacattttgataagacagcatgttctgtgggttaagtacatttaccttttcaaaatatactcccatgaagtatcatggttcanaattacacacttacaaagttaaatggcataaaactactttgtaaaaagtgcctacactctaaaaggtgatttaaaggtttatgacatcttaattcaagtgaatactgaatcagtaggattatngagcaggtgctctaanttagggaatctggagtcagtctctcctttgcttatgtgcaatgtggacccagggatttctcaatttctctgtcagaatttttaacatggtnaaatggctattattatatggaatgatatttcctaagctctgacacatactctttctccaaatcacagggtttatgaaacnaagatacacacacacacacacacaccacacacacacacacacacatatntgtatacacacatntat

SEQ ID NO: 7801 - DNA, 441 bp, Homo sapiens
caggcattgagctactgtgctcaacctgaggtcatgtatttttaattcataacttttacaaatatttactggatgactgccatgccaggcattttgaggaattcttggctactgtctgaccacctgaatccttggagccgaagaggagcgaggagcagtgttcactcttggaggaaatgggatatttcctccggccccttgattctgctctcccttttcttttcttttcttttctttctttttttttttgagacggagtttcgctcttgttgcccaggctggaatgcaatggtgcgatctcggctcaccacaacctccgcctcccaggttcaagcaattctcctgcctcagcctcccaaagtagctgggattaaagacatgcgccaccacactggctaattttttggtatttttagcagagatggggtttcactgtgttgg

SEQ ID NO: 7802 - DNA, 380 bp, Homo sapiens
  misc_feature (1)...(380): n = g, a, c or t
ctgggggcggggtggnnagaagtgattcaacagagctacatgctttaaacttgcccaagttctacctccttcctttgaacatttcagattggagaaccaaggagttgattgcctgaacacctgaacatccgtttatgggggccagatagaatttgttttcaaataggcttaacaggcatcattaaaatttcattctgtgtgttttgtttaggcttgaggtgcttagaagatgggataaaatattctacttttttctaaattttaactttgtttcctatgtgatttttttaaatgtcctttctaaaatattctaaaattattgattcacaagtgccatgttcagaactatagaatattactgttacataatgtctgcacag

SEQ ID NO: 7803 - DNA, 546 bp, Homo sapiens
  misc_feature (1)...(546): n = g, a, c or t
ctcaaggtgcactacangtacacggtagtcatgaagactcagcccgggctcccctacagccaggtccgggacatggtgtctaagaaactggagctccggctggaacacactaagctgagctatcggcctcgggacagcaatgagctggtgcccctttcagaagacagcatgaaggatgcctggggccaggtgaaaaactactgcctgactctgtggtgtgagaacacagtgggtgaccaaggctttccagatgaacccaaggaaagtgaaaaagctgatgctaataaccagacaacagaacctcagcttaagaaaggcagccaagtggaggcactcttcagttatgaggctacccaaccagaggacctggagtttcaggaaggggatataatcctggtgttatcaaaggtgaatgaagaatggctggaaggggagtgcaaagggaaggtgggcattttccccaaagtttttgttgaagactgcgcaactacagatttggaaagcactcggagagaagtctangatgtttcacaaactacaaagctg

SEQ ID NO: 7804 - DNA, 509 bp, Homo sapiens
ctggagggaccggagaacactggcgtctggcagccccgtttccactcctaccaagaaggctcaaagacgacggtcagctcaggcttttcttcttgaagtgtttctaacgcactttttgtctcataattgaaatacatttcagacaaccccaggttctgcaggaggcagctctgctgtttcagcacttcacagaacatcatgacccccaggtcgcccaggtcattgttgcccaggctcagctttcgcaggctctggctggaggtcagaagtgtggaaagatcccagcagcagtgtgacgtgaggttgcagttgtctaattccaacacctgaagcttgcagtcggggtgcaagagtccctcacagagtagtttgatccccttgtctccgagagtgttgcctcgcaggtaaaggtgcgtgagattctgattagtgctgagtaccgaggacaaagctgaacaacagactgacgtaaggccagaattcaccaaccccagtttctgcaggttaca

SEQ ID NO: 7805 - DNA, 518 bp, Homo sapiens
  misc_feature (1)...(518): n = g, a, c or t
gaattttcattgttacataaatgtgtgaactagtttcaacagtgttctttcatatttactctgcaaatacaaaaaaccaaaacctgcagccagtggtcatttcaaaatctttttatgttcagatactgagccttcataagggttgactacctcagatttgctgcactcattgtggacttcatgtggatcacaacttctggataagaagattacaactattaagtgtcgatgtgaaccttgcaaccagctctactggattcttatcagaaatcctgcataaaaagtcagccatctgggttctgatctgctgnaaaagatgaagatttaagtgaccttaattaacctgtcctgtgccctacccttaaggaatactctctgtagtaggctgttgttatattagacttcctggaacacaccgctgaaaagaactgatgtgttcagatcatctgtgtagggctgngatttgtaatttaaactaattgtattctgaggtaaccacaaaataaattcaaccaaac

SEQ ID NO: 7806 - DNA, 283 bp, Homo sapiens
ccacaacaactgacgcggcctgcctgaagcccttgctgtagtggtggtcggagattcgtagctggatgccgccatccagagggcagaggtccaggtcctggaaggagcacttcatctgtttagggccatcagcttcaaagaacaagtcatcctcattgccactgtaataagccatcatttcactggcgagctcaggtacttctgccatggctgcttcagacacttgagcaatgaagattggctgaagagaatcccagagcagcctgttgtgccttgtgcctcg

SEQ ID NO: 7807 - DNA, 416 bp, Homo sapiens
  misc_feature (1)...(416): n = g, a, c or t
ccatcggngctgaaattgngcattttaaatagtacagtaggctggtatacattaggaaatggactgcactggaggcaaatagaaaactaaagaaattagataggctggaaatgcttactttctgctctcattttctttcattttgtctgctgtctttttgaatgccaatactttcatttaaaatgttttgggagcacggcaacccaaaatgactgaacggtggtccaaaaatccaaaccaactgataattacttctcgaggtgataggaaaggcacaggaagttaggactttggctgaaatgatgaaaacacatgttcgccattttagggatcagcgcctcgactcctgccacctccggctccaacgatgatcatgtttggatgtatttattgaattgncctttgctgatgaggaa

SEQ ID NO: 7808 - DNA, 598 bp, Homo sapiens
  misc_feature (1)...(598): n = g, a, c or t
ctgactctncaccttaaatgttcagagggacctacgtcagaggaccagaaagaaccagtttttctgacttgatcatcttgtaattcagataaaagctttgtaaatacaaaaaaacatgtcctcatgaattgcaagaaggaaaatagacccaaggagaggttcaaatggattaccttggagtgcagactagaaaggggtttatgggaatcacttgagaagtgaaacttgcccgaatagaatatatcctcaaattccgactttttctcttctggtgaaacaggaagaaggcactgtcagtattaaatagtaatttcctgtctgcaacaccacagtcattttttttttcctgatcagagaagtccctgaactacgagccttttggaggtcagtgtgagaagaagattgtttctgagcttgagaagcttctggaggattgaagagtatttgaagtctgtgtcaaacatccatatcataagtggaattttggagatattcaaagaatgctgtcagaagggtatctcagtggacttgagtactggaatgacatccactggagttgngcctcttataatgagcaggtggctggggnaaaaggaag

SEQ ID NO: 7809 - DNA, 450 bp, Homo sapiens
  misc_feature (1)...(450): n = g, a, c or t
ctgggggagacggggaagcaggtgtcggtgaggtctggcgttgttttaagaaaatgtctgcgttgagggtttgcanagaaagtttataaagactatcagtagagctgccaggtttgtgaactggaacggaatcccactccggtggaggagagtctttttcaccctctgagctactggtgttgcctaattcttgactattcgggaggaattttgctagggcaggtggtctgttatccactaacttacttgtaccttttgttttctgggcatttcgtgatttggatccacttgtcattgcagttggaagaggaatcttgcttgggagatttctacgttgcttactttccaaagggggagtatatggtagttctaatgaactgggtttcacatctgttgggatttctttcttaatatttaagagttttttgcttttttgcttcacttgagaca

SEQ ID NO: 7810 - DNA, 297 bp, Homo sapiens
  misc_feature (1)...(297): n = g, a, c or t
ccactgaactgcgctgccngtgcttgcagaccctgcagggaattcacctcaagaacatctaaagtgtgaaggtgaagtcccccggaccccactgcgcccaaaccgaagtcatagccacactcaagaatgggcagaaagcttgtctcaaccccgcatcgcccatggttaagaaaatcatcgaaaagatgctgaaaaatggcaaatccaactgaccagaaggaaggaggaagcttattggtggctgttcctgaaggaggccctgcccttacaggaacagaagaggaaagagagacacag

SEQ ID NO: 7811 - DNA, 506 bp, Homo sapiens
  misc_feature (1)...(506): n = g, a, c or t
ccagtggaatgatgttccctgcaattaccatctcacctatacgtgcaagaaaggaacagttgcttgcggccagccccctgttgtagaaaatgccaagacctttggaaagatgaaacctcgttatgaaatcaactccctgattagataccactgcaaagatggtttcattcaacgtcaccttccaactatccggtgcttaggaaatggaagatgggctatacctaaaattacctgcatgaaccgtaagtggtcctttagaaagaatggactaccgtgctataacaactactagacaccttcattttacggctgtggtatcggcagtttagggtatggagcaagtaatattgngtgttttctttttttctttctttccttccatgtagcatctgcataccaaaggacttattctatgaaatactttaaaaattcctcatcagcaaaggacaatttcaataaatacatccaaacatgatcatcgttggagccggaggtggcaggagtcg

SEQ ID NO: 7812 - DNA, 415 bp, Homo sapiens
  misc_feature (1)...(415): n = g, a, c or t
ctggtggatncagcgcgcacacagaagacggcctaccagcggaatcgaatgagatttgcccagaggaacctccgcagagacaaagatcgtcggaacatgttgcagttcaacctgcagatcctgcctaagagtgccaaacagaaagagagagaacgcattcgactgcagaaaaagttccagaaacaatttggggttaggcagaaatgggatcagaaatcacagaaaccccgagactcttcagttgaagttcgtagtgattgggaagtgaaagaggaaatggattttcctcagttgatgaagatgcgctacttggaagtatcagagccacaggacattgagtgttgtggggccctagaatactacgacaaagcctttgaccgcatcaccacgaggagtgagaagccactgnggagca

SEQ ID NO: 7813 - DNA, 340 bp, Homo sapiens
  misc_feature (1)...(340): n = g, a, c or t
ctgctgctnncttccttcagatatgacatttcagcctggcctctacagtaccatgaaacctaaattacttacttctctccagcttaatcctaggtggaggaattctagctgtggtttgtgaatgtacacaggtcagagaggtttagcaccttttgggaggaggaggtcagaatgcggtggtgaaacctctcccactgtgaccaacaaaccctcatacttaaaaagaagcatgcacctctggcttaaggatctggatgctactggaatttttgtctgtttcaattgtattcattagctttgaagaggagagagatggtggtggttaacttttttgttgcat

SEQ ID NO: 7814 - DNA, 544 bp, Homo sapiens
  misc_feature (1)...(544): n = g, a, c or t
ccatccagnctcctttgccaactgaggtgcagactgagttgtggaaggtgggtgttgatggaacccagcattacaatattgtgtagaactagtctcctaatatacctcactctgcaacttacggaagctgaggaagatcagaaaaagaccacactcctcactcagaatatttattatattctgccccatggggccttgcaggaaaagggacccaagctatacccctactccttttccaagctactttcctgaaccaagggacaggattctaagagaatcatgtatctcaaataagccagaatgtatctggggaagaatagccattaatttcctagacctgacactgggtttatttgtgtctgccaggaagacggggagtcagtgagaatcgtaaatggactagatgaggggaaataggatgggcccttctttatcacagcttgagctcaaaaaggttgggataaacaggtgtttaaaaaagagaggaggtaaaagggaggatgggcaggggatagaggaaggtcaggggttgggttcacccata

SEQ ID NO: 7815 - DNA, 270 bp, Homo sapiens
  misc_feature (1)...(270): n = g, a, c or t
gtaacttcnatgacaacnnagacctggaatgcgtgaccaatcttcaggaagtggcccgcatcgtgggcaactctggcctcaacatctacaatctctatgccccgtgtgctggaggggtgcccagccattttaggtatganaaggacactgntgtggtccangatttgggnaacatnttcactcgnctgccactcaagcggatgtggcatcaggcactgctgcgctcaggggataaagtgcgcatggaccccccctgcaccaacacaacag

SEQ ID NO: 7816 - DNA, 262 bp, Homo sapiens
  misc_feature (1)...(262): n = g, a, c or t
tgactattttctactgtaggctgctttggaaataattcccatatccttgctttgtaagttggtaatatcactatgcatttctacacattttataaatttgatttatgcagattttgatacactgtatgtttctgtanaaattgnataaatattcaaaattttattaggatnnatttgagnaacttacntatatcttaattctgggttgcttgttttttaggtgacaaaaataaaatattgtattttaattcaaaaaaaaaaa

SEQ ID NO: 7817 - DNA, 551 bp, Homo sapiens
  misc_feature (1)...(551): n = g, a, c or t
tgcttctctgctgctgtaacagggactagcacaggcacacggatgagtggggtcatttccagatattaggtcacagcagaagcagccaaaatggatccccagtgcactatgggactgagtaacattctctttgtgatggccttcctgctctctggtgctgctcctctgaagattcaagcttatttcaatgagactgcagacctgccacgccaatttgcaaactctcaaaaccaaagcctgagtgagctagtagtattttggcaggaccaggaaaacttggttctgaatgaggtatacttaggcaaagagaaatttgacagtgttcattccaagtatatgggccgcacaagttttgattcggacagttggaccctgagacttcacaatcttcagatcaaggacaagggcttgtatcaatgtatcatccatcacaaaaagcccacaggaatgattcgcatccaccagatgaattctgaactgtcagtgcttgctaacttcagtcaacctgaaatagtaccaatttctnatataacanaaaatgtgtacataaa

SEQ ID NO: 7818 - DNA, 470 bp, Homo sapiens
  misc_feature (1)...(470): n = g, a, c or t
tgaaatannacagcaccnagaaaataatttagttttgcttgcttccattgatcagtcttttacttgaggcattaaatatctaattaaatcgngaaatggcantatantccatgatatntaaggagtnggcaagcttaacanaacccattttttataaatgtccatcctcctgcatttgttgataccactaacaaaatgctttgtaacagacttgcggttaattatgcaaatgatagtttgtgataattggtccagttttacgaacaacagatttctaaattagagaggttaacaagacagatgattactatgcctcatgtgctgtgtgctctttgaaaggaatgacagcagactacaaagcaaataagatatactgagcctcaacagattgcctgctcctcagagtctctcctatttttgnattacccagctttctttttaatacaaatgttatttatagtttacaatga

SEQ ID NO: 7819 - DNA, 338 bp, Homo sapiens
  misc_feature (1)...(338): n = g, a, c or t
ctgtgacgcctgaataactgtctactttatcttcactgaaccactcactctgtgtaaaggccaacagatttttaatgtggttttcatatcaaaagatcatgttgggattaacttgcctttttccccaaaaaataaactctcaggcaagcatttntttaaagctattaagggagtatatacttgagtacttattgaaatggacagtaataagcaaatgttcttataatgctacctgatttctatgaaatgtgtttgacaagccaaaattctaggatgtanaaatctggaaagtncatttcctgggattcacttctccagggattntttaaagttaattt

SEQ ID NO: 7820 - DNA, 431 bp, Homo sapiens
  misc_feature (1)...(431): n = g, a, c or t
ctgtggctgtctgtcagagaagcacatttttctgcagataattagaatggcttcccccatctctcacggactgtcccaagtctagaaaagaattgagttcctcttctattagtcaaataaaagggaagagaatgtttgtcttcctttcctttctgtagtgttaagaaaataaacgaacttaatgattctaaattatcagtgagcttaacactgtactatagaccaaagattaccttttcaaaaagtcctttgaggtgaaatattttgtatacgtaatacatagatgcacatataaacacacacatatagaatctcaatattttaacacttctttgggtagttgtactaactcactaaccctgaggaaaaagttaagaaattgaaagtgttttcttcaaaagttgagatttaacantaaaaggngntacttt

SEQ ID NO: 7821 - DNA, 566 bp, Homo sapiens
  misc_feature (1)...(566): n = g, a, c or t
agtgacttgacttctttaagccttggtttctttttcagtgagatttacagcttagactagtttctgaatcttgaccctgtggacaatctagttggagaactgagatgacctgggcattgtaggatgtttagcaacattcctgcctctgtaaactagacacagcagcacatttacccaacctgctctgactgtgacaaccagaaatgtctccaggcattgccaaatgtcaactgagggcaaaattgcctaccctagccaccttaactgaaaactacaaacttcattgaaataatttctttatggctcccagcagtaacactgtgctattctagaccagttggttaaactactggatgcttcatcagaaagcacccactaagcatcactcaccatgaagttcgttgggtactctatacaatgaacaaaggagatatcacataatttttaaaaaacttaaaagattcacaggtgagaattttgtagtaacaattaagtattaactattannaaaaatttaagaagttttaacaaaatgatntaaaaatatattcactataagtaggatg

SEQ ID NO: 7822 - DNA, 569 bp, Homo sapiens
ctgagtctcacaaagatgccgtggaaagcagatactctagaacggaaggctcccttgatggaacttagacagcaaggccagatgcacatccctggaaggacatccatgttccgagaagaacagatgatccctgtatttcaagacctctgtgcacttatttatgaacctgccctgctcccacagaacacagcaattcctcaggctaagctgccggttcttaaatccatcctgctaagttaatgttgggtagaaagagatacagaggggctgttgaatttcccacataccctccttccaccaagttggaacatccttggaaattggaagagcacaagaggagatccagggcaaggccattgggatattctgaaacttgaatattttgttttgtgcagagataaagaccttttccatgcaccctcatacacagaaaccaattttcttttttatactcaatcatttctagcgcatggcctggttagaggctggttttttctcttttcctttggtccttcaaaggcttgtagttttgggtagtccttgttctttggaaatacacagtgctgacc

SEQ ID NO: 7823 - DNA, 277 bp, Homo sapiens
tgatctctttcagtgcaccgccacttatgttacctttttccttttatttctttgtgtttccagttgcaagaacagcaaggaaaaggaagccctctccagaaccagaaggtgaagtcgggccccctaagatcaacggagaggcccagccgtggctgtccacatccacagaggggctcaagatccccatgactcctacatcctcttttgtgtctccgccaccacccactgcctcacctcattccaaccggaccacaccgcctgaagcggcccagaatgg

SEQ ID NO: 7824 - DNA, 510 bp, Homo sapiens
ccagggtgccacaaacccaaagcaaagtttcaaaataatataaaatttaaaaagttttgtacataagctattcaagatttctccagcactgactgatacaaagcacaattgagatggcacttctagagacagcagcttcaaacccagaaaagggtaatgagatgagtttcacatggctaaatcagtggcaaaaacacagtcttctttctttctttctttcaaggaggcaggaaagcaattaagtggtcacctcaacataagggggacatgatccattctgtaagcagttgtgagggggtagagatgggacaaaattttggtctcagaggtcttaccatcttaatttggtaacttctaatgaaaaaaataaaaaatagaaataacattatccaaagatatcttaaagctgaaaacttgaacagcacattttttgtttttgttgttgtttggctaactcctcctggaatcacctttctggtttagctagtactttgtacagaacaatgaggt

SEQ ID NO: 7825 - DNA, 525 bp, Homo sapiens; identical to SEQ ID NO: 601
  misc_feature (1)...(525): n = g, a, c or t

SEQ ID NO: 7826 - DNA, 380 bp, Homo sapiens
  misc_feature (1)...(380): n = g, a, c or t
tacaagctttttttttttttttttttttttngacagttnatcttttattttctgcaaatttaggaacatatttactcgttttcacattgaatcttaagttnaagctnttcatttggtntttaggcaatatatganaaaaaaatttttttngttcattngtaatttnaacaagttgaacattttaccatgattgaacatgtttttnttacagtntttaacattcccccaaanaatnccctgcaaagngtaaacctttgtcccatactgggatattactgttctgctacaataaatgtcaaacctaancactttgcagttcactactttngggaaaatgttntagggaactgtntcacaggtgaaactgttncccataaagg

SEQ ID NO: 7827 - DNA, 566 bp, Homo sapiens; identical to SEQ ID NO: 433

SEQ ID NO: 7828 - DNA, 440 bp, Homo sapiens
  misc_feature (1)...(440): n = g, a, c or t
ccattggtgcgtgtttcattcagatcacctctggaatctctgtggttgtgaaggcaattccttatgagactcttgcctcctgtggcttacgtgatgaattgttaatatggcagtaattaattagtatctacttaaatttagtggtcagaaatgtatttgaagtgccttaaagatgatcatggttcanaatatcttcagagaaagcaaaatctttaatattgcagggagcctagcaatacaaatacacatttctgtggcttgatttcttgaatatgctgagacccaatttggactacatttggcagaaatcatggagtaaacagcaaggctttaaattaaattaatagttacaaggtaggttggctcttangtgaatttagccatgtcaactaatangcttttatatggtatgtaacaaatctgaattatgttatgctgtg

SEQ ID NO: 7829 - DNA, 508 bp, Homo sapiens
ctggggtgggcttctcctactccgatgacaagttttatgcaactaatgacactgaggtcgcccagagcaattttgaggcccttcaagatttcttccgcctctttccggagtacaagaacaacaaacttttcctgaccggggagagctatgctggcatctacatccccaccctggccgtgctggtcatgcaggatcccagcatgaaccttcaggggctggctgtgggcaatggactctcctcctatgggcagaatgacaactccctggtctactttgcctactaccatggccttctggggaacaggctttggtcttctctccagacccactgctgctctcaaaacaagtgtaacttctatgacaacaaagacctggaatgcgtgaccaatcttcaggaagtggcccgcatcgtgggcaactctggcctcaacatctacaatctctatgccccgtgtgctggaggggtgcccagccattttaggtatgagaaggacactgttgtggtcca

SEQ ID NO: 7830 - DNA, 126 bp, Homo sapiens
ccaaagtgttaactagttttactacaatgtttggtgtttgtgtggaaattatctgcctggtgtgtgcacacaagtcttacttggaataaatttactggtacaaattcttaaaaaaaaaagaaaaaa

SEQ ID NO: 7831 - DNA, 505 bp, Homo sapiens
  misc_feature (1)...(505): n = g, a, c or t
caggactngantcgtatcttcccactttctgaggactactctggatcaggcttcggctccggctccggctctggatcaggatctgggagtggcttcctaacggaaatggaacaggattaccaactagtagacgaaagtgatgctttccatgacaaccttaggtctcttgacaggaatctgccctcagacagccaggacttgggtcaacatggattagaagaggattttatgttataaaagaggattttcccaccttgacaccaggcaatgtagttagcatattttatgtaccatggttatatgattaatcttgggacaaagaattttatagaaatttttaaacatctgaaaaagaagcttaagttttatcatccttttttttctcatgaattcttaaaggattatgctttaatgctgttatctatcttattgntcttgaaaatacctgcattttttggtatcatgttcaaccaacatcattatgaaattaattanattcccatgg

SEQ ID NO: 7832 - DNA, 491 bp, Homo sapiens
ccagtgaacacgaaatgtgcctgacatccctaataatcaaagaaatacaaattaaaacacaatcataccaattttcatctaacagattggcaaaaatgtaaaggatcatgtgtatattcattgcagtgttgcttgtaatagcatacagcttgagtgacctccagtagaggtgatgtttaaatatattttgctgcattcttaaaaggaaatgtagcataatgcagccatttggagagaatgagataactatatgcactctctttgaaagttttgtgactactatgtgccgggagttgcactgggctttctttaaggtattttcagcaaacctgtcttttaatgatttatattgtacctaataagagatatatgaatggaaaaacagtttttgctctcacatcatgacaatcaacacaaaagacttctgtgaccaaatgtgtggagttttcttccaccaacaagcaagcaatcaattctgcagcggacaccag

SEQ ID NO: 7833 - DNA, 343 bp, Homo sapiens
  misc_feature (1)...(343): n = g, a, c or t
ccacttgngtgggtcctcacaagcaaagagagcactaaacttgacattgggggtccaccactccaactttgctttctgaaggttttggtgtacattgagccccagaaggaaaggagagtatctgtgagtgggggcctcccttgaccccagtacgaagtctatgccctgaatccccagagtagcccttcctggtgcccaactggcctggggacaaacagcgtccactacatctaggactgccggctaagtggacacacttcttgacctcctaccaggaactttggtaaaagctagctttggggaaggggttgggtgtaaatatgagagggtggagggagaccag

SEQ ID NO: 7834 - DNA, 550 bp, Homo sapiens
  misc_feature (1)...(550): n = g, a, c or t
ctgtagaagtaggggtttggcttctggcccagatccacgcccttgtcctctgtcaaaaagagaggtggcagctcagcaccattctgttgggatcaggtaactcaggaaaggggctagatgctgtgggcctagagtaagtctccataaaggctggggaagcacacacctgtcatcacctggaaggcagccacactgacgtaatcctctgccactttctggaagagctcgtctggcaggaaaaatgatgatcagcgagggcccaatgccagtagccctgggatctcccagtgacccagccctctgtgccctattcagcttcctctggtgcccctgcatgttcctgctgtgaggctccagcacagcactcacccacactctggcctgtcttgctggatgtttcaaagagctgagctttgatatctgtaaagagaagtgactaaagcctcatacctgagaattagataaacagacaaaagggagggctagcagttcagggagtctcctggaccccacagttcaaggaggccaggaagacctcctanagcacctt

SEQ ID NO: 7835 - DNA, 314 bp, Homo sapiens
  misc_feature (1)...(314): n = g, a, c or t
ccttatttctcttgtcctttcgtacagggaggaatttgaagtagatagaaaccgacctggattactccggtctgaactcagatcacgtaggactttaatcgttgaacaaacgaacctttaatagcggctgcaccatcgggatgtcctgatccaacatcgaggtcgtaaaccctattgttgatatggactctagaataggattgcgctgttatccctagggtaacttgttccgttggtcaagttattggatcaattgagtatagnanttcgctttgactngtgaagtcttagcatgtactgntcggaggttgggt

SEQ ID NO: 7836 - DNA, 539 bp, Homo sapiens
cctgactattctcaattctccccactgcagtgttcacgcaacttccctgaatatagggtctccttaaacacatctgagcactgacctggatgagtgcacttgggagacctggtgacaggcacaaaaagcatgatcagggctagcctcaatacagggagaaatcatggatatttaaaaatacttttttgattcagattccggtatgactgaagagcaacaccatgttgagaactggaggaagacagggttctggtgccagaagctcttctccaatctttaaagccaggcttgctcaccaaggtgctcagtaatgtctctcacccctgcccatatatagcattaaaaagtgaacaaaagacagataaagatagaattcaaaaaggaaaaaaagtaaggaagcagagggacagaaacttagaagagaaaaccaaggtcaacagtcaaaaaggatggtgggaaagaatgtttagatttcaaaatttaaaagccccgagctaggaagaacctgaaaactgagtactcctcagtgaaaggccatc

SEQ ID NO: 7837 - DNA, 397 bp, Homo sapiens
cctactatgggtgttaaattttttactctctctacaaggttttttcctagtgtccaaagagctgttcctctttggactaacagttaaatttacaaggggatttagagggttctgtgggcaaatttaaagttgaactaagattctatcttggacaaccagctatcaccaggctcggtaggtttgccgcctctacctataaatcttcccactattttgctacatagacgggtgtgctcttttagctgttcttaggtagctcgtctggtttcgggggtcttagctttggctctccttgcaaagttatttctagttaattcattatgcggaaggtataggggttagtccttgctatattatgcttggttataatttttcatctttcccttgcggtactata

SEQ ID NO: 7838 - DNA, 428 bp, Homo sapiens
cctgtccatacactaaagaacatctcattgactgtgacaatgggcgagatgaatgatgggttataaatatttctctcttccttaatagctaacaatcttctccaaggactgtggactcctgttccctgctcatcatgtcatgggcatctgccaggaaccatctttgatggtgtaaaaatcttgaatacataagagggaaattttagacttgttagaaagaagccaagcaattgagaccttagatagaacttagaattctcaccgagttttgttgggtaattgttacttcaaaaaaaaatgcaatttctgttccctctttcctccaaccatttatctgggaagcaagttattggcaacccagagctgattgttggagccggggaaaatggtgtgaaatgtgagaaaatgtaattgagataataaaaaca

SEQ ID NO: 7839 - DNA, 447 bp, Homo sapiens
tttggcttcagggtggggtttggaagcttctggaagtcgtgctggtctcccaggtgaggcaagccatggttgctgggctgtagggtgagtggcttgcttggtgggacctgacgagttggtggcatgggaaggatgtgggtctctagtgccttgccctggcttagctgcaggagaagatggctgctttcacttccccccattgagctctgctccctctgagcctggtcttttgtccttttttattttggtctccaagatgaatgctcatctttggagggtgccaggtagaagctagggaggggagtgtcttctctctccaggtttcaccttccagtgtgcagaagttagaagggtctggcgggggcagtgccttacacatgcttgattcccacgctaccccctgccttgggaggtgtgtggaataaattatttttgttaaggtaaaaa

SEQ ID NO: 7840 - DNA, 322 bp, Homo sapiens
  misc_feature (1)...(322): n = g, a, c or t
ctgatgaangcatntgatgccttcatctgttcagtcatctccaaaaacagtaaaaataaccactttttgttgggcaatatgaaatttttaaaggagtanaataccaaatgatagaaacagactgcctgaattgagaattttgattttttaaagtgtgtttctttctaaattgctgttccttaatttgattaatttaattcatgtattatgattaaatctgaggcagatgagcttacaagtattgaaataattactaattaatcacaaatgtgaagttatgcatgatgtaaaaaatacaaacattctaattaaaggctttgcg

SEQ ID NO: 7841 - DNA, 423 bp, Homo sapiens; identical to SEQ ID NO: 275

SEQ ID NO: 7842 - DNA, 530 bp, Homo sapiens
  misc_feature (1)...(530): n = g, a, c or t
atattttatgcatgggtgcatgcacacacacacacatttataagaaaagaattataaaaaataccaacataataattttctctaggaggtgggaataacagtgagttttctttccttttattttttaaaatctatatttttatggttaaaaaaatgtgataaggtaaataccaagtatatacatttgaatttcatgacatactttttaaatttatgcttgatactttcagaccatcagacctttattacaccttgttttaatgcttattttctctttgtttcattcccgtgaaaaatgaaaagtctttgtcattttctctctgaatctgtatctttgtctcccttttttcctcccgctctcctactttctcacactagacgtttcataggaattaaaagtattaaagggtggtcaattcttatttgcctttggaaacccagaatgtgcacagtatttagtaaactttcatctattatgtaaattcttaatgctttgaagaagcacaaatggactgnatttacctccattg

SEQ ID NO: 7843 - DNA, 478 bp, Homo sapiens
ctgttgtgttggtgcagggggggtccatgcgcactttatcccctgagcgcagcagtgcctgatgccacatccgcttgagtggcaggcgagtgaagatgttgcccaaatcctggaccacaacagtgtccttctcatacctaaaatggctgggcacccctccagcacacggggcatagagattgtagatgttgaggccagagttgcccacgatgcgggccacttcctgaagattggtcacgcattccaggtctttgttgtcatagaagttacacttgttttgagagcagcagtgggtctggagagaagaccaaagcctgttccccagaaggccatggtagtaggcaaagtagaccagggagttgtcattctgctcataggaggagagtccattgcccacagccagcccctgaaggttcatgctgggatcctgcatgaccagcacggccagggtggggatgtagatgccagcatagctctc

SEQ ID NO: 7844 - DNA, 559 bp, Homo sapiens
ccaagaacctcttccaccgggccatttctgagagtggcgtggccctcacttctgttctggtgaagaaaggtgatgtcaagcccttggctgagcaaatttctatcactgctgggtgcaaaaccaccacctctgttgtcatggttcactgcctgcgacagaagacggaagaggagctcttggagacgacattgaaaatgaaattcttatctctggacttacagggagaccccagagagagtcaaccccttctgggcactgtgattgatgggatgctgctgctgaaaacacctgaagagcttcaagctgaaaggaatttccacactgtcccctacatggtcggaattaacaagcaggagtttggctggttgattccaatgcagttgatgagctatccactctccgaagggcaactggaccagaagacagccatgtcactcctgtggaagtcctatccccttgtttgcattgctaaggaactgattccagaagccactgagaaatacttaggaggaacagacgacactgtcaaaaagaaagacctgttcctggacttgatagc

SEQ ID NO: 7845 - DNA, 422 bp, Homo sapiens
  misc_feature (1)...(422): n = g, a, c or t
attttaatgnccctgtgtactaaatgactactcatcgagtatgcanaatttnacagaggaaatanaatgctgatatacatatgaaagaaaatatcctcagcatggtgatttattgtcttgtataataatagtagaacattttagaactagtacttttatgattgtattttnttcctgttcacattccaaacttttctgtnttattttcattctatatgtgatcttganncagctnattcctttctgcaactgatttaatctcatnttgacaaatntgacctagaagngttttgagtaatattaaatnttaancacatacatattattaatgaaccatctgtgatttatcttataagaggaaaacntgacaatcattaaaatgtttaccaaanaaaatatngctgangtgctaggtcaaaata

SEQ ID NO: 7846 - DNA, 467 bp, Homo sapiens
  misc_feature (1)...(467): n = g, a, c or t
ctgcccctggctaggtagttaaaactgtgtatgccttcccttgtacaatgtgggactttggtggaactgcctgggagaacttcataattactaccctgtatgtcatgccccttgcaggtaaaacagaagtggcagagcagaggtcaaaggcacagatcagcaaagggaatcctactggatcctgagactagcctggaaggggtgtcatttgtcactgggaatagaggtgcacggcctggtggaccctccgagagagcttaagattcatttttaaaacagaggatttaaaagacacaataggcattggaatcgggtagtaagaagagaaaaccagagccccaagtgaggaagtgggtgatctgtcctcacacagttggtgggggagctgggcctncccactgactggactctcaggtccttaagaggtgctctgtcctgcacaccccaaatgaccacctaaattcagg

SEQ ID NO: 7847 - DNA, 473 bp, Homo sapiens
ccacactctacttctgcttctgccacctatggggtcgaggcaggtgtggtgccttggctaagtccacagacttctgagaggcccacgctttcttcttctccagaaataaaccctgaaactcaagcagctttaatcagagggcaggattccacgatagcagcatcagaacagcaagtggcagcgagaattcttgattccaatgatcaggcaacagtaaaccctgtggaatttaatactgaggttgcaacaccaccattttcccttctggagacttctaatgaaacagatttcctgattggcattaatgaagagtcagtggaaggcacggcaatctatttaccaggacctgatcgctgcaaaatgaacccgtgccttaacggaggcacctgttatcctactgaaacttcctacgtatgcacctgtgtgccaggatacagcggagaccagtgtgaacttgattttgatgaatgtca

SEQ ID NO: 7848 - DNA, 499 bp, Homo sapiens
  misc_feature (1)...(499): n = g, a, c or t
ggcgaatcttgcgccggtttagacaaaggaggccgtgaggacctgcatgcttttctttctcaggcatgcttcggaaactggacatcaaaaacgaagacgatgtgaaatcgttgtctcgagtgatgatccatgttttcagcgacggcgtaacaaactggggcaggattgtgactctcatttcttttggtgcctttgtggctaaacacttgaagaccataaaccaagaaagctgcatcgaaccattagcagaaagtatcacagacgttctcgtaaggacaaaacgggactggctagttaaacaaagaggctgggatgggtttgtggagttcttccatgtagaggacctanaaggtggcatcaggaatgtgctgctggcttttgcaggtgttgctggagtaggagctggtttggcatatctaataagatagccttactgtaagtgcaatagttgacttttaaccaaccaccaccaccaccaaaaccagtttatgcagttgga

SEQ ID NO: 7849 - DNA, 513 bp, Homo sapiens
  misc_feature (1)...(513): n = g, a, c or t
ctgtggaggnaaaaacatacccctggttcagttccttatttggtgcaggccatgcagtgtagatgtataaagagaaagctgatgcttggatattaactgccttgatgctacacacctagaatgtcttttacttacttccaggttcatccgtccctcttttccagggaacacgcctaaaaaaaagggcaactgtgcagagtacaatataaatccccaaataacccangtttccaattttgtttccattccctagtatcatcatctgtttctttaccccagtgtgaaaaagctgattaatttaatgagaccacaataacaaactgtatttatcaggtcacatccaaatcattccattctagaaataaaatttcttttaaacgaactactttaaatgttttactgattaatgagactactgataaaactttgctttttttgtaatctaaaaatacactgcaacaaactaaaaagaacacggaggatgttagtattccatgtgttttttaacacata

SEQ ID NO: 7850 - DNA, 616 bp, Homo sapiens
  misc_feature (1)...(616): n = g, a, c or t
aaccgacgaggactctctcattgagatcatctgctccagaaccaaccaggagctgcaggaaattaacagagtctacaaggaaatgtacaagactgatctggagaaggacattatttcggacacatctggtgacttccgcaagctgatggttgccctggcaaagggtagaagagcagaggatggctctgtcattgattatgaactgattgaccaagatgctcgggatctctatgacgctggagtgaagaggaaaggaactgatgttcccaagtggatcagcatcatgaccgagcggagcgtgccccacctccagaaagtatttgataggtacaagagttacagcccttatgacatgttggaaagcatcaggaaagaggttaaaggagacctggaaaatgctttcctgaacctggttcagtgcattcagaacaagcccctgtattttgctgatcggctgtatgactccatgaagggcaaggggacgcgagataaggtcctgatcagaatcatggtctcccgcagtgaagtggacatgttgaaaattangtctgaattcaagagaaagtacggcaagtccntgtactattatatccagcaagacactaagggcgactac

SEQ ID NO: 7851 - DNA, 210 bp, Homo sapiens
  misc_feature (1)...(210): n = g, a, c or t
ctgacggcggcnacatgactctgaaccccagggcacctactgacgatgataaaaacatctacctgactcttcctcccaacgaccatgtcaacagtaataactaaagagtaacgttatgccatgtggtcacactctcagcttgctgagtggatgacaaaaagaggggaattgttaaaggaaaatttaaatggagactggaaaaattcctga

SEQ ID NO: 7852 - DNA, 485 bp, Homo sapiens
  misc_feature (1)...(485): n = g, a, c or t
cctgcttacaagctgccaactgtaaaaattgtggtagactatctcaagtaagtttccattctcatgaccacattaccaatgtaagtggcacaaaacagattattaatcaattaattaagcaaattgtgcatcactggcttatctttacttccaaaggcttatctttacttctaaagaaaaataagacagtgaagtcctccagttgccaaataaaatgcaaccaaattgtcagcagaatttcagaatcattatgattctaatagccatgttttattgaatgcttaagaatgtgctaaacattgttctaattgctttatgtgcattgtagcatatcatcctcaacaaacagaaaacaacaaaaatgttatttagatttttaaaaatatgcaaatgtctctaataaagttacgtaactgtagttacccaaattactttgaaaaaaatggactgctttggcaggtaattattctttgcaangacacata

SEQ ID NO: 7853 - DNA, 532 bp, Homo sapiens
  misc_feature (1)...(532): n = g, a, c or t
ccagtggaatgatgttccctgcaattaccatctcacctatacgtgcaagaaaggaacagtcgcttgcggccagccccctgttgtagaaaatgccaagacctttggaaagatgaaacctcgttatgaaatcaactccctgattagataccactgcaaagatggtttcattcaacgtcaccttccaactatccggtgcttaggaaatggaagatgggctatacctaaaattacctgcatgaacccatctgcataccaaaggacttattctatgaaatactttaaaaattcctcatcagcaaaggacaattcaataaatacatccaaacatgatcatcgttggagccggaggtggcaggagtcgaggcgctgatccctaaaatggcgaacatgtgttttcatcatttcagccaaagtcctaacttcctgtgcctttcctatcacctcgagaagtaattatcagttggtttggatttttggaccaccgttcagtcattttgggttgccgngctcccaaaacattttaaatgaaagt

SEQ ID NO: 7854 - DNA, 558 bp, Homo sapiens
ccaagtattattttgaaaaagtacttaggtcacttaaaatgtgaataatccaaccacaatgattaaaattcatcagctacccattactttataccttggaatagggtttcttgactttagtactactgacacactgttatgacaaccacaagtatctccagacactttccaatgtcccctttgggggcaaaatcatgccagttgagaaccactgcccaagaacaatgtctgcactttggcctatctttaaagtctttattttttcatgtttataattctagaatatccaactttcatttaacatcagtttaaatactttacatgttactacacaatgactgttttaatgcccacctatggagatgcattacagtattataaaaccacaattttcccatggctactagaaatctatattatttacaatatagctgttagaaaacatttgaaattacttccttaagacacatctatcaaattaaaaactcatgcactgggtcacttgactattttaatgattcaatcataattctaatacagagtgtcttccaaaatagc

SEQ ID NO: 7855 - DNA, 273 bp, Homo sapiens
ggcacaacaggctgctctgggattctcttcagccaatcttcattgctcaagtgtctgaagcagccatggcagaagtacctgagctcgccagtgaaatgatggcttattacagtggcaatgaggatgacttgttctttgaagctgatggccctaaacagatgaagtgctccttccaggacctggacctctgccctctggatggcggcatccagctacgaatctccgaccaccactacagcaagggcttcaggcaggccgcgtcagttgttgtgg

SEQ ID NO: 7856 - DNA, 510 bp, Homo sapiens; identical to SEQ ID NO: 603
  misc_feature (1)...(510): n = g, a, c or t

SEQ ID NO: 7857 - DNA, 491 bp, Homo sapiens
  misc_feature (1)...(491): n = g, a, c or t
cctactatgggtgttaaattttttactctctctacaaggttttttcctagtgtccaaagagctgttcctctttggactaacagttaaatttacaaggggatttanagggttctgtgggcaaatttaaagttgaactaagattctatcttggacaaccagctatcaccaggctcggtaggtttgtcgcctctacctataaatcttcccactattttgctacatagacgggtgtgctcttttagctgttcttaggtagctcgtctggtttcgggggtcttagctttggctctccttgcaaagttatttctagttaattcattatgcagaaggtatangggttagtccttgctatattatgcttggttataatttttcatctttcccttgcggnactatatctattgcgccaggtttcaatttctatcgcctatactttatttgggtaaatggtttggctaannttgtctggtaataangtggagtgggtttgg

SEQ ID NO: 7858 - DNA, 297 bp, Homo sapiens
ccactgaactgcgctgccagtgcttgcagaccctgcagggaattcaccccaagaacatccaaagtgtgaacgtgaagtcccccggaccccactgcgcccaaaccgaagtcatagccacactcaagaatgggcggaaagcttgcctcaatcctgcatcccccatagttaagaaaatcatcgaaaagatgctgaacagtgacaaatccaactgaccagaagggaggaggaagctcactggtggctgttcctgaaggaggccctgcccttataggaacagaagaggaaagagagacacag

SEQ ID NO: 7859 - DNA, 433 bp, Homo sapiens; identical to SEQ ID NO: 276
  misc_feature (1)...(433): n = g, a, c or t

SEQ ID NO: 7860 - DNA, 529 bp, Homo sapiens
  misc_feature (1)...(529): n = g, a, c or t
cctagaaaacaaaagaacagccaagaggaactcaaaagccaaaggaaaaagtgattctgaagatggggagaaggaaaatgaaaaatctaaaacttcagattcttcaaatgacgaatctagttcaatagaagacagttcttccgattctgaatcagagtcagaacctgaaagtgaatctgaatccagaagagtcactaaggagaaagaaaagaaaacaaagcaagatagaactcctcttaccaaagatgtttcacttctagatctggatgattttaacccagtatccactccagttgcacttcccacaccagctctttctccaagtttgatggctgatcttgaaggtttacacttgtcaacttcctcttcagtcatcagtgtcagtactcctgcatttgtaccaacgaaaactcacgtgctgcttcatcgaatgagtggaaaaggactagctgcccattatttctttccaagacagccttgcatttttggtgataanatggtctctatacaaataacactgaataacact

SEQ ID NO: 7861 - DNA, 396 bp, Homo sapiens
ccatgggttataagccgaaggcatatttgagggattttatgtatgtgtctcaggatccaaaagatcaactattacttggaccaacatatgctactccaaaagttctagaaaaggcaggattgaccatgaatgatattgatgcttttgaatttcatgaagctttctcgggtcagattttggcaaattttaaagccatggattctgattggtttgcagaaaactacatgggtagaaaaaccaaggttggattgcctcctttggagaagtttaataactggggtggatctctgtccctgggacacccatttggagccactggctgcaggttggtcatggctgctgccaacagattacggaaagaaggaggccagtatggcttagtggctgcgtgtgcag

SEQ ID NO: 7862 - DNA, 565 bp, Homo sapiens
  misc_feature (1)...(565): n = g, a, c or t
ttttttttaaatggttctttattcataaacttgatgcaagtttacaaaatttactgtacattgccaaataaatctgcaattaaaaataaaatccattaaacaaagcatgccaaatgtgcagctatcagtctgcttgccatcaggatattaaagaattcaacaatgtattcaagatttanccttaggcttaaggaactttactgatttaaagaattctgccttgtcacttgttatctgagcaactggcaatcagaactttatacaaatgtaatcaagtgaacaagaataccagaaaatctatttactgctctcttaaccaaaatggaatcaaaagaaattaaacacacacaatgtagaaatgacaagtctctcanatgtggtttacaaagttaaaaactgaatctcaaagctaatgcacaagaaacacttttgaactttgtaacttgtttgngcagaaaaatgtgcttctggatttcttgttaaaagtgcttaagaactagaatttacttttaaatcaaacgtgggtgtataaaaaaatctattaccaaccaaaaaggactgattc

SEQ ID NO: 7863 - DNA, 477 bp, Homo sapiens
  misc_feature (1)...(477): n = g, a, c or t
gtacaagcttttttttttttttttttttttttttgggnattnaaagttgtattttatttttaactatccaatatnttaaactttgattacatcaaatgaaatanattgngcncactcactntaananagctntgatatatgcanaancaaaggngcagggatcatgcaatagtttcgtaccanatttcaanataccaagtancaaggaaacacaatggaattgaaggctgaggngaagtacaggcntaaggcanggaaagcanaacattcaanatgtncctatatncnccagttnttaaaacncncaaatcatttccaataaggcactggctcatgtatttctgttgaggcanaantcaatcttaggatgnggtctgtacatatctgcanataanattcacaaaagctgaattcagngttattagtccttcattcanangcttcatttttgcattttcaattgctttcctgngatat

SEQ ID NO: 7864 - DNA, 498 bp, Homo sapiens
ctggtggttaacaagtggatcgtcatgttcagtagtttatacattatgtgagaagtaacgttctgattctttttcttacacagaattggcagagggggtcgatttgggaggaaaggtgtggctataaactttgttactgaagaagacaagaggattcttcgtgacattgagactttctacaatactacagtggaggagatgcccatgaatgtggctgaccttatttaattcctgggatgagagttttggatgcagtgctcgctgttgctgaataggcgatcacaacgtgcattgtgcttctttctttgggaatatttgaatcttgtctcaatgctcataacggatcagaaatacagattttgatagcaaagcgacgttagtcgtgagctcttgtgaggaaagtcattggctttatcctctttagagttagactgttggggtgggtataaaagatggggtctgtaaaatctttctttcttagaaatttatttcctagtt

SEQ ID NO: 7865 - DNA, 198 bp, Homo sapiens
ctgaggtggtcttgcttgtcatcgtcggtgaagaaggacttgttgtggtacgtgcctcgggccagcatgcccttgggagcctcctcaactggagtgaggaactcatactcctcaggccgaggtccatagctgccaaccataaatgttgctttatccactttcaccccagtcctgtaggtgtgctgaacgtatttcagg

SEQ ID NO: 7866 - DNA, 547 bp, Homo sapiens
  misc_feature (1)...(547): n = g, a, c or t
tgcaaaaccaccacctctgctgtcatggttcactgcctgcgacagaagacggaagaggagctcttggagacgacattgaaaatgaaattcttatctctggacttacagggagaccccagagagagtcaaccccttctgggcactgtgattgatgggatgctgctgctgaaaacacctgaagagcttcaagctgaaaggaatttccacactgtcccctacatggtcggaattaacaagcaggagtttggctggttgattccaatgcagttgatgagctatccactctccgaagggcaactggaccagaagacagccatgtcactcctgtggaagtcctatccccttgtttgcattgctaaggaactgattccagaagccactgagaaatacttaggaggaacagacgacactgtcaaaaagaaagacctgttcctggacttgatagcagatgtgatgtttggtgtcccatctgtgattgnggcccggaaccacagagatgctggnagcacccacctacatgtatgagtttcagtaccgtccaagcttc

SEQ ID NO: 7867 - DNA, 507 bp, Homo sapiens
  misc_feature (1)...(507): n = g, a, c or t
gttggctggaagtaccaggcagtgacagccaccctggaggagaagaggaaagagaaagccaagatccactaccggaagaagaaacagctcatgaggctacggaaacaggccgagaagaacgtggagaagaaaattgacaaatacacagaggtcctcaagacccacggactcctggtctgagcccaataaagactgttaattcctcatgcgttgcctgcccttcctccattgttgccctggaatgtacgggacccaggggcagcagcagtccaggtgccacaggcagccctgggacataggaagctgggagcaaggaaagggtcttagtcactgcctcccgaagttgcttgaaagcactcggagaattgtgcangtgtcatttatctatgaccaataggaagagcaaccagttactatgagtgaaagngagccagaagactgattggagggccctatcttgtgagtggggcatctgttggactttccacctggtcatatactctgcag

SEQ ID NO: 7868 - DNA, 478 bp, Homo sapiens; identical to SEQ ID NO: 277

SEQ ID NO: 7869 - DNA, 258 bp, Homo sapiens
cagaaacatccaattctcaaactgaagctcgcactctcgcccccagcatgaaagtctctgccgcccttctgtgcctgctgctcatagcagccaccttcattccccaagggctcgctcagccagatgcaatcaatgccccagtcacctgctgctataacttcaccaataggaagatctcagtgcagaggctcgcgagctatagaagaatcaccagcagcaagtgtcccaaagaagctgtgatcttcaagaccattgtgg

SEQ ID NO: 7870 - DNA, 567 bp, Homo sapiens
ccaagaacctcttccaccgggccatttctgagagtggcgtggccctcacttctgttctggtgaagaaaggtgatgtcaagcccttggctgagcaaatttctatcactgctgggtgcaaaaccaccacctctgttgtcatggttcactgcctgcgacagaagacggaagaggagctcttggagacgacattgaaaatgaaattcttatctctggacttacagggagaccccagagagagtcaaccccttctgggcactgtgattgatgggatgctgctgctgaaaacacctgaagagcttcaagctgaaaggaatttccacactgtcccctacatggtcggaattaacaagcaggagtttggctggttgattccaatgcagttgatgagctatccactctccgaagggcaactggaccagaagacagccatgtcactcctgtggaagtcctatccccttgtttgcattgctaaggaactgattccagaagccactgagaaatacttaggaggaacagacgacactgtcaaaaagaaagacctgttcctggacttgatagcagatgtga

SEQ ID NO: 7871 - DNA, 526 bp, Homo sapiens
ccacactctacttctgcttctgccacctatggggtcgaggcaggtgtgatgccttggctaagtccacagacttctgagaggcccacgctttcttcttctccagaaataaaccctgaaactcaagcagctttaatcagagggcaggattccacgatagcagcatcagaacagcaagtggcagcgagaattcttgattccaatgatcaggcaacagtaaaccctgtggaatttaatactgaggttgcaacaccaccattttcccttctggagacttctaatgaaacagatttcctgattggcattaatgaagagtcagtggaaggcacggcaatctatttaccaggacctgatcgctgcaaaatgaacccatgccttaacggaggcacctgttatcctactgaaacttcctacgtatgcacctgtgtgccaggatacagcggagaccaatgtgaacttggtaagatggtacttggctgaaaaggtgcagttctttcacagaagatatattgggggagaatttatgttg

SEQ ID NO: 7872 - DNA, 410 bp, Homo sapiens
  misc_feature (1)...(410): n = g, a, c or t
cctgtttgattgnanctatgttggtgtatctcgtgtacaagatggaaaagtgcttttgttgttctacctgatccagttgggggagcaggaatagggggtgcctgcctaacggcctctagcccatgtgcttatactgggatctgtcccgagggatctgcacctggttggcagtcattttgtggtggacgtggtaaatngcgagtgttaccatgatgacgaggcccangatgagccccaaaatcaggggcaaggnttcttncanttgctnccgctcatccactgggcatttatgctcttcactgaagacaaaatctgagataatgtcaaaaggttgnatgtggaccgcncacaggatcatggtgaccgtcttctgcggatcactagaggccagtgaaatggtttgnntnagc

SEQ ID NO: 7873 - DNA, 478 bp, Homo sapiens
ccagggaactccaaattcagctaatacccaaggaaattcaacaccaaatcctcaggtccctgattaccctccaaactatattttattccttaataacttaccagaagagactaatgagatgatgttatccatgctgtttaatcagttccctggcttcaaggaagtacgtctggtaccagggaggcatgacattgcttttgttgaatttgaaaatgatggacaggctggagctgccagggatgctttacagggatttaagatcacaccgtcccatgctatgaagatcacctatgccaagaaataacatttgggatagtcgtctttaaaagacttggtgttatttacagtgtttgttttgataacatttggctgggtcattttaatagttagagatgaggaggagtaaaagtgaaatttttgtgaaggacttaaattatccagtgtttctttagccttggtgaactatgaaatacgaagg

SEQ ID NO: 7874 - DNA, 519 bp, Homo sapiens
  misc_feature (1)...(519): n = g, a, c or t
ccttattctttagttctctactttacagtttcccattgtcctttgaagaacacatttgggcttgctctcagactcgccaacataaatcatcatttacatatcagggcatgtgtgagttccagcagttcactgaaataaaatccctgagccttaaccctcccatctcaaatacagtgaaaatttattttaatgataatgatggtaattttttatttgacactttttataatgctgatgttaaagtcaagaagcatttctctgtaatggaaaaaatgtctcatttttcttcctactgggcggtcagaagttggattttagaaaaaatatattgaatagggattataccgccttccttccttaaacctcataaagcaatggagtaggtggataagaagaaatagaaccaatttctggaaacaactttggagtaatgatcatagaagttacagatatccaagaatgcctaaagaaatatatctgnccttccatacccacgacacacaaataggatttatagtt

SEQ ID NO: 7875 - DNA, 474 bp, Homo sapiens
  misc_feature (1)...(474): n = g, a, c or t
ctgtattanagggaatacacattttaattgctctttttgaaaatatcaccaggcagttcagaatgtctcatttattgagaatattgtgacaatcaaagaccttaatatcagccagatgctaacaattgggaatagggcagaatttaataatggaatgtatgggattctcatttttactcaatcttgaatcatctgagaatgttttctattcaagccagtatttttagataaacacagatatagatatcgctactttgaaaaaaatcacttattttaaactcagaatttcttagtactaaatgctaaccaatacacattttatacataatatgtacagactttgttaccaagcgccncacaannaggacaaacatattagttaccttggttttcaaaggttgtcaactctgcatattgtgtggcaaggagatactatcaacatttttttttgcataatgtgcaagtattatatgg

SEQ ID NO: 7876 - DNA, 384 bp, Homo sapiens
cctctctcacctctcctactcacttaaagcccgcctgacagaaaccacggccacatttggttctaagaaaccctctgtcattcgctcccacattctgatgagcaaccgcttccctatttatttatttatttgtttgtttgttttattcattggtctaatttattcaaagggggcaagaagtagcagtgtctgtaaaagagcctagtttttaatagctatggaatcaattcaatttggactggtgtgctctctttaaatcaagtcctttaattaacactgaaaatatataagctcagattatttaaatgggaatatttataaatgagcaaatatcatactgttcaatggttctgaaataaacttcactgaaaaaaaaaaaaaaaa

SEQ ID NO: 7877 - DNA, 564 bp, Homo sapiens
ctcaagaggctgaggcaggagaattgcttaaatctgggaggcggaagttgcagtgagccaagatcgcgccactgaactccagcctaggcaacaagagcaaaactccatctccaaaaaaaagaaaggaaaaacagggccaggtagccattgtggagagagcacacttaggaatcctgggatgttagtgttaaaagaaagctcctggagccagtgattctcaggtttgtcccagaacccttttttctaagccccatataaaaggtagattaaaaaaacaaagtagcatgagtgaaattgagagagggacaggtaatgcctttcagcccctaacttctaacaatctggaagcacaacgtgaaaatcacgtagcccaaccctatcattttcatattatgaaactgagtccaggtaagtgaatctgtccaaggtcacccagcaaggtatcagtagccctgagggtaaggactctgataaggctcgggagggtcctggaaagcctgaggcggcaggaagagtgtgcagagttgagcgtgtctggaaggctgatccactgctgggcccaca

SEQ ID NO: 7878 - DNA, 424 bp, Homo sapiens
gattttgataagcatcatcatatttagtgttatcagcaaagacacaagctcaaaagtgacatcttttccatgaatccaggaaagaagaaaaatccactcagttcagataaatcctagcaattcccaaagggaaaggcattggatatgtgtttgatgagaaagaaaatgaaaaaggggtggggtggtagtactcttctacctgcttctcaaaaccagaacattgctcggtcagattaaacccagtgaaaaacacttacaataaccagtatacagcatgttttcccacagcttatttggaaaaaaagacaggtaacagtcaaagttagagaagctgtaagcaatggacaggcttgatattaagtgtgcaggatctgggctaaatgccttaaaatgtgcaattcaactttccacttctgaatgtgga

SEQ ID NO: 7879 - DNA, 479 bp, Homo sapiens
  misc_feature (1)...(479): n = g, a, c or t
ccaccaacagtttcccagccacatgctgggccctctangtctctccagcccactctaaggacccaagaaatgcagccacagtccatctctcttttttctctccttccgggggaccaaggtaccttctggggcatacaacatggcagcagggcctcgggaagaggggtaggaggaccgagcagcattctctgtagaggaagacaggaaaggagaccctcttggcacacatttatggagggttgtccctgaagagaagggcaggtgggagaggttccctgttacttaagagaaggcaccagtggcaaagagcacaatgaagaggatgatgatnaaaacaatcacgcagataaggacaatcatcttcacgttcttccaccagaattttnngagccaccttctgcgatgtcgtcttgaagtgctcagatgtggcttccagatcctctgtcttgttgcggagatgttccaagttttccccccgg

SEQ ID NO: 7880 - DNA, 490 bp, Homo sapiens
ctggctgtggatcaacttttttcagagaccttggcgataaagggctaatttcatataccgagtatcttttcttgcttacaatcctcactaaaccccattctggatttcatgttgcttttaaaatgctggatacagatggtaatgagatgattgaaaaaagggaattttttaagctgcagaagatcataagtaaacaagatgacttgatgacagtgaaaactaatgaaactggatatcaggaagcaatagtgaaagaacctgaaattaacacaactcttcagatgcgtttctttggaaaaagaggacaaagaaaacttcattataaagaatttcgaagatttatggaaaatttacaaacagagattcaagaaatggaattccttcagttttctaaaggtttgagtttcatgagaaaagaagactttgcagagtggctactttttttcactaacactgaaaataaagatatttattggaaaaatgtgagaga

SEQ ID NO: 7881 - DNA, 309 bp, Homo sapiens
  misc_feature (1)...(309): n = g, a, c or t
cctgtttgantgtngctatgttggtgtatctcgtgtacaagatggaaaagtgcttttgttgttctacctgatccagttgggggagcaggaatagggggtgcctgcctaacggcctctagcccatgtgcttatactgggatctgtcccgagggatctgcacctggttggcagtcattttgtggtggacgtggtaaatcgcgagtgttaccatgatgacnaggcccaagatgagccccaaaatcaggggcaaggtttcttccagttgctcccgctcatccactgggcatttatgctcttcactnaagncaa

SEQ ID NO: 7882 - DNA, 498 bp, Homo sapiens
tccggataggccgagaaagtgttgtgggaagaaagttagatttacgccgatgaatatgatagtgaaatggattttggcgtaggtttggtctagggtgtagcctgagaataggggaaatcagtgaatgaagcctcctatgatggcaaatacagctcctattgataggacatagtggaagtgggctacaacgtagtacgtgtcgtgtagtacgatgtctagtgatgagtttgctaatacaatgccagtcaggccacctacggtgaaaagaaagatgaatcctagggctcagagcactgcagcagatcatttcatattgcttccgtggagtgtggcgagtcagctaaatactttgacgccggtggggatagcgatgattatggtagcggaggtgaaatatgctcgtgtgtctacgtctattcctactgtaaatatatggtgtgctcacacgataaaccctaggaagccaattgatatcatagctcagaccatacctatgta

SEQ ID NO: 7883 - DNA, 556 bp, Homo sapiens
ctgggaagccacgagaatattgtgaacctgctgggggcgtgcacactgtcaggaccaatttacttgatttttgaatactgttgctatggtgatcttctcaactatctaagaagtaaaagagaaaaatttcacaggacttggacagagattttcaaggaacacaatttcagtttttaccccactttccaatcacatccaaattccagcatgcctggttcaagagaagttcagatacacccggactcggatcaaatctcagggcttcatgggaattcatttcactctgaagatgaaattgaatatgaaaaccaaaaaaggctggaagaagaggaggacttgaatgtgcttacatttgaagatcttctttgctttgcatatcaagttgccaaaggaatggaatttctggaatttaagtcgtgtgttcacagagacctggccgccaggaacgtgcttgtcacccacgggaaagtggtgaagatatgtgactttggattggctcgatatatcatgagtgattccaactatgttgtcaggggcaatgcccgtctgcctgtaa

SEQ ID NO: 7884 - DNA, 289 bp, Homo sapiens
  misc_feature (1)...(289): n = g, a, c or t
ctgggaggnaaanggtgactgtatttccaaagaagctcttttgattcagaactccaggagaccctgacatgaaaaccttaaagcaaatgactgtcacatgcttcaaggagtttatgtcaagacagttctacttatgtaaagtaagattataaaatgaaagagagtgtataaagaaaatcctaaggaatccactaaaaaacaactagaacgaagaggcaagttcagcaaggttgcaagatacaagacctatatataaaaatcaattgcatttctgtacactngtaataaa

SEQ ID NO: 7885 - DNA, 458 bp, Homo sapiens
ccttatttctcttgtcctttcgtacagggaggaatttgaagtagatagaaaccgacctggattactccggtctgaactcagatcacgtaggactttaatcgttgaacaaacgaacctttaatagcggctgcaccattgggatgtcctgatccaacatcgaggtcgtaaaccctattgttgatatggactctagaataggattgcgctgttatccctagggtaacttgttccgttggtcaagttattggatcaattgagtatagtagttcgctttgactggtgaagtcttagcatgtactgctcggaggttgggttctgctccgaggtcgccccaaccgaaatttttaatgcaggtttggtagtttaggacctgtgggtttgttaggtactgtttgcattaataaattaaagctccatagggtcttctcgtcttgctgtgttatgcccgcctcttcacg

SEQ ID NO: 7886 - DNA, 381 bp, Homo sapiens
  misc_feature (1)...(381): n = g, a, c or t
gggattacaggtgcatgccatcacgcctggctaattttttgtatttttagacgagacagggtttcaccctgttggccaggctggtctcaaactcctaacctcaggtgatccaactgcctcggcctcccaaagtgctgggattacaggtatgagccaccgtgcccagcagaattttttaactatttggttacgactaatttggataatgtagtgcatgcagctttgatttgtgccactaagagtgggcaaactgtcttcctttttgtgaatcagtaaaaattttccctcaacatgtgtttgacagttgtcattcactgctaagttaangcatttggtaaaccacacagcctctgcatccttcctagcgacagccacaagaaa

SEQ ID NO: 7887 - DNA, 581 bp, Homo sapiens
  misc_feature (1)...(581): n = g, a, c or t
ccatttaaaacaaagaaaaatactaaagccactagtaaacatctgatgtgcaaaatacaacatcctctagttggctttatgccattattacataagctccaaatagctcatcttaaattaaaaagaaaaagtggctgtcccatctctgctgcataaatcagatttttttttaaaggtttagagtactttaaggaagggaagttcaaaactgccagtgaaattcacagagaatacaaatttagcaatttaatttcccaaagctctttgaagaagcaagagagtctctcttcttaatgcagtgttctcccaagaggaactgtaattttgcttggtacttatgctgggagatatgcaaaatgtgtttttcaatgtttgctagaatataatgtttcctcttcagtgtctgtttcatcctggaactcatggcttaggagggacttcttggagccggtagacatcatgcgaatttcatcttcatactcatcatgatgctgcctgagccgatgaaagccatccttgngtctattagacttgattgagcagnatgcaccnaaataatgcaagctgttaggatcaatgcc

SEQ ID NO: 7888 - DNA, 357 bp, Homo sapiens
  misc_feature (1)...(357): n = g, a, c or t
ccttattttttgaacaattgagcaaaagaaacagatgaaacctcatacaaaaccctccaaaatatgaaaatgtggggtttatttgtgctaatgctcttcttttggaaacatttgtgttaaaggatcttatggttggtgatgaggcaagtgaattacgatcaatgttagaagttaactaccctatggaaaatggcatagtacgaaattgggatgacatgaaacacctgtgggactacacatttggaccagagaaacttaatatagataccagaaattgtaaaatcttactcacagaacctcctatgaacccaaccaaaaacagagagaagattgtagaggtaatgnntgaaacttacc

SEQ ID NO: 7889 - DNA, 178 bp, Homo sapiens
  misc_feature (1)...(178): n = g, a, c or t
aattcattttatagaaagatttaaagtttttttctggaagtgatatatgtcaaattacatttcctactgnngnatttgagcangganngtcattttttaaatgtttttggccgggcgtggnggntcatgcctgtaatctcagnacattgggaggccnaggcaggnggatcacctgagg

SEQ ID NO: 7890 - DNA, 146 bp, Homo sapiens
ctgtccttccctttcagctttccaaacatgagcacagaaggtgtctagtctgggtgaccaaagtcctcaaacggcagccggtcaacacatcgtcttcctcgttaaccatgtcatcaggtggttccacacagcacagacatggctga

SEQ ID NO: 7891 - DNA, 454 bp, Homo sapiens
  misc_feature (1)...(454): n = g, a, c or t
acgctttcttcttctccagaaataaaccctgaaactcaagcagctttaatcagagggcaggattccacgatagcagcatcagaacagcaagtggcagcgagaattcttgattccaatgatcaggcaacagtaaaccctgtggaatttaatactgaggttgcaacaccaccattttcccttctggagacttctaatgaaacagatttcctgattggcattaatgaagagtcagtggaaggcacggcaatctatttaccaggacctgatcgctgcaaaatgaacccgtgccttaacggaggcacctgttatcctactgaaacttnctacgtatgcacctgtgtgccaggatacagcggagaccagtgtgaacttgattttgatgaatgtcactctaatncctgtcgtaatggagccacttgtgttgatggttttaacacattcaggtgcctctgcc

SEQ ID NO: 7892 - DNA, 578 bp, Homo sapiens
  misc_feature (1)...(578): n = g, a, c or t
ctgagggacctgactgttagaaggaaaactaacaaacagaaaggagtagcatcaacatcaacaaaaaggacatccacaacaaaacctcatctgtaggtcaccaacatcagagaccaaaggtagataaaaccacaaaggtggggagaaaccagagcagaaaagctgaaaattctaaaaactggagcacttcttctcctccaaaggattgcagctccttgccagcaacggaacaaagctggatggagaatgactttgacgagctgacagaagtaggcttcagaaggtcggcaataacaaacttttctgagctaaaggcagatgttcaaacccatcgcaaggaagctaaaaaccttgaaaaaagattagacgaatggctaactagaataaacagcgtagagaagaccttaaatgatctgatggagctgaaaaccatggcatgagaactacgtgacacatgcacaagcttcaatagccgattcgatcaagtggaagaaagggtatcagtgattgaagatcaaattaatgaaataaagtaagagagaagnttagagaaaaaagtnaaaagaaacaaacaaagc

SEQ ID NO: 7893 - DNA, 462 bp, Homo sapiens
  misc_feature (1)...(462): n = g, a, c or t
cgcgtgctggtggtcttggcatcaatcttgcgactgctgatgtagtaattttgtatgattctgattggaatccccaagtagatcttcaggctatggaccgagcacatagaattgggcagactaagacagtcagagtgttccgctttataactgataacactgtagaagaaagaatagtagaacgtgctgagatgaaactcagactggattcaatagccattcaacaagggaggcttgtggatcanaatctgaacaaaattgggaaagatgaaatgcttcaaatgattanacatggagcaacacatgtgtttgcttcaaaggaaagtgagatcactgatgaagatatcgatggtattttggaaagaggtgcaaagaagactgcagagatgaatgaaaagctctccaagatgggcgaaagttcacttagaaactttacaatggatacagagtcaagtgtttata

SEQ ID NO: 7894 - DNA, 545 bp, Homo sapiens
  misc_feature (1)...(545): n = g, a, c or t
ccatagtaaataatgattatttatttgcaaagagaagacagagataacaatagcaataataataatgtatttcaaacaattaagagtaaatttcaaatgcctcaccacaaaatataagtaagcaaagtaaggcgatagtatgttaattagtatgatttaatcatactacattacacacatatatataaacattacgttgtaccctatgtgtacaattatgatttctgaattaatattagagtggggagaacaataatgattaatttttacttcttcagtaagattacaatgaaaatgtagagagcactagcattatagtaactatacgataggccactttaaataaatggcatcttttacaaaatttttagtcaataagttgattacgacatacttacgaactatttgctattaagtgtaagttaatttataattttagtattttcaaaaaangaacatattaaaatcctatcantatttcnaataatgacaaaattaatcatttttaatagaatccttactcaggtcctccaaaaacaatataa

SEQ ID NO: 7895 - DNA, 243 bp, Homo sapiens
cctctttttaccagctccgaggtgattttcatattgaattgcaaattcgaagaagcagcttcaaacctgccggggcttctcccgccttttttcccggcggcgggagaagtagattgaagccagttgattagggtgcttagctgttaactaagtgtttgtgggtttaagtcccattggtctagtaagggcttagcttaattaaagtggctgatttgcgttcagttgatgcagagtggggttttg

SEQ ID NO: 7896 - DNA, 341 bp, Homo sapiens
agatgtgcaaggatgtctgtgaagccatggaatacctggagtcaaagcagttccttcaccgagacctggtgggaccttagaaggattggcctaggacaaagggctgatggggtggaagtagcagtggaagatatatcatacatggttgaggggggctgctggtgccatcatttcaattttatctagaaagtactataagttaggcgtgcctctgccccagtgctgagcccatcaaatatctccagcctcagctccatgaagtctgccgtggtgggaatcagagcagtcactcactcccaaccccctaccacccacaagaaaatggtggggtctttcagtgg

SEQ ID NO: 7897 - DNA, 475 bp, Homo sapiens
  misc_feature (1)...(475): n = g, a, c or t
gttgggtgccggtggagtcgtgttggtcctcagaatccccgcgtagccgctgcctcctcctaccctcgccatgtttcttacccggtctgagtacgacaggggcgtgaatactttttctcccgaaggaagattatttcaagtggaatatgccattgaggctatcaagcttggttctacagccattgggatccagacatcagagggtgtgtgcctagctgtggagaagagaattacttccccactgatggagcccagcagcattnagaaaattgtagagattgatgctcacataggttgtgccatgagtgggctaattgctgatgctaagactttaattgataaagccagagtggagacacagaaccactggttcacctacaatgagacaatgacagtggagagtgtgacccaagctgtgtccaatctggctttgcagtttggagaagaagatgcagatccaggtgccatgtctcgt

SEQ ID NO: 7898 - DNA, 250 bp, Homo sapiens
ccatcacaagaaaatgtaaggctgatgatgggcttatttgatttgggaaatgtaatttctctcacaggctttaagtcccatgtgctccataaccttacaattccattttctaatcccccagcgattacattgatagatactccctcaggctggttggagaaagccacggaacagatgatctccctgcagtggacatgtccaacgagatccccgttcaccgtccagagtctgaggtcactgcctccgccag

SEQ ID NO: 7899 - DNA, 470 bp, Homo sapiens
  misc_feature (1)...(470): n = g, a, c or t
ccactagaggtctgtgtgccattgcccaggcagagtctctgcgttacaaactcctaggagggcttgctgtgcggagggcctgctatggtgtgctgcggttcatcatggagagtggggccaaaggctgcgaggttgtggtgtctgggaaactccgaggacagagggctaaatccatgaagtttgtggatggcctgatgatccacagcggagaccctgttaactactacgttgacactgctgtgcgccacgtgttgctcagacagggtgtgctgggcatcaaggtgaagatcatgctgccctgggacccaactggtaagattggccctaagaagcccctgcctgaccacgtgagcattgtggaacccaaagatganatactgnccaccacccccatctcagaacagaagggtgggaagccaganccgcctgccatgccccanccagtccccacagcataacagggtctnctt

SEQ ID NO: 7900 - DNA, 368 bp, Homo sapiens
  misc_feature (1)...(368): n = g, a, c or t
ccatgtaaataagatgatttaatgttgattttaatcctgtatataaaataaaaagtcacaatgagtttgggcatatttaatgatgattatggagccttagaggtctttaatcattggttcggctgcttttatgtagtttaggctggaaatggtttcacttgctctttgactgtcagcaagactgaagatggcttttcctggacagctagaaaacacaaaatcttgtaggtcattgcacctatctcagccataggtgcagtttgcttctacatgatgctaaaggctgnnaatgggatcctgatggaactaaggactccaatgtcgaactcttctttgctgcattcctttttcttcacttacaagaaagg

SEQ ID NO: 7901 - DNA, 363 bp, Homo sapiens
  misc_feature (1)...(363): n = g, a, c or t
ccatcacancttctcaagtcagntaagtnagacagaactgcagaggtagaagtagaagggaactcagattcttnctcagctagggtagaatccttggaacagtggaggtctttaaattctttacaatcgtcatatctaccattgttggactgttcttctgcatgctgtgacctgatatttgacatgtcttctgaaaacgaagatggaacttccattcggtattctttaacagaactattttcaggggaaggaagatcttgctcagttcctggatcaataattgaggagtctctggtctcattgtcagaagtgctcgttggggtcaggacctccctggtttctgttttcatgtcactgatgcag

SEQ ID NO: 7902 - DNA, 450 bp, Homo sapiens
  misc_feature (1)...(450): n = g, a, c or t
ctgccatctgggcatttgcaatgtccatgcatactcttgaagcagcattcaattctgttcccccttttcaatgtatggttcatggggtttggtatcttgataggactaaggaaggggaagctgtcataaaccaggaagggaaatatttaattggaaagaacaaggctgttcattcaaattgcatttcctacagatttatccaataatggacaagtcaagccgcacacgtcttgctctcattatctgcaatgaagaatttgacagtattcctagaagaactggagctgangttgacatcacaggcatgacaatgctgctacaaaatctggggtacagcgtagatgtgaaaaaaaatctcactgcttcggacatgactacagagctggaggcatttgcacaccgcccagagcacaagacctctgacagcacgttcctggtgttcatgtctca

SEQ ID NO: 7903 - DNA, 481 bp, Homo sapiens
  misc_feature (1)...(481): n = g, a, c or t
tntcaaggaagagaaagtaaagggtctccaaagaancngctggntgtncntctgtcgagaacgtccagcgtggagcggggcaaggagagggaggaggcttggagctttgacggggcattgnanaacaagcgaactgccgctaaggaatctgaggagaacaaggagaacctgatcataaattctgaactcaaagacgacttgcttttgtatcaggacgaggaggcgctgaacgactccattatttctggaacactgccacggaaatgcaagaaggagctcctggccgtgaagctaaggaaccggccaagcaaacaggaactagaagaccggaacattttccccagaaggactgatgaanaaagacaggagatccggcagcagatcgagatgaagctttccaaacggntgagccaaagacctgccgtggaagagctggagagaagaaatatcttgaaacaaaggnatgatcagacagagcagg

SEQ ID NO: 7904 - DNA, 532 bp, Homo sapiens
  misc_feature (1)...(532): n = g, a, c or t
cctagcccaactctccagaaaccaggggtagcctgctgagctctgaaatgccagaagtttaagaaaagagggaagggggcaagaggtggtggtggtagtggtactttgctatttaaaggtagaagaatgcaaggaagtaaaactttttttctccatttgttgtttggcgaccccattggagaattccaggaggcatgcaggatgacatcatgttttacaactgagaaatctcagtaattctgtaaaatggagtccctgcctgctccatgttcctgatggaagctgctttatatttatgtgcttaaagctgtattttatgtcacatttaaatgagggtttaataatcttaattatctaccaaaagtagattacgacgcatgaagatcacataaaatgaacttcacttctcagcatcacaaacatttggaatacaaaaagtccagggatggatattanaagtaagaaaagtncaaaagaggtttgcttagaaataacanaaaattaaaaaaaaaaaacggatcccccctccccc

SEQ ID NO: 7905 - DNA, 346 bp, Homo sapiens
cctggattagaagtgcgtaaacctctgtccatcttccttggccctgtggagctgcctgggaacattccatgattaactctcgtggcgtcctgggacgaccaggtgagcgataccatgtggcacctgggaacctgacgtacctttagatttccgaccatctccctgctgtggtgtctgaggaactgtgcctgggctcaagggctgaacttttgaatacagagtaagaagttttagaaagataaactcctggggaaatgggatcttttaaatccatgtaatttttaaagcagtttttttgcgggggggggcggtggtttgagataggttcttgccctgtggcccaagc

SEQ ID NO: 7906 - DNA, 198 bp, Homo sapiens
  misc_feature (1)...(198): n = g, a, c or t
gacaaattgaaccatatgtaagtaatcttttattttttattttttttttgagacagagtctcactctgtcacccaggctggagtgcagtggcgcgatcttggctctctgcaacctctgcctcccaggttcaagcctcctgagtaactgggactacaggcgtgcaccactacgcccaactaatttttttttttttttna

SEQ ID NO: 7907 - DNA, 394 bp, Homo sapiens
  misc_feature (1)...(394): n = g, a, c or t
ggcaagttctcccaggagaaagccatgttcagttcgagcgccaagatcgtgaagcccaatggcgagaagccggacgagttcgagtccggcatctcccaggctcttctggagctggagatgaactcggacctcaaggctcagctcagggagttgaatattacggcagctaaggaaattgaagttggtggtggtcggaaagctatcataatctttgttcccgttcctcaactgaaatctttccanaaaatccaagtccggctagtacgcnaattggagaaaaagttcagtgggaagcatgtcgtctttatcgctcagaggagaattctgcctaagccaactcgaaaaagccgtacaaaaaataagcnaaagcgtcccaggagccgtactctgacag

SEQ ID NO: 7908 - DNA, 486 bp, Homo sapiens
  misc_feature (1)...(486): n = g, a, c or t
gtctggtatagattcagttactaatgcagtagctaagaaaaaatgtgacttttcagtagcttcagggagagttgngnaagattccaagccatttgcatctggatctggagtagacatgttaactaaagaagtgtcttcctccttcatttctttatcatcactgtaagttttctttgttgttagtacagaataatctgtggttttgagttcagtttcagtaaatgtctgtgaatcaaagattgtttgttctgttgcaggagagttttgaggggattcaaatgacttttcttcttgaatttgttcctctgatgttgtttcactttcaatttcttgtcttacagggttgacttcttgcctagaccataatttggctggctctatantttggggaaagtttgttgaaactgtgccactgacctttacttcctccttctctactggagctttngtaccttccacttctgctgntggtaaaatggtggatct

SEQ ID NO: 7909 - DNA, 550 bp, Homo sapiens; identical to SEQ ID NO: 607
  misc_feature (1)...(550): n = g, a, c or t

SEQ ID NO: 7910 - DNA, 466 bp, Homo sapiens
  misc_feature (1)...(466): n = g, a, c or t
ccaggaactgctttcccataggagggccaagtttgcaaaagcggggctntttncttgggcccctccatntctgggaggacagcttctttnctgcgtgatccctgcccctgccttgatagcagctnctggctggcaggagaccatccttcactggaaacccaaagcgcccataaaagacttcctttttcacattgccaaaacttaattttataattgtctgacttacaccactgggcacatctgctaagcttgtgtgccttctagacatataaaaggctactgtgataccattaaatatcagcagtgtgctttgctgtgctttgagtttataagggtgaaaggtgattgtgcaggaaaatgggacagtatatttgctgtgagacaggcaccaagacttcactcccatactcagttataattcatgacagtactggtgggaagcccttatccctctgtggagttaatg

SEQ ID NO: 7911 - DNA, 308 bp, Homo sapiens
  misc_feature (1)...(308): n = g, a, c or t
aatgccctcngtnacacagaggctgngagatcctgacataaatncttgtttgncggaatctgatgcttccaccagatgtctggatgaaaataactatgacagggaaaggtgttccacttacttcttgaggtacaaaaactgccgganatnntggaattctatcgtgatgcanagaagaaagaacggagtgaagccatttatgcctacggcagcagaaagagatgaaatcttgagagcantgggaaatatgccctattgaatgtttgcattaaaagtgtttatataacttanaaaaaaaaanaaaaaaa

SEQ ID NO: 7912 - DNA, 233 bp, Homo sapiens
  misc_feature (1)...(233): n = g, a, c or t
caagagccagnaanaaaccaccggaaggaaccatctnactgtgtgtaaacatgacttccaagctggccgtggctctcttggcanccttcctgatttctgcagctctgngtgaaggtgcanntttgccaaggnanntgctaaagaacttagatgtcngngcataaagacatactccaaacctttccaccccaaatttatnanagaactgagagtgattganagtggaccacact

SEQ ID NO: 7913 - DNA, 569 bp, Homo sapiens
  misc_feature (1)...(569): n = g, a, c or t
ctgagggctcaggtgagcaactggtcacagtcagcagctctgttgttccagtgcttcccagtgctgtgcaaaagttttctggtacagcttcctccattatcgacgaaggattgggagaagtgggtactgtcaatgaaattgatagaagatccaccattttaccaacagcagaagtggaaggtacgaaagctccagtagagaaggaggaagtaaaggtcagtggcacagtttcaacaaactttccccaaactatagagccagccaaattatggtctaggcaagaagtcaaccctgtaagacaagaaattgaaagtgaaacaacatcagaggaacaaattcaagaagaaaagtcatttgaatcccctcaaaactctcctgcaacagaacaaacaatctttgattcacagacatttactgaaactgaactcaaaaccacagattattctgtactaacaacaaagaaaacttacagtgatgataaagaaatgaangaggaagacacttctttagttaacatgtctactccagatccagatgcaaatggcttggaatcttacacaactctccct

SEQ ID NO: 7914 - DNA, 564 bp, Homo sapiens; identical to SEQ ID NO: 608

SEQ ID NO: 7915 - DNA, 373 bp, Homo sapiens
  misc_feature (1)...(373): n = g, a, c or t
ccaaaagaagtaagacagcttgctgaagatttcctgaaagactatattcatataaacattggtgcacttgaactgagtgcaaaccacaacattcttcagattgtggatgtgtgtcatgacgtanaaaaggatgaaaaatttattcgtctaatggaagagatcatgagtgagaaggagaataaaaccattgtttttgtggaaaccaaaagaagatgtgatgagcttaccanaaaaatgaggagagatgggtggcctgccatgggtatccatggtgacaagagtcaacaagagtgtgactgggttctaaatgaattcaaacatggaaaagctcctattctgattgctacagatgtggcctccagagggctagatg

SEQ ID NO: 7916 - DNA, 516 bp, Homo sapiens
  misc_feature (1)...(397): n = g, a, c or t
ctgcacatggattggttaacataatatatactgctatataatcttttaagggctaatatttgtagataatttaaaagcatgtcaatttcctctaagatttgattatttaacctgcacaaaggccaatcttcagttatcaatgacaagaaaactctagggctgccaaaataacttcattttagaccccagagttagtgttaggctggtaatgtttctaatttgggaataatgagactagaaagctaggagggccccctccaaatttctcccttgtattaggctgaagtagaacataacgtggcttaaagcataaacttaaagcatatgctttgagttttaaaaatgttaacctgtaattaattattagagtattatccatagnctactatgatagtcagttaatattctctaaatcanattatattcatttgaaaatgcatntgcatatttgcaaatgtgttattacacaagatcttacctatgtcaatttaaagaggntaaagatgcaggaagtcc

SEQ ID NO: 7917 - DNA, 499 bp, Homo sapiens
ctagaatgtgatatttgaagcatcacataaaaatgatgggacaataaattttgccataaagtcaaatttagctggaaatcctggatttttttctgttaaatctggcaaccctagtctgctagccaggatccacaagtccttgttccactgtgccttggtttctcctttatttctaagtggaaaaagtattagccaccatcttacctcacagtgatgttgtgaggacatgtggaagcactttaagttttttcatcataacataaattattttcaagtgtaacttattaacctatttattatttatgtatttatttaagcatcaaatatttgtgcaagaatttggaaaaatagaagatgaatcattgattgaatagttataaagatgttatagtaaatttattttattttagatattaaatgatgttttattagataaatttcaatcagggtttttagattaaacaaacaaacaattgggtacccagttaaattttcattt

SEQ ID NO: 7918 - DNA, 555 bp, Homo sapiens
ctgaaggtttttttattctttctttttttaaagtgagcccatgatttggtgtctttcccagattatcccctttgcgacaacacaagcaaaaatatttacaaaggtaaggcatagtcaaactacataaagagaaaaaatcatgaggaaaatacatgaaaaagactaaagacttcgccataacaaggtcttagtgataatagtgtccgtaaagatgtcatcagaattggtaaagtcaagcatgctgcaaatataccctttggattagaaaagagcacaattttctttttttgttttgttctgttttaagaagtggcatactgctctttctccctttggataatttcttttaagcccatcaaaggaaaaaacaaacacaattcaaacaaacactgtcaagtgattcaagatcaaatatttacaataatcaaatggagtatcagatttttttttccaaactgataccacaaatacagagctgaaatctctctttggctcctctatatgcaaaattgaattagtcttcattgaagacaattatatagtcagttccagatg

SEQ ID NO: 7919 - DNA, 545 bp, Homo sapiens
  misc_feature (1)...(545): n = g, a, c or t
ccaaaaaaatcaagatttaatttttttatttgtactgaaaaactaatcataactgttaattctcagccatctttgaagcttgaaagaagagtctttggtattttgtaaacgttagcagactttcctgccagtgtcagaaaatcctatttatgaatcctgtcggtattccttggtatctgaaaaaaataccaaatagtaccatacatgagttatttctaagtttgaaaaataaaaagaaattgcatcacactaattacaaaatacaagttctggaaaaaatatttttcttcattttaaaacttttttttaactaataatggctttgaaagaagaggcttaatttgggggtggtaactaaaatcaaaagaaatgattgacttgagggtctctgtttggtaagaatacatcattagcttaaataagcagcagaaggttagttttaattatgtagcttctgttaatattaagtgttttttgtctgttttacctcaatttgaacagataagtttgcctgcatgctggacatgcctcanaaccatgaatag

SEQ ID NO: 7920 - DNA, 584 bp, Homo sapiens
gagaattcataaaaaaattcattctctgtggtatccaagaatcagtgaagatgccagtgaaacttcaagcaaatctacttcaacacttcatgtattgtgtgggtctgttgtagggttgccagatgcaatacaagattcctggttaaatttgaatttcagtaaacaatgaatagtttttcattgtaccatgaaatatccagaacatacttatatgtaaagtattatttatttgaatctacaaaaaacaacaaataatttttaaatataaggattttcctagatattgcacgggagaatatacaaatagcaaaattgaggccaagggccaagagaatatccgaactttaatttcaggaattgaatgggtttgctagaatgtgatatttgaagcatcacataaaatgatgggacaataaattttgccataaagtcaaatttagctggaaatcctggatttttttctgttaaatctggcaaccctagtctgctagccaggatccacaagtccttgttccactgtgccttggtttctcctttatttctaagtggaaaaagtattagccaccatcttacctcacagtgat

SEQ ID NO: 7921 - DNA, 116 bp, Homo sapiens
ccaacgtggatggagatgcactcacgcatggttgctgcttcgcgactgccgagctgatggcggagacgaagaggagaggttgttgcttcttacagcgcgactcttaggcggtcgat

SEQ ID NO: 7922 - DNA, 260 bp, Homo sapiens
  misc_feature (1)...(260): n = g, a, c or t
attgaatgcagactctaaggctccatggcancagttcatattatgcaacancatgaatggagggtcatagcgtcttcatgtcacttgggtagtaagattggcacagtttanaanagcaagaaaatgctgaaatctcttcatcagtaggctactacgtactctgtgacgctactgccttttcagaacacttattaaaaatttgactagagcagcagctctggactagactgtttcagaatgtttgtgcgcgtgtgtgtgtg

SEQ ID NO: 7923 - DNA, 434 bp, Homo sapiens
cctggctcaacaaaagggctggggattggccctgaaaggagagagctgactgtcctggctgatggacaggagatcctcttagcactaccctaaggcaggcagttgggcattggtgtagacaacaggaaagtccaggctatagccgtactcaaaaacctttctgttccctttctgccagccctagggattgagtccacattcagcacaggactctctgggtacagctctctttaggaagacacaaattgcatggtgaagtcagttatatcctggccgcctttggtccctcccaggaagacgggcatgttttctgcttgagaggtgctgatgtaccagttggggaactgggcagactcaaattccagcttgttattgatttctatcttgttgaagacaaatcgcttttccatcttcttctttgggtaatttttggg

SEQ ID NO: 7924 - DNA, 116 bp, Homo sapiens
  misc_feature (1)...(116): n = g, a, c or t
cctactatgggtgttaaatnttttactctctctacaaggttttttcctantgtccaaaganctgttcctctttggactaacagttaaattnacaaggngatttanagggttctgtg

SEQ ID NO: 7925 - DNA, 234 bp, Homo sapiens
cctacccattctcctagtttcttgttgtcatcaaccttaattaggttgatttggtgttcagcacaaagggcctccaccaacttgacatacataggctcatcacagttggatgcaagcacacaaagatgggcttggcgcttgtctaaggctttggcagcttcgcgaattccacgtgctaggccatcgtggatgagggcagtcttcagaacctcttgtaaagcagtattaacgtcc

SEQ ID NO: 7926 - DNA, 564 bp, Homo sapiens
  misc_feature (1)...(564): n = g, a, c or t
ctgcacatggattggttaacataatatatactgctatataatcttttaagggctaatatttgtagataatttaaaagcatgtcaatttcctctaagatttgattatttaacctgcacaaaggccaatcttcagttatcaatgacaagaaaactctagggctgccaaaataacttcattttagaccccagagttagngttaggctggtaatgtttctaatttgggaataatgagactagaaagctaggagggccccctccaaatttctcccttgtattaggctgaagtagaacataacgtggcttaaagcataaacttaaagcatatgctttgagttttaaaaatgttaacctgtaattaattattagagtattatccatagtctactatgatagtcagttaatattctctaaatcanattatattcatttgaaaatgcatctgcatatttgcaaatgtgttattacacaagatcttacctatgtcaatttaaagaggttaaagatgcaggaagcccccactaaaatgtaaacacatttgtacgggtttcanaatgtttggactc

SEQ ID NO: 7927 - DNA, 604 bp, Homo sapiens
ccatctctaattttattaagatctttgattatgttatccaggtgacaaaattctccaatcacgactcacctccagaagcttaaaacataattgtttcatatactgttaaacacttaagagatttgtaattttccagactttcaatgtctttacttgaatgtctgccttgcttagttactgtaaggttttgatttatttctccagtgtcattgtttttcagctttattgtttgatatagtaagatttcacatgcctagcttacgatgctgtttaaacttacaagctaactttgcctttttactttttaataggtccctgattaccctccaaactatattttattccttaataacttaccagaagagactaatgagatgatgttatccatgctgtttaatcagttccctggcttcaaggaagtacgtctggtaccagggaggcatgacattgcttttgttgaatttgaaaatgatgggcaggctggagctgccagggatgctttacagggatttaagatcacaccgtcccatgctatgaagatcacctatgccaagaaataacatttgggatagtcgtctttaaaagacttggtgttatttacagt

SEQ ID NO: 7928 - DNA, 541 bp, Homo sapiens
ccatatctcaagcaggtctgtccaatggcttggaacatagacttttgcagtgaaactttaaaaacattacttgaattaggattacacaaaaaaaactaaattctaagtgagcacaactatcgctgagaccctgaaatttcaggaaataaacatggttcaaaactcaaactgttcatcaaaataattacgcaggtcagccaccactgcagaaccatcactgctcagagaaattgagtcagcaatgactgatctcatcatctcttcattagcacataagcggttcaacttgggatacgcaaggagtctctgcagaggtacgaaaaatttatctccaacacagaagggtgtgggagagttctctatcttgaccttctcaatctctgtgaagactggtccaaagcatgggacaggggcctttgagccaccaatgtctttgggcttatcgccccgttccccagcctgttctttccgccttggcaggtggctcactcttaagctttccacttgttgggacacctcattaaccaacacaagtttaaag

SEQ ID NO: 7929 - DNA, 600 bp, Homo sapiens
gttggcagagaaatgggggtggatgttcacttccctaaagcagaggccagcatccaagctggtgctggagacggcgagtgggaagagtctgaagtcaaactgaaaaagtccaagatcaaaatgcccaagtttaatttttccaaacctaaagggaaaggtggtgtcactggctcaccagaagcatcaatttctgggtccaaaggtgacctgaaaagttcaaaggccagcctgggctctctggaaggagaggcagaggccgaagcctcttcaccgaaaggcaaattctccttatttaaaagtaagaagccacggcaccgctcaaattcattcagtgatgaaagagagttctctggaccttccaccccgacggggacgctggagtttgaaggtggggaagtgtctctggaaggtgggaaagttaaagggaaacacgggaagctgaaattcggtacctttggtggattggggtcaaagagcaaaggccattatgaggtgactgggagcgatgatgagacaggcaagttacaggggagtggggtgtccctggcctctaagaagtcccgactgtcctcctcttctagcaatgacagtgggaataag

SEQ ID NO: 7930 - DNA, 416 bp, Homo sapiens
  misc_feature (1)...(416): n = g, a, c or t
cctactatgggtgttaaattttttactctctctacaaggttttttcctagtgtccaaagagctgttcctctttggactaacagttaaatttacaaggggatttagagggttctgtgggcaaatttaaagttgaactaagattctatcttggacaaccagctatcaccaggctcggtaggtttgtcgcctctacctataaatcttcccactattttgctacatagacgggtgtgctcttttagctgttcttaggtagctcgtctggtttcgggggtcttagctttggctctccttgcaaagttatttctagttaattcattatgcagaaggtataggggttagtccttgctatattatgcttggttataatttttcatctttcccttgcggtactatatctattgcgccangtttca

SEQ ID NO: 7931 - DNA, 265 bp, Homo sapiens
ctgaagaaggaactgaatgaactggtcagtgctattgaagaacattttttccagccacagaagtacaatctgcagccaaaagcagactaaaatagtccagccttgggtatacttgcatttacctacaattaagctgggtttaacttgttaagcaatatttttaagggccaaatgattcaaaacatcacaggtatttatgtgttttacaaagacctacattcctcattgtttcatgtttgacctttaaggtgaaaaaagaaaatgg

SEQ ID NO: 7932 - DNA, 523 bp, Homo sapiens
ctgcagaggctaaacaaaaatgagatgataacatgtgacctttcttaggcagatggctggttggggaaagtagatgaatgaaaagaggaaaagatctccagaagagcgggaaggtataaagtttctctaggacagtttcccaaatcgtgcttcattggacattgacacaggagaaggctgtgggggaaaagaaaattcatgatcagataggtatggcaaatgcctcattctatggtttcctctttgagattctcaatgcaacattagactattaaaggctctgaaaaatcctacaagaaaacacctgtataaccttgtgtgaccaagtaataccaaaatttatttgccctctgagtctgctattttgccctcttcctccagcccttgacactgtttctcaggaagaaaacatccttcatgctggctactacctcatatgctctataacattgtggtgttcacagtttgaatttttcaaaatccagggtagaatttggcccccaaacctaaagctagtggacaa

SEQ ID NO: 7933 - DNA, 565 bp, Homo sapiens
  misc_feature (1)...(565): n = g, a, c or t
ctgtcattgctggtggagttattggctttctctttgcaatttttcttatcctgctgttggtgtatcgcatgagaaagaaggatgaaggaagctatgaccttggagaacgcaaaccatccagtgctgcttatcagaaggcacctactaaggagttttatgcgtaaaactccaacttagtgtctctatttatgagatcactgaacttttcaaaataaagcttttgcatagaataatgaagatctttgttttttgttttcattaaagagccattctggcactttaatgataaaatcccattgtatttaaaacatttcatgtatttctttagaacaacataaaattaaaatttaacatctgcagtgttctgtgaatagcagtggcaaaatattatgttatgaaaaccctcgatgttcatggaattggtttaaacctttatgcgcaaatacaaaatgattgtctttttcctatgactcaaagatgaaagctgtttcatttgtgtcagcatgtctcanattgaccttaccaagttggtcttactttgntaatttatctgntgtccccttcc

SEQ ID NO: 7934 - DNA, 542 bp, Homo sapiens
ccagaaccctggtggcaggagcatctgatatccctgtctttttccaaaaacctaactgtgtacaaatatgcacacaaacttatcttatatgtgtccatttctcttaatgatatttaccagcttaagaaattaacaaacattttatgtgattctcagatttttcaagtcaaggacaaattcagttttcacattatttttcaagtgtatcttatcttcggaggcattaacagggcagtaacattattaccatcactgtatctgtcattctgttttgggggattaccattgttgccaataaaacttacatttcattcccatccttagcaaattaatttagttacatgcagggtccaaacaataattatgagtttagagagagcttcagaaagccagcgatcatctgtaaggtgtgggctgaaaccaacattggaggaaggtacggccttgattattcagcaactgaaatgacttcctttaattagctcttgaggacccaaagtgggccatctgggttaatttcagtcagctcaaatcaagcactc

SEQ ID NO: 7935 - DNA, 564 bp, Homo sapiens; identical to SEQ ID NO: 609

SEQ ID NO: 7936 - DNA, 527 bp, Homo sapiens
  misc_feature (1)...(527): n = g, a, c or t
ctgagtatagttcaacagttttgctgacagatgggaacaatcttttttttttttttccaactgccatctatacaattttnttacagatgtcaaaagcagtntagtttatataagcattctgttacctgtgatattttttanactgaactgctccattcctagtcttaattaccatattcagggtncnaactggagggcttgngtgttancttctgaattggcaattgnaggcggtagtggtcgtncctgtgtgtatcaaaagggataggtatnttgcctcctttctctcaggcagngcaaatcaccctgtggaaaaccnatggacaggaaggagtgttacacactgnttaccctgatttattcagnggttttgttttcattctggaaccatactatcaaatggngacanactgttccgttccacccccgtgaagtaatcatgcaccgngtgaatagtatcaagcaggattgntttcattgtntggagcatgaccagcgtgtgactcattctgacatttcanatccta

SEQ ID NO: 7937 - DNA, 474 bp, Homo sapiens
ccttatttctcttgtcctttcgtacagggaggaatttgaagtagatagaaaccgacctggattactccggtctgaactcagatcacgtaggactttaatcgttgaacaaacgaacctttaatagcggctgcaccattgggatgtcctgatccaacatcgaggtcgtaaaccctattgttgatatggactctagaataggattgcgctgttatccctagggtaacttgttccgttggtcaagttattggatcaattgagtatagtagttcgctttgactggtgaagtcttagcatgtactgctcggaggttgggttctgctccgaggtcgccccaaccgaaatttttaatgcaggtttggtagtttaggacctgtgggtttgttaggtactgtttgcattaataaattaaagctccatagggtcttctcgtcttgctgtgttatgcccgcctcttcacgggcaggtcaatttcac

SEQ ID NO: 7938 - DNA, 355 bp, Homo sapiens
ctggatcacgaggtcaagagttcaagaccagtttggtcaagatggtgagacccccgtctctactaaaaatacaaaaattagccaggcatgacagcggatgcctgtaatcccagctattcgggaggctgaggcagagaatcgcttgaacttgggagggggaggttgcagtgagctgagatcaagccgctacactccaccttgggcaacagggtgagactctgactccatctcaaaaaaaaaaaaaaaaaaaatccaagagtagggctgagcatggtggctcacgcctgtaatcccagcactttgggaggacgaggagggtggatcacctgaagtcaggagtttaagaccagcctgg

SEQ ID NO: 7939 - DNA, 423 bp, Homo sapiens
  misc_feature (1)...(423): n = g, a, c or t
gtcggcatcatactaaaagcaatgtttaaatcaaactaaagattaaaaattaaaattcgtttttgcaataatgacaaatgccctgcacctacccacatgcactcgtgtgagacaaggcccataggtatggccccccccttccccctcccagtactagttaattttgagtaattgtattgtcagaaaagtgattagtactatttttttttgttgtttcaaaaaaaaaatttttgtgtgtgtgtgtttttttttttttttttttngggggttaaaagcaaggcatgcttgtggatgactntgtaacanactaattggaattgttgaagctgctccctggttccactntgganagtaatctgggacatcttagngttttgttttgtttttttccctcctcttttttttgggggggagtgtgtgtgg

SEQ ID NO: 7940 - DNA, 138 bp, Homo sapiens
  misc_feature (1)...(138): n = g, a, c or t
aaagctgtctgagaccctcctcccctcctccccagcatggagagaataattgccatttcaccctacaaatccgaaagagtctcccccttccgtgggtttaagcanggacacaagccaagcaagcctcagatacccagg

SEQ ID NO: 7941 - DNA, 550 bp, Homo sapiens; identical to SEQ ID NO: 610

SEQ ID NO: 7942 - DNA, 559 bp, Homo sapiens
  misc_feature (1)...(559): n = g, a, c or t
ctgaactctctgaacttgtcttctccttttgatttgaattttccattgccaggagagaagggccctgcatgccttgtgaaggtttatgaanattgggattgtttcaaagtaaatgacattcttgagctatatggcatactgtctgtggatcctgtgctgagtatactgaataatgatgaaagggatgcctctgcactgctggatccgatggagtgcacagacacagcagaggagcagagagtacacagtcctcctgcttcattagtgccgagaattcatgtgatcttagcccanaagttgcaacacatcaacccattattgcctgcctgccttaacaaagaggagagcaaaacctgtaagtatatacaagaagagatgtccttccactaggaaaatttacagttaacttgagtggttgcccacggaatagtaccttcacagaacacttgtatcgaattattcaacatcttgttccagcatcttttcgtctgcngatgactatagagaacatgaaccatttgaaattcattccccacaaagactacacanccaatngctt

SEQ ID NO: 7943 - DNA, 260 bp, Homo sapiens
cctgaagtgaggaaaacctatttaggactgacatctaactagagaaagtcagggaatgaggcaggagaagaggcaaagtcctcatgaaccacaaagatagagtggaaaatcctaagtaggaaaaaatacatggaaaagggcaaatgagcaacagcagtgaatgagttgagattgaaaaggaaagagttcaaggaaggagaggcaatggggcaagacaaaataaatctgaggaaacagagcaaataaaaagtatggaggga

SEQ ID NO: 7944 - DNA, 600 bp, Homo sapiens
ccagtggaatgatgttccctgcaattaccatctcacctatacgtgcaagaaaggaacagttgcttgcggccagccccctgttgtagaaaatgccaagacctttggaaagatgaaacctcgttatgaaatcaactccctgattagataccactgcaaagatggtttcattcaacgtcaccttccaactatccggtgcttaggaaatggaagatgggctatacctaaaattacctgcatgaaccgtaagtggtcctttagaaagaatggactaccgtgctataacaactactagacaccttcattttacggctgtggtatcggcagtttagggtatggagcaagtaatattgtgtgttttctttttttctttctttccttccatgtagcatctgcataccaaaggacttattctatgaaatactttaaaaattcctcatcagcaaaggacaattcaataaatacatccaaacatgatcatcgttggagccggaggtggcaggagtcgaggcgctgatccctaaaatggcgaacatgtgttttcatcatttcagccaaagtcctaacttcctgtgcctttcctatcacctcgagaagtaatta

SEQ ID NO: 7945 - DNA, 150 bp, Homo sapiens
ctgcccaatgcaggcagaaggcaggaaggctatagtgttacagccctggcttgggaaatcctgatgtctcggcccccagaagtgtcactgcttttcactcctgcagtccagcaaatgggagcatgtcaccaccacagtttggtgagttgg

SEQ ID NO: 7946 - DNA, 519 bp, Homo sapiens
ccaacccaaagaacatctttcccatagcatctttgtcccttgccccacaaaaattcttctttctctttcgctgcagagtgtagatcccaaaaattacccaaagaagaagatggaaaagcgatttgtcttcaacaagatagaaatcaataacaagctggaatttgagtctgcccagttccccaactggtacatcagcacctctcaagcagaaaacatgcccgtcttcctgggaaggaccaaaggcggccaggatataactgacttcaccatgcaatttgtgtcttcctaaagagagctgtacccagagagtcctgtgctgaatgtggactcaatccctagggctggcagaaagggaacagaaaggtttttgagtacggctatagcctggactttcctgttgtctacaccaatgcccaactgcctgccttagggtagtgctaagaggatctcctgtccatcagccaggacagtcagctctctcctttcagggccaatccccagcccttttgttgagccagg

SEQ ID NO: 7947 - DNA, 383 bp, Homo sapiens
ccatggacaagctgaggaagatgctggttccctgcccacagaccttccaggagaatgacctgagcaccttctttcccttcatctttgaagaagaacctatcttctttgacacatgggataacgaggcttatgtgcacgatgcacctgtacgatcactgaactgcacgctccgggactcacagcaaaaaagcttggtgatgtctggtccatatgaactgaaagctctccacctccagggacaggatatggagcaacaagtggtgttctccatgtcctttgtacaaggagaagaaagtaatgacaaaatacctgtggccttgggcctcaaggaaaagaatctgtacctgtcctgcgtgttgaaagatgataagcccactctacag

SEQ ID NO: 7948 - DNA, 578 bp, Homo sapiens
cctcaatgacaagatgtttgagcatgacttccgttggactgatggcagcacactggtaagatgcccttgaaaatgatgtcaagttctaccttctggaaatttggtactgtgcactgattgtgcattacagagggtgcattagactggaggcaagttaaatgacttgctcaaggtcactcagtgaaacagagaagggttagaagagttccaagctacctgatccaacatccagtcctctcttcaatagttgtggttctcttcaaaagaggagtgtaccagatttctatcaaaccagaaaaccagacaattagtagaattgccttgggtctgtctttcagatggttatctttgctttttctagcttcagagcaaaaagagaagaataaaatgtagcagaaaaagtcattttaaaaaaatacctttccgtcttaaataattcactggaaatccgctataaggcatgactcatttccaagcaaaaatatccatttatttttatcttaaagaagactgttgatatgatcttgtgaatttctgccaactaattacatatttcaacttgttttctattttttgaa

SEQ ID NO: 7949 - DNA, 611 bp, Homo sapiens
  misc_feature (1)...(611): n = g, a, c or t
ctgcatcccatgtgcgtcgatgggcaaagtatttgtagcactgcccttggaatttgtgccagccatagtcacatgtctcggtatcttgctcacaaagtgcaccaacataacttggaaggcagaggcacctgaatgtgttaaaaccatcaacacaagtggctccattacgacagggattagagtgacattcatcaaaatcaagttcacactggtctccgctgtatcctggcacacaggtgcatacgtaggaagtttcagtaggataacaggtgcctccgttaaggcacgggttcattttgcagcgatcaggtcctggtaaatagattgccgtgccttccactgactcttcattaatgccaatcaggaaatctgtttcattagaagtctccagaagggaaaatggtggtgttgcaacctcagtattaaattccacagggtttactgttgcctgatcattggaatcaagaattctcgctgccacttgctgttctgatgctgctatcgtggaatcctgccctctgattaaagctgcttgagtttcagggtttatttctggagaanaagaaagcgtgggcctctcagaagtctgtggacttagccaaggcaccaca

SEQ ID NO: 7950 - DNA, 553 bp, Homo sapiens
  misc_feature (1)...(553): n = g, a, c or t
ccttctgctagtcctggtaagaaaaatcctatttcagaccattaaagctaagttattttgacataatcatgattcttttcaataaacattaaacatgacattgtggaatatcaaatctaaccaaaaatgcctgtacttaacaaaacgaagatttttgtccgaattatctctggctacactcaacacttccagcaggcagttgctcaactttccaatgtctgcataaaatacagttctgaagccaatttttttagattaaaataaaaagccactctttagcataaaccttcattcaacgaaattgggtaaataagatttaattaagaaaattaggagccgcgttcattgcaaaccgtagtttactttancatttcacttgtaattaagttaggggcttagggatgcattgaaaacaccaaaggataagtatctcaaagttctaaaaatgtctcaatactaaaatgatgttctggggtgattttgcaaggaccanaagacatcatacattgcgaacccagtgagggtggcatcgcggacgaacagaanatgcttt

SEQ ID NO: 7951 - DNA, 499 bp, Homo sapiens
ctgtttaaccagaaccaaggtgttcaccccccacagaatgtacatgaaacactagaggactgcatgtttttccctgagagaagcgtaagacaaacagaagtcaaaaagtagtcactgggagcgccatccttctaagcaaatcctccctttcccttttggaggatttgcccgaactacgtagccagtcagcacttagaccacctgcctcctcctccccctataaacccaccactcccctcctcctttcccaaaccacttggggtgtcctaagccctcactgccccaagcccaaaatatcaactaagatccttgtctgtatttccacagtcatacctaatgaattgggaagtggggcccctaaaaaccaattcacatctatgcacttgtttccactggatttggcagacaggcttttttagttaccgtaaccagatcttaagattaattaaaaactacataaagtgcttttaggtccttagagatacatgatataaataag

SEQ ID NO: 7952 - DNA, 503 bp, Homo sapiens
  misc_feature (1)...(503): n = g, a, c or t
ttgcanagctgtgggctgagcactcaggcaatcacactctcagaaactgcggcggctctggactgcagcctcccaaggctccatgccagacaaagcatgcgtgtcacacttgctacaatagcctggatggtttcttttgtctccaattattcacacacagcaaatattttgccagatatcgaaaatgaagatttnatcaaagactgcgttcgaatccataacaagttccgatcagaggtgaaaccaacagccagtgatatgctatacatgacttgggacccagcactagcccaaattgcaaaagcatgggccancaattgccagttttcacataatacacggntgaagccaccccacaagctgcacccaaacttcacttcactgggagagaacatctggactgggtctgtgcccattttttctgtgtcttccgccatcacaaactggtatgacgaaatccaggactatgacttcaagactcggatatgcaaaaaagtctgtgg

SEQ ID NO: 7953 - DNA, 597 bp, Homo sapiens
tgcagattttggccttgctagagtaattgaagataatgagtacacagcaagggaaggtgctaagttccctattaagtggacggctccagaagcaatcaactttggatgtttcactattaagtctgatgtgtggtcctttggaatcctcctatacgaaattgtcacctatgggaaaattccctacccagggagaactaatgccgacgtgatgaccgccctgtcccagggctacaggatgccccgtgtggagaactgcccagatgagctctatgacattatgaaaatgtgctggaaagaaaaggcagaagagagaccaacgtttgactacttacagagcgtcctggatgatttctacacagccacggaagggcaataccagcagcagccttagagcacagggagacccgtccatttggcaggggtggctgcctcatttagagaggaaaagtaaccatcactggttgcacttatgatttcatgtgcggggatcatctgccgtgcctggatcctgaaatagaggctaaattactcaggaagaacaccctctaaatgggaaagtattctgtactcttagatggattctccactcagttgcaa

SEQ ID NO: 7954 - DNA, 519 bp, Homo sapiens
cctggctcaacaaaagggctggggattggccctgaaaggagagagctgactgtcctggctgatggacaggagatcctcttagcactaccctaaggcaggcagttgggcattggtgtagacaacaggaaagtccaggctatagccgtactcaaaaacctttctgttccctttctgccagccctagggattgagtccacattcagcacaggactctctgggtacagctctctttaggaagacacaaattgcatggtgaagtcagttatatcctggccgcctttggtccctcccaggaagacgggcatgttttctgcttgagaggtgctgatgtaccagttggggaactgggcagactcaaattccagcttgttattgatttctatcttgttgaagacaaatcgcttttccatcttcttctttgggtaatttttgggatctacactctgcagcgaaagagaaagaagaatttttgtggggcaagggacaaagatgctatgggaaagatgttctttgggttgg

SEQ ID NO: 7955 - DNA, 599 bp, Homo sapiens
ctggacaagaaagagcaaatgccaaaatagaacaagaatggttttgttgaggtgtttacagaataagcaaagcctgggttttaattggaatttaattcagagttctgtctgagtccatcaaatgatccctgttgaagattaaaagtttactgccttaggcagtaagtcttaaattatttttgatagtatttatttaaaaattttaaaaactatgtacctctcacattttaagttgccaacaaaattttttttcatcataaagttatacaactatagaggatgtaatttttgacctattttaaatattgtcattctaaaataagcatgtaatatcactttcaggatatattcagtggaatctaaatatcatagtggtttgacctcttacatcattcttttaaaagtagtcttttattaagagtcaaaaattttatatttttgttttcgttggactaattctaaaatttaagttcctcttacggaatgttatcaaaaattatatagttatatgcttagaagtcttctattgattaagccatcaaacttaagtacatcaaaatttgtactttaaagtttaaattcttttttccttgtgaaca

SEQ ID NO: 7956 - DNA, 392 bp, Homo sapiens; identical to SEQ ID NO: 7567

SEQ ID NO: 7957 - DNA, 350 bp, Homo sapiens
  misc_feature (1)...(350): n = g, a, c or t
ttattttcactccaaaggcncatctactgttcctactattattgctacagatattccaaaaagtgagtaggtggaaagaagggattaaanaataccaccacaggaaaaaaatatttaacttatgacctanataattttagtcattnaatatnttaaaatatatnttatgacttaaaagagaaagnattctatttaccatatatacaaanaaaataccgtatttggaatccaatagacttggttccanaatacataaanaactgctncaactgatgataaataaataacctgaccttaaaaatggnacaaaacttttaaagagatgntcntaaaagaagatatacaaatgg

SEQ ID NO: 7958 - DNA, 487 bp, Homo sapiens
  misc_feature (1)...(487): n = g, a, c or t
cctttcttacaaccagcangactcccctcctttccatgagtacctaccccagtgttcctcctgagatggcctatggttggatggttgagcacaaacacaggcaccgtcacaaacacagagaacaccgttcttctgaacaaccccaggtttctatggacactggctcttcccgatctgtcctggaatctttgaagcgctatagatttggaaaggatgctgttggagagcgatataagcataaggaaaagcaccgttgtcacatgtcctgccctcatctctctccttcaaaaagcttaataaacagagaggaacagtgggtccaccgagagccttcagaatctagtccattggccttgggattgcagacacctttacagattgactgttcagaaagttctccaagcttatcccttggaggattcactcccaactctgagccagccagcagtgatgaacatacaaaccttttcacaagtgcaataggcag

SEQ ID NO: 7959 - DNA, 608 bp, Homo sapiens
  misc_feature (1)...(608): n = g, a, c or t
ccatgggaatctaattaatttcataatgatgttggttgaacatgataccaaaaaatgcaggtattttcaagaacaataagatagataacagcattaaagcataatcctttaagaattcatgagaaaaaaaaggatgataaaacttaagcttctttttcagatgtttaaaaatttctataaaattctttgtcccaagattaatcatataaccatggtacataaaatatgctaactacattgcctggtgtcaaggtgggaaaatcctcttttataacataaaatcctcttctaatccatgttgacccaagtcctggctgtctgagggcagattcctgtcaagagacctaaggttgtcatggaaagcatcactttcgtctactagttggtaatcctgttccatttccgttaggaagccactcccagatcctgatccagagccggagccggagccgaagcctgatccagagtagtcctcagaaagtgggaagatacgattcaagtcctggattcccgtctttggaaaaaggtcagtcctcanacgggggatcttgttggattcacctggaagtagttcgaacattggtcctttttcttcaaggcagtttgca

SEQ ID NO: 7960 - DNA, 606 bp, Homo sapiens
ccttatttgtagatttcattttggtttattatggtttctaattattcaaagtaataacaaagcatatacaaagagatgccacatgtcctgtactttttgcttggttttgaatacttaggaattcctcaaattactttttcatgaaaacatgactgatattactaatgggaaaaaaatctctgaaattaacaaaagaaaacacgcctacacatatatgcactaactaaagatatattctgagacctattctattactgtggtatgagggagagagaatttaattttccctttaaagaaggactggggatggcacagggagcgacaggaccagtcctgccagtgagcagcaatgtgtctgtgggtggctgtgcaagacggaaggcgaggctctcaagtaaggcacctggaaagacactcagtgtgaactactggcccaggaatcactcatggcaaaacgtaccaaggtcaccaggagaaaacagggttagaagcagcttctcataagaggctgcctgataagcaatgaaagtgatgatttgttttgggatctataggtttcagtactttgaaataacagatagtaaagccttcttcttttacacacct

SEQ ID NO: 7961 - DNA, 470 bp, Homo sapiens
  misc_feature (1)...(470): n = g, a, c or t
ttttttttttttttttttanaaatctatttatttatcaaaacagtattggcacagtaattctcatattatcatcaaataataaaattgctactttctgtactcaattctttanaatcctanaaattgcaaatgcattcaatttaacaatattgtaaataacaatacaaaanaaagaactctgcatatttatggaaacattgttgatggtncagttntactgaaactcatacacatttcactatttaatttacatatggtcttgttgaaaaaaaccagtatgttttactttttcaatttccttatgctaaaatacatgtaattctaaaggatatctcttaggtgttataaaaaccaaggaaggtccaccaccaagtcaaagttagagtcaaagatacttcaaagattccatgaaatgatctgaaaacaaatttaaccaaaaaatgngtactgtattggggcacatccatgg

SEQ ID NO: 7962 - DNA, 543 bp, Homo sapiens
cctttcttaaacaacttactctgcattaaaaagtcatcaataagaactgtaattcagtgtttttaaaaatgaaatgtttaacttcaaattgtttgtttaaaataaactgctattgtgccaaataatgaaactactattttattcattacaaacatcatataatcattctctataatcactataaaaatttaaatgcttcctttctcctgtatatgaagatggtagttctaaagcaacactctaaaagtgttaaaaagcccattcgtaacacacaccccacctcagtttttgaaagtcagtgcattcagtggttataaataggcatgatgttcttccacagctaagagttctgagtgtcaatcagttgtgtttttttctcccaagggaagacgttcccataactggagcaactgttcaccaacctgaggttctagttcctagataaatcagaagtcaaaataaacataaaaagaactggagtgaaaatttttaatgaccaaaacctacactgataaaaatgtaagaaaatcactttaaatttca

SEQ ID NO: 7963 - DNA, 560 bp, Homo sapiens
  misc_feature (1)...(560): n = g, a, c or t
ctgaaaaccatgctgttcaagggtcaactgtgtgtggtatcggtgagactgaatgattatcgttggtgttcttaaattattttcaggtcctctagaaaataagataattatagcaaaaaataaaattgttttgaaattttgataaatatataaatgtatagaacctatttttttcaatgaaagaaaatgggaaacattttttaacattgctagattggcagtgctttcttttattatttcaagttatggaaatttgcacagttgaaaactggggataaattctacaaaagtgcaagaaaacaattcaaattagccagagccctgctaaaacttttaatgtaaaatttatttatttgcactgagctgttttaccttctttaaggccattgggacctctcaatgatgcatatgtttcatacatcttgtattttccaggtagaagtcanacttggttaataccaataaatacttctgtaatcctattggctcanttacctttataatgaagtatattctgtgtaaggtaattcttccantgatggtctgagtagtanagtctt

SEQ ID NO: 7964 - DNA, 598 bp, Homo sapiens
  misc_feature (1)...(598): n = g, a, c or t
ccttgtgggtaatggtgaaaattctggattttattctgagagcaacaggattccgctgaagaatttttaaccagagaggtaatgtgatctaatttgtttgaaaaagaacaggtctgttgctgaatgaaatagattagagggaaaagtgcagatatcaagtaggcaaataaatgtttggagctcagacctagagaggaagaggatcagggatcagcagttctgaaaagatctctaacttaccagcagactgtgatcgccttgtgggaagagacttgcgtttctgaattccctgttgtgtgtttgttttgagagaaaacagagcatatttgtatgctggcagaagtgacagaagtgatagaaaattctagaaagtaaagatgcaggaattaagagtgagataattaaagggtcaacttccttgagaaggtgtgcacatgtagagagattcattttgaaaggagagaggatacttcctctacaataaagagaggaaagggcaagctggaacagactctggcaggcgtgtggcatctgtggttggggtaggaaatgctcatttgctaatctgtactttctcagtgaagtcgagcggnaagga

SEQ ID NO: 7965 - DNA, 597 bp, Homo sapiens
gtcgaggcaggtgtggtgccttggctaagtccacagacttctgagaggcccacgctttcttcttctccagaaataaaccctgaaactcaagcagctttaatcagagggcaggattccacgatagcagcatcagaacagcaagtggcagcgagaattcttgattccaatgatcaggcaacagtaaaccctgtggaatttaatactgaggttgcaacaccaccattttcccttctggagacttctaatgaaacagatttcctgattggcattaatgaagagtcagtggaaggcacggcaatctatttaccaggacctgatcgctgcaaaatgaacccgtgccttaacggaggcacctgttatcctactgaaacttcctacgtatgcacctgtgtgccaggatacagcggagaccagtgtgaacttgattttgatgaatgtcactctaatccctgtcgtaatggagccacttgtgttgatggttttaacacattcaggtgcctctgccttccaagttatgttggtgcactttgtgagcaagataccgagacatgtgactatggctggcacaaattccaagggcagtgctacaaatacttt

SEQ ID NO: 7966 - DNA, 538 bp, Homo sapiens
ctgcaagcagccgaggcagatggagcccaagccctgttgcttgtggtcttggcttactgagcctgaatccacgaccggatcattagaaaagggacggtgtgtgtgcctacctttgaagccagtaggccaaaagaagggtgagcaggacagcgccataacacctagagttactgtgtttggttcacacttctggtttcctgcagaattgctagaatttttaaaaaaaggaagcagcaagttgagagcaactaaagtaaaaagagaaaagtgatacaaagggaaaggtttatttttggagctcttagattctgaaactccttctgactcttttatccttttacctctccctttctcctcactgggctctttgtcctcatggggactgtgcatctctggtctcactctagctctgggtcccttaggctcttctggttttctggctcctggagtgagccctttcaatgaggccctccctcaatttcccatccctcttgttcttctgccatccagactcatcacagcccaaatctgagaccag

SEQ ID NO: 7967 - DNA, 158 bp, Homo sapiens
cacgagtctgactggcctttgggtggcctttgtggacggctcgtagctggaaagtgttgatctgggttttctggcattcttttaagttaaaaagttgacatcgggacaggggtttgatcttttgttgtacctgatgacagtgcagagattctccacag

SEQ ID NO: 7968 - DNA, 474 bp, Homo sapiens
ttttgctcttggtttgcattccagtctcttctcgaagacaaaggtctggcagaggtgtctaaggttgcagagcaagtactgaatgccgtaaataaggggctctacagagaggccacagagctgtgggggaaagcagaaatgatcattgaacagaacacagatggggtgaacttctataacatcttaactaaaagcactcccacgtctacaatggagtcgagtctagaattcacacagagccacctagtttgtctttgtcagcgccacgtgagacacctacaacgagatgccttaagccagctcatgaatggccccatcagaaagaagctcaaaattattcctgaggatcaatcctggggaggccaggctaccaacgtctttgtgaacatggaggaggacttcatgaagccagtcattagcattgtggacgagttgctggaggcagggatcaacgtgacggtgtataatggacag

SEQ ID NO: 7969 - DNA, 417 bp, Homo sapiens
ctgcagtctcccagcctccactttcagagtgaaattcaaggcagcacggacatgtgcccatcaggcacagaagaaaacacgacgtcgtccattttggaagagacgaaagaaaggaaaataaactctttgtatgatatttattaggaggaaagaggactgaaaatgttcttgtgtagaaacagaaggacagcatttctgttagtcatttcctggaaaagtaatattttaaggggaaattatggaaacaatctaattgttcaattgctgtgctagtggtagggtttattttctgggaggtctctcctttgtgtgtctgtatgtttgtgtacacacacgtgcccatctgctgtcccagaggggaggggttgtgtgtgcgagtgtatggagttagtgtggaacttaagagctggaagacag

SEQ ID NO: 7970 - DNA, 449 bp, Homo sapiens
  misc_feature (1)...(449): n = g, a, c or t
ctggagagtgtanatcccaaaaattacccaaagaagaagatggaaaagcgatttgtcttcaacaagatagaaatcaataacaagctggaatttgagtctgcccagttccccaactggtacatcagcacctctcaagcagaaaacatgcccgtcttcctgggagggaccaaaggcggccaggatataactgacttcaccatgcaatttgtgtcttcctaaagagagctgtacccagagagtcctgtgctgaatgtggactcaatccctagggctggcagaaagggaacagaaaggtttttgagtacggctatagcctggactttcctgttgtctacaccaatgcccaactgcctgccttagggtagtgctaagaggatctcctgtccatcagccaggacagtcagctctctcctttcagggccaatccccagcccttttgttgagccagg

SEQ ID NO: 7971 - DNA, 383 bp, Homo sapiens; identical to SEQ ID NO: 7947

SEQ ID NO: 7972 - DNA, 572 bp, Homo sapiens
  misc_feature (1)...(572): n = g, a, c or t
gaaaaagctgatgctaataaccagacaacagaacctcagcttaagaaaggcagccaagtggaggcactcttcagttatgaggctacccaaccagaggacctggagtttcaggaaggggatataatcctggtgttatcaaaggtgaatgaagaatggctggaaggggagtgcaaagggaaggtgggcattttccccaaagtttttgttgaagactgcgcaactacagatttggaaagcactcggagagaagtctaggatgtttcacaaactacaaagctgaagaaaatgaagccctattacttgtttgtaagatttagcacccttctgctgtatactgtactgagacattacagtttggaagtgttaactatttattccctgttaaaatttaacctactagacaatgatgtgagtacccaggatgatttcctggggcacagtgggtgaggagatggggacaggtgaatggaggagttaggggagaggaaaagtggatggaagtgtctggaaagggcacgagagagtcttccaggtactgatcctgtttcttgctctgagtgctanctagccag

SEQ ID NO: 7973 - DNA, 375 bp, Homo sapiens
ccaccatgtgttctcattgctgtaataaaccaaaggacttactccaacacctgaagcttgcagtcggggtgcaagagtccctcacagagtagtttgatccccttgtctccgagagtgttgcctcgcaggtaaaggtgcgtgagattctgattagtgctgagtaccgaggacaaagctgaacaacagactgacgtaaggccagaattcaccaaccccagtttctgcaggttacactgtggattcttggctttttcacataaaattgcgactcctgagtctcccaaggcattctcccccacatagagtctggtcagggaatggctggtgctcaatactgatgcaagatcctgacaacatgctgatgtgaggcagcag

SEQ ID NO: 7974 - DNA, 599 bp, Homo sapiens
  misc_feature (1)...(599): n = g, a, c or t
ctgcctatgttaatgccattgagaaagtcttcaaagtgtacaatgaagctggtgtgaccttcacatagatggatcatggctgacttcctcactatcctcttcacatgtaacttctgcagacctatcacaagtttacatgtaaccacagaaatccctttctctcctgactcattaataatggataccattctcaacaagtcaatccaagtcagcccgttaaggagaaagaaattaaggttagcggatcatgtacaagctgagtgtgaaagtagaaatcacctacaccagagagccattttggtattttgcctttaaataaaaagcctcctttatctggctgtgcagccttgctctgtggcttttcccaacacaatcagtgctagtgctggggaggaacagtcaagagcagtcagttgcttgcttattttttctggatgagtctgggacacactgtaactttaacacatttaagaagtaggtgtgtggccttttcagaaggtggcatggtcctcaagtgagttcttagtattttatatcagcaaaataattcaattttgcaggttacaaacaaatataaaacctgtttctgnttatgaata

SEQ ID NO: 7975 - DNA, 265 bp, Homo sapiens
ctgaacagagaaaggaattaaaacgctttaattaaaaaatcacgagtggatgataaagtgtgtagaaactgaaaatttacaaactatttaaaacctggaatcgctgactgttcagaaactacacagatggatcatgggtggtggtgaacagcagaaagggattatggatgaatctgcattgttctagctgctccccatgccacccgtctccgaggaaagcctgtaacacagaaacaagaactcagttagtttccccagtgctcag

SEQ ID NO: 7976 - DNA, 597 bp, Homo sapiens
ctgggaagccacgagaatattgtgaacctgctgggggcgtgcacactgtcaggaccaatttacttgatttttgaatactgttgctatggtgatcttctcaactatctaagaagtaaaagagaaaaatttcacaggacttggacagagattttcaaggaacacaatttcagtttttaccccactttccaatcacatccaaattccagcatgcctggttcaagagaagttcagatacacccggactcggatcaaatctcagggcttcatgggaattcatttcactctgaagatgaaattgaatatgaaaaccaaaaaaggctggaagaagaggaggacttgaatgtgcttacatttgaagatcttctttgctttgcatatcaagttgccaaaggaatggaatttctggaatttaagtcgtgtgttcacagagacctggccgccaggaacgtgcttgtcacccacgggaaagtggtgaagatatgtgactttggattggctcgagatatcatgagtgattccaactatgttgtcaggggcaatgcccgtctgcctgtaaaatggatggcccccgaaagcctgtttgaaggcatctacacc

SEQ ID NO: 7977 - DNA, 596 bp, Homo sapiens
agtctaggcagaatgtaactctaaaccattgtagactgtcctgaagattcataatttctttccccaaaagaattattcttaatatgcacatttaacactgaaatgtagctgtaattcaaggtaagcttaggaacttcaccctctaagcacagacttctatgcagcacatacttctataatcagtaaacttaattcacaaaattagcgcataagggtattaagtgcatgggaagtaaacacagttatgttacacttaaaattacttttgaatgattgataaaggatttcttcatgattgattatcttaagaaaatggaagtctgtgtaacttgaatttggcagggcatgaaataagtggtaaaaacagcaaactgataacttgagaatcattttcgttttactgagaatactttatttgctggtagaagttgctaaaaatgcacagaacaaataccaatagaaaatgcactgtatttgaatctccctagtctatataaaatgaacggtgtacagcatctgttggaaaaatggctgcatggacatttcttattttatgcccacttataaataaaaataaaccttttattcaagagtat

SEQ ID NO: 7978 - DNA, 599 bp, Homo sapiens
  misc_feature (1)...(599): n = g, a, c or t
ccaccgtcacagnccaggatgaagaggagtacagggtcctgtgagctgtttgaccactgttctaagactatgtgtgcccaaaagcacataagcatctatgttgagagtaagtttgtatcctgcgttggtctcagaaagaacgtgaatgcttaagattttgaaagtacataatattttatactttgggagagagctttaagagtccctggaaatactttttaatttttttaacttaaaattcaagagactgaatcacttttctcattgattaaatgtaaagattattgagaaacctatagtaaatgaaatttgtaagatgttttctcaaatatatgctgtgcctgtacttatatacagtctttcaagagagatacaaacaaggcagaaacatttaaactagtattaaaggtagtttaccaaagcattttttgttttcttaccttgaaaacacagaaccgttaattccttggtttaagcagttgctaagttttttaattttaggctcagaggcccataggaggttttaagatttatgtttagtccgataggtgaggtctttgatattttgaattttaactccttttatgatacatcacagt

SEQ ID NO: 7979 - DNA, 575 bp, Homo sapiens
  misc_feature (1)...(575): n = g, a, c or t
ctgggagagctagactaanttggtcatgatgcagaagctactcaaatgcagtcggcttgtcctggctcttgccctcatcctggttctggaatcctcagttcaaggttatcctacgcagagagccaggtaccaatgggtgcgctgcaatccanacagtaattctgcaaactgccttgaagaaaaaggaccaatgttcgaactacttccaggtgaatccaacaagatcccccgtctgaggactgacctttttccaaagacgagaatccaggacttgaatcgtatcttcccactttctgaggactactctggatcaggcttcggctccggctccggctctggatcaggatctgggagtggcttcctaacggaaatggaacaggattaccaactagtagacgaaagtgatgctttccatgacaaccttaggtctcttgacaggaatctgccctcagacagccaggacttgggtcaacatggattagaagaggattttatgttataaaagaggattttcccaccttgacaccaggcaatgtagttagcatattttatgtaccatggttatatgattaatc

SEQ ID NO: 7980 - DNA, 598 bp, Homo sapiens
  misc_feature (1)...(598): n = g, a, c or t
gcttctaggacaagagccnggaagaaaccaccggaaggaaccatctcactgtgtgtaaacatgacttccaagctggccgtggctctcttggcagccttcctgatttctgcagctctgtgtgaaggtgcagttttgccaaggagtgctaaagaacttagatgtcagtgcataaagacatactccaaacctttccaccccaaatttatcaaagaactgagagtgattgagagtggaccacactgcgccaacacagaaattattgtaaagctttctgatggaagagagctctgtctggaccccaaggaaaactgggtgcagagggttgtggagaagtttttgaagagggctgagaattcataaaaaaatttattctctgtggtatccaagaatcagtgaagatgccagtgaaacttcaagcaaatctacttcaacacttcatgtattgtgtgggtctgttgtagggttgccagatgcaatacaagattcctggttaaatttgaatttcagtaaacaatgaatagtttttcattgtaccatgaaatatccagaacatacttatatgtaaagtattatttatttgaatctacaaaaaacaaca

SEQ ID NO: 7981 - DNA, 450 bp, Homo sapiens
  misc_feature (1)...(450): n = g, a, c or t
ctagtcttaaaaaatatgatagtttctctactaaagtctaaaaaacaaatctgtgctatttaaagaaagctgaaaaaatctgttttatcaaataggtttcacattagttttttcaacaactctcaaatgactatagttttttttctaaataagtataaccaattacatggtatgatgacccttacttgtgacactagtgtctccctagaatagctttttgtctgtggatagagccaaagatgctagataaagttcaaattagggaaaataataaactcattcataaatcagaatcaaacttgtctctctgtgctaggttaagcattgctaatttaaataaaatctgcattaattgaaatatgctgaaaattttaagatatatttgcatttattatgatgcattttgcatcaganatattctattcttgatcaatatttctcaaatattgg

SEQ ID NO: 7982 - DNA, 603 bp, Homo sapiens
  misc_feature (1)...(603): n = g, a, c or t
ccatcggtgctgaaattgancattttaaatagtacagtaggctggtatacattaggaaatggactgcactggaggcaaatagaaaactaaagaaattagataggctggaaatgcttactttctgctctcattttctttcattttgtctgctgtctttttgaatgccaatactttcatttaaaatgttttgggagcacggcaacccaaaatgactgaacggtggtccaaaaatccaaaccaactgataattacttctcgaggtgataggaaaggcacaggaagttaggactttggctgaaatgatgaaaacacatgttcgccattttagggatcagcgcctcgactcctgccacctccggctccaacgatgatcatgtttggatgtatttattgaattgtcctttgctgatgaggaatttttaaagtatttcatagaataagtcctttggtatgcagatgctacatggaaggaaagaaagaaaaaaagaaaacacacaatattacttgctccataccctaaactgccgataccacagccgtaaaatgaaggtgtctagtagttgttatagcacggnagtccattctttntaaaggaccacttac

SEQ ID NO: 7983 - DNA, 155 bp, Homo sapiens
  misc_feature (1)...(155): n = g, a, c or t
ctgagggctcaggtgagcaactggtcacagtcagcagctctgttgttccagtgcttcccagtgctgtgcaaaagttttctggtacagcttcctccattatcgacgaaggattgggagaagtgggtactgtcaatgaaattgatagaanatccncc

SEQ ID NO: 7984 - DNA, 603 bp, Homo sapiens
  misc_feature (1)...(603): n = g, a, c or t
ctgataatttncaatgtcataaagtttccagtttcacaatacaaaaaggataaaatgaaattgggtatcattttgttgcaatttatagaactttacccatacctgtaagaccctcaatgtatatgaaatcattttcactgggaaagtgacagttacagtaaaagcagaaccacacaaatctttatttaaaagccgaaatatcagccttctctctctcttttgctatttgaaaggtagtcttcaatttggcaggcaactgcttctctctccaaatagtaacaggttacaaacatgctactttaaatatgaataggacctaaggctttagtattttaaatcttgcccaatacagaaatgcctttcaagagactttagtgatgcttaatttatgaacaacaaggaattattttccttttgattattcactttttcaaaactcatagatcagaataaacaaaaaatcccccaacccatggtggggacacaaaagtaacataagtgactaaggtgtgccattcatagagaggttgaagactccatgccccaggaccacttanctgcaatagggtgaaatagtctactttttgatttcatgaatntttt

SEQ ID NO: 7985 - DNA, 489 bp, Homo sapiens
  misc_feature (1)...(489): n = g, a, c or t
ccttatttctctnntcctttcgtacagggaggaatttgaagtagataggaaccgatctggattactccggtctgaactcagatcacgtaggactttaatcgttgaacaaacgaacctttaatagcggctgcaccatcgggatgtcctgatccaacatcgaggtcgtaaaccctattgttgatatggactctagaataggattgcgctgttatccctagggtaacttgttccgttggtcaagttattggatcaattgagtatagtagttcgctttgactggtgaagtcttagcatgtactgctcggaggttgggttctgctccgaggtcgccccaaccgaaatttttaatgcaggtttggtagtttaggacctgtgggtttgttaggtactgtttgcattaataaattaaagctccatagggtcttctcgtcttgctgtgttatgcccgcctcttcacgggcaggtcaatttcactggttaaaagtaaga

SEQ ID NO: 7986 - DNA, 392 bp, Homo sapiens; identical to SEQ ID NO: 7567

SEQ ID NO: 7987 - DNA, 367 bp, Homo sapiens
gcggcgaccatggcgtatcacggcctcactgtgcctctcattgtgatgagcgtgttctggggcttcgtcggcttcttggtgccttggttcatccctaagggtcctaaccggggagttatcattaccatgttggtgacctgttcagtttgctgctatctcttttggctgattgcaattctggcccaactcaaccctctctttggaccgcaattgaaaaatgaaaccatctggtatctgaagtatcattggccttgaggaagaagacatgctctacagtgctcagtctttgaggtcacgagaagagaatgccttctagatgcaaaatcacctccaaaccagaccacttttcttgacttgcctgttttgg

SEQ ID NO: 7988 - DNA, 485 bp, Homo sapiens
  misc_feature (1)...(485): n = g, a, c or t
ctgcaaaaaccacttcaggntcctagctctatttctagagctgtcttgtccannacagtggctgctacccacctgtggctcttgagcacctgaaaggtagatagtgcaaactgacatagtctttaagtgtaaagtacttgacaactttaaataagataataggaaaaaagaatgtaaaatttctcaataattttcatgtgggttacttattgaaacataataacttgaatacattaagtaaaatatattgttaaattactttnatntctttaatttcaattttttaaagatgcttacaattttatatggggttttcattatatttntattgaacagtgctattctacacacaagctcatcttccttaaatattgntggngcctccaaccatgattccatcacttctttncattggccaatttctttttttcttttttttgaatngagacatannttcactcttgtcacccangctggaatgcaat

SEQ ID NO: 7989 - DNA, 446 bp, Homo sapiens
  misc_feature (1)...(446): n = g, a, c or t
cctttcttaaacaacttactctgcattaaaaagtcatcaataagaactgtaattcagtgtttttaaaaatgaaatgtttaacttcaaattgtttgtttaaaataaactgctattgtgccaaataatgaaactactattttattcattacaaacatcatataatcattctctataatcactataaaaatttaaatgcttcctttctcctgtatatgaagatggtagttctaaagcaacactctaaaagtgttaaaaagcccattcgtaacacacaccccacctcagtttttgaaagtcagtgcattcagtggttataaataggcatgatgttcttccacanntaagagttctgagtgtcaatcagttgtgtttttttctcccaagggaagacgttcccataactggancaactgttcaccancctgangttctagttcctagataaa

SEQ ID NO: 7990 - DNA, 92 bp, Homo sapiens
  misc_feature (1)...(92): n = g, a, c or t
ctcaggtgacactatggcnanattaacatctgggattaggactggaaacacatgtcattttgaactaagggaaactctttgtcatcctaatt

SEQ ID NO: 7991 - DNA, 88 bp, Homo sapiens
  misc_feature (1)...(88): n = g, a, c or t
ctgggaagccacgagaatattgngaacctgctgggggcgtgcacactgtcaggaccaatttacttgatttttgaatactgttgntatg

SEQ ID NO: 7992 - DNA, 203 bp, Homo sapiens
cctttaagaattaagtgacttgtccaaggtcactatccgtattttaggagccaagacgagatcaagttcaatattccaggagtggtactgactagaccttgtagttattttgaaaatgttagcctccaattacaaaagcaagcatttcctagttctcactcaacttctccttttccctgttcctctcaaaaaaaaaaaaaaaa

SEQ ID NO: 7993 - DNA, 72 bp, Homo sapiens
  misc_feature (1)...(72): n = g, a, c or t
ctgaaccctcntggagccattcatacaggtccctaattaaggaacaagtgattatgctacctttgcacggtt

SEQ ID NO: 7994 - DNA, 577 bp, Homo sapiens
cctactcattattttagagaatgaatgaagcaacaaggaagagagaccatgactctatcgatgacactgtttatagaaacacaggagaggaagaatttggaatgaaaagcacttcgtcagaaccttctgtgggagccattgagagaaaagcatggtccagtgccttctgagaaaggccagagctttgggctttcctgctctgcttttgggtcgtcaatttgccatctctggttctgtgctataatcagaattgtaattatgttctccagaggccaatttcattaactctgattaattagaatcagctagccagattagtaacctctttgtccagccttgatttacagtgcagggtaaagtgcagaccttaaaaacagctaagtacctagaagagctccctgcaagtgtaaatattaaggatgacctgtgcaaaattatacccacaccagcactagtggtaattattctaaattattgccaaaaagttttttttaatctgtctttcaagtttacagaaaagaaagcagtaaatgcattgatgtcattttattatgtacatatatcatgtgcattcaag

SEQ ID NO: 7995 - DNA, 186 bp, Homo sapiens
cctttccactaaccctgaaaaagatatatttgtggtgcgggaaaatgggacgacgtgtctcatggcagagtttgcagccaaatttattgtaccttatgatgtgtgggccagcaactacgtagatctgatcacagaacaggccgatatcgcattgacccggggagctgaggtgaagggccgctgtgg

SEQ ID NO: 7996 - DNA, 236 bp, Homo sapiens
  misc_feature (1)...(236): n = g, a, c or t
cttacgtttagtgagggagagatttggtatatgattgagatgggggctagtttttgtcatgtgagaagaagcaggccggatgtcagaggggtgccttgggtaacctctgggactcagaagtgaaagggggctattcctagttttattgctatagccattatgattattaatgatgagtattgattggtagtattggttatggttcattgtccgganagtatattgttgaagaggat

SEQ ID NO: 7997 - DNA, 388 bp, Homo sapiens
  misc_feature (1)...(388): n = g, a, c or t
ctgaatttcacttttctttaaaaatttaatattaaaatgntttcatctcttaattattggcttgcttgcatggatcattcattaaataattttttatttgctagatacccataatatctgccgaacatctgactagccacaagtatgttacccagatgtagaattttcatcactaaacagtaagttcattatgtaatatatagttgcatatttgtggtggttttttttaagatagcaattgtatagtgcacttaaaattttgcgaaatctctgagaaaatatatacagatcacatttttatcttaaatgggtgtgaggaattttatcagacatctttataacaaatatgttaatatcacttaaatatacaaagtnctaagagaaanta

SEQ ID NO: 7998 - DNA, 388 bp, Homo sapiens
ctggcagaccccccaaccacatcagaggagttttcatttcttcctgggctgcttatctgggaagccttcaaagaattcgttacacatcatggcgatgcaggacaggaagacacagtactcttggaagtccacctcgttgtccctgttgctgtccaagttgctcatcagcttctggaaagcagcttcatctgtccttttccccaagaagctgggcagctcccgggtcagcagctcctttagttctgacttgttgagcttgaacttgtcaccctctttgcccgagtacttgtggaaggtggacaccatcacatccagggccttctccagagggcacgccatgacagcagtcaggatcaaaccaagaaagaagaagcgctgaggagagagg

SEQ ID NO: 7999 - DNA, 405 bp, Homo sapiens
  misc_feature (1)...(405): n = g, a, c or t
cctggctcaacaaaagggctggggattggccctgaaaggagagagctgactgtcctggctgatggacaggagatcctcttagcactaccctaaggcaggcagttgggcattggtgtagacaacaggaaagtccaggctatagccgtactcaaaaacctttctgttccctttctgccagccctagggattgagtccacattcagcacaggactctctgggtacagctctctttaggaagacacaaattgcatggtgaagtcagttatatcctggccgcctttggtccctcccaggaagacgggcatgttttctgcttgagaggtgctgatgtgccanttggggaactgggcanactcaaattccagcttgttattgatttctatcttgttgaagacaaatcgcttt

SEQ ID NO: 8000 - DNA, 452 bp, Homo sapiens
cctgccttaccgagagccaaacagagcccagggagactccgctgtgggaaacctcattgttctgtacaaagtactagctaaaccagaaaggtgattccaggaggagttagccaaacaacaacaaaaacaaaaaatgtgctgttcaagttttcagctttaagatatctttggataatgttatttctattttttatttttttcattagaagttaccaaattaagatggtaagacctctgagaccaaaattttgtcccatctctaccccctcacaactgcttacagaatggatcatgtcccccttatgttgaggtgaccacttaattgctttcctgcctccttgaaagaaagaaagaaagaagactgtgtttttgccactgatttagccatgtgaaactcatctcattacccttttctgggtttgaagctgctgtctctagaagtgccatctcaa

SEQ ID NO: 8001 - DNA, 355 bp, Homo sapiens
gaagaacgtgagtaggccagatcagaaaagggagctcaggtaccttccagagagtgagacccagcgcccttgtctcgcacccagtaggctttcatccccgccatggcggagctgatccagaagaagctacagggagaagtggagaaatatcaacagctacagaaggacttaagtaaatccatgtcggggaggcagaaacttgaagcacaactaacagaaaataatatcgtgaaagaggaactggccctgctggatgggtccaacgtggtctttaaacttctgggtccggtgctagtcaaacaggagctgggggaggctcgggccacagtagggaagaggctggactatatcacag

SEQ ID NO: 8002 - DNA, 339 bp, Homo sapiens
ccagaggagggtcccatctgtcatccgcctggcactggctccagggactgccttccagagtatacccatcttcacacttcaaagtcacataatctccatagtgatatacttttttcatttctaactccttcgagattccattcataaacagtgggaagctacaatttacttctttgcaataatgatccaattggctccagattccctggtctgtacagaaaatgaagccctttcccactaacaggtagccggggtcacaaatgtagctgattgtcatcccaggaagatatagagatacgtgtcctccaatgtaatgcccgttttggatcttgggtggat

SEQ ID NO: 8003 - DNA, 393 bp, Homo sapiens
  misc_feature (1)...(393): n = g, a, c or t
ccagtgtgaggtttgctccttcagcaaacctggaaggtaagaatggggcatatccacatccatagacccttttgtttccctcacagaattttgtgattttttttgtgtgtggcatttttgggggagcagggaacatcaactttgttgggggaaatttctctgcataccagcacgccagcgagggcagacggccttacacactggcctgtgaacatacctatttgttggcccgcttgtgtctgtacatctgcatcatcctctgtcggaacacatcgaatgtgtcttctttgtgctcctgcccgtcagcacccaacccttccccttccgagggggttcccctagggagtgaaaaanagagtcagttgtgcacctgagcccagggcctgncatgcc

SEQ ID NO: 8004 - DNA, 73 bp, Homo sapiens
  misc_feature (1)...(73): n = g, a, c or t
tcggcttgtcctggctcttgccctcatcctggttctggaatcctcanttcaaggttatcctacncanagagcc

SEQ ID NO: 8005 - DNA, 279 bp, Homo sapiens
gcacaaggcacaacaggctgctctgggattctcttcagccaatcttcattgctcaagtgtctgaagcagccatggcagaagtacctgagctcgccagtgaaatgatggcttattacagtggcaatgaggatgacttgttctttgaagctgatggccctaaacagatgaagtgctccttccaggacctggacctctgccctctggatggcggcatccagctacgaatctccgaccaccactacagcaagggcttcaggcaggccgcgtcagttgttgtgg

SEQ ID NO: 8006 - DNA, 271 bp, Homo sapiens
  misc_feature (1)...(271): n = g, a, c or t
ctgattgattgaatgcaatgtgattgattgattgattgattgatatataccaaaattcatatggatgtcacacagtgacagcattgtacaagtaacgttaatgacctccaacaaacacattttaaattanactggtcaagctaaaaggaatgttggagccaaaagaaatgtagtggaattcagattgtctattaagacttgaaactatacattagaatgatgtggaaccctaatactancancaactgnnacagcccncttnaaagatttg

SEQ ID NO: 8007 - DNA, 531 bp, Homo sapiens
  misc_feature (1)...(531): n = g, a, c or t
tgagtccaaacattctgaaaaccgtacaaatgtgtttacattttagtgggggcttcctgcatctttaacctctttaaattgacataggtaagatcttgtgtaataacacatttgcaaatatgcagatgcattttcaaatgaatataatctgatttagagaatattaactgactatcatagtagactatggataatactctaataattaattacaggttaacatttttaaaactcaaagcatatgctttaagtttatgctttaagccacgttatgttctacttcagcctaatacaagggagaaatttggagggggccctcctagctttctagtctcattattcccaaattagaaacattaccagcctaacactaactctggggtctaaaatgaagttattttggcagccctagagttttcttgtcattgataactgaagattggcctttgtgcaggttaaataatcaaatcttagaggaaattgacatgcttttaaattatctacaaatattagcccnttaaaagattatat

SEQ ID NO: 8008 - DNA, 449 bp, Homo sapiens; identical to SEQ ID NO: 7970
  misc_feature (1)...(449): n = g, a, c or t

SEQ ID NO: 8009 - DNA, 297 bp, Homo sapiens
cctgggtatctgaggcttgcttggcttgtgtccatgcttaaacccacggaagggggagactctttcggatttgtagggtgaaatggcaattattctctccatgctggggaggaggggaggagggtctcagacagctttcgtgctcatggtggcttggctttgactctccaaagagcaataaatgccacttggagctgtatctggccccaaagtttagggattgaaaacatgcttctttgaggaggaaacccctttaggttcagaagaatatggggtgctttgctcccttggacacag

SEQ ID NO: 8010 - DNA, 385 bp, Homo sapiens
ctggcagaccccccaaccacatcagaggagttttcatttcttcctgggctgcttatctgggaagccttcaaagaattcgttacacatcatggcgatgcaggacaggaagacacagtactcttggaagtccacctcgttgtccctgttgctgtccaagttgctcatcagcttctggaaagcagcttcatctgtccttttccccaagaagctgggcagctcccgggtcagcagctcctttagttctgacttgttgagcttgaacttgtcaccctctttgcccgagtacttgtggaaggtggacaccatcacatccagggccttctccagagggcacgccatgacagcagtcaggatcaaaccaagaaagaagaagcgctgaggagag

SEQ ID NO: 8011 - DNA, 398 bp, Homo sapiens
aatcgctgtcggatcgatacaggaaggactcccgtcgttgactgtggacaaaatttgcttggagaattagcccggatcctgggctggtcatgggatccaagggactccgtcccgcagatgtgccattgtccacatcaaaaccactggattctgcagaagtgatagcaatcagcggcagaatcttcagggggaggctggttggtcgttgaatgttctctgattcacttttcaagtcagcttgttccaactgtctgaaggcgagagggggaagctgaatattgcgacatgaaagtctccggacaagatagggttccattccgcggaaagggtcttcctcttcattactggaatgtagtgtttcctcagaggcacttttgctccgagaaagcaaatcacag

SEQ ID NO: 8012 - DNA, 278 bp, Homo sapiens
  misc_feature (1)...(278): n = g, a, c or t
aggtntgacntcctaaaaacnaagtcaaattagggaaggatggccgtttccttgagtcaaaagcccagcaggattgcattataatgtatatttcttctgcagcataaaatggctgatccattttaaatccattttgaatcagtttgtagaagttagcatcaaccggaatgccagggtaaggattcacaccaagtgagaagatttcccacagtaatattccatatgaccagacatcactcttaatggtgtagatgccttcaaacaggctttcgggggcc

SEQ ID NO: 8013 - DNA, 305 bp, Homo sapiens
  misc_feature (1)...(305): n = g, a, c or t
ccaatatgcctttggagcacagcctatggtttatgtttcttttatgaccacctttaatatctgtcaaacgactagacatgctatagctttacccgaaggtaatttgattgactgtgctctgctagaagatggtgtatgggtccctctcgaggtaactgccaataaatgataagtggtatttgttttagataatgcctctacctcagtggtagctttgataatggcaaattgtaattgcaagtgccattttcagaataggcattggtttattttangaagaggataataaanttccttttagttat

SEQ ID NO: 8014 - DNA, 231 bp, Homo sapiens
ccatcatccatgaagaaaaggcactgaccatggaagtgatccgccaggtgaagggagacctggccttcctcaacttccagaacaacctgcagcagactccactccacttggctgtgatcaccaaccggccagaaattgctgaggcacttctgggagctggctgtgatcctgagctccgagactttcgaggaaatacccccctacaccttgcctgtgagcagggctgcctgg

SEQ ID NO: 8015 - DNA, 157 bp, Homo sapiens
  misc_feature (1)...(157): n = g, a, c or t
ctggtgttaatggcatgcaggcatatgtgatgccaaccatgagggctggaagaaccagaagccaaagaagaatatgaccgcatctattctaaagctactgtggtggtttctcatgcttnagagtctcntaagtctcctggttcctggtgctcaggcc

SEQ ID NO: 8016 - DNA, 262 bp, Homo sapiens
  misc_feature (1)...(262): n = g, a, c or t
ccaacatggtgaaaccccagctctattaaaaataatagaaaaattagccaggcgtggtgacatgtgcttgtaggcccagctactcgaggctgaggcatgagaatcgcttgaacccatggaggtggaggttgcagtgccactgcactccagtctgggtgacanagcaagactccatcccaaaaaataaaaataaaactctaggtggaggcttaatcttttctttaaatcagcttcttagagcactctanaantcatctgtaac

SEQ ID NO: 8017 - DNA, 288 bp, Homo sapiens
ctgttgagaatatactgtagggggtgaggatggaagtgagggtggtatttggaaggctagtgcaataatccaggcaagaaatgaattaaatggtttgagtagggtgaaagcagttgttctgcatgtattttgaaggaaaacccaccaagatttgctgaaagattaaatgtgaaatacaagagaaaaagagaaatcggccgggcatggtggctcacacctgtaatcccagcactttgggagaccgaggtgggtggctcacctggggtcaggagttcgagactagcctgg

SEQ ID NO: 8018 - DNA, 309 bp, Homo sapiens
  misc_feature (1)...(309): n = g, a, c or t
cgcgtaggcgagttggtctgaaagcccccggtatcattcctngaatttcagtgcgggaaccaatgcagactggcattaaggctgtggatagcttggtgccaattggtcgtggtcagcgtgaactgattattggngaccgacagactgggaaaacctcaattgctattgacacaatcattaaccanaaacgtttcaatgatggatctnatnaaaagaanaanctgtactgnntttatgttgctattggncaaaaganatccactgttncccagttgntgaagagacttacagatgcannatgccatgaag

SEQ ID NO: 8019 - DNA, 620 bp, Homo sapiens
  misc_feature (1)...(620): n = g, a, c or t
tttagattatattcgataaaagtaattggactttttttctttttttgactcgttgacaagtgtctttgtaatatgtttttagttccctttttttgttgtattataggcagatgaacaaattaaatttggcctcaaagagagaacttactcccttctggatatttttgccacatttctttgcaaaaggagatatatatatctttagtcagttttgttgttatgagaaattatgggttattttgtggcatgctctttgggagctgcacagttatggggaggactcccactgctgtgcaagttaagtcttttacaaaacaaggacagcagaggagggtttgcagagacctccctctgaaaaacacaaagaatggactctctcctgggatgaggacttgctttctttacctccggttctttccatgtcttagttggatgtccctgaaatggacacaggctgtgccattgtgccagaaacattgngttatcttttatgttgttgntgntgctgntaaactataatatgtgacttctttttttattattttttggttgaatgctttaaaaatcttttaagtctgtggatctgctgatgtacagngcctttgctgctatggatcaaa

SEQ ID NO: 8020 - DNA, 446 bp, Homo sapiens
ctggtgcttctgccttaccccatcctctcctctcagattcaccgaggactgttcaggtggtaacattctcttagggtagggaactctgcagagggagagctgaggaggttccggccatagttgtttgtaatcttagggctctgggcttggctgaaacatgacggtattgcttggtttcaggcttgacactgccaggcgcctattgcttgacctctgtttaaatgagggacttcaagactagacagcatggctcttttcagtttattgcatgaaggagttacactagtccaagttaaaagcggaccccaaatggttacattatacaagctgtgaggtttttaaacctgtgacaagggagagaagggaaattctactcattgcaaggaaatcctcacttaagcttcagtgagccacaagcacttaaaacccatgaaccttcagacctc

SEQ ID NO: 8021 - DNA, 609 bp, Homo sapiens
  misc_feature (1)...(609): n = g, a, c or t
ccaatgaaatttgaacatcactaaacaagcaaatggaatgactttggaccatatctagtatataatatttttgtcacgcacctgctgcattgctctaacttacacagaatgagaggagtaaatgttcttgccttcaaatagtgttttacgttttttatcctgctgaaaaagtatatataaaatatctaacattacaggatagaggttcagtttcttaaaaaattaaagctgctaaaattgagtggttaaaaaagataccttatcctattcctccccacccacccatgtttttaaactaatttatataaaatctggaggctgttacagctaacaaagcaggtgtgtggcagaaatattactttaaatttgtcttgtgagattttactatatctcagacagcataaatgctgttttagcactggattctttcactgagcacaaagagttgttggggctttagcatctgactgattttgttacggggttgattctgaccataggaagtatgcaatgtgaatcactatttacagagaaacctacaacaggatgcttgatgttgtagaaanctgggnacatataggataccaagcnnaaattataagaaaccta

SEQ ID NO: 8022 - DNA, 252 bp, Homo sapiens
  misc_feature (1)...(252): n = g, a, c or t
tcttacaggcagaaactcttagagctcacaaattggaaacaactgcaaacttcanagtaaattcatagcttccaaatacaaatgttcacattgtccctccgctatttttacacaaatgcattcnggtgaagacagcaacacacattgggaaaggacatctgcttcctattttagtcccanaatcacttttgcttctagtcccaactgttccctctccccaatcccaaccttatccatgtnacagtatgaatt

SEQ ID NO: 8023 - DNA, 342 bp, Homo sapiens
cctgtttgattgtagctatgttggtgtatctcgtgtacaagatggaaaagtgcttttgttgttctacctgatccagttgggggagcaggaatagggggtgcctgcctaacggcctctagcccatgtgcttatactgggatctgtcccgagggatctgcacctggttggcagtcattttgtggtggacgtggtaaatcgcgagtgttaccatgatgacgaggcccaagatgagccccaaaatcaggggcaaggtttcttccagttgctcccgctcatccactgggcatttatgctcttcactgaagacaaaatctgagataatgtcaaaaggttggatgtgga

SEQ ID NO: 8024 - DNA, 274 bp, Homo sapiens
ccttggtcctagcacccactcgagaattggctcagcagatacagaaggtggtcatggcactaggagactacatgggcgcctcctgtcacgcctgtatcgggggcaccaacgtgcgtgctgaggtgcagaaactgcagatggaagctccccacatcatcgtgggtacccctggccgtgtgtttgatatgcttaaccggagatacctgtcccccaaatacatcaagatgtttgtactggatgaagctgacgaaatgttaagccgtggattcaagga

SEQ ID NO: 8025 - DNA, 178 bp, Homo sapiens
  misc_feature (1)...(178): n = g, a, c or t
ctgtttcatagtcattgttggtttcttcaggttgtctctttctgatggcaatcatttgacgtccaggtggctcaaattgggcagccttcacaggatcagtggaattggctgaaatccgctttttcctgcantanatcaaggccactacancagcaacaatggccagctacannaatcc

SEQ ID NO: 8026 - DNA, 321 bp, Homo sapiens
gggacgctctcagctctcggcgcacggcccagcttccttcaaaatgtctactgttcacgaaatcctgtgcaagctcagcttggagggtgatcactctacacccccaagtgcatatgggtctgtcaaagcctatactaactttgatgctgagcgggatgctttgaacattgaaacagccatcaagaccaaaggtgtggatgaggtcaccattgtcaacattttgaccaaccgcagcaatgcacagagacaggatattgccttcgcctaccagagaaggaccaaaaaggaacttgcatcagcactgaagtcagccttatctgg

SEQ ID NO: 8027 - DNA, 241 bp, Homo sapiens
ccaagggtcatgatggcaggagtaatcagaggtgttcttgtgttgtgataagggtggagaggttaaaggagccacttattagtaatgttgatagtagaatgatggctagggtgacttcatatgagattgtttgggctactgctcgcagtgcgccgatcagggcgtagtttgagtttgatgctcaccctgatcagaggattgagtaaacggctaggctagaggtggctagaataaataggag

SEQ ID NO: 8028 - DNA, 428 bp, Homo sapiens
ctgtggtttattctgcttgtatgtctgcacaggccggatgctcgtgttccttgtcttattctccatttactcagtcactggggctcactcccgtctgatgcactagccaagattgccttagtgtgctccagaaaagaaggccaaatcccaggcattgtcagggcagcagagctctacaggataggcttacctttcccacctgtgtggctagcacttcacagtttacaaattcctcccacctccactcagtgacacatgctgttctaacacaggtcaggcaggcattacagtccccatgttcagaatcaaagacctagcctcagagaagtgaagaaacatcatgccaaggtcattgactgccaagcggtagaggtggggttgcatccagagagcttcccggtatgcctctgcacaatgccattccttgg

SEQ ID NO: 8029 - DNA, 383 bp, Homo sapiens
ccatggacaagctgaggaagatgctggttccctgcccacagacctttcaggagaatgacctgagcaccttctttcccttcatctttgaagaagaacctatcttcttcgacacatgggataacgaggcttatgtgcacgatgcacctgtacgatcactgaactgcacgctccgggactcacagcaaaaaagcttggtgatgtctggtccatatgaactgaaagctctccacctccagggacaggatatggagcaacaagtggtgttctccatgtcctttgtacaaggagaagaaagtaatgacaaaatacctgtggccttgggcctcaaggaaaagaatctgtacctgtcctgcgtgttgaaagatgataagcccactctacag

SEQ ID NO: 8030 - DNA, 529 bp, Homo sapiens
  misc_feature (1)...(529): n = g, a, c or t
cgccttttacttcggcccgcttcttctggtcactccgccaccgtagaatcgcctaccatttggtgcaagcaaaaagcaatcagcaattggacaggaaaagaatggcattgaagcagatttccagcaacaagtgctttgggggattgcagaaagtttttgaacatgacagtgttgaactaaactgcaaaatgaaatttgctgtctacttaccaccaaaggcagaaacaggaaagtgccctgcactgtattggctctcaggtttaacttgcacagagcaaaattttatatcaaaatctggttatcatcagtctgcttcagaacatggtcttgttgtcattgctccagataccagccctcgtggctgcaatattaaaggtgaagatgagagctgggactttggcactggtgctggattttatgttgatgccactgaagatccttggaaaaccaactacagaatgtactcttatgtcacagaggagcttccccaactcataaatgccaattttccagtggntccccaaangat

SEQ ID NO: 8031 - DNA, 382 bp, Homo sapiens
ctggagtgaaggctggatacactaattcttttaaacaagtgcccattatcacattttgcatttttgagtgcttctgagttgaaaattaaaaccatgaaatttgaactgcgttttatttttcacctgctgaaagaacaggatcctacagcaattaaaaaacaatcacataacaactatagctacagtgtgctgtttggtttgcctgtttatgatttaaattttgtgaaagtcaatacttgttttgaagatttttttgtgaacaataaaccactgaaattggcagaaactgatctgaataatatatgttcttagtatagttctttctctctttttttgttgaagttttaaacatgcagtagttttgaaaaatgtaaggaatatc

SEQ ID NO: 8032 - DNA, 508 bp, Homo sapiens
  misc_feature (1)...(508): n = g, a, c or t
ctgccgctgctcgttgttttttctgcaatgatatttgggactattacaaatcaagatctgcctgtgattaagtgtgttttaatcaatcataagaacaatgattcatcagtggggaagtcatcatcatatcccatggtatcagaatccccggaagacctcgggtgtgcgttgagaccccagagctcagggacagtgtacgaagctgccgctgtagaagtggatgtatctgcttccatcacactgcaagtgctggtcgatgccccagggaacatttcctgtctctgggtctttaagcacagctccctgaattgccagccacattttgatttacaaaacagaggagttgtttccatggtcattttgaaaatgacagaaacccaagctggagaatacctactttttattcagagtgaagctaccaattacacaatattgtttacagtgagtataagaaataccctgctttacacattaagaagaccttactttanaaaaatggaaaaccagg

SEQ ID NO: 8033 - DNA, 394 bp, Homo sapiens
ccaggacagcctgtacttctgttgaggagtttcaagtttttaagaagctcctggctcgggaggaggaggagtctgagagcagcacatctgatgacaaaagggcaagtctggatgaggatgaggatgacgatgatgaggaggacaatgatgaggatgacaatgacgaggatgacgatgatgaggacgacgacgaggcggaggacaatgatgaggatgaggacgacgacgaggaggaatagctgtgatggaaggactagagcgaaagggcccagagatatcaaggaagcttttcattctcttaaagcttttgggtcctttacttgaatcttctcaagttattttttattctaaaactggtctcttgatgaaaaaaattataagtcacctgagaggc

SEQ ID NO: 8034 - DNA, 550 bp, Homo sapiens
  misc_feature (1)...(550): n = g, a, c or t
ccttggtcctagcacccactcgagaattggctcagcagatacagaaggtggtcatggcactaggagactacatgggcgcctcctgtcacgcctgtatcgggggcaccaacgtgcgtgctgaggtgcanaaactgcagatggaagctccccacatcatcgtgggtacccctggccgtgtgtttgatatgcttaaccggagatacctgtcccccaaatacatcaagatgtttgtactggatgaagctgacgaaatgttaagccgtggattcaaggaccagatctatgacatattccaaaagctcaacagcaacacccaggtagttttgctgtcagccacaatgccttctgatgtgcttgaggtgaccaagaagttcatgagggaccccattcggattcttgtcaagaaggaagagttgaccctggagggtatccgccagttctacatcaacgtggaacgagaggagtggaagctggacacactatgtgacttgtatgaaaccctgaccatcacccaggcagtcatcttcatcaacacccggaggaaggtgga

SEQ ID NO: 8035 - DNA, 337 bp, Homo sapiens
  misc_feature (1)...(337): n = g, a, c or t
ctgtttcatagtcattgttggtttcttcaggttgtctctttctgatggcaatcatttgacgtccaggtggctcaaattgggcagccttcacaggatcagtggaattggctgaaatccgctttttcctgcagtagatcaaggccactacagcagcancaatggccgctncagcaatcccagtgaccacagccacaatgatccccatcggtgaagagctgggagcttggacagtgatggtcacaggcttggatgagtacagcgtgtagcctatgtttcctgtgcagtggtaatcaccactgtgactgtggtttgcttgtgggatggagaagttgggatc

SEQ ID NO: 8036 - DNA, 449 bp, Homo sapiens
ctggagagtgtagatcccaaaaattacccaaagaagaagatggaaaagcgatttgtcttcaacaagatagaaatcaataacaagctggaatttgagtctgcccagttccccaactggtacatcagcacctctcaagcagaaaacatgcccgtcttcctgggagggaccaaaggcggccaggatataactgacttcaccatgcaatttgtgtcttcctaaagagagctgtacccagagagtcctgtgctgaatgtggactcaatccctagggctggcagaaagggaacagaaaggtttttgagtacggctatagcctggactttcctgttgtctacaccaatgcccaactgcctgccttagggtagtgctaagaggatctcctgtccatcagccaggacagtcagctctctcctttcagggccaatccccagcccttttgttgagccagg

SEQ ID NO: 8037 - DNA, 383 bp, Homo sapiens
ccatggacaagctgaggaagatgctggttccctgcccacagaccttccaggagaatgacctgagcaccttctttcccttcatctttgaagaagaacctatcttcttcgacacatgggataacgaggcttatgtgcacgatgcacctgtacgatcactgaactgcacgctccgggactcacagcaaaaaagcttggtgatgtctggtccatatgaactgaaagctctccacctccagggacaggatatggagcaacaagtggtgttctccatgtcctttgtacaaggagaagaaagtaatgacaaaatacctgtggccttgggcctcaaggaaaagaatctgtacctgtcctgcgtgttgaaagatgataagcccactctacag

SEQ ID NO: 8038 - DNA, 626 bp, Homo sapiens
tgacatcaaggactcaaaagcttattaccacctgcttgagcaggtggctccaaaaggagatgaagaaggtgttcctgctgttgttattgacatgtcaggactgcgggagaaggatgacatccagagggcagaatgcatgctgcagcaggcggagaggctgggctgccggcagtttgtcacagccacagatgttgtccgagggaaccccaagttgaacttggcttttattgccaacctctttaacagataccctgccctgcacaaaccagagaaccaggacattgactggggggctcttgaaggtgagacgagagaagagcggacatttaggaactggatgaactccctgggtgttaaccctcgagtcaatcatttgtacagtgacttatcagatgccctggtcatcttccagctctatgaaaagatcaaagttcctgttgactggaacagagtaaacaaaccgccataccccaaactgggaggcaatatgaagaagcttgagaattgtaactacgcggtagaattggggaagaatcaagcgaagttctccctggttggcatcggtggacaagatctcaatgaaggaaaccgcactctcacactggccttgatttggcagctaatga

SEQ ID NO: 8039 - DNA, 388 bp, Homo sapiens
ctgcttcaggggaaggcttgtggcttatatctattttgttgtattcctctagttcaacatgtctgcccccacccttacttctaacacctctgcccactccagtattccctcagaacctagcctggtaacgaatatatggacaattaaattacatcccaacatcattcatactttaatatataagaaatcagagcagagaatcagggcagccagtccctgaaggaaaagtctgtgacaaatcacaagtatgatcacagcacgaacttttctattctagcctggcctctaggaagaaaacagagagtgttaccggacttagggggaaaaaggacatgcttgatgaaggacagaaccccattgttctccacatttcctggctcacagaagg

SEQ ID NO: 8040 - DNA, 198 bp, Homo sapiens
cctgaaatacgttcagcacacctacaggactggggtgaaagtggataaagcaacatttatggttggcagctatggacctcggcctgaggagtatgagttcctcactccagttgaggaggctcccaagggcatgctggcccgaggcacgtaccacaacaagtccttcttcaccgacgatgacaagcaagaccacctcag

SEQ ID NO: 8041 - DNA, 344 bp, Homo sapiens
  misc_feature (1)...(344): n = g, a, c or t
gttaaacactannttaaaaaattttaaaatgaatgatgccacatttctatataaagaaatgagcattattaatccctgttgttgtaaaacatcattgaaattgtatgctattctctttatataaagtcattctaattatgtcacatgttgaagatgtaaccaaactattataaaggctgcttatccattcacatattgaatagattaagtttgggttttttaagattgttaatttgttattttctctttcctctagtcaaagtgggaaaaagcccaccggtgaggggctccctctctggaaaagtcagcctaccttgnnatttttcaacgatgcatactttgcc

SEQ ID NO: 8042 - DNA, 480 bp, Homo sapiens
ctgcagatgtgctggctcctgagggacccgggggcttactctgctcttgggacaccttattccttttggcttcagtcttttctttgtttggagtttttcttttctgagctacaggaatcctccctcttgcttccgatgtcagtttgtttcttgcggtgggtgcaggtgccgcaagacccacttcttcctggtttatttttttcactggagctttttcttgtgttttaattttcttagcaacttttgacttctcttttcgaagattgttaacaaggtttttaagtgatggcatatctttggcaagttctattagtttgtctagacaggcaacgccttggaactttttttccatcaaatctgtaatcttaattctgttgtattcctcttgcatttttgtagttagtcctaaatcataggccagtaaggacttaattgatgtaaaatgataatcatccatgagctcaaatcctttcagcaaaa

SEQ ID NO: 8043 - DNA, 549 bp, Homo sapiens
ctgttttcctgttggaaagagctctttgatggacccctttccatccacccttattaggtagtagtctctcttgaaacccacacagatagaattttcacaccacgccatggacttgggcacatctggcacactaaagtccccctgcaattcatgaaattccctgtccttccagaaatagagctgcagcttcttttttactgccacacacatccgtaacacctcctcaccggtctctgtgtgctggaggtcacaagtaaacagtgatgctccctttgcctttgaaaccgtagtgatttgttgaaatgtcaataggtcatggacataaatgttattttctgtttgggaggaggtataacatcaggatcaatgatcataattctctagcatagccactatcgaggcaaaaaaagtaactgtgttaacatctagaagaagcaaatggcagatgttggttgaagatgtcccttcagtttcactaggatgattcattctcacctataaccagtacaaagcatttaagaggtcacttggtcttctaaacttggatat

SEQ ID NO: 8044 - DNA, 444 bp, Homo sapiens
ccagttttgaggatcagaggaagaaaggcttcctctgtgacattactttaatcgtggagaatgtacatttccgggcccacaaagccttacttgctgccagtagtgaatacttctcaatgatgtttgcagaagagggggaaatcggccaatccatttatatgctggaaggcatggttgcagacacctttggtatcctgctggaatttatctacacaggttatctccatgccagtgagaaaagtacagaacaaatcctggctactgctcagttcttaaaagtctatgacctggtaaaggcttacacagacttccaaaataatcatagctccccaaagccaacaactttgaacactgctggtgccccagtggttgttatctctaataagaaaaacgatcctccaaagcggaaacggggaagaccaaaaaaagtcaatacattgcagg

SEQ ID NO: 8045 - DNA, 258 bp, Homo sapiens
  misc_feature (1)...(258): n = g, a, c or t
gaagaggcagaataaaccaagcctgggacacctccctcctgtctaggtgtactcattcttctgtttcaaaagaaggcaaggacatgaagtcaacttctacctatcttctgctgctggtgtcttatgtattctcagtttgacctgattcctcttctgtcttttgacttaacattaggggttcttggtcataacctgctctgatgtacataaagatttcaggttcaatatcaatgtgtcttaaaacagaagtattttanc

SEQ ID NO: 8046 - DNA, 496 bp, Homo sapiens
gaaatttttccttaagtgtctggtgatccctggatttctgctcataattaaggaaaagaatgctgactcactggacccaggcagggcttctctcccagattgcaggcttgcctcggggatacacgggtttcccaaatgctagaatgaaaagagattttattttggcttgctaacatcaaagatactagtttctccagatggtttattcagaacactgttgtcttatttttatttgtctgagattaaatgtcttcccctttaattaaagggaggtctctgatgaagtaggtttgggaactgctaccttggtgacagcttgagtctttcctttagtgaagtgcagcacaattccacgtgctcggtgaccttctcttgattagggtgccttggaatgtacagaacctaacttgaatatacagcactggtttcttggataagaagtgtacagtgatctaaacttgcaaaccaaaatacagagatgatgggaccaaaaatt

SEQ ID NO: 8047 - DNA, 605 bp, Homo sapiens
  misc_feature (1)...(605): n = g, a, c or t
ctgggaagccacgagaatattgtgaacctgctgggggcgtgcacactgtcaggaccaatttacttgatttttgaatactgttgctatggtgatcttctcaactatctaagaagtaaaagagaaaaatttcacaggacttggacagagattttcaaggaacacaatttcagtttttaccccactttccaatcacatccaaattccagcatgcctggttcaagagaagttcagatacacccggactcggatcaaatctcagggcttcatgggaattcatttcactctgaagatgaaattgaatatgaaaaccaaaaaaggctggaagaagaggaggacttgaatgtgcttacatttgaagatcttctttgctttgcatatcaagttgccaaaggaatggaatttctggaatttaagtcgtgtgttcacagagacctggccgccaggaacgtgcttgtcacccacgggaaagtggtgaagatatgtgactttggattggctcgatatatcatgagtgattccaactatgttgtcaggggcaatgncccgtctgcctgtaaaatggatggcccccgaaagcctgtttgaaggcatntacaccattaaga

SEQ ID NO: 8048 - DNA, 341 bp, Homo sapiens
  misc_feature (1)...(341): n = g, a, c or t
cctgtttgattgtagctatgttggtgtatctcgtgtacaagatggaaaagtgcttttgttgttctacctgatccagttgggggagcaggaatagggggtgcctgcctaacggcctctagcccatgtgcttatactgggatctgtcccgagggatctgcacctggttggcagtcattttgtggtggacgtggtaaatcgcgagtgttaccatgatgacgaggcccaagatgagccccaaaatcaggggcaaggtttcttccagttgctcccgctcatccactgggcatttatgctcttnactgaanacaaaatctgagntaatgtcaaaaggttggatgtgg

SEQ ID NO: 8049 - DNA, 390 bp, Homo sapiens
ccttggatgcagatcaatgctccaataaagttcattatcagctcctcctgccttgtgacaggatgatttgattttacaaaagtccctttgaaaacaagagtaaacgcagacagcttctagagaaaagtctggtgaagcagcagttgataatagattttcttttagtgatgaaattaatcttgttttggtaatctacagcctgttagggataggtggagggatgaagtccttaaaactaaattgttcctctacgaatcttcgacctgagcctgcggagagagtagccccaaatccatctctctgctgaaaggtcgcctgttttggtaggtgtgaggacattccgaaacacggccatccacattctgatacatcgcttcttctgcatctgcc

SEQ ID NO: 8050 - DNA, 630 bp, Homo sapiens
  misc_feature (1)...(630): n = g, a, c or t
cctctggcctcctgttcgcctcctctacaatttgccattgtttctcctgggttaggccccggcttcactggttgagtgttgctctctagtttccagaggcttaatcacaccgtcctccacgccatttccttttccttcaagcctagcccttctctcatcatttctctctgaccctctccccactgctcatttggatcccaggggagtgttcagggccagccctggctggcatggagggtgaggctgggtgtctggaagcatggagcatgggactgttcttttacaagacaggaccctgggaccacagagggcaggaacttgcacaaaatcacacagccaagccaatcaaggatggatgcagatccagaggtttctggcagccagtacctcctgccccatgctgcccgcttctcaccctatgtgggtggggccacagactcacatcctgaccttgcacaaacagcccctctggacacagccccatgtacacggcctcaagggatgtctcacatcctctgtctatttgagacttagaaaaatcctacaaggctggcagtgacagaactaagatgatcatctccagtttatagaccagnaaccagagctcananaggctagatgattgattac

SEQ ID NO: 8051 - DNA, 553 bp, Homo sapiens
attgctctttttcagctttatttttaagagtacagtcaggaaaccaacaaggggcctaagagtggctgcccctgcttgggacattacagcaagtgaaacaaagttaatgtgacaagctttgctttgttatcattggtcttcactagaggataccttttacatgtacttctctcttggatcaaatatgtctttaactgtacatctcagtggctggaggccatgccttttaagcatgtgtaaaatttttaaagaaatgaacatacacatagttattttagtaatatttcctgaaagaaaaaccaaattctgctataagtcttgatcttcaatgaacttttaaataatgcatttagctggaaaacaagactttcccagcttgtattacctagaagcgtgaatgtataggatacctgactactaagactatattctcagccctgccctgtcttttatttgcgggtctaatctaatattagaatatattaaccgcttaaggcattgaagccatatgggatggggaatgcatttcttcagtgtttctccgagagacttt

SEQ ID NO: 8052 - DNA, 317 bp, Homo sapiens
ctgtgttggactcagggttcagagctgccagcttggggtacctgggagggcacagcactgcctccagaaattcctcaatcttgttggtgtctgtgtgcacttcagtgccatacagcaggaatgggagctgcccccctgggcacagcttctgcactgtctcggtccgccttttggtgtcaacggtggtaacattgaaggtgactcccttgagccacagtaccatgaacagtctctgggagaatgggcagttcccaatcttggccccatcactgccagccttcacgaacaattcgacctgcggttgttcttcagccatg

SEQ ID NO: 8053 - DNA, 386 bp, Homo sapiens
  misc_feature (1)...(386): n = g, a, c or t
cgagcggccgnccggcaggtccaagatggttggggcataccttggttttatacattttagggagacataagacattaatcaatatatgtaagaagaacattggttcagtggggagggagcttccaggtcacagataggtgagacacaaacagttgcattcttttgagtttctgattagcctttccaaaggaggcaatcagatatgtatctatctcagtgagcagagagataactttgaatagagtgggaggtgggtttgccctaagaagtttccctaagcttgagttttccttagtgattctggggccccaagatattttcctgtcacagttgacatccccaacacagtgtttagggctcagaaaaagatncccctaaaatagggt

SEQ ID NO: 8054 - DNA, 414 bp, Homo sapiens
  misc_feature (1)...(414): n = g, a, c or t
ggatctgggagtnncttcctaacggaaatggaacaggattaccaactagtagacgaaagtgatgctttccatgacaaccttaggtctcttgacaggaatctgccctcagacagccaggacttgggtcaacatggattagaagaggattttatgttataaaagaggattttcccaccttgacaccaggcaatgtanttagcntattttatgnaccatggttatatgattaatcttgggacaaagaattttatagaaatttttaaacatctgaaaaagaagcttaagttttatcatccttttttttctcatgaattcttaaaggattatgctttaatgctgntatctatcttattgntcttgaaaatacctgcattttttggtatcatgttcaaccnacatcattatgaaattaat

SEQ ID NO: 8055 - DNA, 367 bp, Homo sapiens
  misc_feature (1)...(367): n = g, a, c or t
ccaaatgggagagtggttacaacacacgagctacaaactacaatgctggagacagaagcactgattatgggatatttcagatcaatagccgctactggtgtaatgatggcaaaaccccaggagcagttaatgcctgtcatttatcctgcagtgctttgctgcaagataacatcgctgatgctgtagcttgtgcaaagagggttgtccgtgatccacaaggcattagagcatgggtggcatggagaaatcgttgtcaaaacagagatgtccgtcagtatgttcaaggttgtggagtgtaactccagaattttccttcttcagctcattttgnctctctcacattaagggagtaggaattaantgaaag

SEQ ID NO: 8056 - DNA, 513 bp, Homo sapiens
ccaagggaaactgtctggattggattgtcgaggttttcgcttttgtaaagcttgacccataatgtaggaaggtattcagaggaagtgatcacatttccacttaaatcaaattgattaatctgccggaaaactatgatgtttacatcatcgatgtcattattcccaacctcaatcaccctatggtgggggagcgcccgctcaatgtggtcgttgccttctgccttgagctgaacgtggtacacacatcccggcagcaatccacgtaatctgaacttgccctcttcgtctgtcacggtgtcttctccgtaaatgctgcagtcgttctggcccaccgcttccatggcaaccccttgttcgggctctccgtttaaggaagacactgtgccatagcaactgtaagcggttcggtaccccgtgatggtgatcttcaggttctggccttcctgcacctcgatcatctgtgaggatggctcaaaccggaactccttcatcatgggtttgaagtaatactgg

SEQ ID NO: 8057 - DNA, 452 bp, Homo sapiens
  misc_feature (1)...(452): n = g, a, c or t
ctggtgaactgaatgngagtcacctntnttccagttgctttttcttttttatttacaatgntcaatttctgaatgatgtaatctggacatcttttgngctggttgatctttacaacaacatntccaaaagcccgagtgccctcttccattgacggccagnattctgcacacttgntcctgtttccttcttcacatcgagtgaccatgacaataactgtggctttctgttcccaaatcatcctccagaaatcatcaacagtttcatccctgggaccttgtgcagcaatgtatttcctgggttctttgaaaccatcaatatagctggcatttatgtagtttgaccctgcatctccgtttatctcananagttcaacacggttataatcataaggaagaatgtcaacataacggtttttattctggttaaagggctttcgagcttcctttatagg

SEQ ID NO: 8058 - DNA, 190 bp, Homo sapiens
  misc_feature (1)...(190): n = g, a, c or t
ctgggacnacnggcaccnnccaccatgcctggctaaatttttgtatttttagtagagacagggtttcactgtgttaaccaggatagtctcaatctcctgacctcatgatccgcctgctttggcctcccaaagtgctgcaattacaggcgtgagccactgcgcccagcccaaagtggttaatattaatatg

SEQ ID NO: 8059 - DNA, 328 bp, Homo sapiens
ccaggaagccggccagttgagttagaaaacatctctctttgaggtttacgaactgctgtttgttctctgccaactgggggcgcaatttctcgttgatttctagaatgttcatctctgccttctcgttggaccaagggccggctgataccaccatgctgacgtttgtggcagaagaggtggagtcagggacttactgttgtgaaaaatgtgatcactcccacagcactttaggatccttcaccacaaaaacaaggttcgaggtgcctcaactcagagctgaaagcactgccagtagctcagactctgataagagtgaggtagattgtgg

SEQ ID NO: 8060 - DNA, 294 bp, Homo sapiens
ctgggcggatagcaccggacatattttggaatggatgaggtctggcaccctgagcagtccagcgaggacttggtcttagttgagcaatttggctaggaggatagtatgcagcacggttctgagtctgtgggatagctgccatgaagtaacctgaaggaggtgctggctggtaggggttgattacagggttgggaacagctcgtacacttgccattctctgcatatactggttagtgaggtgagcctggcgctcttctttgcgctgagctaaagctacatacaatggctttgtgg

SEQ ID NO: 8061 - DNA, 549 bp, Homo sapiens
ctgccaaaatgtctacaggtccaactgctgccactggcagtaatcgaagacttcagcagacacaaaatcaagtagatgaggtggtggacataatgcgagttaacgtggacaaggttctggaaagagaccagaagctctctgagttagacgaccgtgcagacgcactgcaggcaggcgcttctcaatttgaaacgagcgcagccaagttgaagaggaaatattggtggaagaattgcaagatgtgggcaatcgggattactgttctggttatcttcatcatcatcatcatcgtgtgggttgtctcttcatgaagaaccagcggaactcaaaactgctgttcaagaaacctcttcaagacttttgacttagaacctgctatattatcaagcttacctactgttatctctaaaattttttttgtgttaatgtaaagttgaatttctaggaaacgtgcctttgttttttaatatgcactccaaattagaaggccggccccgtccacattttgcacagtgcctttacagatttacgtatgggctgatgaagagg

SEQ ID NO: 8062 - DNA, 515 bp, Homo sapiens
aagtcaaagcaggagagtaattatgaatagcgcagcgggattctcacacctagaccgtcgcgagcgggttctcaagttaggggagagtttcgagaagcagccgcgctgcgccttccacactgtgcgctatgacttcaaacctgcttctattgacacttcttctgaaggataccttgaggttggcgaaggtgaacaggtgaccataactctgccaaatatagaaggttcaactccaccagtaactgttttcaaaggttcaaaaaaaccttacttaaaagaatgcattttgattattaaccatgatactggagaatgtcggctagaaaaactcagcagcaacatcactgtaaaaaaaacaagagttgaaggaagcagtaaaattcagtatcgtaaagaacaacagcaacaacaaatgtggaattcagccaggactcccaatcttgtaaaacattctccatctgaagataagatgtccccagcatctccaatagatgatatcgaaagagaactgaagg

SEQ ID NO: 8063 - DNA, 457 bp, Homo sapiens
  misc_feature (1)...(457): n = g, a, c or t
cctttgaaaggtaagttctggcaggaggaacagtgtatctgtggcaactttgtttttccttattccattttatgaagactcagttctaaatgtcagccatgttaggaacttcataaatggagctatttttggtcattactatggaaggacctcttttctaagaagccataaagaaaagttgcaagttagtcacagaagttttggattgcctgtagatttctttatgataggaaattagtgagttaatattctgtttattttctgacacagatttttctttgataaataaaagactcttattcattaagatcagcttcttgttctgtttttcttggagtaaataactgtgaatttgggtagattgattttactttgttcagtttcctctgtaaaatgaggattttgaactgtatagtcaaatatactctattcattgntgaagtaagaaatcttatgc

SEQ ID NO: 8064 - DNA, 193 bp, Homo sapiens
  misc_feature (1)...(193): n = g, a, c or t
tcatcaatggagaaacagagtctgagtggggttaaagaacgggcttcccaatgtcacacagtggtgctagaatttgaagcaaagtacgtcagattctaaagccacaatctttctacactttcaccccaaaatgaggagtaagaatgaaagtgacactgtggatttaaggaagataatagaaagtntattanaa

SEQ ID NO: 8065 - DNA, 447 bp, Homo sapiens
ctgttggagacccctgaatcttgggctaaagagactttccttacccagaagctccgtgtacctgccaaatggatccacgaggccaaagctgtgcgagcacacatggaatctgacaagcacttagaggccctttgcttatttaaggctgagcactggaaccgctgccacaagctcatcatccgacacttagcttctgatgccatcattaatgagaactatgactacctgaaggggttcttggaagacctggcacctccagagcgcagcagcctaattcaggattgggaaacatctgggcttgtttacctggactatattagagtcattgaaatgctccgccatatacagcaggtggattgctcaggtaatgacctggagcagttacacatcaaagtgacttcactgtgcagtcggatagagcagattcagtgttacagtgctaaagat

SEQ ID NO: 8066 - DNA, 145 bp, Homo sapiens
gtggcttctggactgcgcgatgactggacgcaagtaacttctaggtctgcagacaagaggaagagaagatgaaggaagactgtctgccgagttctcacgtgcccatcagtgacagcaagtccattcagaagtcggagctcttagg

SEQ ID NO: 8067 - DNA, 436 bp, Homo sapiens
  misc_feature (1)...(436): n = g, a, c or t
ctggctaaagntcaanaaaatactattgcttctttaagaaatgctgctagtcatggtgcagcctttgtagaatttgacgtacacctttcaaaggactttgtgcccgtggtatatcatgatcttacctgttgtttgactatgaaaaagaaatttgatgctgatacagttgaattatttgaaattncagnaaaagaattaacatttgaccaactncagttgttaaagctcactcatgtgactgcactgaaatctaaggatcgaaaagaatctgtggttcaggaggaaaattccttttcanaaaatcagccatttccttctcttaagatggttttagagtctttgccanaagatgtagggtttaacattgaaataaaatggatctgccagcaaagggatggaatgtggggatggtaacttatcaacatattttgacatg

SEQ ID NO: 8068 - DNA, 454 bp, Homo sapiens
ccaacacccacttctctggttgtataagacagggacctaaaaagggaaaggatgggaggaggatcatcctgcagtgatcatgtagggcttcatgctataaatggttttgcatttccggagatgaaacaagtctcttcaccacagaactactgcagatcatagccctatggtctggctggttttgtcaatctggcagttcagggtcagtgcaaaggacatccccaacacctcaatcacacatacacagatggtgatgattccgatatacaggaaattggaatgaagccacagtcttgctttcgcatagcaaccctccacttttcgatctgaggggcaagatgctggtgggccactggtccaatcactcgtgccatttataccacaacactgcagaaatgactggatggagtcccacgctgccttggtgctattgtctgagtggtaacggtggatg

SEQ ID NO: 8069 - DNA, 449 bp, Homo sapiens
ctggagagtgtagatcccaaaaattacccaaagaagaagatggaaaagcgatttgtcttcaacaagatagaaatcaataacaagctggaatttgagtctgcccagttccccaactagtacatcagcacctctcaagcagaaaacatgcccgtcttcctgggagggaccaaaggcggccaggatataactgacttcaccatgcaatttgtgtcttcctaaagagagctgtacccagagagtcctgtgctgaatgtggactcaatccctagggctggcagaaagggaacagaaaggtttttgagtacggctatagcctggactttcctgttgtctacaccaatgcccaactgcctgccttagggtagtgctaagaggatctcctgtccatcagccaggacagtcagctctctcctttcagggccaatccccagcccttttgttgagccagg

SEQ ID NO: 8070 - DNA, 513 bp, Homo sapiens
  misc_feature (1)...(513): n = g, a, c or t
gtgttagtggttacccagttagctctcaagttatcagggtattccagagtggggatatgatttaaatcagccgtgtaaccatggacccaaaatttaccagaccacaaaacttttctaatactctaccctcttagaaaaaccaccaccatcaccagacaggtgcgaaaggatgaaagtgaccatgttttgtttacggttttccaggtttaagctgttactgtcttcagtaagccgtgattttcattgctgggcttgtctgtagattttagaccctattgctgcttgaggcaactcatcttaggttggcaaaaaggcaggatggccgggcgcggtggctcacgcctgtaatcctancactttgggaggccaaggtgggaggattgcttgagctcaggagtttgagaccaacctgggtaacatagtgagacaccatctctattatgaacaataacagttaagaaaaaaaaaggcaggcaggcggttatggtggttccctcccatcccaccacataa

SEQ ID NO: 8071 - DNA, 447 bp, Homo sapiens
ccagcagaacacagagtggattttggtcccgtttgttccccagtggggtatctatccttgtgcagggcacaagcctacatggtggctctggtcatatcattagaaaatagacagaaatgggctgcacaccagaatgaatgaattgaattgaaagggaggagtgatggtggaaaaaaaaaacaagtcaattcatttagactggtagaaccagaaccactgtgtagtacatccaaacggttaaaattccctggaagatgttacataatcctatcatggtgtttatttatggaaatctattttaaaaattttatgtaatactgcacagtctgtttgcatgatgtcttgtacgtagtagcaactcagtaaatactttttgaatgaactagtatagtattttaattagctagtcttcatgtactggtacaaaagaacagtgtcatcttacag

SEQ ID NO: 8072 - DNA, 442 bp, Homo sapiens
ccaatgtctgttaaccattaactctcttcatgattgcaccagttagaccatttgccctgatggggggaaaaagaagaagaaaaaacaaaatagaagaaaaaaagtgacaagagaaagcaagctgctaatggccgatcccaacacactttctgggagacagtagatgaaatcacagcacagtgaacacatgctgcctaaaatcagccttgttggggagtaatcccaactgccacccccaagacacagggtccagtccacttatctatagtctgagatgttcaccaacaaaaatggattaaagaatcttggacacaaagggccagaagaaaaagcctgagatgatcggttctgtgatttgttgcagagtgataaagagtaaatggtgagtaagtgttgtgtccaaaggtggagactccatagtcggcagacaggagagggatgg

SEQ ID NO: 8073 - DNA, 595 bp, Homo sapiens
  misc_feature (1)...(595): n = g, a, c or t
cctcctcgaccaaggcagggaacttcaatctgtataagtatctgcagttgctggaataatttgaagaccccatggagctaaggagattaagtggaggattttcattgtttcagaggggcaaggggcaaatccattgctaattctttaatgatgaaaaatggtaagaagttgttaaactcctttggggattttaaaaagtgatacgtaaacagaagagagagagagagagagaaatcacagtagtgaggctaacaaaaataatgataaaaaggttagaagaacccaggatacttagtggatgcctagacaacataaaaatagatttatagaaggaagcaatggaatttgaatataaaagggtatcagaaagttaatgtgttgcatctgaaattcaaagtatttccttttggctacacaagaaagacttttaataaaaccctttgtatatatttctgaaaggnaaatattttatagggaaatggaggattggaagaaaatctgttccatcatgtctgggtattagaattttgcttaataacttgccaaaatattacgcttccaagggctatggcattatgtgtgtacccaattaaag

SEQ ID NO: 8074 - DNA, 231 bp, Homo sapiens
gaaaaacaagatggagatccagggcaaccccaaataccgcgccctctctgagcaaggcgtctgcaccctagagatccggaaaccctgcccctttgattctggggtctacacctgcaaggccataaatgtgctgggggaggcatctgtggactgccggctggaggtcaaagcctcagccgcacactgaagagtcacgggaggaggctgtgatgaggagccaggtgctgcagg

SEQ ID NO: 8075 - DNA, 291 bp, Homo sapiens
cctgttctggaaatggcaggtcacagcagcgggcagtcatgttgtggatcagcccaggaatatgtttatgcttggtgagaactctttggtttccacagaggtggcccatgaggttgggggtgactcgaccgatgtcaatggtcaagatgtcccggtcatagttggggtaaggagcccgacgggcaaagcactcatcccgagtagggctgggagggtggcggcaacacaagtggtggtgggtcttcacagcatactcccggtcacagtatttgtcaagggtatcctcccagg

SEQ ID NO: 8076 - DNA, 504 bp, Homo sapiens
  misc_feature (1)...(504): n = g, a, c or t
ccacatcttcgaacaccgggtcaccagtgaggctgctcagggtggcaaattcaacaatgaaggtcccaatccctgccgtacaggtgacaggggtctctcctgggttcacgccatgaagtaagttcactgttccatatggcatgccagtgggggtctgaaaggctgggaggagttttcgggccgcctcctcagccattctcaggagaggcccggaacagggccatccagcctctacttccaccccagccttcttggagagcagatgagcagacaggagtcctcctaccactcgaatgtttgtttcaaacacagaggcgttcacatcaatatcaaagtccacgctgtcctggagcacttcaaccactctttggaattctgagacattccccaaaatcagcaaggtgtccagtgcatcaattagagtcagagaaaaactgccccaggtgtcgtgcccgtcacaggtgagaggtcgcagctcatcgaagggaaaggcatnctccaggt

SEQ ID NO: 8077 - DNA, 427 bp, Homo sapiens
  misc_feature (1)...(427): n = g, a, c or t
ccagggggaattgagggaggctctaagctaggggcactgcatggtgggacaggatggccccttgaggactgaaccctggggagaagacaaacagtaataataaaaacaaataacaagtactttaagaatggattgtatgacctatagtgacagatgacatcactaatactgaaagcttcttatattaataattttggcaaaatgtcattttgtaatatagtatatgctttccaggtgtgggggtggtaaagtaatgaggccaaaatcatcctgccccaagactaatatcttctaatggtgcattancaaggaaggcagaaatcaatatttagatatcagtagagtacataatnctgtagaaagaagaagagcacacatgagacaganaaggaggtggatgctcctgngttgagancaaggngtgggg

SEQ ID NO: 8078 - DNA, 370 bp, Homo sapiens
ctggcagaccccccaaccacatcagaggagttttcatttcttcctgggctgcttatctgggaagccttcaaagaattcgttacacatcatggcgatgcaggacaggaagacacagtactcttggaagtccacctcgttgtccctgttgctgtccaagttgctcatcagcttctggaaagcagcttcatctgtccttttccccaagaagctgggcagctcccgggtcagcagctcctttagttctgacttgttgagcttgaacttgtcaccctctttgcccgagtacttgtggaaggtggacaccatcacatccagggccttctccagagggcacgccatgacagcagtcaggatcaaaccaagaaagaag

SEQ ID NO: 8079 - DNA, 582 bp, Homo sapiens
tagtaaaataattttatttagtttcttattttaaaaaaggtagcatttcaacatataaatttagactcaagattacagtgtatatttgccaaaaggaacaccccgaaagacggccagcctcagagctgagagggcacagggaggcacactcctcacacatggagtttaagcagaagtgctttaagacttcacagcggcatttccctgttcctcagccccgcctccagggccatcactttggggcaacagcttttgctcatgtaactataaaacatctctaggaatgaaagcacagaggtcaatgatccagattttccacaacaatcatctgcagcaacaattcgacaggtaaagattttatttttataattcaaaagttcttttaaggagaactaaagaacacaaaattcatttataaagagaatttatagaattaaatgagcaaaaatgaaaaattattttctccatattacaaatgcctctataggataaggcccaggggaaagacccattcaaatctgggctttcctttcccaaataaagtgtttggcacaaccaacaaactgtcatgagactgacagg

SEQ ID NO: 8080 - DNA, 604 bp, Homo sapiens
ctgcaccattttgcattctcgctagcaatgtgcaaggattacagttttttcacatcctcgccaacacttgtcttttgtctcttcaacaaatggtgttgggaaaacaatacccacattcgaaagaatgaaattggacccttatcttatgtcatacacaaaaatgaactcaaaatggatcaatgacttaaatgtatgacccaaaactgtaaaactcctaagaaaaaaaaacaggagaaaagctctatgacgttgatcttggcagtgacttcatggatatgacaccaaaagcacaggcaacagaaacaaaaataagtaagtgggactacatcaaactaaaaagcttctgcacagcaaagaaaacaatcaacagagtgaaaaaaacaacctacaaaatgtaagaaaatatttgcaagtcatatgtctgaaaagtagttaatatccaaaatatataaggaactcctacaacacaatggtaaaaataaatgaacaatttgattacaaaatgggccaaggacttgaatagacatttctccaaagaagacataagaatgccaacagctatatgaaaaaatgcttggccgggcccagtggctcacccctgtaa

SEQ ID NO: 8081 - DNA, 151 bp, Homo sapiens
ctgcaagaggaggcccacctcaacacctcctttaagcactttattttctttgttcaggagtttaatctgattgataggcgtgagctggcacctcttcaagaattaatagagaaacttggatcaaaagacagataaatgtttcttctagaac

SEQ ID NO: 8082 - DNA, 482 bp, Homo sapiens
  misc_feature (1)...(482): n = g, a, c or t
ctgtggcgagtccgtcctttctttattctggcaggcttnggtttggggatgtactgattatttgcctggtactcgagttctttacggaagtagtgaattgctttgtttaaaccttcctccagcgggaccacgggctcccaccccagcatcagctttgcttttttgatgtctggttttcttttctgtgggtcatcctgggcttcggagagaaactgaatttcacttccgctaccaacaaggtttttaattaactgagcaaattctaggattgtgtgttcttctgggttccccaggttgaccgggctgctgacgttgctgttcatgagagccacgaggccattcactagatcgctgacgtactggaacgcccttgtctgagacccggatccgtataccgtgagtggctccccctggagcgcctgcaggatgaagttgctgactactcgcccatcgttcatgtgcatgcgtggcccaaaggngtt

SEQ ID NO: 8083 - DNA, 558 bp, Homo sapiens
ttctgctctgtgagttaccacacccaggattcctcctgatcccagagaaatcggatctgcgaacagtggcaccagcctctagtctcaatgtgaggtttgactccaggacgatgaatttaagctgggactgccaagaaaacacaaccttcagcaagtgtttcttaactgacaagaagaacagagtcgtggaacccaggctcagtaacaacgaatgttcgtgcacatttcgtgaaatttgtctgcatgaaggagtcacatttgaggttcacgtgaatactagtcaaagaggatttcaacagaaactgctttatccaaattcaggaagggagggtaccgctgctcagaatttctcctgtttcatctacaatgcggatttaatgaactgtacctgggcgaggggtccgacggccccccgtgacgtccagtattttttgtacatacgaaactcaaagagaaggagggagatccggtgtccttattacatacaagactcaggaacccatgtgggatgtcacctggataacctgtcaggattaacgtctcgcaattactttctgg

SEQ ID NO: 8084 - DNA, 373 bp, Homo sapiens
cctgagctcatcctgagctagtgatgccagtgtccagagcacatggagtgaccctctgagtgccgagtgcttaggcagagctgccgtgctctgaacttgagctctggtggggctcccagctccatcatgcatggtgactaggggaaagatggggctggcccaggactcatgctgaaagagaaattcaatctaacaaggcccatattaattatattaacccgggaaatatgatgatgagcaagaaaggagcttatgattcattttatgagaaggataagctcccaagtcattacagcataggaagaactctagagccacaagagatgcttcctgatgtcagggggttggtgaggagaatatcatgccaagctgg

SEQ ID NO: 8085 - DNA, 610 bp, Homo sapiens
ctgggaagccacgagaatattgtgaacctgctgggggcgtgcacactgtcaggaccaatttacttgatttttgaatactgttgctatggtgatcttctcaactatctaagaagtaaaagagaaaaatttcacaggacttggacagagattttcaaggaacacaatttcagtttttaccccactttccaatcacatccaaattccagcatgcctggttcaagagaagttcagatacacccggactcggatcaaatctcagggcttcatgggaattcatttcactctgaagatgaaattgaatatgaaaaccaaaaaaggctggaagaagaggaggacttgaatgtgcttacatttgaagatcttctttgctttgcatatcaagttgccaaaggaatggaatttctggaatttaagtcgtgtgttcacagagacctggccgccaggaacgtgcttgtcacccacgggaaagtggtgaagatatgtgactttggattggctcgatatatcatgagtgattccaactatgttgtcaggggcaatgcccgtctgcctgtaaaatggatggcccccgaaagcctgtttgaaggcatctacaccattaagagtgatg

SEQ ID NO: 8086 - DNA, 468 bp, Homo sapiens
ctgcagtggaggcggcggtgggaaagcctggcccacacacgtggtctgtagcgacagcggcttggaagtgctctaccagagttgcgatccattacaagattttggcttttctgttgaaaagtgttccaagcaattaaaatcaaatatcaacattagatttggaattattctgagagaggacatcaaagagctttttcttgacctagctctcatgtctcaaggctcatctgttttgaatttctcctatcccatctgtgaggcggctctgcccaagttttctttctgtggaagaaggaaaagagagcagatttactatgctgggcctgtcaataatcctgaatttactattcctcagggagaataccaggttttgctggaactgtacactgaaaaacggtccaccgtggcctgtgccaatgctactatcatgtgctcctgactgtggcctgtagcaaaaatcacagccag

SEQ ID NO: 8087 - DNA, 387 bp, Homo sapiens
ccaggttgggatgcagagaaaaacaggcaggagggtgtcaatctatagcatcctgaaccccaaaaggtctgtaactggattctctaagccttgagaagttcagaccaaagcttcagaccagggaaaatattttggaaagatcagtctttccaagattgagctcctttccaagaagctggacaggaaacccaataaatgtggatctgaaaaaacaaaatccaagagagaagcaaaatgggctgggggtgtgcaataagagaagcaaggaaaatggaaagactgtagctgaggatcttttattaaaaaaaaatggatgggactttggtgatgagagagaaaaagggcaaaagtctgcagttaggaatttaggtgaccgaagactgtcct

SEQ ID NO: 8088 - DNA, 386 bp, Homo sapiens
ccaggctgaggttccagatctgttgccatcatggccccttcagggtcctgggaaattcctggcttctcctaaatcagggtgaactgggcctccaggatcaggtctggagcaggcccaaatatagtcctggatctgcctggattaggtgccaatgtctgagtctgggttccagatcaactccagaccccaggctggatctggccccatttgagttctgattccccttggagctgggctctgggccctgggccagcatctatccttgtgtggcatctgtcctgagctggtcctggggcaccatgcatagttagtgttctttgttggcccaccagggtggggctgtccagagctgccaggtcttaactccccaagttccaggttcttag

SEQ ID NO: 8089 - DNA, 560 bp, Homo sapiens
tcgagcggccgcccgacaggtccacactctacttctgcttctgccacctatggggtcgaggcaggtgtggtgccttggctaagtccacagacttctgagaggcccacgctttcttcttctccagaaataaaccctgaaactcaagcagctttaatcagagggcaggattccacgatagcagcatcagaacagcaagtggcagcgagaattcttgattccaatgatcaggcaacagtaaaccctgtggaatttaatactgaggttgcaacaccaccattttcccttctggagacttctaatgaaacagatttcctgattggcattaatgaagagtcagtggaaggcacggcaatctatttaccaggacctgatcgctgcaaaatgaacccgtgccttaacggaggcacctgttatcctactgaaacttcctacgtatgcacctgtgtgccaggatacagcggagaccagtgtgaacttgattttgatgaatgtcactctaatccctgtcgtaatggagccacttgtgttgatggttttaacacattcaggtgcctctgcct

SEQ ID NO: 8090 - DNA, 337 bp, Homo sapiens; identical to SEQ ID NO: 7576

SEQ ID NO: 8091 - DNA, 604 bp, Homo sapiens
cctacaccccagcaaccatgtccaagggacctgcagttggtattgatcttggcaccacctactcttgtgtgggtgttttccagcacggaaaagtcgagataattgccaatgatcagggaaaccgaaccactccaagctatgtcgcctttacggacactgaacggttgatcggtgatgccgcaaagaatcaagttgcaatgaaccccaccaacacagtttttgatgccaaacgtctgattggacgcagatttgatgatgctgttgtccagtctgatatgaaacattggccctttatggtggtgaatgatgctggcaggcccaaggtccaagtagaatacaagggagagaccaaaagcttctatccagaggaggtgtcttctatggttctgacaaagatgaaggaaattgcagaagcctaccttgggaagactgttaccaatgctgtggtcacagtgccagcttactttaatgactctcagcgtcaggctaccaaagatgctggaactattgctggtctcaatgtacttagaattattaatgagccaactgctgctgctattgcttacggcttagacaaaaaggttggagcagaaagaaacgtgct

SEQ ID NO: 8092 - DNA, 555 bp, Homo sapiens
cttcatcctaattgaggtgatacaaaatataagaatattccttcatcctggggcatcatgtggtcatctgagagctcatttgattacattaaaaatcgtgttccttagagagagagtgccagtatttagactttttgagtgtgaatcaggagggaaacacacatccattgacaagaagatggatataattatttttaaaaagagtgatttgatcctttggaggaaaataaattctggtggaccttctaagtaactgctagaatgattgggtaatgtatacagcttttgcttctccataaataatgtaagtattaaaaaggagattttaaactagaaggaaggaatctctggagtgagaggaaaagtttaattgtatttcagtatctatgtctatgaaaagttgatatacggtgtcactgtggtatacccaaacttgtttatacacatgtataaccagtacacagtaagtaccatgagtggcttttagtgattttatctttttaccttgtagtacagtctccctggtgtctcacaaggctagtttacttactttgg

SEQ ID NO: 8093 - DNA, 564 bp, Homo sapiens
  misc_feature (1)...(564): n = g, a, c or t
ccaatatgcctttggagcacagcctatggtttatgtttcttttatgaccacctttaatatctgtcaaacgactagacatgctatagctttacccgaaggtaatttgattgactgtgctctgctagaagatggtgtatgggtctctctcgaggtaactgccaataaatgataagtggtatttgttttagataatgcctctacctcagtggtagctttgataatggcaaattgtaattgcaagtgccattttcagaataggcattggtttattttaggaagaggataataaagttccttttagttatcaaagtaacaccttttattgttaaatctcaacttttgaagaaaacactttcaatttcttaactttttcctcagggttagtgagttagtacaactacccaaagaagtgttaaaatattgagattctatatgtgtgtgtttatatgtgcatctatgtattacgtatacaaaatatttcacctcaaaggactttttgaaaaggtaatctttggtctatagtacagtgttaagctcactgataatttanaatcattaagttcg

SEQ ID NO: 8094 - DNA, 556 bp, Homo sapiens
cctttgaggattggaataagacagagctagactcattcctgattgaaatcacagccaatattctcaagttccaagacaccgatggcaaacacctgctgccaaagatcagggacagcgtggggcagaagggcacagggaagtggaccgccatctccgccctggaatacggcgtacccgtcaccctcattggagaagctgtctttgctcggtgcttatcatctctgaaggatgagagaattcaagctagcaaaaagctgaagggtccccagaagttccagtttgatggtgataagaaatcattcctggaggacattcggaaggcactctacgcttccaagatcatctcttacgctcaaggctttatgctgctaaggcaggcagccaccgagtttggctggactctcaattatggtggcatcgccctgatgtggagagggggctgcatcattagaagtgtattcctaggaaagataaaggatgcatttgatcgaaacccggaacttcagaacctcctactggacgacttctttaagtcagacctcggcccgaccacgct

SEQ ID NO: 8095 - DNA, 212 bp, Homo sapiens
cctggctcctctttcatccttggtaaagagctctggggggtttccccagaggagcctgtccctctgccccaaatcctatcatgctcccttatgaccttctttccagaccccctgagtgccgatcccacctgtgaaaggggaggagcagatctggggaagggatatgcccagaggaaatcaacaagaccaaagagacgtcagagtcctgatgg

SEQ ID NO: 8096 - DNA, 566 bp, Homo sapiens
ccactgtgaaaaaacaaccccctcaaaacttcaggagaatgtatataataaatgaaggtacaatttcataccttcacaggattattgagaaggtcaaattacataacagatatgaaagcactgtgtaaactatgcggactatgctgcaccaaataactgtaaagaattattaactagactgtaaatgccttgagggcaaggaatgcatctgcaacgggtatttgtgaagtacttgacagtttgctaaggacttctgtggattttcctcatatgctactcataacaaccctggaaggtaaggggaattgttatcccaaattccaaataaagacactgcaggtcagacatcacacaggtggtaaatagcaattctggtacttactttagatattctgctacaggcttgctattcaaagtgtggtatgtagaccagcaacattgactctctgtgctatctttcttttttataaactcggaattatttcaaaataagaagtttctaacaaaagagattcagaagagtcaaacccttgggtgtgaaaaagttttaggaagactttcctgaa

SEQ ID NO: 8097 - DNA, 136 bp, Homo sapiens
  misc_feature (1)...(136): n = g, a, c or t
ccccccccttttttttttttnttttttttttttttcgcattcaacttaaangcttttattgacaatgtctnggaacnataagcaaacaatgcttaaatttttnattcaaattnactttccacatgtcaaaanacct

SEQ ID NO: 8098 - DNA, 431 bp, Homo sapiens
ccacttcacatgatggcgggcctttaagagcacaaagaagtttaatatggacaacaacaggaaaaagcaagaagaaaacaagtagggaaaaacagctaacctggagagaaagaatttctttaacctttatgttcttcattaaaaatcttatcttggactgatttgagggatttttagaaacatggccttattttatataagcattaccttcccaggaatctttgttgtatattaatttttgataaccatttgattaactttaaaattaagtatatgtgtgtatatatacatatgtatgtttatatacacacatgtatctgtatagttttatatatacatatatacacatagacatacagagaaccactactttgtaatagtgtacagtttgttttatatctctttactttttttgttactattttatctgg

SEQ ID NO: 8099 - DNA, 590 bp, Homo sapiens
gagctagactaagttggtcatgatgcagaagctactcaaatgcagtcggcttgtcctggctcttgccctcatcctggttctggaatcctcagttcaaggttatcctacgcagagagccaggtaccaatgggtgcgctgcaatccagacagtaattctgcaaactgccttgaagaaaaaggaccaatgttcgaactacttccaggtgaatccaacaagatcccccgtctgaggactgacctttttccaaagacgagaatccaggacttgaatcgtatcttcccactttctgaggactactctggatcaggcttcggctccggctccggctctggatcaggatctgggagtggcttcctaacggaaatggaacaggattaccaactagtagacgaaagtgatgctttccatgacaaccttaggtctcttgacaggaatctgccctcagacagccaggacttgggtcaacatggattagaagaggattttatgttataaaagaggattttcccaccttgacaccaggcaatgtagttagcatattttatgtaccatggttatatgattaatcttgggacaaagaattttatag

SEQ ID NO: 8100 - DNA, 601 bp, Homo sapiens
ccatcggtgctgaaattgagcattttaaatagtacagtaggctggtatacattaggaaatggactgcactggaggcaaatagaaaactaaagaaattagataggctggaaatgcttactttctgctctcattttctttcattttgtctgctgtctttttgaatgccaatactttcatttaaaatgttttgggagcacggcaacccaaaatgactgaacggtggtccaaaaatccaaaccaactgataattacttctcgaggtgataggaaaggcacaggaagttaggactttggctgaaatgatgaaaacacatgttcgccattttagggatcagcgcctcgactcctgccacctccggctccaacgatgatcatgtttggatgtatttattgaattgtcctttgctgatgaggaatttttaaagtatttcatagaataagtcctttggtatgcagatgctacatggaaggaaagaaagaaaaaaagaaaacacacaatattacttgctccataccctaaactgccgataccacagccgtaaaatgaaggtgtctagtagttgttatagcacggtagtccattctttctaaaggaccactt

SEQ ID NO: 8101 - DNA, 594 bp, Homo sapiens
  misc_feature (1)...(594): n = g, a, c or t
tctaaataagaaaataaataaataaaattccagctaggtacatattcttcttgggtacaaagctcaagtcaactatcaattacataattgtaatactattacttgaatcagccattaaaaaatgctctgaatttattagtaaagagctatgaagaagagtcatttgtaatatcatacaaaaaaaaacaaacaaacaaacaaaaaaaaacatgcttttaccaacctgggctgagaaaccacagaagaaaccaaaccagaaatgcacaagtgtaaatgcaaaattcttatagaagaaatagcataagaatttgtacattcggaaataagaccaccttccatgaacaaggagaagcctttggagatatctaaactgtgcaaatgaatagtcgctggctaagactgcttgcaatccttcctggccgctgatgccaacaccaatgtgagcacctacaaaggaaagaggaacactgtcactcccaaaacaaagccacgatctcttttggaaacttgncattcctcttttatttacggaaaacttacagccattgnaattataatttttcacatatattatctgatgaaacacttatgata

SEQ ID NO: 8102 - DNA, 428 bp, Homo sapiens
cctcagttttttctctgtgcatcaacagtctacatatcaagtttgatgagtacctctgaaaaaatatcctaacacttgcagcattggagtcatgctagaatcttttctgcaataaagtattttcacttcttttcttcttctcaatcttctcaatcacctgcccctagaatctgagtggtcctaacctagacctcttgctggccgagatttagacaatgtggttgtttttccttatcttgactaatcttcccgaatcttacattgtgccttaatttgcacatctgcacctctaatgtctgcctatattatctccttggctcacaaggaccttgtgggagagctgctcacatctcaacatgtaaataaaatgtgcctttgggtcaacacaggagaggtgattccaacgttaacaagttagtcaaggaaac

SEQ ID NO: 8103 - DNA, 401 bp, Homo sapiens
ctgaattggcaaagtaaggtttactacacaagcccctctttttcttctgatatccccactcaaatggaagcacactccccagcacatggggatcccttattaatctttactaaagaaccgtgaaccagcattttccagttatcaactggatatttaggcatgaatctggacatgtccatctgcttaagaaatctgcttaagaaatctgtaacagctacaggaaaagacacacccagggccagagattctacaaatgccagaagagtggatgtgatagagaattttttctcaagttttgggttagggcaccagttgcaattttaatccaggggaggatctgggctgctgctgtagggggcaagtacaccagggaggtgggtgtggacagaggcactgggcag

SEQ ID NO: 8104 - DNA, 530 bp, Homo sapiens
  misc_feature (1)...(530): n = g, a, c or t
cctcaggaaatgggtagaaatcacaggacaatctctcttcccaccaaaaaaaagttgcatattttggtaagtgtttgtcctagagggaaaaacaactgaaatttacattagcagtgctgtgcaagattcttacataattcaagacctaaaaccagcctgcagtggaggtttcagtcctctgttcaggtgcttagacagaagccataagctgatgagcatgacagggaaaaggaggcagtgaagacaggtgacaggcacctggcagggaagaaggattcaggaatgccagactccttgaaatcatgtgggttttttttttttttttccttttaaagtcatctntataggaaggtgctgggcagggatcccagagaaagaaagggtccaagactccattaactgccctggatgaagggcactgctacagcagctagtaccananactctcctatctcacggttgaggcagacccaggatagaatagagaataaaaggaatgcttataggaaacaattttgtatggaatgcta

SEQ ID NO: 8105 - DNA, 603 bp, Homo sapiens
cctcagtgtccaccctccacttccaacccaggaccataccaggtgaagtgagatatgaagaagcatatggtctctttgtacatctgcctcagaacttctttccatcttccaaaatggagagaaaacatgcctaaatggtgccagcatactagctggtaatgaccacattagaacagcattgctactttgacttagtgacttacattttgcttcagttcctcaaataagcattgcgtcttctatctctgacttttctgtcttttctcaatttcaatctgtcaaaacactactcgacctataagacctagtatgaatgttattagatattccctaataacctcagccagaagtggctatacattttttaatttctatatcttttgtttatttttttagaacaccgtatcatatgactattgatatatattattttcactatctgacagtggaatcctgagtacagggtaatgtttgatagatctctatataacctcacaatttaaagccatgattgcaataggggctcaataaaagtttattaaattgataaatttactgaattcctaaactattatacaatcagtgtatattttacacagtgaa

SEQ ID NO: 8106 - DNA, 111 bp, Homo sapiens
  misc_feature (1)...(111): n = g, a, c or t
ttttttttttnttttgggtnccnatnaaattttattaacaaaatatgacngtgggggggccacagtttgccaaactttgccttggaggacatgcanaggcaccctcaaaat

SEQ ID NO: 8107 - DNA, 392 bp, Homo sapiens
ctggcagatgcagaagaagcgatgtatcagaatgtggatggccgtgtttcggaatgtcctcacacctaccaaaacaggcgacctttcagcagagagatggatttggggctactctctccgcaggctcaggtcgaagattcgtagaggaacaatttagttttaaggacttcatccctccacctatccctaacaggctgtagattaccaaaacaagattaatttcatcactaaaagaaaatctattatcaactgctgcttcaccagacttttctctagaagctgtctgcgtttactcttgttttcaaagggacttttgtaaaatcaaatcatcctgtcacaaggcaggaggaactgataatgaactttattggagcattgatctgcatccaagg

SEQ ID NO: 8108 - DNA, 555 bp, Homo sapiens
ctggggcacgccgagggagcagttccttttgcaaagatgagttagtgcggatcagcacattagcaaagcaaaatatttaaacatttttaaaagctgctaatccttccaatttccctcctgattgtagctcaagctgcagcctctaaacctgctaaaaatcaggaagaaacccctcctctggagggcagatggactgaagtggctacagccagtgtgggtacggaaagcctcccgctgaactgtgatcatgtgacacctgcagaccctgggaagggctgatctgaatcctggcagcaaactcaacctcttcttttgcttggggggcttgtgtttaatacaggtcattgcgatggaagaagtctcagagtctctctcacatcaagaggacagatggggacagggatcctggagcttttcttctcctgtgttctggttgcatacttgaatcccaggaaacagtgtgacacggtgccaatttactgccaaacatgcccggtttgtcaacagagccagacaaggaggagaggagagattcatgccccaaacacaggccag

SEQ ID NO: 8109 - DNA, 608 bp, Homo sapiens
  misc_feature (1)...(608): n = g, a, c or t
cctggggctggtactaaaaggaaaaagaggaaagtgaatctgagagaggactgggaatatatttctccctcctcaagcaaacagcaaatcagcatatagttaccaagtgttcacctataatacacagctagaacattactttcagttgccaactggagaatccaggaggccagtggtattggtgaggccacacatacaaaaaagggccacagagaatgtcaagaagatgctgctttccaaagaaatttgagcaaaagctgaaactgaatttaaagtataagaagagctaggctcagaaaaagttgtactgtccccaagtcagcagagaaccaagccctcctaagagtatgttgtctgctacatagacttctgaaataacagtttgctttgtgtatgcctataattgaaactgtaactatttcaggaccaatttacttgatttttgaatactgntgctatggtgatcttctcaactatctaagaagtaaaagagaaaaatttcacaggacttggacagagattttcaaggaacacaatttcagtttttaccccactttccaatcacatccaaattccagcatgcctggttcaaganaagttcagataca

SEQ ID NO: 8110 - DNA, 328 bp, Homo sapiens
ctgtattcagaagagggcaaaggcgtgtttgactgcaggaagaacgtgctgggtcacatgcagcagggtggggcaccctctccatttgatagaaactttggaaccaaaatctctgccagagctatggagtggatcactgcaaaactcaaggaggcccggggcagaggaaaaaaatttaccaccgatgattccatttgtgtgctgggaataagcaaaagaaacgttatttttcaacctgtggcagagctgaagaagcaaacggattttgagcacaggattcccaaagaacagtggtggctcaagctacggcccctcatgaaaatcctgg

SEQ ID NO: 8111 - DNA, 569 bp, Homo sapiens
  misc_feature (1)...(569): n = g, a, c or t
cctcttggctctggagaaggcatccttagcatcctcttctgaagggtgatcataagccccaagttaattaaataggcccaatgtctgcctgctctttctgtattcccttcctgaatctagttcatgtcaacaaatgtgtactattattgtagaaaatcgaatgctctcatacttttaataggtttgcttcttggttaatatgcccaggtcaggaagtggcttatatttcaggagtgctctctaatacttattgcagatattcaagcatttattctctcacacacacgcacttaaaaaccgcacactacctcacactctgcaataatccgatagtatggtggtcatcatacccacatatatacatgataagatagaatgcattgcttaaatagcacataagtcatctataatcctccacaccctgtaataccagtagcacaatggttttctatttggaggttgccaggagcactcaaaagtaagcttctggctcctacaacaacacatccaactgccttggggacaacatgattgncatccttctagtacacactcagtccaaggccagg

SEQ ID NO: 8112 - DNA, 348 bp, Homo sapiens
ctgcataccgctgggtacaggagaaagttcctggaataccaccgccctccaggagctttgcatacctgcgggggcccgggggcattccacctcatcgtgcacctgaaggcgggagatgcagtcaacgtcgtggtgactgggggcaagctggctcacacagactttgatgaaatgtactccacatttagtggggttttcttatatcctttcctttcccacctctaaggtggctggggagatgtcaggggaaagatagatagttgtaaaaactctaaagctttaatatattcggtttgtatgtaatggaagcacggggctagagtttccacataggccccaacataaagg

SEQ ID NO: 8113 - DNA, 177 bp, Homo sapiens
ctgctcagcctcctcattcagtgaagtgagggtgagttgtgaggcaggcaggctcctcagaggggagggggaggggaaacgtcagttacttgggctgtgtccttacgccaagactacaaaacatcgtaagcctcactatacaacactgagctatttacaatggaaattctcaatcag

SEQ ID NO: 8114 - DNA, 606 bp, Homo sapiens
ctgctctggagaatctcaataaggctctcctagcagacattgaagcccactatcaggacccttcacttccttaccccaaagaagataacacacttttatatgaaatcacagcctatctggaggcagcgaggagggcaactactttgagatgagtacctattcaacaaacagaactatgatacggattctgtttgcttttgtatcatcagtggcaagaaacgacaccggatactacacttgttcctcttcaaagcatcccagtcaatcagctttggttaccatcgtagaaaagggatttataaatgctaccaattcaagtgaagattatgaaattgaccaatatgaagagttttgtttttctgtcaggtttaaagcctacccacaaatcagatgtacgtggaccttctctcgaaaatcatttccttgtgagcaaaagggtcttgataacggatacagcatatccaagttttgcaatcataagcaccagccaggagaatatatattccatgcagaaaatgatgatgcccaatttaccaaaatgttcacgctgaatataagaaggaaacctcaagtgctcgcagaagcatcggcaagtcaggcgtcctg

SEQ ID NO: 8115 - DNA, 421 bp, Homo sapiens
  misc_feature (1)...(421): n = g, a, c or t
cgcgtgagccactgcgcccggcctagtttgtgctttttacttaccagttaggggttatattactgtgtaacaaaatggacggttatttctattcattaacaagattcaagtaatagcctctttagccacatattccttaataacacctttagaccttataggggtaattattttctatatacttttccaatgtatttgaaagtttgttggctcttcttccgtaattatactatatcctcagtaaagaaagtttggcatacagaaaagttgaaggaagaaaattttcaatcactgttgttccactaccaagaaataatacttggaggtatttcctttcaatcttcaacatgaggatgctaatgtccccctnataaggggccttaaagtcactgactctgtgcactatttcatgagaacattg

SEQ ID NO: 8116 - DNA, 563 bp, Homo sapiens
  misc_feature (1)...(563): n = g, a, c or t
aggacctgaaggaggggaagccttatctggtcctgggacttctgtggcaagtcatcaagattgggttgtttgctgacattgaactcagcagaaatgaagctctgattgctcttttgagagaaggtgagagcctggaggatttgatgaaactctcccctgaagagctcttgctgaggtgggctaattaccacctggaaaatgcaggctgcaacaaaattggcaacttcagtactgacatcaaggactcaaaagcttattaccacctgcttgagcaggtggctccaaaaggagatgaagaaggtgttcctgctgttgttattgacatgtcaggactgcgggagaaggatgacatccagagggcagaatgcatgctgcagcaggcggagaggctgggctgccggcagtttgtcacagccacagatgttgtccgagggaaccccaagttgaacttggcttttattgccaacctctttaacagataccctgccctgcacaaaccagagaaccaggacattgactggggggctcttgaaggtgagacgagagaagagcggacatttngg

SEQ ID NO: 8117 - DNA, 542 bp, Homo sapiens
caaaacgcagcagtatgactgcaaatggtacattccgctcacggatctcagcttccagatggtggatgaactggaggcagtgcccaacatccccctggtgcccgatgaggagctggacgctttgaagatcaagatctcccagatcaagaatgacatccagagagagaagagggcgaacaagggcagcaaggctacggagaggctgaagaagaagctgtcggagcaggagtcactgctgctgcttatgtctcccagcatggccttcagggtgcacagccgcaacggcaagagttacacgttcctgatctcctctgactatgagcgtgcagagtggagggagaacatccgggagcagcagaagaagtgtttcagaagcttctccctgacatccgtggagctgcagatgctgaccaactcgtgtgtgaaactccagactgtccacagcattccgctgaccatcaataaggaagatgatgagtctccggggctctatgggtttctgaatgtcatcgtccactcagccactggatttaagcagagtt

SEQ ID NO: 8118 - DNA, 408 bp, Homo sapiens
ccgcactagaaagttcatgaccaaccgactacttcagaggaaacaaatggtcattgatgtccttcaccccgggaaggcgacagtgcctaagacagaaattcgggaaaaactagccaaaatgtacaagaccacaccggatgtcatctttgtatttggattcagaactcattttggtggtggcaagacaactggctttggcatgatttatgattccctggattatgcaaagaaaaatgaacccaaacatagacttgcaagacatggcctgtatgagaagaaaaagacctcaagaaagcaacgaaaggaacgcaagaacagaatgaagaaagtcagggggactgcaaaggccaatgttggtgctggcaaaaagccgaaggagtaaaggtgctgcaatgatgttagctgtgg

SEQ ID NO: 8119 - DNA, 567 bp, Homo sapiens
cctgaacttctccccagcaaatgaagttagttgctttagaaagagatttagaactctgtcttacagcatacttctccccctaggcaagtctctatctctggagctggggaacaatggtgcacttctctttgaatgacaacccagctagaggacaaaaacactttgtggagttggggcaacagcctcgggtctcaacttgcctctcccaatgtggaactgctggattacaagctggggcatgggtgactgtgccttcagtattctcagtggtactgtacacaggtacagcctctgtaccatgagtaagaaatagttcctgcctctcagccccactcatccagaacttgacctcaccaacaggccactaaaaaaaaaaatcttgatatcctattcctttgagaaagataccctccaactaggaaataaaggaacaggtaatcttgtgttcttggctgcaccagtctggagtgaagtttctatctcagcaagctgggaaagaggaaaaggagtgggtcttggttcaataccacagaaattcaatgttcttaccaagttttagtagatatt

SEQ ID NO: 8120 - DNA, 493 bp, Homo sapiens
  misc_feature (1)...(493): n = g, a, c or t
gggatggggaggttgcgatgggccgagattgcaccactacaccccagcctggataacaagagtgaaactccgtctcaaaaaataaaaatagaaaaggactcagaagccaacttgaagtgcctctcgctgccaaagataggatagtctgagaataaaaagaataatgactgcaattagttgaaacacatggaaataaaaagaaacgtaaggtcatagtgatactttttaaaaggccaaggaaacacagtgaaacaaaattcattggtcccattagagtaatagggcaccaattccttactttgaaatttggcaattaaaggaacagaattcagcatttattctgcctttcctgaatgaactgtattttagagtaaccaaatagtcctagttgatgagggaatattttgntcgtttaatatgaaaaaatattctgatgtttagtttaaagaaaaatggactccaaatatttcacttagtatactagagtatttca

SEQ ID NO: 8121 - DNA, 284 bp, Homo sapiens
ccaattgatttgatggtaagggagggatcgttgacctcgtctgttatgtaaaggatgcgtagggatgggagggcgatgaggattaggatgatggcgggcaggatagttcagacggtttctatttcctgagcgtctgagatgttagtattagttagttttgttgtgagtgttaggaaaagggcatacaggactaggaagcagataaggaaaatgattatgagggcgtgatcatgaaaggtgataagctcttctatgataggggaagtagcgtcttgtagacctac

SEQ ID NO: 8122 - DNA, 568 bp, Homo sapiens
  misc_feature (1)...(568): n = g, a, c or t
atgaaggcagaagactatgatgttgtaaaagttattggaagaggtgcttttggtgaagtgcagttggttcgtcacaaggcatcgcagaaggtttatgctatgaagcttcttagtaagtttgaaatgataaaaagatcagattctgcctttttttgggaagaaagagatattatggcctttgccaatagcccctgggtggttcagcttttttatgcctttcaagatgataggtatctgtacatggtaatggagtacatgcctggtggagaccttgtaaaccttatgagtaattatgatgtgcctgaaaaatgggccaaattttacactgctgaagttgttcttgctctggatgcaatacactccatgggtttaatacacagagatgtgaagcctgacaacatgctcttggataaacatggacatctaaaattagcagattttggcacgtgtatgaagatggatgaaacaggcatggtacattgtgatacagcagttggaacaccggattatatatcacctgaggttctgaaatcacaagggggtgatggnttctatgggcganaatgtg

SEQ ID NO: 8123 - DNA, 252 bp, Homo sapiens
ctggcttcccacttcttggtacccggttaactgccaggtgggtgacagtgatgccaggctcgcccactactgcactggacacagcctcaccaatgccaccttcataataatggtcctccacggtgaggatcctgcccttggtggcacgagcgctgtcgagaatgagttttctgtccaggggcttgatggtgaaggggtccagcacgcggatgttgatcttttctttcttcagcagttcggcagcggccaagg

SEQ ID NO: 8124 - DNA, 454 bp, Homo sapiens
ctggcttcactgctcaggtgattatcctgaaccatccaggccaaataagcgccggctatgcccctgtattggattgccacacggctcacattgcatgcaagtttgctgagctgaaggaaaagattgatcgccgttctggtaaaaagctggaagatggccctaaattcttgaagtctggtgatgctgccattgttgatatggttcctggcaagcccatgtgtgttgagagcttctcagactatccacctttgggtcgctttgctgttcgtgatatgagacagacagttgcggtgggtgtcatcaaagcagtggacaagaaggctgctggagctggcaaggtcaccaagtctgcccagaaagctcagaaggctaaatgaatattatccctaatacctgccaccccactcttaatcagtggtggaagaacggtctcagaactgtttgtttcaattgg

SEQ ID NO: 8125 - DNA, 487 bp, Homo sapiens
ccaagacagcctgtttcagagggttgttttgtttggggtgtgggtgttatcaagtgaattagtcacttgaaagatgggcgtcagacttgcatacgcagcagatcagcatccttcgctgccccttagcaacttaggtggttgatttgaaactgtgaaggtgtgattttttcaggagctggaagtcttagaaaagccttgtaaatgcctatattgtgggcttttaacgtatttaagggaccacttaagacgagattagatgggctcttctggatttgttcctcatttgtcacaggtgtcttgtgattgaaaatcatgagcgaagtgaaattgcattgaatttcaagggaatttagtatgtaaatcgtgccttagaaacacatctgttgtcttttctgtgtttggtcgatattaataatggcaaaatttttgcctatctagtatcttcaaattgtagtctttgtaacaaccaaataaccttttgtacaag

SEQ ID NO: 8126 - DNA, 606 bp, Homo sapiens
  misc_feature (1)...(606): n = g, a, c or t
ctgtggaaagaagtcgcaaaacactggaagcaagagaaaaagaggaagaaatgaacagagagaaagaattaagaagacaaaatgaagatattgagccaacatcctcaagatcaaatgtggtcagagattgctccaaatcatcttccagggatacgagcagcagtgaaagtgaacagagttctgactcttctgatgatgagttaattggccctcctttaccccctaaaatggtaggaaaaccagttaattttatggaggaagatatcctcggtcctttacctccacctcttaatgaagaagaagaagaagcagaggaagaagaagaggaagaggaggaagaggaaaatcctgttcacaagattcctgactcgcatgagataacgctgaagcatggcactaaaacagtgtctgctttgggtctggatccctcaggtgcccgtttggtgacaggaggatatgactatgatgttaagttttgggattttgctggaatggatgcttcttttaaggcatttcgatcccttcagccctgtgagtgccatcagatcaagtcattacagtatagtaacacaggagacatgattcttgntgtatctggnaagctct

SEQ ID NO: 8127 - DNA, 567 bp, Homo sapiens
ctgggagagctagactaagttggtcatgatgcagaagctactcaaatgcagtcggcttgtcctggctcttgccctcatcctggttctggaatcctcagttcaaggttatcctacgcagagagccaggtaccaatgggtgcgctgcaatccagacagtaattctgcaaactgccttgaagaaaaaggaccaatgttcgaactacttccaggtgaatccaacaagatcccccgtctgaggactgacctttttccaaagacgagaatccaggacttgaatcgtatcttcccactttctgaggactactctggatcaggcttcggctccggctccggctctggatcaggatctgggagtggcttcctaacggaaatggaacaggattaccaactagtagacgaaagtgatgctttccatgacaaccttaggtctcttgacaggaatctgccctcagacagccaggacttgggtcaacatggattagaagaggattttatgttataaaagaggattttcccaccttgacaccaggcaatgtagttagcatattttatgtaccatggttatat

SEQ ID NO: 8128 - DNA, 605 bp, Homo sapiens
  misc_feature (1)...(605): n = g, a, c or t
gcactaaaatggagtggagagttggggtggaaataagacatccttaaaaggttaaattgtctgcaaagcacctagcccagtgccgagctcccagtaggtgttcagtaaagcttagtgcctgactttctgaacactgattcctcctgtttggagtcactgggatactctcattgccgttgggatgttcctcactccttcccagttcgtggctgaggcagaacccagactgaagagggaagagacattccagaggaggattgccttcgtcagggtaagggatgggctgctcaggggccctacccttcacccccttctgtatcagattggccctcccactcccatctcactctgcgtgtacaatcttccatatccgcaagttcactggcactcttctggcacctgggcaagatcccagaacagaggatggagtgactggcctcacagagcttagtgcccgactcaggggaaatgggactggtgcatgggaaatggtcagcctaggatnggacacgagagtctgaaattcaaagcaaccagcttgaagtggtttgagaagctggaagcaaacatgggctanagagatagggcagaagtcaagacgagga

SEQ ID NO: 8129 - DNA, 317 bp, Homo sapiens
gcctagctgtggagaagagaattacttccccactgatggagcccagcagcattgagaaaattgtagagattgatgctcacataggttgtgccatgagtgggctaattgctgatgctaagactttaattgataaagccagagtggagacacagaaccactggttcacctacaatgagacaatgacagtggagagtgtgacccaagctgtgtccaatctggctttgcagtttggagaagaagatgcagatccaggtgccatgtctcgtccctttggagtagcattattatttggaggagttgatgagaaaggaccccag

SEQ ID NO: 8130 - DNA, 608 bp, Homo sapiens
  misc_feature (1)...(608): n = g, a, c or t
ctgctggagtagctcgtggtgctgattgatctgcttggagattcttgtgcatcttcacctgttagagctggaaagatgctcaggactatacagcccagcccttctggtttacatataatgaaactaaggcccaccttagtcaactaatgtgcttaaactcaagcaaatggcaaatggcaaaactcaggactctgtcaatgagttttcattctttttctttattcttctagacacatattttataaagaaatgaggcagcatgatgtttaaaatacttaaagtgagaatgagaaaaactgatgtctacatatcatgaaatggttaaaaagtttaacgtgcattgtcttctccattagaacttcttttacgaatttttttctcaaaatctggctcagaaatcttgttttaaaagctccctaaacattcctaggcagaattagtaacgccttcctctttgctaacaaggaactgtgcatattcctgtaatagaatacttaccatattatattgnaagtattaaattattcatctgccctcctcccacctacccactggatcaggcttcccaggaacagcaacagagagcccagcaatttgngtgttctcag

SEQ ID NO: 8131 - DNA, 540 bp, Homo sapiens
ctgatatgctttattgtgccgagtcccatatccgaatgattaagactggagaaagtggcatgatagttttccggcttcttacaaaaaacaaccgatggacttgggtccagtctaatgcacgcctgctttataaaaatggaagaccagattatatcattgtaactcagagaccactaacagatgaggaaggaacagagcatttacgaaaacgaaatacgaagttgccttttatgtttaccactggagaagctgtgttgtatgaggcaaccaacccttttcctgccataatggatcccttaccactaaggactaaaaatggcactagtggaaaagactctgctaccacatccactctaagcaaggactctctcaatcctagttccctcctggctgccatgatgcaacaagatgagtctatttatctctatcctgcttcaagtacttcaagtactgcaccttttgaaaacaactttttcaacgaatctatgaatgaatgcagaaattggcaagataatactgcaccgatgggaaatgatacta

SEQ ID NO: 8132 - DNA, 608 bp, Homo sapiens
ctgacatcctaaaaacgaagtcaaattagggaaggatggccgtttccttgagtcaaaagcccagcaggattgcattataatgtatatttcttctgtagcataaaatggctgatccattttaaatccattttgaatcagtttgtagaagttagcatcaaccggaatgccagggtaagaattcacaccaagtgagaagatttcccacagtaatattccatatgaccagacatcactcttaatggtgtagatgccttcaaacaggctttcgggggccatccattttacaggcagacgggcattgcccctgacaacatagttggaatcactcatgatatctcgagccaatccaaagtcacatatcttcaccactttcccgtgggtgacaagcacgttcctggcggccaggtctctgtgaacacacgacttaaattccagaaattccattcctttggcaacttgatatgcaaagcaaagaagatcttcaaatgtaagcacattcaagtcctcctcttcttccagccttttttggttttcatattcaatttcatcttcagagtgaaatgaattcccatgaagccctgagatttgatccgagtccgggtgtatct

SEQ ID NO: 8133 - DNA, 367 bp, Homo sapiens
ctgttaattctaaaatgaaaccagtcagaccactgacttataaaaatatggtactcatatagatttagcattataaagaaggaatatattatttaaaacatttaaatagtgcatatggacatttttgcatgtggtatataaaataaaacattcatataagatacacagtgcacataaaattagatgtttggatacactcctatctggagactgaaggaaattatctgaaatgtacactgcatgatggattcaaataaaaatgatacatcttttggtattttcaatttcacttttctaggtatacattatgaataacctagttgtatcaaaaggaaaccacacaaaaagggcaggatttagtgctttt

SEQ ID NO: 8134 - DNA, 567 bp, Homo sapiens
  misc_feature (1)...(567): n = g, a, c or t
gctagactaagttggtcatgatgcagaagctactcaaatgcagtcggcttgtcctggctcttgccctcatcctggttctggaatcctcagttcaaggttatcctacgcagagagccaggtaccaatgggtgcgctgcaatccagacagtaattctgcaaactgccttgaagaaaaaggaccaatgttcgaactacttccaggtgaatccaacaagatcccccgtctgaggactgacctttttccaaagacgagaatccaggacttgaatcgtatcttcccactttctgaggactactctggatcaggcttcggctccggctccggctctggatcaggatctgggagtggcttcctaacggaaatggaacaggattaccaactagtagacgaaagtgatgctttccatgacaaccttaggtctcttgacaggaatctgccctcagacagccaggacttgggtcaacatggattagaagaggattttatgttataaaagaggattttcccaccttgacaccaggcaatgtagttagcatattttatgtaccatggntatatgattaatc

SEQ ID NO: 8135 - DNA, 594 bp, Homo sapiens
ctgttgttaaaaaggaggaaaaagtgcttcatgaattatttgggacggacataaggtgctgtgccagaaatgaactgggcagggaatgcaccaggctgttcacaatagatctaaatcaaactcctcagaccacattgccacaattatttcttaaagtaggggaacccttatggataaggtgcaaagctgttcatgtgaaccatggatttgggctcacctgggaattagaaaacaaagcactcgaggagggcaactactttgagatgagtacctattcaacaaacagaactatgatacggattctgtttgcttttgtatcatcagtggcaagaaacgacaccggatactacacttgttcctcttcaaagcatcccagtcaatcagctttggttaccatcgtagaaaagggatttataaatgctaccaattcaagtgaagattatgaaattgaccaatatgaagagttttgtttttctgtcaggtttaaagcctacccacaaatcagatgtacgtggaccttctctcgaaaatcatttccttgtgagcaaaagggtcttgataacggatacagcatatccaagttttgcaatcata

SEQ ID NO: 8136 - DNA, 515 bp, Homo sapiens
gtggaggcactcttcagttatgaggctacccaaccagaggacctggagtttcaggaaggggatataatcctggtgttatcaaaggtgaatgaagaatggctggaaggggagtgcaaagggaaggtgggcattttccccaaagtttttgttgaagactgcgcaactacagatttggaaagcactcggagagaagtctaggatgtttcacaaactacaaagctgaagaaaatgaagccctattacttgtttgtaagatttagcacccttctgctgtatactgtactgagacattacagtttggaagtgttaactatttattccctgttaaaatttaacctactagacaatgatgtgagtacccaggatgatttcctggggcacagtgggtgaggagatggggacaggtgaatggaggagttaggggagaggaaaagtggatggaagtgtctggaaagggcacgagagagtcttccaggtactgatcctgtttcttgctctgagtgctagctagccag

SEQ ID NO: 8137 - DNA, 501 bp, Homo sapiens
ctgcttttccttgctttaaaataagctaccagtaattctaaatcagactaaaatgtactgttcctagaccaaatacaggcattcatccttgcaaaaatgttttgcaatgagttcttggcctatatgaaaagcatcaaatagctaaggagagactagaatttatttccaaattctgtgactgacttccaataatcccttatcagtacgagtaccaggaaaatatcagatattaaagatcagatttaattctttggtataagcatgaaactgttactgatagctttccatggcgagcataaaccatgaagcaactcaagaagcatgagagacaacaatgaaatctagtatacaatgcagggcaggccaagaacgatgtctgctttacaggaaaagtcaacactaacaatctactcctgagaaactaacacctatttagatgtttttaacataatggcaaactaaaatgtcaagcttcaaaatgaccaaacttgtaacgtacag

SEQ ID NO: 8138 - DNA, 563 bp, Homo sapiens
ggacgttctgccaaactcagatttcctggtgcatttttaccttgtgatgcacctgggattaaccagcgaggatcaggatatcttaaatacgatcataaggcactgtccaccccgctttttctccctgggttttcctggcttctcaatgctggtgggggacttcatcacggccgctgccagggtccttagcacagacattttgacggcgcctcgttcagaggctgtcactgtcctcggctctctggtctgctttccaaatacctaccaggagattcctttactgcagtcagtgccagaagtaaatgaggccattacaggaactgaagatgtcaagcattacctcataaatattttactgaagaatgccacagaagaaccaaatgaatatgcaagatgcattgctgtttgctcccttggggtctggatatgtgaagagcttgcacagtgtacaagccaccctcaggtgaaagaggccatcaatgtgataggagtaactctgaagtttcccaacaaaatcgtggcccaggtagcttgcgatgtccttcagttgctggtttcctact

SEQ ID NO: 8139 - DNA, 166 bp, Homo sapiens
cttttgttcagtaaagcccaaaatctaggccaatggttctcaaagtgtagttccaggagcagcaacagcagcatccctggagagggagaaagagagagagagtgtatgtgtgtgtgtgtgtatgtgtatgtgtgtgtgtgtgtgtgtgtgtgaagctgtttgtata

SEQ ID NO: 8140 - DNA, 188 bp, Homo sapiens
  misc_feature (1)...(188): n = g, a, c or t
ctgagaagctgatagaggagaagggagctgtggaagctctggcagcagcactggcccatatttcaggtgccacgtccgtagaccagcgctccttgatcaactcaaatgtgggttttgngaccatgatcttgcagtgctcaattgaaatgccaaatattagttatgcttggaaagaacttaaagagcag

SEQ ID NO: 8141 - DNA, 284 bp, Homo sapiens
  misc_feature (1)...(284): n = g, a, c or t
cctttttaagatgatactttnganatgcacgatatnatgagngggangnttttaaaaacgcctntttaataaactacctctaacactatttctgcggtaatagatattagcagattaattgggttatttgcattatttaatttttttgattccaagttttggtcttgtnaccactataactctctgtgaacgtttttccaggtggctggaagaaggaananaacctgatntagccaatgctgntgnantcgtttcctcagcctcatctcantgtgctgnggtct

SEQ ID NO: 8142 - DNA, 604 bp, Homo sapiens
  misc_feature (1)...(604): n = g, a, c or t
ccactcgagcacggtagggacagttcacaggtatatgaagataattgggtcccaggcgatggcggtgagtgtcaggataggcaaaaaggcggccctgaagcattttgtcaggactggcctcaatgccaggtggcatgttgcttgggtcgaaggctatctgttcaacctcagcaaagtaattaactggattccggtttaagaccagtttaccaactgggatgagagggtagtccttgtgaggccaaaccttggtgagatcgaatggattaaatggaaaagtttctgcctgattaaatgtcatgacctggatgtaaaaagtccaggaggggtactttcctgtggcaatggcgttaaaaagatcccggatgccatagtcaggatcttcctgggaaagtctcgccgcatcttcaacagaaaggtttttgatgccctggtcagtcttataatggaatttgcaataaactgcctccccatttgcattaaccagcttgaaagtatgtgatccatatccattcatgtggcgatgtccatctggaatcccccgatcactgaacaagaaagaaacctgatgcagagactcaggacgtaggctccanaagtccca

SEQ ID NO: 8143 - DNA, 600 bp, Homo sapiens
  misc_feature (1)...(600): n = g, a, c or t
atgactttagtcccagctacttggggggctgaggcaggagggtcgcttgagcccaggaaagttcgagtccaagctgggcaacagagcaaaaccttgtctcttaaaaaagaaaaaaaatagagttcagaatagataaaagagttgttattctaagaaaatagactactgaaggagaaaggctttaataatattaaaaataggcaaggtaatgcttttcatagtatagtaagatttgcctaataccatcttatttctttgattaaaagttacttagcttcagcatgcgtgtacattcaaaatacaaaattaaagcatgagttgtcattaatttgcagaattctatgattgaagcctctaaatgaattgtgcaggagagggagtttgtaaacaactgactacagacattcacattgggtcatctttaaaaagctggactctgcttttggatgcttctcggaggcgagttggattttggactgaagtactgncgttccattcctttttttgaggngttatgagtggggctataacatcgccatcctgcggcttggtgaaatttctgtctgcacaccactgaacaaaatattgtcttgcggcata

SEQ ID NO: 8144 - DNA, 595 bp, Homo sapiens
  misc_feature (1)...(595): n = g, a, c or t
ccagctagtcacagttgttgggtcagtagtacagtgctcaagaacaattcagactaacatgccaaggagcctgaggaaaagtctggtagtcatggctctcccagccagcattcccagtgggggaaactagaagacaccagcctggagaggctgaatattcaggagtccctgagatggggaatggaacagaggaaagtgtcttttgactcatcttaagtactcccctccccaaatagaaacctcaaagactgatccatttcccctagggcctgggccaggagtagctcactgctcactgctgaggagaaaggcacaagatataatgtcataagagcaggacagtggctcagcctacagagttccctataggggaaagaaggcaggaaataggcgcagggtctggtcctgtccctgcaccaccctgagtagctagtcttgggaagggattacaggccctgggccataggctgctcgccattctgctttcctatcctgtttctctccctgtgctgntcccttttagccagggctgagaaatgttcagcacctgaggcaaaactgccatagtacctctgaaagctgaatcaagggggaa

SEQ ID NO: 8145 - DNA, 465 bp, Homo sapiens
taaatctgtatcaagacggttcttttctagatttcctctacctttttgctcttaaaactgcttctctgctctgagaagcacagctacctgccttcactgaaatatacctcaggctgaaatttggggtgggatagcaggtcagttgatcttctgcaggaaggtgcagcttttccatatcagctcaaccacgccgccagtccattcttaaggaactgccgactaggactgatgatgcattttagctttgagcttttgggggttattctaccaacaaacagtccattggaaagaaaacagtccctggaattaacagatcagaatgttcacactggttaatctttttttaacaatgagcatgaaggtagcagaagctggtgtgtttccagatggttcttctaaccaaactaatttttcactgttgacaagcgaggcaagggttgcactggaccaaaggctgaggcttgg

SEQ ID NO: 8146 - DNA, 597 bp, Homo sapiens
  misc_feature (1)...(597): n = g, a, c or t
cctggtgcctacagcacaggctacgggggctacgaggagtacagtggcctcagtgatggctacggcttcaccaccgacctgttcgggagagacctcagctactgtctctccggaatgtatgaccacagatacggcgacagtgagttcacagtgcagagcaccacaggccactgtgtccacatgaggggcctgccgtacaaagcgaccgagaacgacatttacaacttcttctctcctctcaaccctgtgagagtccatattgagattggcccagatggaagagtgacgggtgaagcagatgttgagtttgctactcatgaagaagctgtggcagctatgtccaaagacagggccaatatgcagcacagatatatagaactcttcttgaattcaacaacaggggccagcaatggggcgtatagcagccaggtgatgcaaggcatgggggtgtctgctgcccaggccacttacagtggcctggagagccagtcagtgagtggctgttacggggccggctacagtgggcagaacagcatgggtggntatgactagttttgttaggaacatttgagttacttcaatcattttcacaggcag

SEQ ID NO: 8147 - DNA, 536 bp, Homo sapiens
ccaggcaggtctcgaactcctggcctcagatgatctgcccaccgtagcctcccaaagtgctgggattacaggtatgagccactccacccagcccagagttttcatttgttccttaaaataattaagctggaaaggcaaggacaattatgagcacaactgtagtcaagttgagaagacctcaaaaaagtcaagtttagaccttcggattttccatagaagagaaaaagatactaggttttagggtacagagagccagatctgaagagtagctgcagggggaaggtgctgttagaaggaggatatagacacattctctggggggaacatatggtgactgacccatgcacacaaagggggccttagcgaaactgcagaggactgatccttaaaccaatcacatctttgccaatctctgtcactgtggtgaccctgcagatttgacctttgaactcaggggaatagcaggccccactgagtggacacttttctactggctttccacggtagatgggccgatatgatgcagcacaaatgtc

SEQ ID NO: 8148 - DNA, 392 bp, Homo sapiens; identical to SEQ ID NO: 7567

SEQ ID NO: 8149 - DNA, 467 bp, Homo sapiens
cctggacctgtgtaaaccttcaaacactcttttttacattaggtcatgaagttaaattttttactgtttctgtgctacagactcttcaaaggaaaatagttaagtcaatttcaaagaaaatgaccagcacatttttaaaacattagaaatgatttgactttgactatctactgccaaaaaaaggttaaggaatttgtaatgagaagctaaaaactttaaggaattttaaggaactcaaaacaaaaactcattaaatgtaattaaagtgaattctacaaataaagcctcttaatacatttctataatagtcacttaagacttaaattcaaacactagcaaaccacaaaatcagactgtatgactgacatccaaaagataaatataaatcaaaatccgaccccagcattagccaaggggtaggtgttcctcttgaggaaggcaggaattcctcttctgccacctgttgg

SEQ ID NO: 8150 - DNA, 564 bp, Homo sapiens
  misc_feature (1)...(564): n = g, a, c or t
ctggtgggagggatgaaggaaattatctggacgatgctctcgtgagacaggatgcccaggacctgtatgaggctggagagaagaaatgggggacagatgaggtgaaatttctaactgttctctgttcccggaaccgaaatcacctgttgcatgtgtttgatgaatacaaaaggatatcacagaaggatattgaacagagtattaaatctgaaacatctggtagctttgaagatgctctgctggctatagtaaagtgcatgaggaacaaatctgcatattttgctgaaaagctctataaatcgatgaagggcttgggcaccgatgataacaccctcatcagagtgatggtttctcgagcagaaattgacatgttggatatccgggcacacttcaagagactctatggaaagtctctgtactcgttcatcaagggtgacacatctggagactacaggaaagtactgcttgttctctgtggaggagatgattaaaataaaaatcccagaaggacaggaggattctcaacactttgaatttttttaacttcatttttctacactgnta

SEQ ID NO: 8151 - DNA, 596 bp, Homo sapiens
  misc_feature (1)...(596): n = g, a, c or t
ccagtggaatgatgttccctgcaattaccatctcacctatacgtgcaagaaaggaacagttgcttgcggccagccccctgttgtagaaaatgccaagacctttggaaagatgaaacctcgttatgaaatcaactccctgattagataccactgcaaagatggtttcattcaacgtcaccttccaactatccggtgcttaggaaatggaagatgggctatacctaaaattacctgcatgaaccgtaagtggtcctttagaaagaatggactaccgtgctataacaactactagacaccttcattttacggctgtggtatcggcagtttagggtatggagcaagtaatattgngtgttttctttttttctttctttccttccatgtagcatctgcataccaaaggacttattctatgaaatactttaaaaattcctcatcagcaaaggacaattcaataaatacatccaaacatgatcatcgttggagccggaggtggcaggagtcgaggcgctgatccctaaaatggcgaacatgtgttttcatcatttcagccaaagtcctaacttcctgngcctttcctatcacctcgagaagta

SEQ ID NO: 8152 - DNA, 547 bp, Homo sapiens
  misc_feature (1)...(547): n = g, a, c or t
ccactactatgagcagggagttcaggctgtccccttgggacctcgctttgtcccaggcacagtcaccctttccataaccatcactagaaatcccaaaccccagaatcctgctcacctaagctcaaagaaggaagctgttgctggcaggtgcttctcagaagtctggcacatctgtgtatttcttgtctaattcttctcattggcctggagcatctcttcacatttttctctagagagcctggcacttttttttccccaacaacctgaccattttatcttctcagtctagggcttctggggtcaaaagaaaggactgaaatacagtatcacctatatgaatgtctgctcctgagggaagttaacaaaagccagattagatactgactggattttggtgtctctctcaagtggagaagatgtgaatagaaacagaagtttacaaaacactatagcctaacaaataggtaaaagctgtgatttaaagctggctcaagactggcccaggcataatactgncaatctaaaggtaaccggcaacatcaaaaag

SEQ ID NO: 8153 - DNA, 591 bp, Homo sapiens
  misc_feature (1)...(591): n = g, a, c or t
agcggattctgcttttaggagtacccgncaacaagcgggaccgagcaggaatccgnatctgggaacanagcccttngctcctccctcagaatgaacggagaccaganttcagatgtttatgcccaagaaaagcaggatttcgttcagcacttctcccagatcgttagggtgctgactgaggatgagatggggcacccagagataggagatgctattgcccggctcaaggaggtcctggagtacaatgccattggaggcaagtataaccggggtttgacggtggtagtagcattccgggagctggtggagccaaggaaacaggatgctgatagtctccagcgggcctggactgtgggctggtgtgtggaactgctgcaagctttcttcctggtggcagatgacatcatggattcatcccttacccgccggggacagatctgctggtatcagaagccgggcgtgggtttggatgccatcaatgatgctaacctcctggaagcatgtatctaccgcctgctgaagctctattgccgggagcagccctattacctgaacctgatcgagctcttcctgcagagttcctatcagact

SEQ ID NO: 8154 - DNA, 460 bp, Homo sapiens
ctgctcttcctaatgttggtccagtcctttaaacctgccctacggattctagtctgcccttctttgcccttaattgcttgacctcttatgcttgcctttttttttttttatcacttattttgttcatgttaaacactaagttaaaaaattttaaaatgaatgatgccacatttctatataaagaaatgagcattattaatccctgttgttgtaaaacatcattgaaattgtatgctattctctttatataaagtcattctaattatgtcacatgttgaagatgtaaccaaactattataaaggctgcttatccattcacatattgaatagattaagtttgggttttttaagattgttaatttgttattttctctttcctctagtcaaagtgggaaaaagcccaccggtgaggggctccctctctggaaaagtcagcctaccttgtcatttttcaacgatg

SEQ ID NO: 8155 - DNA, 444 bp, Homo sapiens
ctgttcttagaaagcattccatatagttatccagagcactcaagttttggttctcttttacatagctgcattcggagatactctatgtgagacatgtttaaaaaaagagaaacatttatacctggaatttatattcttccaagtaatcttttagtcttgttggtaaaggcagtccccagatggcaccggtacatttgttaatggtgagcctacagagatgctgcagagatggtgctgacgtgtagagcggtttggtcagataaaggtgaacagtgccgttccggggggcttctggacctgtccgcttatccttgcacatctgaacatagtagtcgatcagatgaaccacactgtcaaattgtttaagcttggatttgacacatatgatagagtccaatctgaattttccgtcttggtattcgattcgaagattagttggtccag

SEQ ID NO: 8156 - DNA, 605 bp, Homo sapiens
ctgtcagcttcagcagaccttggaaaggaaaatggtttgccttagttttacagtttgttttgagaaagaaaaccattcatttgtatcctttctaagttgcaatataaataactgtcattgttcttgtattcttcacaataatgtccattaaacatatatgtatcacatattttacctcactagggactaaggcattgcattatgtcaggattgtattacttttccctctcatattcgtgtcttactcttaataggaagtatgagtaaatcaggtatttttctaaaggtaattttcatttatttagaacacatttctttttggtgacataaattatcaggaacatcatcactccggaaaaaatacagtgggggttctcttgtacataatcctttgaaaataacattgaactaaacatgaaacatacatttatttctctgaaataatttctcttgaatatttctacaaaagtaatttttccccacatctgttattgtctttaatctcctagtccccagaactatctataaccaagttagttccattatttaatctctactcatcacaccacacaaaccccaaaatacaggtagtcagtcacaaaata

SEQ ID NO: 8157 - DNA, 467 bp, Homo sapiens
  misc_feature (1)...(467): n = g, a, c or t
ctgagtctgtcacttctaaaaagacaggaccccttagtgcccagccctctgttgaaaaagagaacttggcaatagaaagtcaatcgaaaactcagaaaaaagggaagatatctcatgacaaaaggaagaaatcaagaagtaaagccataggctcagatacttctgacattgtgcacatttggtgtccagaaggaatgaaaaccagtgacatcaaggagttgaatattgttttgcctgaatttganaaaacccacctagagcatcancaaagaatagaatctaaagtttgtaaggcagccatcgccacattttatgttaatgttaaagaacaattcatcaaaatgcttaaagaaagccagatgttgacaaatctgaaaaggaagaatgctaagatgatttcagatatcgaaaagaaaaggcagcgtatgattgaagtccaggatgaactgnttcggntagagccacag

SEQ ID NO: 8158 - DNA, 500 bp, Homo sapiens
  misc_feature (1)...(500): n = g, a, c or t
ccaagaattcaaggacttgtaggagataagtgaaggctattacagggattttgtcctggtttggtaggtttctcttggagaaataccactacaccctggtctagaaatgagttttgaanacttggggagttaaagggcactgagttttgctctcaccgtaccctgattccaggttttacatggagaaataacctgagggactttatttctatccaatgccctggtttccatcctgaccagaggatgatgacatccgctgataggccatgcttctgtcttctcttatgtgcctcatgccaagcctcgaaatataccttctggaccatcatttccacatctaccttgtgactagaagtcctagttatggtattttgaaattnatgatccataatccttgccanaaatcctgcancgaaccatggcatggcatcatcctantnattgatttcantcttttgccttttgctccnctggaatcttgngccaattgcaggangggg

SEQ ID NO: 8159 - DNA, 448 bp, Homo sapiens
  misc_feature (1)...(448): n = g, a, c or t
ctgctggtggagatggatggttttaatacaacaacaaatgtcgtcattttggccggcaccaatcgaccagatatcctggaccccgcgctgcttaggccggggcgtttcgacaggcagatctttattggaccaccagacataaaaggaagagcttctattttcaaagttcatctccgaccgctaaaactggacagtaccctggagaaggataaattggcaagaaaactggcatctttaactccagggttttcaggtgctgatgttgctaatgtctgtaatgaagctgcgttgattgctgcaaggcatctgtcagattccataaatcagaaacactttgaacaggcaattgaacgagtgattggtggcttagagaagaaaacgcaggttctgcagcctgaggagaagaagactgtggcataccacgaagcaggccatgcggttgccngct

SEQ ID NO: 8160 - DNA, 381 bp, Homo sapiens
ctggagcagttcaagaaggacaacgaggaaacaggcttcggctcaggcacccgggccctggagcaagccctggagaagacgaaagccaacatcaagtgggtgaaggagaacaaggaggtggtgctccagtggttcacagaaaacagcaaatagtccccagcccttgaagtcacccggccccgatgcaaggtgcccacatgtgtccatcccagcggctggtgcagggcctccattcctggagcccgaggcaccagtgtcctcccctcaaggacaaagtctccagcccacgttctctctgcctgtgagccagtctagttcctgatgacccaggctgcctgagcacctcccagcccctgcccctcatgccaaccccgccctagg

SEQ ID NO: 8161 - DNA, 313 bp, Homo sapiens
ctggtggtgattgcacacgacgtggatcccatcgaggtgcgtttgcctgttgactgctaacccaagggcttctggcagtaccaggaagagagagtagacctaatgccaagtcagtgatgggaccgaagtgggtgagggcagtactgacacagatccaacacatgcgtggctcttgcaatgatgtgaatctctcactgaattcaaccttgaagtgcgaatccatgagctttttaaccctgagcaattgttacaagctaactgaaatttgctgcttttggtcaaaatacagtcttcagctaatgctttcttccag

SEQ ID NO: 8162 - DNA, 200 bp, Homo sapiens
ctgcccttcctggacagcctatggaggctccagtcatgctgtgggatgagtccagcttccctgacatcccaggggctgtaagtgccaacatgactgtgaagggccagagtgaagaccctggctccctcctttccttgttccggcggctgagtgaccagcggagtaaggagcgctccctactgcatggggacttccacgcg

SEQ ID NO: 8163 - DNA, 459 bp, Homo sapiens
  misc_feature (1)...(459): n = g, a, c or t
gctggtctcaaactcctgaccttgtgctctgcccgccgtggcctctcaaagtactgcacactatcttaaaggcagtaaatgaatctgagtaagtgagtaagcaatgacagaaaactgcttttcctaccaataaaaaacctgcatatatggtcaagtgacatgatctattcaaagtgattaaaaattgtctttgacaagagattacattaaaaaaataaattttttttactgacctnataattgatttgcattgttcattttgctgcatgttctcattatcattaacatgtatgtttaatacactgttttattacagtatgtataattaatatactgctttattacatgtactaaactagactcatatncacttaaaaaaaaaaagatatgtggagatatccacataccataatagtcacccttttaaaggtacacaattcagtggtttttagacctcgg

SEQ ID NO: 8164 - DNA, 266 bp, Homo sapiens
cacgcccagctaatttttgtatttttttagtagacatggggtttcgccatgttggcgaggctggtctcgatctcctgaccttgtgatccacccacctcggcctcccaaagtgctgggattacaggcgtgagccactgcgcccggccacattcagttcttatcaaagaaataacccagacttaatcttgaatgatacgattatgcccaatattaagtaaaaaatataagaaaaggttatcttaaatagatcttaggcaaaataccag

SEQ ID NO: 8165 - DNA, 477 bp, Homo sapiens
atcacctggagcgtgaagggccacatgtattgtttggaaggccatctggagcctacattctagtaggagagggaagaaacagatgtagccaaccacagtatgaggtggaaacataaaattacaaagggaaaagaagagaatgacttacagttagatcactggtccttagcctggttgctcattggattcacctggggagtttttagtcgtctcatgccagccccgttgcacccaggaccagtcaaatcagaatctgtgagggcatagtcagggagcatgagtaggagattccagtgtgcagccaaagttgagagctagggaacagatgggggtggggtggagaggcaggccaacaagttgcaagtaattcaaatctccattggaaggggcttctcacagagcaaggcggcagctccagggctctctagtcctttccctcagctatcctctgccactgccatgcagatggcaagatgg

SEQ ID NO: 8166 - DNA, 297 bp, Homo sapiens; identical to SEQ ID NO: 7858

SEQ ID NO: 8167 - DNA, 527 bp, Homo sapiens
ttttttttttggtataaaagcatttttaaactttattattaatactcaggacattaggaatttccagatttttttcagtagcatttgtagaaccacttttggtaacaaatacagtagttaggaatatgcatccaattcagaatgcataataatgtttatcctgaatcctttccggctaaaaacagggctggcgctgtgatgagatatagaacgagaatctacaaaaaacactgtaacatgtttgttttttcccagaggctacatcctcttttgctggaatactttataaatacatattaaaaagtaaggcaacaactccaaacagtccaagctgtttgctcaactcttttcccaattagatttgcaatcccggtgatcaatttcatggttgtattgtttagtgtttgtctttcttatttcaaatggtccaaaaggatgtttttctcacatttctaaaacatctctggtatgtgtgttcaatgatatatgcaactaatactggtcaggtactgaagcctgtgatgtcc

SEQ ID NO: 8168 - DNA, 426 bp, Homo sapiens
cgttgaccgcatggcagctccgagagcagaggctctatttgacttcactggaaacagcaaactggagctgaatttcaaagctggagatgtgatcttcctcctcagtcggatcaacaaagactggctggagggcactgtccggggagccacgggcatcttccctctctccttcgtgaagatcctcaaagacttccctgaggaggacgaccccaccaactggctgcgttgctactactacgaagacaccatcagcaccatcaagtctgtggcctgggagggaggggcctgtccagccttcctgccatccctacgaccactgcccctcacatcaccttctcatgggtccctctcccactccaaagcccccagtggctcccagatgagccacaatgctgtaacaagccatcaacgtccagggtggcctgg

SEQ ID NO: 8169 - DNA, 131 bp, Homo sapiens
ccagtttgtaaatctgctccttcacgtcgtcagatgtcaacttcaaccaagtggggacgctgcgtcgatagggtaaagccgactgggacaggcccttcccgggagcatgcatgcgacccatgatggcggcg

SEQ ID NO: 8170 - DNA, 359 bp, Homo sapiens
  misc_feature (1)...(359): n = g, a, c or t
ggcgaggcaggggagctgccttcggtacataatttgaaggggcactccctcttgggcacatgccggccctgagtgcctcccttgcctcactctgatcccggccccataatgtcctcagtggaaggtgactgggggccggtgctgnggggagagtagaaagaggggttggcatgactaaaaataccagtatgtgtattaagtattttgagaatgaaatgccaaggagtgcctactgtatgccagctctgctctaggaatggagtagacagtggacacaagaaggacttacgccctgagcacaggtgccaacggtgacaagactggcaagacgtgagggcatgaatggttcattcaggcag

SEQ ID NO: 8171 - DNA, 420 bp, Homo sapiens
ctgttagatgaaaatctaaaggatgaatactttgaggaaatcatggaagaatatgaagatattagacagggccattatgagtctctcaaggagaggagatacttacccttaagtcaagccagaaaaagtggtttccaaatggattggctgtctgaacctcacccagtgaagcccacgtttattgggacccaggtctttgaagactatgacctgcagaagctggtggactacattgactggaagcctttctttgatgtctggcagctccggggcaagtacccgaatcgaggctttcccaagatatttaacgacaaaacagtaggtggagaggccaggaaggtctacgatgatgcccacaatatgctgaacacactgattagtcaaaagaaactccgggcccggggtgtggttgggttctgg

SEQ ID NO: 8172 - DNA, 640 bp, Homo sapiens
ctgacattcctgaataagaaggaagcaattgctgcagtcatccaggcaacagctatggtgccatgagtgaggaggaagcagcagagggagtcggattctggcggaggggggagtcccatgaggaaggatttacaggatgagaagtatgagaggaacacaggaattagcttattacaatacaaaaactccaacaaatatgaaagaggcaatcactaaagcagtttcagaaaaatatgctaccaaagggagaaaaggcaaagtagctgagattttcagacaatggctttagtacaaaagagaagcaaggggactatacatgtcatttcactaggttgacttttcattattgttgttgttcttaaaaccttgatctttatttttttcttaagtcgaaagctaagaatctacaaagaattatctataattggttttctctactcatgtgaattcgaaagaagccttccaaaaacgtatattgtaaattgagttgcacgaaaaaaaaaaactcattttagaatcttcttttttattaaaccaaataggcactgctggctgcttgtctcacaattctgctacacatagcagtgaggctcctgacttttacaatattccctgggactattggttgagttacccatga

SEQ ID NO: 8173 - DNA, 323 bp, Homo sapiens
  misc_feature (1)...(323): n = g, a, c or t
acaagcttttttttttttttttttttttttttngctattttaatattttttattaagggctntaaaaatncccanaaagataaataaatgtgatgcaatgatntctgtcctaatatnaaaaactttntttcactgcattgttttccttcacaatggccttcaaatcacaggaggcagngattccatgccatttcctnttnttttattacacnctacaggatttctgaatcagtatccccgccctcagtcttctntttataaatnaaagtcattttcaatccaccgtttaaagggagcgtntttttttnttttccacnaanagg

SEQ ID NO: 8174 - DNA, 309 bp, Homo sapiens
tcgacagcccagtagaggaaaaaggggtggtgccgtgcctgtctcttaatgaagtccagggcttcctgcaggtagatctgggtgaggttggcttcccccgtcttcagattaataggaaattcttcataatatctgccaaccatctcccagtccctgtacacagggatgttgggcctggccttgttgtcataaggtccaaagtggcagttgggggatccaaaccactcatcaaatccgtgcttcagggggtggaactggggcctgtgacccagatgcctctgtgcccactcgccctggcccccaggccag

SEQ ID NO: 8175 - DNA, 568 bp, Homo sapiens
gaagaagatgggcatcaaggcttcaaacacagcagaggtgttctttgatggagtacgggtgccatcggagaacgtgctgggtgaggttgggagtggcttcaaggttgccatgcacatcctcaacaatggaaggtttggcatggctgcggccctggcaggtaccatgagaggcatcattgctaaggcggtagatcatgccactaatcgtacccagtttggggagaaaattcacaactttgggctgatccaggagaagctggcacggatggttatgctgcagtatgtaactgagtccatggcttacatggtgagtgctaacatggaccagggagccacggacttccagatagaggccgccatcagcaaaatctttggctcggaggcagcctggaaggtgacagatgaatgcatccaaatcatggggggtatgggcttcatgaaggaacctggagtagagcgtgtgctccgagatcttcgcatcttccggatctttgaggggacaaatgacattcttcggctgtttgtggctctgcagggctgtatggacaaaggaaaggagctctctggg

SEQ ID NO: 8176 - DNA, 554 bp, Homo sapiens
  misc_feature (1)...(554): n = g, a, c or t
ccatttacaaatatgtttaatagcagcatttctttaaagaaaaacaaagttcaaatgcccaataataattatgtttaacacttggtacacatataaatagacaaaaggctgcggagaacactggatttaaataaaggtgttatgggtataattaactataatttattttatgaataaataagaaaaaagtccctggctataaaggatagtggaggtttatttcccaatattcttccatttggactgaacccctgccaactaagcagacatcccactattacaccaaaaagactgctctccccgcgagcaattacaatacatgacaccactaggcccaatggctcagagggaagagtggcctgtggctcttcaatctttatccaaacctggttctagcttcaggagcctttggtcacctgagactttttatttattaatttttatgagacggagtattgctatgttgcccaggctgattctgaactcctgggctcaagcagttctcccgcctgggcctcccanaatgttgggattacaggcatgagccaccacac

SEQ ID NO: 8177 - DNA, 262 bp, Homo sapiens
cctcaagtaatccatctacctcggcctcccaaaggattgggactactgatgtgaggtgtatttgtcactattcatctaactgcatacacattatctgtgcacttactgtatataaattatacctcaataaaaagtttatttacttctttatattaaatgtctattaataagctgggcgcagtggctcacacctgtaatcctagcactttgggaggccatggcgggcagatcacttggggccagaagtttgagaccagcctgg

SEQ ID NO: 8178 - DNA, 569 bp, Homo sapiens
  misc_feature (1)...(569): n = g, a, c or t
cggctaactatggcgaccgccacggagcagtgggttctggtggagatggtacaggcgctttacgaggctcctgcttaccatcttattttggaagggattctgatcctctggataatcagacttcttttctctaagacttacaaattacaagaacgatctgatcttacagtcaaggaaaaagaagaactgattgaagagtggcaaccanaacctcttgttcctcctgtcccaaaagaccatcctgctctcaactacaacatcgtttcaggccctccaagccacaaaactgtggtgaatggaaaagaatgtataaacttcgcctcatttaattttcttggattgttggataaccctagggttaaggcagcagctttagcatctctaaagaagtatggcgtggggacttgtggacccagaggattttatggcacatttgatgttcatttggatttggaagaccgcctgncaaaatttatgaagacagaagaagccattatatactcatatggatttgccaccatagccagtgctattcctgcttactctaaaagaggggacattgtttttgt

SEQ ID NO: 8179 - DNA, 241 bp, Homo sapiens
ctgtgatattgtgaaatatatagttggtcttcaactcccttcctggcatacaactcctaaaatctttggcctttccaaagtggtgtcattttgtatgctaatgattggtggctggcgcacttaggtagcttcagggtaggggctggtcactgaaaaaccaagggaggattagaaggttaggactttctgtcccatctcccaacctccaaggagggcagagaggctgactgatttccaatgg

SEQ ID NO: 8180 - DNA, 175 bp, Homo sapiens
ccagtgatggactgctgggaaatctgctggcctgtggtctgagttcccctacttgctcaggctgcccctcactcccagtgtgccagggaggcttagtccggggagcatcagagcagaagacattcggggctcatggctcccatccccactggcctgtatcttcagcaccctctgg

SEQ ID NO: 8181 - DNA, 545 bp, Homo sapiens
ggaatttcgcagagctgaagatcaagcgcctgagaaagaagtttgcccaaaagatgcttcgaaaggcaaggaggaagcttatctatgaaaaagcaaagcactatcacaaggaatataggcagatgtacagaactgaaattcgaatggcgaggatggcaagaaaagctggcaacttctatgtacctgcagaacccaaattggcgtttgtcatcagaatcagaggtatcaatggagtgagcccaaaggttcgaaaggtgttgcagcttcttcgccttcgtcaaatcttcaatggaacctttgtgaagctcaacaaggcttcgattaacatgctgaggattgtagagccatatattgcatgggggtaccccaatctgaagtcagtaaatgaactaatctacaagcgtggttatggcaaaatcaataagaagcgaattgctttgacagataacgctttgattgctcgatctcttggtaaatacggcatcatctgcatggaggatttgattcatgagatctatactgttgggaaaacgcttcaaagaggc

SEQ ID NO: 8182 - DNA, 593 bp, Homo sapiens
ctgccaggagccagttgctctggcctcagtctccaattgttagtctcaggatcaacagagaactggaaagcagcagaatctggaggagcaggaagagagcccagagggagtgttgtgctgagtgacggttaacagatgaaacagaatttcatggagattctttgttacaaggagaaattgctcagtctcaactcccaaaacgtgaaagttgcctggtttaagagacctatgttttctttttcagctcttcaaacctccgggaaagatcatcaaagtcaatgtcttcagatgctgaggtgctggcaccagcagatgcagttggtagtgtgtctggcacagatggcaactctggtaggacaaagttgtcatagttatctgcaggtctggaaggaagctttgcagaggcttctggcttgggtccaggaccaacaatctgtgcagaagagatattcttatcagcattaatgtcatctacctgaaacacaaagattgttaccagaggagacagcaatagtgtcactggagaaagtactggtgtaagcccctgtgtttccaaaagttaagttgctcaccaaatgcaacagagcctgttc

SEQ ID NO: 8183 - DNA, 357 bp, Homo sapiens
ccacatcaatgtcatacagcttcttcacagcctgtttaatctggtgcttgttggctttaacatccacaatgaacacaagtgtgttgttgtcttctatcttcttcatggcagactcagtggtcagcggaaacttgatgatagcatagtggtcaagcttgtttctcctgggagcgctcttccgaggatatttgggctgtctccggagtcgcagtgtcttcggccgccggaaggtgggtgacgtgcggatcttcttctttttgtggctgtggacacctttcaacactgccttcttggcctttaaagccttcgctttggcttcagctttaggaggggcaggagcttccttcttcgctttcg

SEQ ID NO: 8184 - DNA, 595 bp, Homo sapiens
ccaatatgcctttggagcacagcctatggtttatgtttcttttatgaccacctttaatatctgtcaaacgactagacatgctatagctttacccgaaggtaatttgattgactgtgctctgctagaagatggtgtatgggtccctctcgaggtaactgccaataaatgataagtggtatttgttttagataatgcctctacctcagtggtagctttgataatggcaaattgtaattgcaagtgccattttcagaataggcattggtttattttaggaagaggataataaagttccttttagttatcaaagtaacaccttttattgttaaatctcaacttttgaagaaaacactttcaatttcttaactttttcctcagggttagtgagttagtacaactacccaaagaagtgttaaaatattgagattctatatgtgtgtgtttatatgtgcatctatgtattacgtatacaaaatatttcacctcaaaggactttttgaaaaggtaatctttggtctatagtacagtgttaagctcactgataatttagaatcattaagttcgtttattttcttaacactacagaaaggaaagg

SEQ ID NO: 8185 - DNA, 514 bp, Homo sapiens
  misc_feature (1)...(514): n = g, a, c or t
ccaggatggcatcagtggcaaacacattcccctgagtttttgccagcttgcggatgacagggtcgtctgtggtggtgacagtgtggaagatgcgcttgatgctccgcagtggcttctcactcctcgtggtgatgcggtcaaaggctttgtcgtagtattctagggccccacaacactcaatgtcctgtggctctgatacttccaagtagcgcatcttcatcaactgaggaaaatccatttcctctttcacttcccaatcactacgaacttcaactgaagagtctcggggtttctgtgatttctgatcccatttctgcctaaccccaaattgtttctggaactttttctgcagtcgaatgcgttctctctctttctgtttggcactcttaggcaggatctgcangttgaactgcaacatgttccgacgatctttgtctctgcggaggttcctctgggcaaatctcattcgattccgctggtaggccgtcttctgtgtgcgcgctgtatccaccag

SEQ ID NO: 8186 - DNA, 601 bp, Homo sapiens
  misc_feature (1)...(601): n = g, a, c or t
gttatttccaccatctggttttccaatgctagtcactgacatcaagccaagactgagaaaatttgcccacatctctggaggtacaaccaccccatatttgggtcagtcctgatctctgatgccttcttcccctttctccactgacctttcagagaggttaaatggatttgacagagaaagcatacagactgttcaaaaatggaagatcatctactaagattatatccatctctaagactttacatgtttatgatttcactaactatgcatcccaattttgtgaatatatttttaaagaaacatttatatctatatcaattactaaaagccaacatttattggagctctttaattgtattaaaatttattatccatgataatgcaatacaactgatactgtttttagtttaatatgtgtagttaacgaacctcagaggggttaacttgcctgctgtcacacaatggaaacctcaatttgaaagtttgccctaagccactaaactatgctacttatcccttcagcacatacatgacatccttatttactcatctaaaagttatggttagagttgagaggtagtgttataatccanaaagagca

SEQ ID NO: 8187 - DNA, 361 bp, Homo sapiens
ccaagcatctaagaatataatccagccaccctcctgtgttttgcattattataatgttccattgtgtgtcacagaagagaccttcacaaagttgtgtaatgaccatgaagttcttacattcatcaaatataaagtgtttgatgcaaaaccttcagccaaaacactttctgggctattagaatgggagtccaaaactgatgcagtagaagcccttacggcactgaatcactatcagataagagtgccgaatggttccaatccctatacattgaagctttgcttttctacatcatcccatttataagaagagaagagcatgttagaatttatgttcacctttattacaaatgggatgatgtag

SEQ ID NO: 8188 - DNA, 363 bp, Homo sapiens
cctggcatacccccatcctctacactcatacccacacaagaccctgggtggctaaggggcagcagggattgcaacacgtttggggaaaatcaagttatggagccagctcccaggaaggagaagccgtggaacattgccagagagaatactgaggatcagaggcatctaccaactccacagtcagggcttgaagagtaaggggctggtggtccttgaagccacagtcttggggcgagtcccatggagctaggaaggggaagaaggaatccagggtgcaggctgaggaactactgtccacaatctgcaggaagggaggcaaggatgaaggtggcaggaaagttggagatagcaaatggatgacag

SEQ ID NO: 8189 - DNA, 387 bp, Homo sapiens
ccatcggtgctgaaattgagcattttaaatagtacagtaggctggtatacattaggaaatggactgcactggaggcaaatagaaaactaaagaaattagataggctggaaatgcttactttctgctctcattttctttcattttgtctgctgtctttttgaatgccaatactttcatttaaaatgttttgggagcacggcaacccaaaatgactgaacggtggtccaaaaatccaaaccaactgataattacttctcgaggtgataggaaaggcacaggaagttaggactttggctgaaatgatgaaaacacatgttcgccattttagggatcagcgcctcgactcctgccacctccggctccaacgatgatcagcaaaggacaatt

SEQ ID NO: 8190 - DNA, 537 bp, Homo sapiens
  misc_feature (1)...(537): n = g, a, c or t
caaatagcaaaattgaggccaagggccaagagaatatccgaactttaatttcaggaattgaatgggtttgctagaatgtgatatttgaagcatcacataaaaatgatgggacaataaattttgccataaagtcaaatttagctggaaatcctggatttttttctgttaaatctggcaaccctagtctgctagccaggatccacaagtccttgttccactgtgccttggtttctcctttatttctaagtggaaaaagtattagccaccatcttacctcacagtgatgttgtgaggacatgtggaagcactttaagttttttcatcataacataaattattttcaagtgtaacttattaacctatttattatttatgtatttatttaagcatcaaatatttgtgcaangaatttggaaaaatagaagatgaatcattgattgaatagttataaagatgttatagtaaatttattttattttagatattaaatgatgttttattagataaatttcaatcagggtttttagattaaacaaa

SEQ ID NO: 8191 - DNA, 599 bp, Homo sapiens
ctgatcttaaactcctgacctcaagcagtctacccccgttggcctcccaaagtgctgggattacaggtgtgagccactgcacccagccaagtttatgtatttttattctttttcatgaatgtgatttgttaaatgagtgattaaatataatttttatatatttgtatgacttttctgtaaataaaatttaaaatcagaaaaaatcatgttagaccatgtatagtgatttattttgaaattttgattatttaatatgtacaccatgctctgttcttccccacaataaaaaaattcaatgctttgtcttctttaaaatataccatataaatagcatcagtaatagtaaatatcgaggaatgactctaataaaatatgtacagtacttctgcatggaattctataaaacattattgagagaaactaaagaagacccaaataattggagcattatataatgttcatgtattgaaagaatcaatattataaacatacatgttttctccaaatctatagatcccaatttaatcccaatcaaaatcttaataacagcattattaaaaataacattattgagatataattcacatatcttaaaattc

SEQ ID NO: 8192 - DNA, 301 bp, Homo sapiens
  misc_feature (1)...(301): n = g, a, c or t
atgtaaataagatgatttaatgttgattttaatcctgtatataaaataaaaagtcacaatgagtttgggcatatttaatgatgattatggagccttagaggtctttaatcattggttcggctgcttttatgtagtttaggctggaaatggtttcacttgctctttgactgtcagcaagactgaagatggcttttcctggacagctagaaaacacaaaatcttgtaggtcattgcacctatctcagccataggtgcagtttgcttnctacatgatgctaaaggctgcgaatgggatcctgat

SEQ ID NO: 8193 - DNA, 563 bp, Homo sapiens
ctggcaatgacaagactgggagtatcaaactaggattgttagttcaattaaaatttcagataaacaataatgtacttatactaaaaaattatttgttgtttatctgaaatgaaaatttaactgggtacccaattgtttgtttgtttaatctaaaaaccctgattgaaatttatctaataaaacatcatttaatatctaaaataaaataaatttactataacatctttataactattcaatcaatgattcatcttctatttttccaaattcttgcacaaatatttgatgcttaaataaatacataaataataaataggttaataagttacacttgaaaataatttatgttatgatgaaaaaacttaaagtgcttccacatgtcctcacaacatcactgtgaggtaagatggtggctaatactttttccacttagaaataaaggagaaaccaaggcacagtggaacaaggacttgtggatcctggctagcagactagggttgccagatttaacagaaaaaaatccaggatttccagctaaatttgactttatggcaaaatttatt

SEQ ID NO: 8194 - DNA, 571 bp, Homo sapiens
  misc_feature (1)...(571): n = g, a, c or t
gtttaacggccgcggtaccctaaccgtgcaaaggtagcataatcacttgttccttaattagggacctgtatgaatggctccacgagggttcagcctgtttgattgtagctatgttggtgtatctcgtgtacaagatggaaaagtgcttttgttgttctacctgatccagttgggggagcaggaatagggggtgcctgcctaacggcctctagcccatgtgcttatactgggatctgtcccgagggatctgcacctggttggcagtcattttgtggtggatgtggtaaatcgcgagtgttaccatgatgacgaggcccaagatgagccccaaaatcaggggcaaggtttcttccagttgctcccgctcatccactgggcatttatgctcttcactgaagacaaaatctgagataatgtcaaaaggttggatgtggaccgcagacaggatcatggtgaccgtcttctgcggatcactagaggccagtgaaatggtttgttgagcttgacactcataggacttcccagcgggggtgaccaaggcaganaggtggtgcgagttggctgtgtgctt

SEQ ID NO: 8195 - DNA, 511 bp, Homo sapiens
  misc_feature (1)...(511): n = g, a, c or t
atttcaagaacactgaanaatggaaagtgggcattaactgaagcagacacctcttgaggtaagatttgtggaagaagaggttaaagngtgccagaaatttgggttaccctcctctagaaagaaattccagtaatggatctgtttaagtgttaagggagcanangagaagacggtgaatgtacttcaatattttgaacatttttngaaataggaattcttgagtctcttttctttcttcagtcttttccatttctttttcttttctttttcactgtaatnntctgtgtttctgatactgtgctgntttagataatattatgtttacatctttcatcccactccttatnccttcaaaggtctgaggaaaaaaaacctgtcccctggtgcggnggaatcggatgtgagaggaataactggggttgatctatttggaactacagatgcagtggtgaagcatgtactanagggtcacgatcgtggagtaaactgggctgccttccaccccactatg

SEQ ID NO: 8196 - DNA, 563 bp, Homo sapiens
  misc_feature (1)...(563): n = g, a, c or t
ccagtggaatgatgttccctgcaattaccatctcacctatacgtgcaagaaaggaacagttgcttgcggccagccccctgttgtagaaaatgccaagacctttggaaagatgaaacctcgttatgaaatcaactccctgattagataccactgcaaagatggtttcattcaacgtcaccttccaactatccggtgcttaggaaatggaagatgggctatacctaaaattacctgcatgaaccgtaagtggtcctttagaaagaatggactaccgtgctataacaactactagacaccttcattttacggctgtggtatcggcagtttagggtatggagcaagtaatattgtgtgttttctttttttctttctttccttccatgtagcatctgcataccaaaggacttattctatgaaatactttaaaaattcctcatcagcaaaggacaattcaataaatacatccaaacatgatcatcgttggagccggaggtggcaggagtcgaggcgctgatccctnaaatggcgaacatgtgttttcatcatttcagccaaagtcctaa

SEQ ID NO: 8197 - DNA, 562 bp, Homo sapiens
  misc_feature (1)...(562): n = g, a, c or t
ccttcttgtgatcttgctctatctcacagcacactcagcacccccttctctgcccattccccagcctctcttcctatcccatcccatcccatcccatcccatcccatcccgctcttttcctacttttccttccctcaaagcttccattccacatccggaggagaagaaggaaatgaatttctctacagatgtcccattttcagactgctttaaaaaaaatccttctaatctgctatgcttgaatgccacgcggtacaaaggaaaaagtatcatggaaatattatgcaaattcccagatttgaagacaaaaatactctaattctaaccagagcaagcttttttattttttatacaggggaatattttattcaaggtaaaattctaaataaaatataattgttttttatcttttctacagcaaatttataattttaagattccttttcttgtttatcagcagttgttattacatccttgtggcacatttttttttttaattttgtaaaggngaaaaaagcttttatgagctcatgtagcaatcagattttcctgnggatngata

SEQ ID NO: 8198 - DNA, 547 bp, Homo sapiens
  misc_feature (1)...(547): n = g, a, c or t
tttttttttggaaattggagataaaatttttattacttgtaaacaaaattctgtcaaaaacctgacaaattaaacaatacaattaatatgtttaatagaactaattacatatgagaggcatccaaaatccatttttctatacaaacatggtttgatatacagtcattttatctgtgtattaattggtttatgaaataacaaatagaaaaatcaagtatgcattatcaagttaaagaagcaggagagatggagctataaaaacaaagagagaagaatgttgtaaggagggcttaacaaccaggataaatgttgtagagagatcaattaaagtgatggcctanagatcacgggcttcctttggcagagccatgttggtgaagtgaaggaagtggaagccagaccacaatggttgaagaatgaatgtaatgtaagagccaagacatttatttgagtctgatagtaatgaaaaaggacaagaattttcttcttgctgttgtttttgncatttcatgttcaaaaccctttatctcccatgtggtactgaaaa

SEQ ID NO: 8199 - DNA, 592 bp, Homo sapiens
  misc_feature (1)...(592): n = g, a, c or t
ggcagatagtgagcgctggtggcggagttaaagtcaaagcaggagagtaattatgaatagcgcagcgggattctcacacctagaccgtcgcgagcgggttctcaagttangggagagtttcgagaagcagncgcgctgcgccttccacactgngcgctatgacttcaaacctgcttctattgacacttcttctgaaggataccttgaggttggtgaaggtgaacaggtgaccataactctgccaaatatagaaggttcaactccaccagtaactgttttcaaaggttcaaaaaaaccttacttaaaagaatgcattttgattattaaccatgatactggagaatgtcggctagaaaaactcagcagcaacatcactgtaaaaaaaacaagagttgaaggaagcagtaaaattcagtatcgtaaagaacaacagcaacaacaaatgtggaattcagccaggactcccaatcttgtaaaacattctccatctgaagataagatgtccccagcatctccaatagatgatatcgaaagagaactgaaggcangaagctagtctaatggaccagatgagtagttgtgatagttcatc

SEQ ID NO: 8200 - DNA, 542 bp, Homo sapiens
ccaccttttaaacataagttaattacttgctgacataatatgaaaccttactttaaatacaatagtttcaaagaaaaatggtgttacaatataaaaccacaacaaaaggtgtgcaaagagacatttatattggctataaaaggcagtgagaggaaagggcaaagcagtttagaaaataattcctgcaatcactatttacagttctggtttgagctttgtttgaattccacttgaaaaaataactcccttcaaccaactgactcagggggatggatggaaaagaacagagtaggtgaaatttgcaacaaactgactctaagaaggctctcaccttagagatattaacttggatcaggcgcatctttctctgtgattgcatattgaaggagtgctgtctaaagcccttgatcctctgtctctcttccttcactcagtgcattggtgcagcaattttgtttattcccgtttccaaatgccacacccttctgtgagcagagaaatccatgactcaagaatggtatctttgtaaactccatcttttc

SEQ ID NO: 8201 - DNA, 589 bp, Homo sapiens
ccaaggcttccagggtctggtgcagggacgaagaggaacacagtgccccaaacactgggatgctctccactgctgctcccttgggggaaccatccagaaccatacccggtggactgcagcttgagaagaggtgggggtaaggaggagccaccctgcagggagtcagcagcagatgggaagaactcatgactccaggctgctgctgttgtaaatactgagccaagatttcttccccagtggtacatgcatgaagggcagagggtggaggtgtccctggggtgagctggcttgtgtggcatgctctgtctatacccctcagcaccactgactgggcaaagcaacgtgttccagaaggctccccacatgcagacagtggggtccatggggtggctcctccaaactgcatcagggaatcaggaagggactggcctggagccaaggggaaagggatgattgctcctgctgtcaccacctttttcccacagaagctcagcatgtcagccagatgaaccatggaaactggagaggaacacaggcgataaggaacagtgactgtgtccagggctgtagccaggatggcactgcagtg

SEQ ID NO: 8202 - DNA, 581 bp, Homo sapiens
  misc_feature (1)...(581): n = g, a, c or t
gtacaagcttttttttttttttttttttttttttttttgggattatttactaaataattgatntncatccaacatcactgaatggaaataatttaaaaataancaaggcttaaattggggtctttcaaaaaactcaaaacattcttggngactgtatntttaacaaatggaatgacaaaactagttaagtcatattatctcaatcaactccaaaactcaatgttgccaacatgtttttntacttaaaagcaaacaaaaagcaaagcctcataatttagtaattaccatgtttcttggtttctgttctcaaatgccacanaaagatncctgatgaaaggaagcaaagcncctagtctcatcagtcttnttcaaaactttaaggntgctttcacaatctcactataaatatttanattcctatctgacanatttnttcacttatgtgagtaggaatgctctcgaaaccttantctttactcttgcttcatactaaagctgttngattaaaccacctntgtatttgctggcctgcaacactanataanaactcattcctatctnttccaanaaaccaanataat

SEQ ID NO: 8203 - DNA, 586 bp, Homo sapiens
  misc_feature (1)...(586): n = g, a, c or t
ctgtgagcaaaaggagaagtatcagcttctcaagggcctagggtttgttggaagggcaaggcaggggcaaaggaggatacagaacaagggggcaagtaccagtgcctgggatggacccatccattcaggcagggggtgtggggtgtcccctgtgcttagaaaccacctagcatcatagctgcaacagcactttattgggatctgagtctacagttcacatagggaggtgaagccgtgggagaagcaggggtaaaaaaaaaaaaaaaaaaaaaaaaaaaaaggggggagggctgttgtgttggtgcagggggggtccatgcgcactttatcccctgagcgtagcagtgcctgatgccacatccgcttgagtggcaggcgagtgaanatgttgcccaaatcctggaccacaacagtgtccttctcatacctaaaatggctgggcacccctccagcacacggggcatanagattgtagatgttgaggccagagttgcccacgatgcgggccacttcctgaagattggtcacgcattccaggtctttgttgtcatanaagttacacttgttttganagcancagtgggtc

SEQ ID NO: 8204 - DNA, 610 bp, Homo sapiens
  misc_feature (1)...(610): n = g, a, c or t
ccagggccatccaaaacattgagatgacccaagaggatgtccgactcattggtctcagtgccaccctacccaactatgaagatgtagccacctttctacgtgttgaccctgccaagggtctcttttactttgacaacagcttccgtccagtgcctctggaacagacatatgtgggtatcacagagaaaaaagctatcaagcgtttccagatcatgaatgaaatcgtctatgaaaaaatcatggaacatgctggaaaaaatcaggtgctggtgtttgtccactcccggaaggagactggaaagacagccagggccatccgggacatgtgcctagaaaaggacactctgggtctgtttctgagggagggctcagcctccacagaagtcctgcgaacagaagctgagcagtgcaagaacctagagctgaaggatcttctgccttatggctttgctattcatcacgcaggcatgaccagggttgaccgaacactcgtggaggatctttttgctgataaacatattcaggttttagtttccacagcaactctagcttggggtgtgaatctccctgcacatacagtcatcatcaaaggcacccaggtgtncagtcc

SEQ ID NO: 8205 - DNA, 516 bp, Homo sapiens
  misc_feature (1)...(516): n = g, a, c or t
ccaagaattcaaggacttgtaggagataagtgaaggctattacagggattttgtcctggtttggtaggtttctcttggagaaataccactacaccctggtctagaaatgagttttgaagacttggggagttaaagggcactgagttttgctctcaccgtaccctgattccaggttttacatggagaaataacctgagggactttatttctatccaatgccctggtttccatcctgaccagaggatgatgacatccgctgataggccatgcttctgtcttctcttatgtgcctcatgccaagcctcgaaatataccttctggaccatcatttccacatctaccttgtgactagaagtcctagttatggtattttgaaatttatgatccataatccttgccagaaatcctgcagcgaaccatggcatggcatcatcctagtcattgatttcaatcttttgccttttgctcccctggaatcttgggccaattgcaggagggggctctgtttgnctctct

SEQ ID NO: 8206 - DNA, 414 bp, Homo sapiens
  misc_feature (1)...(414): n = g, a, c or t
ctgttttaagtgtattaacgcattttggtaaatttacagacttgttcaaccacaaccacagtctgattttagaacatttccatcaacttcaaagatccctggtgccatttgtagtcctccaacccatctccgatctatcttgtttctatgacttgccttttctggctatttnatataaangggatcatatgacatgtggntncctatatctgacttttttcatttagcataacgtttntgangctcatccatgttgtannactccatgccatgttgtgggctacataatattccatngnatggatataccacattttgcttatcanttaatggacatttangttttgnctactttttggcattaatagtgctgntnngaacaancatgtataantctttgtatnanagccactt

SEQ ID NO: 8207 - DNA, 606 bp, Homo sapiens
  misc_feature (1)...(606): n = g, a, c or t
ctgaacagagaaaggaattaaaacgctttaattaaaaaatcacgagtggatgataaagtgtgtagaaactgaaaatttacaaactatttaaaacctggaatcgctgactgttcagaaactacacagatggatcatgggtggtggtgaacagcagaaagggattatggatgaatctgcattgttctagctgctccccatgccacccgtctccgaggaaagcctgacattgattagatattgagccaggctaatgctggcagcagatccagtgatggtaacctgcctatcagtagatccttccactgggttcgcaattttgatctgcgccccagacatctgacggatctcattgattttggcgccttgacgcccgattatgcagccaatcaaatcgtttggaatggtgagttcatgagaagtagtctgagcagatgcatccaaacctgcccaatagcctttcacctctggagagctggattcaatgccactgaatccggtgttgccatgcgtcatgggaaaatgagactgttgcattgccaactggtgcagcttggtcaaatctggctgnggaatggcatactgtccttgaatggtataggacctgcc

SEQ ID NO: 8208 - DNA, 392 bp, Homo sapiens
ctggcagatgcagaagaagcgatgtatcagaatgtggatggccgtgtttcggaatgtcctcacacctaccaaaacaggcgacctttcagcagagagatggatttggggctactctctccgcaggctcaggtcgaagattcgtagaggaacaatttagttttaaggacttcatccctccacctatccctaacaggctgtagattaccaaaacaagattaatttcatcactaaaagaaaatctattatcaactgctgcttcaccagacttttctctagaagctgtctgcgtttactcttgttttcaaagggacttttgtaaaatcaaatcatcctgttacaaggcaggaggagctgataatgaactttattggagcattgatctgcatccaagg

SEQ ID NO: 8209 - DNA, 390 bp, Homo sapiens
gcagaaaccagggtggttatgaccgctactcaggaggaaattacagagacaattatgacaactgaaatgagacatgcacataatatagatacacaaggaataatttctgatccaggatcgtccttccaaatggctgtatttataaaggtttttggagctgcactgaagcatcttattttatagtatatcaaccttttgtttttaaattgacctgccaaggtagctgaagaccttttagacagttccatctttttttttaaattttttctgcctatttaaagacaaattatgggacgtttgtagaacctgagtatttttctttttaccagttttttagtttgagctcttaggtttattggagctagcaataattggttctggcaagtttgg

SEQ ID NO: 8210 - DNA, 123 bp, Homo sapiens
  misc_feature (1)...(123): n = g, a, c or t
cccgcctcagcctcccaaagtgctgggagtncaggtntgagccactgcgcccagccagggatttcttttttaagngaaaaataaaaagatcactatntagacacatgtggctggaatgtggga

SEQ ID NO: 8211 - DNA, 293 bp, Homo sapiens
tcgactcacagatggatgacatggacatggacttagacaaggaatttctccgggacttgaaggagctcaaggtgctagtggctgacaaggaccttctggacctgcacaagagcctggtgtgcactgctctccggggaaagctgggcgtcttctctgagatggaagccaacttcaagaacctgtcccgggggctggtgaacgtggccgccaagctgacccacaataaagatgtcagagacctgtttgtggacctcgtggagaagtttgtggaaccctgccgctccgaccactgg

SEQ ID NO: 8212 - DNA, 501 bp, Homo sapiens
ggacgtgctcttcagaagcattagtgaaagggacccttacctcgtgtcctatcttagacagcagaatttgtaaaatgagtcagttaggtagtctggaagagagaatccagcgttctcattggaaatggataaacagaaatgtgatcattgatttcagtgttcaagacagaagaagactgggtaacatctatcacacaggctttcaggacagacttgtaacctggcatgtacctattgactgtatcctcatgcattttcctcaagaatgtctgaagaaggtagtaatattccttttaaattttttccaaccattgcttgatatatcactattttatccattgacatgattcttgaagacccaggataaaggacatccggataggtgtgtttatgaaggatggggcctggaaaggcaacttttcctgattaatgtgaaaaataattcctatggacactccgtttgaagtatcaccttctcataactaaaagcagaaaagctaa

SEQ ID NO: 8213 - DNA, 50 bp, Homo sapiens
  misc_feature (1)...(50): n = g, a, c or t
ttttttttttttttngctngcctgattttnattattnaaaaaantggaaa

SEQ ID NO: 8214 - DNA, 304 bp, Homo sapiens
  misc_feature (1)...(304): n = g, a, c or t
tatgtatttatttaagcatnnaatatttgtgcaagaatttggaaaaatagaagatgaatcattgattgaatagttataaagatgttatagtaaatttattttattttagatattaaatgatgttttattagataaatttcaatcagggtttttagattaaacaaacaaacaattgggtacccagttaaattttcatttcagataaacaacaaataattttttagtataagtacattattgtttatctgaaattttaattgaactaacaatcctagtttgatactcccagtcttgtcattgccag

SEQ ID NO: 8215 - DNA, 535 bp, Homo sapiens
ccactagctgaatcttgacatggaaggttttagctaatgccaagtggagatgcagaaaatgctaagttgacttaggggctgtgcacaggaactaaaaggcaggaaagtactaaatattgctgagagcatccaccccaggaaggactttaccttccaggagctccaaactggcaccacccccagtgctcacatggctgactttatcctccgtgttccatttggcacagcaagtggcagtgtctccaccacctgttgaatgaaagccaggtaaaaagggaaaagagagaaaagaaaaaaaagggattggcaccaaaactgtaaggcagtgtgctccccaacccaaaaggtagctgataaacccccaactctatcttaccaagaggctcctctgtaaattacctacctgtttacctcttaacatttacccagaataaagagacatagaagaagttctccattccaccttcctctgatcagaattctgccagcttatatgggtattagctttgtataggaccgcttacctatgatggtg

SEQ ID NO: 8216 - DNA, 602 bp, Homo sapiens
  misc_feature (1)...(602): n = g, a, c or t
actggataataagccatggggattgtggaacctaaaggcccaacagccacagactgggccatgggaagatacagagaggctccaggaaatgcggctgacatggtggggactgtggcagcccctgggtgcacaaagctcggacgatagagctagaagaggcagaagagaaggcaaaatgttactttatgacattcctatttgagatctctttaatgagctaattcttaattctccttatgcaggttatactttttgtaagattatacaagttgcctttccactggccttcaatattctcctggatcactttctgctatagctaatgttgggctcacagaacgcaaattcatcttctgcaccttagcctgtgccaaataacacaaaatcatcaaataatgcactttcaactccgacaaaaattgccaaattatatagtgttttagattattcatgttagcatttgtgaagagtaaatatgtgaagtcagatttagctaaggactaaaggaccaccctaagagtattcccagctagttcaaatctggcaaactggangcacctctgagtaggcaggtggagcatcggtatagggtggagcctgag

SEQ ID NO: 8217 - DNA, 527 bp, Homo sapiens
  misc_feature (1)...(527): n = g, a, c or t
ctggtttttaattctaatagtataaaaattggaaatttgaaatagttctgtaaaagaaaaaaatgtaaaaatacatctgctttctctcatggtttaatacagcattggaaggctttcagatgttttcttaaaaaaaaacaaaacccaaaaaaactcaacatttaaaaccaaatctcagcttcatttccagaaatattgcagtttggtttaggtaatgtttcatttaatctactccagtttccacaaaatggcattttattaaaaaaacctttcagttatttggtccttttgcaatttgctgtgcacataatgcctactgtaccaaacttttattgcctttaaatttagttgtaattttattgataaaatttaaatctagtgtctttatttcttctgttacaatagtgttgcttgngtaagcaggttanagtgcacagngtccccaattgttcctggcactgcaaaaccaaattaaacaattccacaaagaattctgacatcaatgtgttttcctcagtcaggtctat

SEQ ID NO: 8218 - DNA, 495 bp, Homo sapiens
cctaagttaagaatgctacagaaaaatatcgatccctaagcgtatttactgttatgtgaatgtgtgtgtcaaaggacttaggtgctttgggggagaggagggtgaagacaggaatttattcattgagcgaatagttattaagcgcccactctattccagacaccgttctaggcattaggtgaacagcagtgaacaaaacagacggaaatctgtgtctacttgtagctcacattttagagaggaaggcacatactaagcaaagtaattagaaacatactgtattttaggtcgtgatagtcctgaagagaaacgtaaagcagggaagaagggtataaagtgacacaggaaggtcttgctgaaaagatgacttttaagtaaagggctgacagaagtgggagatttaaccacgcgaatatcttgggaaagtgcagtcagacagagggaccagccattgcagaggtcatgaagcagaaacgtgctagaatagcaaggagg

SEQ ID NO: 8219 - DNA, 607 bp, Homo sapiens
ggcaggtgtggtgccttggctaagtccacagacttctgagaggcccacgctttcttcttctccagaaataaaccctgaaactcaagcagctttaatcagagggcaggattccacgatagcagcatcagaacagcaagtggcagcgagaattcttgattccaatgatcaggcaacagtaaaccctgtggaatttaatactgaggttgcaacaccaccattttcccttctggagacttctaatgaaacagatttcctgattggcattaatgaagagtcagtggaaggcacggcaatctatttaccaggacctgatcgctgcaaaatgaacccgtgccttaacggaggcacctgttatcctactgaaacttcctacgtatgcacctgtgtgccaggatacagcggagaccagtgtgaacttgattttgatgaatgtcactctaatccctgtcgtaatggagccacttgtgttgatggttttaacacattcaggtgcctctgccttccaagttatgttggtgcactttgtgagcaagataccgagacatgtgactatggctggcacaaattccaagggcagtgctacaaatactttgcccatcgacgcaca

SEQ ID NO: 8220 - DNA, 572 bp, Homo sapiens
  misc_feature (1)...(572): n = g, a, c or t
cctgaagatacattctattttgatcctgagtttactgcaaaaactcccaaagattcacctggcattccacctagtgctaatgcacatcagctttttcgggggtttagttttgttgctattacctcagatgatgaaagccaagctatgcanacagttggtgtacattcaattgttcagcannttacacaggaacagtattcagtttactgatggatatgaagtaaaagaagatattggagttggctcctactctgtttgcaagagatgtatacataaagctacaaacatggagtttgtagtgaanattattgataaaagcaagagagacccaacanaagaaattganattcttcttcgttatggacagcatccaaacattatcactctaaaggatgtatatgatgatggaaagtatgtgtatgtagtaacanaacttatgaaaggaggtgaattgctggataaaattcttagacaaaaatttttctctgaacganangccantgctgtcctgttcactataactaaaaccgntgaatatcttcacgcacaaggggtggttnatanagactnga

SEQ ID NO: 8221 - DNA, 536 bp, Homo sapiens
  misc_feature (1)...(536): n = g, a, c or t
ctggtttcagtgaaactgccaaaatcctcaagccaggaagtagaagccaaggagctgtcctttgttttggattacataaaccagtcacccaagtgcattgcctttggaaacgagggagtatatgttgctgcagtacgggaattttacttgtctgtttattttttcaaaaagaaaacaacatcaaggtttactttatcatcatcaagaaataagaagcatgctaaaaacaattttacgtgtgtatcatgtcacccaacggaagactgcatcgcatctggtcacatggatggcaaaattcgtctttggaggaatttttatgatgataagaaatatacgtacacatgtttacattggcaccatgatatggttatggatttggctttttcagtgacaggcaccagtctgctgagtggcggtcgtgaatctgtacttgtagagtggcgcgatgcaacagagaanaataaggagtttctcccgcgtttaggagctactattgaacatatctcagtctcgcctgcaggagatttattctgcac

SEQ ID NO: 8222 - DNA, 533 bp, Homo sapiens
  misc_feature (1)...(533): n = g, a, c or t
ccagtggaatgatgttccctgcaattaccatctcacctatacgtgcaagaaaggaacagttgcttgcggccagccccctgttgtagaaaatgccaagacctttggaaagatgaaacctcgttatgaaatcaactccctgattanataccactgcaaagatggtttcattcaacgtcaccttccaactatccggtgcttaggaaatggaagatgggctatacctaaaattacctgcatgaacccatctgcataccaaaggacttattctatgaaatactttaaaaattcctcatcagcaaaggacaattcaataaatacatccaaacatgatcatcgttggagccggaggtggcaggagtcgaggcgctgatccctaaaatggngaacatgtgttttcatcatttnagccaaagtcctaacttcctgtgcctttcctatcacctcgagaagtaattatcagttggtttggatttttggaccaccgttcagtcattttgggttgccgtgctcccaaaacattttaaatgaaagta

SEQ ID NO: 8223 - DNA, 477 bp, Homo sapiens
  misc_feature (1)...(477): n = g, a, c or t
ccaacatggagaaaccccatctntactaaaaatacaaaattagccgggcgtggtgtcgggcgcatgtaatcccanctactcaggaggctgaggcaggagaatcgcttgaacctgggagacagaggttgcagtgagccgagatcacgccattgcactccagcctgggtgacaagggcaagactctctcaaaaaaaaaaaaaaaaaaaattttttttttgactctcctgagtatctgggccatgccttgcttttcaccggtgttatctttatcaaaggcacctaaaccggcagggtcagtcacgtnacccagancacttaatagttccgtggaaaagcctcgccggttccagaggcagcccttggcagacctgcccgggcggccgctcgattatggcccaaacccatgcaatgggccagttctttgaaaggaatagtgttccataactcacacaaggagaaatagaaaatttgaatagg

SEQ ID NO: 8224 - DNA, 545 bp, Homo sapiens
  misc_feature (1)...(545): n = g, a, c or t
ccttctgtccacgcccaccttacctgctgcttcccagaagaggaagcgggaagaggaaaaagactccagctcaaagtccaagaaaaagaaaatgatctctactacctcaaaggaaactaagaaagacacaaagctttactgtatctgtaaaacgccttatgatgaatctaagttctatattggctgtgatctttgtactaactggtatcatggagaatgtgttggcatcacagaaaaggaggctaagaaaatggatgtgtacatctgtaatgattgtaaacgggcacaagagggcagcagtgaggaattgtactgtatctgcagaacaccttatgatgagtcacaattttatattggctgtgatcggtgtcagaattggtaccatgggcgctgcgttggcatcttgcaaagtgaggcanagctcattgatgagtatgtctgtccacagtgccagtcaacagaggatgccatgacagtgttcacgccactaacagagaaggattatgaggggttgaagagggtgctccgttccttacaggcccata

SEQ ID NO: 8225 - DNA, 569 bp, Homo sapiens
ccaaatcttagctatttgaggaatgtagggagaaaagccaccttctctctctatgtctgaaggttcccatggctgtctctttgcccaaggggcaaactttccatcagggcatcttctgtgcctctgaggatcattttccaattataggcaatggtagtacgtgtttcagtgcagaatgagatagagttgtttaatttgacaataaagcgatgcgtcaaaaacctcagtcaacacagtaagtgttttcttgttttcctgctgaccaacctaattctggtttcatacagggcagccaggtgcccacctaaaagactgcacttctcaacttccagttgtttctatggataatggttggaagcagaaattgggttggggcttccagataatcccccctcacagggactgcttcaagagaaagggatgccctttggttctttctcctttccactgcctggaatgtgatgtctgacactgtggcagccatactggcataatgaggccaactctctgccatgctaagagtggcagagctgggaattgaaaagagcctgctagccttgggttgcttc

SEQ ID NO: 8226 - DNA, 636 bp, Homo sapiens
  misc_feature (1)...(636): n = g, a, c or t
ccaaatgggagagtggttacaacacacgagctacaaactacaatgctggagacagaagcactgattatgggatatttcagatcaatagccgctactggtgtaatgatggcaaaaccccaggagcagttaatgcctgtcatttatcctgcagtgctttgctgcaagataacatcgctgatgctgtagcttgtgcaaagagggttgtccgtgatccacaaggcattagagcatgggtggcatggagaaatcgttgtcaaaacagagatgtccgtcagtatgttcaaggttgtggagtgtaactccagaattttccttcttcagctcattttgtctctctcacattaagggagtaggaattaagtgaaaggtcacactaccattatttccccttcaaacaaataatatttttacagaagcaggagcaaaatatggcctttcttctaagagatataatgttcactaatgtggttattttatattaagcctacaacatttttcagtttgcaaatagaactaatactggtgaaaatttacctaaaaccttggttatcaaatacatctccagtacattccgttctttttttttttttttttttttttganacagtctcgctntgtcatccaggctggagtgca

SEQ ID NO: 8227 - DNA, 389 bp, Homo sapiens
ctgtgatgagttgataccagagtatctcaattttatccgtggtgtggttgactctgaggatctgcccctgaacatctcccgagaaatgctccagcagagcaaaatcttgaaagtcattcgcaaaaacattgttaagaagtgccttgagctcttctctgagctggcagaagacaaggagaattacaagaaattctatgaggcattctctaaaaatctcaagcttggaatccacgaagactccactaaccgccgccgcctgtctgagctgctgcgctatcatacctcccagtctggagatgagatgacatctctgtcagagtatgtttctcgcatgaaggagacacagaagtccatctattacatcactggtgagagcaaagagcaggtgg

SEQ ID NO: 8228 - DNA, 355 bp, Homo sapiens
tcgacttttaaaagaggtatgagggctgggcgtggtggcttatgtttgtaatcccagctacttgggaggctgaggttgcagccaagattgcgccactgcactacagcctgggcgacagagcaagactctcaaaaggaggcatgaaatgcacctcaatcttttgctccaagtctgccaaagattgtcaaaccctccctgttaaaaaaaaaaatcagtttacctactctcccttctatataaaggaccctaaaattaaatgtcaatgccaaaatgcgaagtgcagatcgtcttctctccaaataagagttacttggaatccttaacaaatccaaggagaagaagcgaccactgcgaa

SEQ ID NO: 8229 - DNA, 337 bp, Homo sapiens; identical to SEQ ID NO: 7576

SEQ ID NO: 8230 - DNA, 286 bp, Homo sapiens
ggcatctctgtactgaaccccaacaaaaccaaggtccagggaagctgtgagggtgcccatccccacctgcttctctcattcccctatggacacctcagctttggattcatgcaggacctccagcagaaggttgtctacctgagctacatggcggtggagtgcaatgtgtccttcccccacgcagcacagtggacattctcggctcagaatgcatcccttcgagatctccaagcacccctggggcagagcttcagttgcagcaactcgagcatcattctttcaccag

SEQ ID NO: 8231 - DNA, 587 bp, Homo sapiens
ctggcattggtctagagctttataaggccattcagcgagggaccatcaagtgcaactttgcgggggttgccttgggtgattcctggatctcccctgttgattcggtgctctcctggggaccttacctgtacagcatgtctcttctcgaagacaaaggtctggcagaggtgtctaaggttgcagagcaagtactgaatgccgtaaataaggggctctacagagaggccacagagctgtgggggaaagcagaaatgatcattgaacagaacacagatggggtgaacttctataacatcttaactaaaagcactcccacgtctacaatggagtcgagtctagaattcacacagagccacctagtttgtctttgtcagcgccacgtgagacacctacaacgagatgccttaagccagctcatgaatggccccatcagaaagaagctcaaaattattcctgaggatcaatcctggggaggccaggctaccaacgtctttgtgaacatggaggaggacttcatgaagccagtcattagcattgtggacgagttgctggagacagggatcaacgtgacggtgtataatggacag

SEQ ID NO: 8232 - DNA, 364 bp, Homo sapiens
cctattctgaactgcagatgctgtcccccagcgagcggcagtgtgtggagacggtggtcaacatgggctactcgtacgagtgtgtcctcagagccatgaagaagaaaggagagaatattgagcagattctcgactatctctttgcacatggacagctttgtgagaagggcttcgaccctcttttagtggaagaggctctggaaatgcaccagtgttcagaagaaaagatgatggagtttcttcagttaatgagcaaatttaaggagatgggctttgagctgaaagacattaaggaagttttgctattacacaacaatgaccaggacaatgctttggaagacctcatggctcgggcaggagccag

SEQ ID NO: 8233 - DNA, 627 bp, Homo sapiens
ctgtggctgtctgtcagagaagcacatttttctgcagataattagaatggcttcccccatctctcacggactgtcccaagtctagaaaagaattgagttcctcttctattagtcaaataaaagggaagagaatgtttgtcttcctttcctttctgtagtgttaagaaaataaacgaacttaatgattctaaattatcagtgagcttaacactgtactatagaccaaagattaccttttcaaaaagtcctttgaggtgaaatattttgtatacgtaatacatagatgcacatataaacacacacatatagaatctcaatattttaacacttctttgggtagctgtactaactcactaaccctgaggaaaaagttaagaaattgaaagtgttttcttcaaaagttgagatttaacaataaaaggtgttactttgataactaaaaggaactttattatcctcttcctaaaataaaccaatgcctattctgaaaatggcacttgcaattacaatttgccattatcaaagctaccactgaggtagaggcattatctaaaacaaataccacttatcatttattggcagttacctcgagagagacccatacaccatcttctagcagagcacagt

SEQ ID NO: 8234 - DNA, 276 bp, Homo sapiens
ctgagataacgaggaaatattctgaaatggatcccaaatatttcatcttaattttgttttgtggacacctgaacaatacatttttttcaaagacagagacaattacaacagagaagcagtcacagcctaccttattcacatcatcaatgtcacaggtattggctaattctcaaaacacaacagggaatcctttgggtcaaccaacacaattcagcgacactttttctggacaatcaatatcacctgccaaagtcactgctggacaaccaacaccag

SEQ ID NO: 8235 - DNA, 312 bp, Homo sapiens
  misc_feature (1)...(312): n = g, a, c or t
cagctagtacccggngggtcaccatgangttcaatcccttcgttacctcggaccgcagtaaaaaccgcaaacgtcacttcaatgccccctcacacgtgcgcaggaagatcatgtcatncccgctttccaaggagctgcggcagaagtacaatgtccgctccatgcccatccgcaaggacnacgaggtccaggtagttcnaggacactacanaggncagcaaattggcaaggnanntccaggtgnacagaaagaaatatgtcatntacatcnancgggtgcngcgngagaaggccaacggcacaactgtccac

SEQ ID NO: 8236 - DNA, 601 bp, Homo sapiens
  misc_feature (1)...(601): n = g, a, c or t
aaaaaaaaaaaaaggggggggcacattttaagttgtcaacaaaattttttttcatcataaagttatacaactatagaggatgtaatttttgacctattttaaatattgtcattctaaaataagcatgtaatatcactttcaggatatattcagtggaatctaaatatcatagtggtttgacctcttacatcattcttttaaaagtagtcttttattaagagtcaaaaattttatatttttgttttcgttggactaattctaaaatttaagttcctcttacggaatgttatcaaaaattatatagttatatgcttagaagtcttctattgattaagccatcaaacttaagtacatcaaaatttgtactttaaagtttaaattcttttttccttgtgaacataatcctataaactaaaattttcctggaccaagttatttttgtagtttactaatatacaattgatcaaaacaatataaagctatcgtaacatgtgaaagattatacaaattgtaaaaattttgttggaaatatgtcttaatgagatgattagggctgtttttcccaattcacatttnccgtagggaaatattccttaaaact

SEQ ID NO: 8237 - DNA, 632 bp, Homo sapiens
ctaatatcataaataaggttgtttaagacgtgcttcaaatatccatattaaccactatttttcaaggaagtatggaaaagtacactctgtcactttgtcactcgatgtcattccaaagttattgcctactaagtaatgactgtcatgaaagcagcattgaaataatttgtttaaagggggcactcttttaaacgggaagaaaatttccgcttcctggtcttatcatggacaatttgggctagaggcaggaaggaagtgggatgacctcaggaggtcaccttttcttgattccagaaacatatgggctgataaacccggggtgacctcatgaaatgagttgcagcagaagtttatttttttcagaacaagtgatgtttgatggacctctgaatctctttagggagacacagatggctgggatccctcccctgtacccttctcactgccaggagaactacgtgtgaaggtattcaaggcagggagtatacattgctgtttcctgttgggcaatgctccttgaccacattttgggaagagtggatgttatcattgagaaaacaatgtgtctggaattaatggggttcttataaagaaggttcccagaaaagaatgttcatccagcctcctcagaa

SEQ ID NO: 8238 - DNA, 336 bp, Homo sapiens
  misc_feature (1)...(336): n = g, a, c or t
cttttttttttttttttttttttttttttanatatttnaaatacaactttattntgattctaaacgaaaaggaatgggaatgacagtaacaaacaanatttcaccactgaatattgngatgtgactgcagcagtcttatntntgaaactcaaggaatcaactgngttctaaaacagctaaatatgcaggtccaaacaatgaagttattttttaaactgccacattcactccgaagcccactcatntccttcagcatcccacanatgaagcacatgttccgcttagctagataataatgagggggcacacacnctgcaccgntgacatcacaggaca

SEQ ID NO: 8239 - DNA, 488 bp, Homo sapiens
  misc_feature (1)...(488): n = g, a, c or t
ctctttgggacatttaaccatactgtttgacaggaatgtaaggtaattattgacaaaagcacttttagatttccttgattaaagaggaaccatcagttttagatcagtaataatagttgtttatccattagaaaattgcatagctactgttaaggttttagttacattgcattcatgcattcaagttttaaatcttaaatttctttttattttcttcattttaaaagtacagaagtcagattctatttgtgcattttattgtcagaagctttgttgtgtatctttattatcttaactatttatttcagcatatatatagagacaagtctagaagctccctgaaaaactgacttgcgaaaaggaatcacagtggggaaagacttttanttaacaaaaccttaaacaaaaatggaatataaaatgattttttcccagccattgagaccaaatatatatggaatcttgactcttaattgnttgtctttaat

SEQ ID NO: 8240 - DNA, 162 bp, Homo sapiens
ctgcttcttcttgaagtaagcatcagtaagatgttttgggatttttacattgctgatatcgattttggttgaagtggcaatgacaaatttctggtgtgttcttcgtagaggaactcgattgaggaccagaggtccagtcacaagtaataagccactagccag

SEQ ID NO: 8241 - DNA, 553 bp, Homo sapiens
cctgtgagtgaagtgcctctcagagcagtcacccagggaagggaggagggcagggaacggggctaggggagatgcagggacagaaatcagcagaaacactccatgctggttctgactcgctccatctcgtgcaggaagctgtagaactgaggcaaggttaattctatatacacattttcggtttgatttcctttcttaaccaccaactttagttgtaaaaatatacttcccactttctccaattcgctgctcccagatgtcactccaaatttccactccatatctatgagctggttaatcatcagagtctgacctatggcccatcgagcaagggtgggagcattctgcttccacttttcagaaaagtaagtggctttctcctcactaagacccagagttatgaaatccgcctggacctgcttggctgtgagactcttcttcaaagcaccatttggaaccagaaggaggcttttcacgatgcttctgagggagccaagactgatctgattggtggtggcaaattcagagagctgagccagaaatctttccacct

SEQ ID NO: 8242 - DNA, 543 bp, Homo sapiens
  misc_feature (1)...(543): n = g, a, c or t
cctactgtaaagagatgatgcatggtaaaaggaaaatggcagctctatgttattaccagtagtgaaggtgaatgatggattgttacatacagagtaagacttaaatgttgtgaagtttcctacagtttgacaaccaaaacatctaaaaaattcaaataaattttaaggtaatcttgatcttggttgtgagttgcaccagagaggacagtttatttttagttaacttgtacttaacctgcacaataagagtggtgactgactcaaatgtaggtagtactttattgtattccaatttaaaaaaacaaaattaagtctatattttaaaaactctgacaatagcaagatatttaatgaactctacttcatatctagttcatttttttttctggtttgaaaaaaagatcancnttccctgaataaacaaaanngaatgtnaataancangaaaatacaaaaccataatttccaaaaacgaaatgaatgggccaacagtaaaatgcacaatgagccacaactgccctggtatttaagaaaataaaggtc

SEQ ID NO: 8243 - DNA, 462 bp, Homo sapiens
acgaggcaaaaaaaaaaaaaaaaacagtaaaaggtgtctaaataggaaaggaagatgtgaaattatcactgttacctgacaatgtgacgttacatacaaaaagccacaaagactccagaaaaaaactattagacctggtaaatgaatacagtaaagttgcaggatacaaaatcaacctacaaaaaatcagtagtgtttctaagtactaacaacaaactatctgaaaaagaaatcaagaaaacaataccatttataatagctaccaagtaaaataaaatacgtaggaatacatttaaccaacaaggtgaaagagccatacattgaaaactgtaaaacattgatgaaagaagttgaagtctgcaataaaggaaagatactctgtattcatagattagaagaagaattgttaaaatgcccatactactaaaagtgatttgcagattcaatgcattccctataaaa

SEQ ID NO: 8244 - DNA, 447 bp, Homo sapiens
ccactgtcacggtctgtctgacacttactgccaaacgcatggcaaggaaaaactgcttagtgaagaacttagaagctgtggagaccttggggtccacgtccaccatctgctctgataaaactggaactctgactcagaaccggatgacagtggcccacatgtggtttgacaatcaaatccatgaagctgatacgacagagaatcagagtggtgtctcttttgacaagacttcagctacctggcttgctctgtccagaattgcaggtctttgtaacagggcagtgtttcaggctaaccaggaaaacctacctattcttaagcgggcagttgcaggagatgcctctgagtcagcactcttaaagtgcatagagctgtgctgtggttccgtgaaggagatgagagaaagatacgccaaaatcgtcgagatacccttcaactccaccaaca

SEQ ID NO: 8245 - DNA, 494 bp, Homo sapiens
  misc_feature (1)...(494): n = g, a, c or t
cctctaaaatcagatcccctagttactcctctgttctgaatctggggaagtagtaaaccaaaaagacagggaaaaccagatatttagagtcgaagcagcatgcaaaaaataataatgtttttaactaatgaaggctactggagttactaagaatcacctaaaaatgtgctactgtaccttgctcattttgcagatttagaagctgaaacatgggttaggttacttactaaaagtccacctgtggcaacctgcaaataatgcttatttatactaaagatgagtttatctgatagagttaggaaatttcttcttttgagtaagagtattgctataacatatatttttttctgaaatgttttaaaatagaagtacacctaattgttattggttaaaaaaaaaaagccatatgtgaatgaggttggtttttgggttttttnttttctgaattgtattagtccaaaagaactaaattagggtacttgtgctgnaccaaa

SEQ ID NO: 8246 - DNA, 490 bp, Homo sapiens
  misc_feature (1)...(490): n = g, a, c or t
cctagtagtggggtgaggcttggattagcgtttagaagggctatttgttgtgggtctcatgagttggagtgtaggataaatcatgctaaggcgaggatgaaaccgatatcgccgatacggttgtataggattgcttgaatggctgctgtgttggcatctgctcgggcgtatcatcaactgatgagcaagaaggatataattcctacgccctctcagccgatgaacagttggaataggttgttagcggtaactaagattagtatggtaattaggaagatgagtagatatttgaagaactgattaatgtttgggtctgagtttatatatcacagtgagaattctatgatggaccatgtaacgaacaatgctacagggatgaatattatggagaagtagtctagtttgaagcttagggagagctgggttgtttgggttgtggcttagtgtcanctcgagataataacttcttggtctangcacatgaatattg

SEQ ID NO: 8247 - DNA, 493 bp, Homo sapiens
  misc_feature (1)...(493): n = g, a, c or t
tgggagagctagactaagttggtcatgatgcanaagctactcaaatgcagtcggcttgtcctggctcttgccctcatcctggttctggaatcctcagttcaaggttatcctacgcagagagccaggtaccaatgggtgcgctgcaatccagacagtaattctgcaaactgccttgaagaaaaaggaccaatgttcgaactacttccaggtgaatccaacaagatcccccgtctgaggactgacctttttccaaagacgagaatccaggacttgaatcgtatcttcccactttctgaggactactctggatcaggcttcggctccggctccggctctggatcaggatctgggagtggcttcctaacggaaatggaacaggattaccaactagtagacgaaagtgatgctttccatgacaaccttaggtctcttgacaggaatctgccctcagacagccaggacttgggtcaacatggattagaagaggatttta

SEQ ID NO: 8248 - DNA, 510 bp, Homo sapiens
  misc_feature (1)...(510): n = g, a, c or t
ctggtggatacagcgcgcacacagaagacggnctaccagcggaatcgaatgagatttgcccagaggaacctccgcanagacaaagatcgtcggaacatgtngcagttcaacctgnagatcctgcctaagagtgccaaacagaaagagagagaacgcattcgactgcagaaaaagttccagaaacantttggggttaggcagaaatgggatcagaaatcacagaaaccccgagactcttnagttgaagttngtagtgattgggaagtgaaagaggaaatggattttcctcanttgatgaagatgcgctacttggaagtatcagagccacaggacattgagtgttgtggggccctagaatactacgacaaagcctttgactgcatcaccacgaggagtgagaagccactgcggagcatcaagcgcatnttccacactgtcaccaccacagacgaccctgtcatccgnaagctggcaaaaactcangggaatgtgtttgccactgatgccatc

SEQ ID NO: 8249 - DNA, 436 bp, Homo sapiens
  misc_feature (1)...(436): n = g, a, c or t
ctgccccagtcaatgaagattatgcatgagatcatgtacaaactggaagtgctctatgtcctctgcgtgctgctgatggggcgtcagcgaaaccaggttcacagaatgattgcagagttcaagctgatccctggacttaataatttgtttgacaaactgatttggaggaagcattcagcatctgcccttgtcctccatggtcacaaccagaactgtgactgtagcccggacatcaccttgaagatacagtttttgaggcttcttcagagcttcagtgaccaccacgagaacaagtacttgttactcaacaaccaggagctgaatgaactcagtgccatctntctcaaggccaacatccctgaggtggaagctgtcctcaacaccgacaggagtttggtgtgtgatgggaanaggggcttattaactcgtctgctgc

SEQ ID NO: 8250 - DNA, 503 bp, Homo sapiens
ctggccctgtcctgcagaatgaggtgtccggcccggtacagtgggtgttcatgcagatctgtctgggcgggaaacaccagcagctccggcatcaaggggtccaggagaaaatgcttccccttgagggctcgtaagtcatcgaggctgccagggaagaaccattcattcatcatttcctgaatttctccctgccaggccctatttcaacggtccattcatgcaacaaatgttaccacagctatggagaaatcaacagggtgataagggaatccgggatccgcagttgagggaatgggttgtcaagccagacttatgggtcaggagccccctctactgtttaccagcagtgggagcctgggcaagtgattcaatctcaagccccactggcatctctgtaaaatagtaggtgtgaggattcaatgagccaatatatccaagatacttacgtgccacaatttaataaatgttagctattcctgttgaagcataaccttggagaaagg

SEQ ID NO: 8251 - DNA, 236 bp, Homo sapiens
ccaagaagtacaagggccaaaagggcctggtcatcgccaagatggacgccactgccaacgacgtccccagcgaccgctataaggtggagggcttccccaccatctacttcgcccccagtggggacaaaaagaacccagttaaatttgagggtggagacagagatctggagcatttgagcaagtttatagaagaacatgccacaaaactgagcaggaccaaggaagagctttgaagg

SEQ ID NO: 8252 - DNA, 463 bp, Homo sapiens
  misc_feature (1)...(463): n = g, a, c or t
tcgacaaatacccacatgctgttttcctctgctaacgagttgcagagaaaaaaaacagcatgaatttggattttaatcacacatttcttctggaatctcatgtggattaaagatgccagggacagacatttgacgtttatgtttctcttcatcagcctgccgtagggctatttctctctcttccaaaaacaaatcagaagtgtcttcacctgcaaattcctttatttgaactaggaaatctcttaaatgttccttgaaagcaggaatatcttgatttaagctgaaaagccctgtcacaaagagctttacttgagcatcttgtaggtgagggaaggccnacttaaggagattagccncatattcctgaanaaaganttggntgttaactggatttccaggatttaatgatgtacttatttttccttcttcaaccnaattaaacatatatgcaangaattgatgc

SEQ ID NO: 8253 - DNA, 466 bp, Homo sapiens
ccacaggggaaggcaagaggcgatagctgggggtcacttgtcactagatggaagctccttggtccacacagtcccaaagaaaggtctgcccttgggcccacgaaacccatcccagccctcacaggctgaacctcaccctgggttttcccagagaggtgcccaagaagacccaagctgccccaagtcagaggagcagcaggaaacagcctcagaagtccgtcactcttcagtactcctcccttagaatgtccacttcctgtttggtgaccatggcaaccaaaagacaatggcagtgcagtgcgtgtgggatgggggagctccatcttccttgggtacatggggaggagactccagtgaccaggagaagcggggagagccatgggagatgttagagggacccagagaagatgggggacaggaaaaaggagagaatctgtctcaagtaaatggcctcctgccttggacc

SEQ ID NO: 8254 - DNA, 447 bp, Homo sapiens
ctgaaaggaggtggatggggacagagcaccaaggggaaggggccctcggcccaaggggggaggaacctagcccccaccccgctacagctccccactgaattcacagcacagagaacacctctcgcccaacaactccacatggaggtataccaagtccaggggtcaaaggagcaggtgggtgacagatgggcaggggcagtgaagatgacagcaggctcaggaggggaggtggcagaaacttcctcctacccatgggaggagacgatggggcgactgatattgctgttggtggtcatggcattcagctcccacctgatatcatgaggcaaacaggactggtctaggttatactgaatcacggccagtttgcacagagtcttcagactagggctaaagtccaaaatgtgtaagtcagaatgatctataaggtcaaattcatctcccagg

SEQ ID NO: 8255 - DNA, 539 bp, Homo sapiens
ctgacatcctaaaaacgaagtcaaattagggaaggatggccgtttccttgagtcaaaagcccagcaggattgcattataatgtatatttcttctgtagcataaaatggctgatccattttaaatccattttgaatcagtttgtagaagttagcatcaaccggaatgccagggtaaggattcacaccaagtgagaagatttcccacagtaatattccatatgaccagacatcactcttaatggtgtagatgccttcaaacaggctttcgggggccatccattttacaggcagacgggcattgcccctgacaacatagttggaatcactcatgatatctcgagccaatccaaagtcacatatcttcaccactttcccgtgggtgacaagcacgttcctggcggccaggtctctgtgaacacacgacttaaattccagaaattccattcctttggcaacttgatatgcaaagcaaagaagatcttcaaatgtaagcacattcaagtcctcctcttcttccagccttttttggttttcatatt

SEQ ID NO: 8256 - DNA, 401 bp, Homo sapiens
ccatcggtgctgaaattgagcattttaaatagtacagtaggctggtatacattaggaaatggactgcactggaggcaaatagaaaactaaagaaattagataggctggaaatgcttactttctgctctcattttctttcattttgtctgctgtctttttgaatgccaatactttcatttaaaatgttttgggagcacggcaacccaaaatgactgaacggtggtccaaaaatccaaaccaactgataattacttctcgaggtgataggaaaggcacaggaagttaggactttggctgaaatgatgaaaacacatgttcgccattttagggatcagcgcctcgactcctgccacctccggctccaacgatgatcatgtttggatgtatttattgaattgtcc

SEQ ID NO: 8257 - DNA, 383 bp, Homo sapiens
ctggcagaccccccaaccacatcagaggagttttcatttcttcctgggctgcttatctgggaagccttcaaagaattcgttacacatcatggcgatgcaggacaggaagacacagtactcttggaagtccacctcgttgtccctgttgctgtccaagttgctcatcagcttctggaaagcagcttcatctgtccttttccccaagaagctgggcagctcccgggtcagcagctcctttagttctgacttgttgagcttgaacttgtcaccctctttgcccgagtacttgtggaaggtggacaccatcacatccagggccttctccagagggcacgccatgacagcagtcaggatcaaaccaagaaagaagaagcgctgaggag

SEQ ID NO: 8258 - DNA, 442 bp, Homo sapiens
  misc_feature (1)...(442): n = g, a, c or t
cctagtagtggggtgaggcttggattagcgtttagaagggctatttgttgtgggtctcatgagttggagtgtaggataaatcatgctaaggcgaggatgaaaccgatatcgccgatacggttgtataggattgcttgaatggctgctgtgttggcatctgctcgggcgtatcatcaactgatgagcaagaaggatataattcctacgccctctcagccgatgaacagttggaataggttgttagcggtaactaagattagtatggtaattaggaagatgggtagatatttgaagaactgattaatgtttgggtctgagtttatatatcacagtgagaattctatgatggaccatgtaacgaacaatgctacagggatgaatattatggagaagtagtctagtttgaagcttanggagagctgggttgtttgggttgtggctc

SEQ ID NO: 8259 - DNA, 357 bp, Homo sapiens
ctgttgaggtgcagggcctcagctttgtcccggtgtgccacctctgaaccctgctgtctggtttaagtaccactcctgtgggaatggtggcattgttcctagttgtgcccggttcccactcccctcccccaggactggttgatgtctagagctgcctttcacgtggccccaccctcccctcttgcatagtggatctgaaaagcagcaccttgtgacttaacatcacctgcttcatgtgctgggctagctctcgtgccagccaaactcgggaggaaaagggacctaggatctaggcaggggctgggctgaaatcagtagagggcagggaggaaagaacacagttcccacgctctcatc

SEQ ID NO: 8260 - DNA, 391 bp, Homo sapiens
ctgaaaaaatcctggcaaactacaagctgtccacaagaaagcaaagcaacatgtttgaaggggtatggagtgctaactctgtgccacttttgcaagcaattttgctcagtctgtcattgtattagccttaacaaaactccttgtaattatagacgtttttattcaaaataagatcttactattatacaggtttctctcttttgactatatacagaagtgcaaaaagtcaaccttctccctagacgttccaacatgctaaattgcagcataatcaaccctcaagagtttgcacacacgctataattttcattacgtaaactttgagtatttggattatcaacaaaaagtcccttgttctatttattgattatgcagcttatttataacaagg

SEQ ID NO: 8261 - DNA, 501 bp, Homo sapiens
  misc_feature (1)...(501): n = g, a, c or t
ggcaggtctgctgctaccaccctgactggaccagttctatcaagatacaacctagcaacaccctggaactcctagtcacaggcttactccccaaacccagcctattagcccagcctggtcccatggtggcccctggcgaaaatatgactcttcagtgtcaaggggaactgccagactcaacatttgtcctgttgaaggagggggctcaggagcctttagagcaacagaggccaagtgggtacagggctgacttctggatgccagcagtgagaggtgaagactctgggatctatagctgtgtttattatttggactctactccctttgcagcttcaaatcacagtgactccctggagatctgggtgactgataagccccctaaaccctctctgtcagcctggcccagcaccatgttcaagttagggaaggacatcacccttcagtgccgaggaccccnnccaggtgttgaatttgtcctagaacatgatggagaagaagcac

SEQ ID NO: 8262 - DNA, 347 bp, Homo sapiens
  misc_feature (1)...(347): n = g, a, c or t
ccaagagatgcagtgccaggaacccttaaacagttgcacagcatctcagctcatcttcactgcaccctggatttgcatacattcttcaagatcccatttgaattttttagtgactaaaccattgtgcattctagagtgcatatatttatattttgcctgttaaaaagaaagtgagcagtgttagcttagttctcttttgatgtaggttattatgattagctttgtcactgtttcactactcagcatggaaacaagatgaaattccatttgtaggtagngagacaaaattgatgatccattaagtaaacaataaaagngtccattgaaaccgngattttttttttttt

SEQ ID NO: 8263 - DNA, 297 bp, Homo sapiens
ctgtgtctctctttcctcttctgttcctataagggcagggcctccttcaggaacagccaccagtgagcttcctcctcccttctggtcagttggatttgtcactgttcagcatcttttcgatgattttcttaactatgggggatgcaggattgaggcaagctttccgcccattcttgagtgtggctatgacttcggtttgggcgcagtggggtccgggggacttcacgttcacactttggatgttcttggggtgaattccctgcagggtctgcaagcactggcagcgcagttcagtgg

SEQ ID NO: 8264 - DNA, 505 bp, Homo sapiens
ccatggttgaatatctggatgctatagaacatgcttataatggacttgctgcccagagatgtttaggaagttcaagtggattctgagccagatggttgctttagatccgcaccagtacgcaaaagttctatagccaacatactgcgttaacttgacacggtttagaccagttagactgtgcaaaaataggtagtctgcacacactacatgagccctttagcaccctgtttgctttagcactttcatcactttgttttccaaaaactcaaaacagccaaaaaactgatttgatatgggaatcacggtatttttcttgtgttttgttttgtttgtttgtttccaaattgtctaaatcactaaccaagatcattcgaccagcttaggaaaaacaaatagattgtgcatttgagttcagttttgattctgtaaagactttgcaaagcctacttcactaattatgtgctactgttaaatggtatttgataggttgttggaaaagataggg

SEQ ID NO: 8265 - DNA, 491 bp, Homo sapiens
  misc_feature (1)...(491): n = g, a, c or t
accagtctcagcctcccaaagtactgggattataggcgtgagccactgtgcacggctgctgacccacatttaatagtataatgacattccctctaacagtgtcatttttgttttctttgtaccaataggtaatttgtcgtccagatgctctgctatatgtgaagtatcatttttctattgaacacaggtcatccttcagtttcatttttctcttcaccaattggatgctgcatacctggttttcagctcattcatgtgttagatcccctgtgtcctagatcgtatacctttctctttcttgatttactttctcattttatagagcacatcattgagtagaaagatggaaaataatttttgggatttatacaattaaaaatcattagtctcccttcaactttagtaataaaattgtagattggaaattattttccctcagaattttaaaactctttttctgnttctcttancttcttttcaggttgagaaga

SEQ ID NO: 8266 - DNA, 488 bp, Homo sapiens
  misc_feature (1)...(488): n = g, a, c or t
ctgtggtttgttgtcaattggtggctgttggctggtctgcttagttatatcagtgaggaaggggacaatgttagaccttgtactgctgggacttagtgatgtcactgatgacaggaagcttctagttggttggttagtttcattggcctgatctggagagagtggactgagaattactggggctgtgagaacttgccttccctagaatcatggcctgtctttttcccacacaggaacttgagcttgttcctccctacacaggaacttgggggccaatagcattgtccctgattttcatnttttcactggttgtattattggagaattttactgtttaaaatgtaaatgaaaaatttatattctcattcagttcacatcagcaaagcattactcccatttaggggtagttttttttttttttttaaatgacatctgctaaaatgggatcctttatnnatcagttttagttacnatattattttctccaa

SEQ ID NO: 8267 - DNA, 253 bp, Homo sapiens
ccttatgaaggacattgtaggagccaatgagaaagaaatagccctaatgaatgctttgactgtaaatttacatcttctaatgttatcattttttaagcctacgccaaaacgatataaaattcttctagaagccaaagccttcccttctgatcattatgctattgagtcacaactacaacttcacggacttaacattgaagaaagtatgcggatgataaagccaagagagggggaagaaaccttaagaatagag

SEQ ID NO: 8268 - DNA, 510 bp, Homo sapiens
cactgtcaggaccaatttacttgatttttgaatactgttgctatggtgatcttctcaactatctaagaagtaaaagagaaaaatttcacaggacttggacagagattttcaaggaacacaatttcagtttttaccccactttccaatcacatccaaattccagcatgcctggttcaagagaagttcagatacacccggactcggatcaaatctcagggcttcatgggaattcatttcactctgaagatgaaattgaatatgaaaaccaaaaaaggctggaagaagaggaggacttgaatgtgcttacatttgaagatcttctttgctttgcatatcaagttgccaaaggaatggaatttctggaatttaagtcgtgtgttcacagagacctggccgccaggaacgtgcttgtcacccacgggaaagtggtgaagatatgtgactttggattggctcgagatatcatgagtgattccaactatgttgtcaggggcaatgcccgtctgcctg

SEQ ID NO: 8269 - DNA, 486 bp, Homo sapiens
cgcgagcgccctgcagactgagggagagagagagaaagaggaggggaggaggaggaggattcagggaataggagctggggagcccttctgcgccacaggttcaagcgattctcctgcgtcagcctcctgaggagctgggactacagtgatatcagtatcaagataaaagtttggaatgggagaaaaattctcaaagcctgaaagaaaatctgtagttacttttggtgacgctgtccagttcccacaatgtatcattccttatctgaaactagacatcctctgcagccagaagaacaagaagtaggcattgaccccttgtccagttactctaacaagtctggaggagattcaaataaaaatggaagaagaacaagttctactttagactctgaagggacttttaattcctataggaaagaatgggaagaactatttgtaaacaacaattacttggcaacaataaggcagaaggggattaatgggcag

SEQ ID NO: 8270 - DNA, 362 bp, Homo sapiens
gtgtctcgtgggtgaatttgtaagtgatgtcctgctagttccagaaaagtgccagtttttccacaaagagcggatggaggtgtgtgagaatcaccagcactggcacacggtagtcaaagaggcatgtctgactcagggaatgaccttatatagctacggcatgctgctcccatgtggggtagaccagttccatggcactgaatatgtgtgctgccctcagacaaagattattggatctgtgtcaaaagaagaggaagaggaagatgaagaggaagaggaagaggaagatgaagaggaagactatgatgtttataaaagtgaatttcctactgaagcagatctggaagacttcacagaagcag

SEQ ID NO: 8271 - DNA, 496 bp, Homo sapiens
  misc_feature (1)...(496): n = g, a, c or t
ctttcctgccagtgtcagaaaatcctatttatgaatcctgtcggtattccttggtatctgaaaaaaataccaaatagtaccatacatgagttatttctaagtttgaaaagtaaaaagaaattgcatcacactaattacaaaatacaagttctggaaaaaatatttttcttcattttaaaacttttttaactaataatggctttgaaagaagaggcttaatttgggggtggtaactaaaatcaaaagaaatgattgacttgagggtctctgtttggtaagaatacatcattagcttaaataagcagcagaaggttagttttaattatgtagcttctgttaatattaagtgttttttgtctgttttacctcaatttgaacagataagtttgcctgcatgctggacatgcctcanaaccatgaatagcccgtactagatcttgggaacatggatcttanagtcactttggaataagttcttatataaatacccccagcc

SEQ ID NO: 8272 - DNA, 508 bp, Homo sapiens
ctgccatctgggcatttgcaatgtccatgcatactcttgaagcagcattcaattctgttcccccttttcaatgtatggttcatggggtttggtatcttgataggactaaggaaggggaagctgtcataaaccaggaagggaaatatttaattggaaagaacaaggctgttcattcaaattgcatttcctacagatttatccaataatggacaagtcaagccgcacacgtcttgctctcattatctgcaatgaagaatttgacagtattcctagaagaactggagctgaggttgacatcacaggcatgacaatgctgctacaaaatctggggtacagcgtagatgtgaaaaaaaatctcactgcttcggacatgactacagagctggaggcatttgcacaccgcccagagcacaagacctctgacagcacgttcctggtgttcatgtctcatggtattcgggaaggcatttgtgggaagaaacactctgagcaagtcccagatatacta

SEQ ID NO: 8273 - DNA, 601 bp, Homo sapiens
  misc_feature (1)...(601): n = g, a, c or t
ctgggaagccacgagaatattgtgaacctgctgggggcgtgcacactgtcaggaccaatttacttgatttttgaatactgttgctatggtgatcttctcaactatctaagaagtaaaagagaaaaatttcacaggacttggacagagattttcaaggaacacaatttcagtttttaccccactttccaatcacatccaaattccagcatgcctggttcaagagaagttcagatacacccggactcggatcaaatctcagggcttcatgggaattcatttcactctgaagatgaaattgaatatgaaaaccaaaaaaggctggaagaagaggaggacttgaatgtgcttacatttgaagatcttctttgctttgcatatcaagttgccaaaggaatggaatttctggaatttaagtcgtgtgttcacagagacctggccgccaggaacgtgcttgtcacccacgggaaagtggtgaagatatgtgactttggattggctcgatatatcatgagtgattccaactatgttgtcaggggcaatgcccgtctgcctgtaaaatggatggcccccgaaagcctgtttgaangcatctacaccatta

SEQ ID NO: 8274 - DNA, 503 bp, Homo sapiens
cctggtagtgtgactacccggaataatcaggaaaggcatcaccaaggcagcagtagctgtgctgtgatcaaagaatgcacagggcttgtagctacaggagagagagaacagtggcaattccaggcagagggagtggcatgttcagcagcacaaggaggagagtggctgcccaggaaggaccctcaggagttctttccttgcagtaggggatggaggtggtgctaaggctggaagagagtgtgtggatccagattgcgaagcatttcaaatgccatgctagggagtttaaagatttttgccaaaatgaaatgatgtcaccagaaatagagcattacctgtctgcctggtgtgcattaggtggacagaagagggagacatagcaagtagaagactgttttaataaatagaccaggcaagaaattagatcttaactaaaagctcccaaatctttaggcatttcaggcatttctatgccagttggagactgggggaattccccgagg

SEQ ID NO: 8275 - DNA, 481 bp, Homo sapiens
gagcaattcctcgggaaaaaatatttagcatagcagtaaagactgataggatgcctcaaaattcttaagttcacacgtatttcttaacgaatatactttccattacaaggttctatattatagtttttaatgacaaacttattaaacatctgggaaaggtccacttccttaaacctcttctccaaatcaggaacaggttagattgacatatttaacaggtagatttaggcatggtgtaggaatcatatcacctgggatttgtggtataggcacatcttattgaaatgaatgttttatgactttacctgatgaaccattaaggactggacctgccgtttgaggacctgcattctagctgttgtgacaactgaccgaacgtctggcaccacactctcactaagaatttcactgatgaggcggtggtttctctggaaacgggcggtggctgtatgcttcattgaaaagccatcatcataatctg

SEQ ID NO: 8276 - DNA, 516 bp, Homo sapiens
  misc_feature (1)...(516): n = g, a, c or t
ccccccccttttttttttttttttttttttttttnaaaaaaaggattttaggtttctttggngaaacaaaagcagatntaaaaagttacaaagattttanattttcattcacaaaaaaagtcattcacattttacactatacacgttatgatataaatncaggaaagtnttatgtgcattgtaaaganaaaggaaaaatagaaacctactanatcaacacagngttgttctgngctctaaaatacctaangggggattacatttaatgcaacanccaagggaacctgcttaaacatactgngtattattgnanctagagtcattccttntaagccaaaggnggttttataaaaaanaatcaatnttgggccaatccctttgngccctttttctctttttctatgggcatttnatttttngnctactcttcttcaagttgctctaaactgaaattagggaaggannctcactttccattacaggtttttntttaaacattaaattaagnggataagg

SEQ ID NO: 8277 - DNA, 489 bp, Homo sapiens
tgacagtgcaacatcttaaccaagaagtaaatatgacctcagtgtcctataaataatgtaagagcaggatttgaaacttggagagctgttttctcatttcatgtacacttgccccaaattgtctttgaagtcgtgtgcattgcacgttggatgagccagggaaattattacattaacaagcattttgtgtgtgcgtagtagttactttgtactgagagaacttgctttggggtgcaattaaacaataaactgattttatttgggagaaacaaggaagggtgcacttaactagcaacctaagcatgatttttcagcttttgcccttagggtttaaattacaattccaaaatgttagacatactgtattttttcgttcagtgtggctttaattttcccctcttgcagtttgttctgtaatgccttttacatttggacacatagtttatgctttttagattttggttgctttcttgccaaaataagtgttaa

SEQ ID NO: 8278 - DNA, 449 bp, Homo sapiens
  misc_feature (1)...(449): n = g, a, c or t
cctggctcaacaaaagggctggggattggccctgaaaggagagagctgactgtcctggctgatggacaggagatcctcttagcactaccctaaggcaggcagttgggcattggtgtagacaacaggaaagtccaggctatagccgtactcaaaaacctttctgttccctttctgccagccctagggattgagtccacattcagcacaggactctctgggtacagctctctttaggaagacacaaattgcatggtgaagtcagttatatcctggccgcctttggtccctcccaggaagacgggcatgttttctgcttgagaggtgctgatgtaccagttggggaactgggcagactcaaattccagcttgntattgatttctatcttgntgaagacaaatcgcttttccatcttcttctttgggtaatttttgggatctacactctccag

SEQ ID NO: 8279 - DNA, 493 bp, Homo sapiens
cttatttctcttgtcctttcgtacagggaggaatttgaagtagatagaaaccgatctggattactccggtctgaactcagatcacgtaggactttaatcgttgaacaaacgaacctttaatagcggctgcaccatcgggatgtcctgatccaacatcgaggtcgtaaaccctattgttgatatggactctagaataggattgcgctgttatccctagggtaacttgttccgttggtcaagttattggatcaattgagtatagtagttcgctttgactggtgaagtcttagcatgtactgctcggaggttgggttctactccgaggtcgccccaaccgaaatttttaatgcaggtttggtagtttaggacctgtgggtttgttaggtactgtttgcattaataaattaaagctccatagggtcttctcgtcttgctgtgttatgcccgcctcttcacgggcaggtcaatttcactggttaaaagtaagagacag

SEQ ID NO: 8280 - DNA, 422 bp, Homo sapiens
ccgcctgctactgagtaaggggcattcctgttacagaccaaggagaactggagaaagaaagagaaaatcagttcgtggttgcattgtggatgcaaatctgagcgttctcaacttggttattgtaaaaaaaggagagaaggatattcctggactgactgatactacagtgcctcgccgcctgggccccaaaagagctagcagaatccgcaaacttttcaatctctctaaagaagatgatgtccgccagtatgttgtaagaaagcccttaaataaagaaggtaagaaacctaggaccaaagcacccaagattcagcgtcttgttactccacgtgtcctgcagcacaaacggcggcgtattgctctgaagaagcagcgtaccaagaaaaataaagaagaggctgcagaatatgctaaacttttgg

SEQ ID NO: 8281 - DNA, 521 bp, Homo sapiens
ccacactctacttctgcttctgccacctatggggtcgaggcaggtgtggtgccttggctaagtccacagacttctgagaggcccacgctttcttcttctccagaaataaaccctgaaactcaagcagctttaatcagagggcaggattccacgatagcagcatcagaacagcaagtggcagcgagaattcttgattccaatgatcaggcaacagtaaaccctgtggaatttaatactgaggttgcaacaccaccattttcccttctggagacttctaatgaaacagatttcctgattggcattaatgaagagtcagtggaaggcacggcaatctatttaccaggacctgatcgctgcaaaatgaacccgtgccttaacggaggcacctgttatcctactgaaacttcctacgtatgcacctgtgtgccaggatacagcggagaccagtgtgaacttgattttgatgaatgtcactctaatccctgtcgtaatggagccacttgtgttgatggttttaacac

SEQ ID NO: 8282 - DNA, 285 bp, Homo sapiens
  misc_feature (1)...(285): n = g, a, c or t
cggaggaaaaggttggggaacagctaaataggttgttgttgatttggttaaaaaatagtagagggatgatgctaataattaggctgtgggtggttgtgttgattcaaattatgtgttttttggaaagtcatgtcagtggtagtaatataattgttgggacgattagttttagcattggagtaggtttaggttatgtacgtagtctaggccatatgtgttggagattgagactagtagggntaggcccaccgctgcttcgcangcggcaaagactagtatggcaat

SEQ ID NO: 8283 - DNA, 310 bp, Homo sapiens
ccaacattaaaaaaaaaaaaaagtaagacaattgccctggaatcccatccccctcacacctccttggcaaagcagcaggagtgctaactagctagtgcttcttctcttatactgcttaaatgcgcataattagcagtagttgatgtgcccctatgttagagtagaatcccgcttccttgctccatttgcattactgcaggagcttctaactagcctgaattcactctcttggactgttaatgtgcatacttatatttgctgctgtacttttttaccatgtaaggaccccacccactgtatttacatccca

SEQ ID NO: 8284 - DNA, 535 bp, Homo sapiens
  misc_feature (1)...(535): n = g, a, c or t
ctggctctggcatgaattttatttttaaataatttgttatttaaaatgaattactgaggggacagcccggctctctcttcatgattgttaccgcaactatatacaacagtttgctttccagattcaatttcgctttttctacattagatataaaagggggtaggttgaaagaggggagggtaaaataaaaaacataaacacacagacatacacatatcctggtttgggattttgcacccaataacttaaaaaaaaagtgttgcaaaaacttctgcccactctccacctgaggaacaccatgcatttgagaaacacggactctgtcacataaacggtgctgcctaaaacagtatggaggcggggaaggaagctagcaggggttggaattcattttgaaaaaagattgttttgttagaaaaagcaaaaacaaaaaagcattagaaagtgggagccactgcacagcagtagcctananactggctgcgatatggtagctntgccttgatatcatcttcgtgtcttcaggcatagagaa

SEQ ID NO: 8285 - DNA, 521 bp, Homo sapiens
  misc_feature (1)...(521): n = g, a, c or t
gagcccgttaggcagagtttgcagtgagccaaaattgagccactgctctccagcctgggtgacagagcaagactccgtctctaaatagatagatgaatgaatgaatgaatgaatgaatgaatgcagggcggccaggtgcagtggctcatgcctgtaatcccagcactttgggaggccgagggcagatcatgaggtcaggagttcgagaccaccctgaccaacatggtgaaaacccgtctctacaaaaaatacaaaaaaaaaaaaattagccaggcgtggtggcacacgcctgggtgagagtgagattccacctcaaaaaaaaaaaaaaaaaaaaaaaaangccgggcatggcagtcctgtggtccgatactcgagaggctgaggcaggaatttcacttgagcccacatggttgaggctgcagtgagctgtgccactgcactacagcaagaccctgtctccccaaccaaaaaaagaaaataaatgttcgtataatttaaaaagaggccnggagttcaagacc

SEQ ID NO: 8286 - DNA, 500 bp, Homo sapiens
  misc_feature (1)...(500): n = g, a, c or t
aaaattgaaaaaaaaaaaaaaaaangctaancaaaaaanccaacttgttttccattaataaaagggggaacctgagtcacatgaggactggattgtcttanctacgtacttggcaatgtcactacacaaagaagaggaagtttggagaaggtctcagtgacataagggaaagttttatgtagggcaagactaaaagcagattgattacctaaaaaaagtttcctccctctaaagatgtttccgtaatcccttcctggctactcctggaataaccctaaattttgtatcaacaatcattagctcaaaatagagctgggcagaaaatacttccctaagattcttttatactcataagcatgtttttgnttttcattttgntttgttttgcactgaggngtatttgggtaaaatttccgngtgtgtcatgtgggactagtacagacttgggagcccaaggcttgntaatatcacttgatgctttcttggaggaccagtctact

SEQ ID NO: 8287 - DNA, 471 bp, Homo sapiens
ctgaagggtacagccatttcatagggtcctctcagagagtatttggtttgctttcctaactttctaaaaatagtagattacacaggccacctccatctcatggctcaagaactcagaaaaggctggactatggatttaagcaatacacaggacacattttattaaagaagtcaggattattacaagttttctaaatttttttccgtttactctgtgagagaatgcaaatgatctagcggttaatggcatggaaacctcataacgctcccaaatttcagaacttcaagcatgagtcatacagttactttaacagttttaaaatatgtttttgatctattttagccacaagactgaatacaagaggactgctatctgaagggaaggattctaaatactgtacaaagaatcacatgtgtcagttataaatatatacacacacacgtaagaaacatgttttttaacataaatgct

SEQ ID NO: 8288 - DNA, 449 bp, Homo sapiens; identical to SEQ ID NO: 8278
  misc_feature (1)...(449): n = g, a, c or t

SEQ ID NO: 8289 - DNA, 464 bp, Homo sapiens
ctgccagtttggagcattgccctctaagagctttaaaactatttttttacatgccttatatacattccactaatgacattcttataataatattaaacacatgaccttggtactaacatactcactgtgaacccagcctattgcaaaaataaaatctttttataatattatctatgggatgtcagcacaatataacactctgggaagaagtggagttttttggttattaggttaattttctagtaaaacacattgcctgttttcagttaacactggtaatgccattttaatatatggctttttcaaatcagttcagtgaaaatagtacagatttaggtttacataactactctgacatactggaattgcatatagagatgttcagtggtcgtttttcattttaagtaatttttgttttggcatttttttgtgtgaagtaaattaatcaactagagaggtgcaaa

SEQ ID NO: 8290 - DNA, 384 bp, Homo sapiens
ccacaacgtcaatattcctggttaccctacattagagtatgcttccaaagctgtgtgcataacatggaattctttagagtagccattactgcattttcccaagggaaatttgcaagaattggatacatcagaatttaatcagaaactaaagccatgtcttttcccagaacatgccccagacgtggtttttaattttttgttgttgttattttggttttttaacgaatatggtttttaactgacctataagacagtccatttaaatatataaatttttaatagccttccaggggccatttcctaaatcccacctgagaggattaaatgagacaacgtagccaaaccccaggcattctccccttaagaaccttgtttggggaatgg

SEQ ID NO: 8291 - DNA, 295 bp, Homo sapiens
ctgtggtggtgccttctggagaagagcagagatacacatgccatgtacagcatgaggggctgccgaagcccctcaccctgagatgggagccatcttcccagtccaccatccccatcgtgggcattgttgctggcctggctgtcctagcagttgtggtcatcggagctgtggtcgctactgtgatgtgtaggaggaagagctcaggtggaaaaggagggagctactctcaggctgcgtccagcgacagtgcccagggctctgatgtgtctctcacagcttgaaaagcctgagacag

SEQ ID NO: 8292 - DNA, 506 bp, Homo sapiens
cagaagtaagcctcatcatcagagcctttcctcaaaactggagtcccaaatgtcatcaggttttgttttttttcagccactaagaacccctctgcttttaactctagaatttgggcttggaccagatctaacatcttgaatactctgccctctagagccttcagccttaatggaaggttggatccaaggagggtgtaatggagcatcaagccactcggcggcagcatggagctataactaagcatcctttagggttctgcctctccaggcatttagccctcacattagatctagttactgtggtatggctaatacctgtcaacatttggaggcaatcctaccttgcttttgcttctagagcttagcatatctgattgttgtcaggccatattatcaatgtttacttttttggtactataaaagctttctgccacccctaaactccaggggggaaaatatgtgccaatcaatagcacccctactcacatacacacacacctagccag

SEQ ID NO: 8293 - DNA, 512 bp, Homo sapiens
  misc_feature (1)...(512): n = g, a, c or t
cctttgcatgttaaagctgtataatttgttgggttgtgagtggtctgacttaaatgtgtattataaaatttagacatcaaattttcctactaactaactttattagatgcatacttggaagcacagtcatatcacactgggaggcaatgcaatgtggttacctggtcctaggtttgaactgtcttatttcaaaagatttctgaattaatttttccctagaatttctccttcattccaaagtacaaacatactttgaagaatgaaacagattgttcccatgaatgtatgctcatactcgactagaaacgatctatgttaaatgactgtgtatatgaattatttcaagtactaccccaaataactttcttattgctctgaaagaagaaaagcaatgtaaatcactatgattattgcacaaacaaccagaattctccaacaattttaagtaatctgatcctcttcttggagaaaattgttacctaatagtttttccttatgaatgntattactac

SEQ ID NO: 8294 - DNA, 383 bp, Homo sapiens; identical to SEQ ID NO: 7947

SEQ ID NO: 8295 - DNA, 467 bp, Homo sapiens
  misc_feature (1)...(467): n = g, a, c or t
canaaanttanctggtntggnggtgcacncccgtagtcccagctacttgggaggctgagacaggagaatcgcttgaacccaggaggcggaggttgcagtgagtggagactgagccactgaactccagcctgggtgacaaagtgagactctgtctcaaaacaaaaaacaaaaaacaaaaaaagaattagccaggcgtggtggcatgcgtctgtagttccagctacttgggaggctgaggcaggagaatgtcatgaacccaggaggtggaggttgcagtgagccaagattgcgccactgcactccagcctgggtaacagaatgagactccgtctcaaaaaaaaaaaaaaaaagaggaatgagaacatgtgaccacacaaagttttgtttatgaatgttcataataattttgtttttaatagccaaaaactgaaaataacccaactgcgcaacaatggttgaatggataa

SEQ ID NO: 8296 - DNA, 506 bp, Homo sapiens
  misc_feature (1)...(506): n = g, a, c or t
cctgccttaccgagagccaaacagagcccagggagactccgctgtgggaaacctcattgttctgtacaaagtactagctaaaccagaaaggtgattccaggaggagttagccaaacaacaacaaaaacaaaaaatgtgctgttcaagttttcagctttaagatatctttggataatgttatttctattttttatttttttcattagaagttaccaaattaagatggtaagacctctgagaccaaaattttgtcccatctctaccccctcacaactgcttacagaatggatcatgtcccccttatgttgaggtgaccacttaattgctttcctgcctccttgaaagaaagaaagaaagaagactgtgtttttgccactgatttagccatgtgaaactcatctcattacccttttctgggtttgaagctgctgtctctagaagtgccatctcaattgtgctttgtatcantcagtgctggagaaatcttgaatagcttatgtacaaaa

SEQ ID NO: 8297 - DNA, 477 bp, Homo sapiens
  misc_feature (1)...(477): n = g, a, c or t
ctgctttccccagaccagggggtccaatggctgcaatgtacccaaatggaatgttgcccccttaaacaccattttccctccaggaccaccttggtttctaggcactgtggttcttggcaggggctgtcttaggtaaaagggtagttgtggagctacagtctgaagaacatagcttgggctcaagttcaaatgagccatctttttcctttgcgtttttcttgactgaaggtgagatgttatttgtggcatgtgaactgtggcaggtgggaataatcctgcccttgagagaaaggatctccagcctcccagaagcctgctgtgctttcgtcccacagctttctgcccattgtttcttactagtttcttgaattgttcttgtggacttttcctcagggatacattggcctgcaggtcccagttcacatgtagtcccctgctcaccattggagaatcagctcactgntctctanaaacgtg

SEQ ID NO: 8298 - DNA, 546 bp, Homo sapiens
  misc_feature (1)...(546): n = g, a, c or t
ctgtcaacctttctttaactgaggaaacatttgagggctctgctgatgttctggctagctacactcaggcaacacatgatgaatcaatgacttatgaagatagaagccaactagatcacatgggctttcacttcacaactgggatccctgctcctagcacagaaacagaattagacgttttacttcccacggcaacatccctgccaattcctcgtaagtctgccacagttattccagagattgaaggaataaaagctgaagcaaaagccctggatgacatgtttgaatcaagcactttgtctgatggtcaagctattgcagaccaaagtgaaataataccaacattgggccaatttgaaaggactcaggaggagtatgaagacaaaaaacatgctggtccttcttttcagccagaattctcttcaggagctgaggaggcattagtagaccatactccctatctaagtattgntactacccaccttatggatcanagtgtaacanaggtgcctgatgtgatggaaggatccaatcccccatattaca

SEQ ID NO: 8299 - DNA, 326 bp, Homo sapiens
ctgagaccaaaattttgtcccatctctaccccctcacaactgcttacagaatggatcatgtcccccttatgttgaggtgaccacttaattgctttcctgcctccttgaaagaaagaaagaaagaagactgtgtttttgccactgatttagccatgtgaaactcatctcattacccttttctgggtttgaagctgctgtctctagaagtgccatctcaattgtgctttgtatcagtcagtgctggagaaatcttgaatagcttatgtacaaaactttttaaattttatattattttgaaactttgctttgggtttgtggcaccctgg

SEQ ID NO: 8300 - DNA, 512 bp, Homo sapiens
ctgcctttcctgggagccactttgattccactgaacgcccttcctgccctttccacttttggttccaaagccctccctagtttccatcagaggttctacaacatgaaaataagtcccacctcacagatttgttccacgtaacatgcccctactgatggtcattggattactctcttccattgcaaaataaattcagaatcagacttttctggggttgaattttattcctgactgtgacatgagctaggaaaagtcagttcacctctctgagagtgttttcccatacttgaaattgggggggagagataaagtcaataatcattagcattattacggggataaaataagctaatttgtgtaaagtgtttaatgtgatgcctggaaaagcataagtgcttgacaaagagtagctattactggggcaattattatgacttttgttatcatcgttattgaaaacttattgcttgagcacaatctgggctaagtaggaaactaagtgaatgtgatgc

SEQ ID NO: 8301 - DNA, 580 bp, Homo sapiens
ctggtgagaggaggagttagagctggtcgttttgtgattacccataatattggaagcagcctgagggctagttaatccaaacatgcatcaacaatttggcctgagaatatgtaacagccaaaccttttcgtttagtctttattaaaatttataattggtaattggaccagttttttttttaatttccctctttttaaaacagttacggcttatttactgaataaatacaaagcaaacaaactcaagttatgtcatacctttggatacgaagaccatacataataaccaaacataacattatacacaaagaatactttcattatttgtggaatttagtgcatttcaaaaagtaatcatatatcaaactaggcaccacactaagttcctgattattttgtttataatttaataatatatcttatgagccctatatattcaaaatattatgttaacatgtaatccatgtttctttttcaaatctaaagttaaaaaaaaaatagcagaagccagtgtcttaaagtctatcttttgtttctaagaccatgggatttcataatctcaagataaaatatgtatgaag

SEQ ID NO: 8302 - DNA, 457 bp, Homo sapiens
  misc_feature (1)...(457): n = g, a, c or t
ctggtcctaacttttatacaaagtgaaactatatagagctcctttgccaacataaggagctacataatttctattacacttgcctaggcatgagaaacgcaaaagcaactcaaaaggagcaagtccaggaaaagaaaagctatgaaggagagaaagactagcagatgaaacacatactctgaaaaactccaatctgccattcaagtattggaaataccccaaaggggacaatgaatgggatctattacaacaaagtcagcaaagtaaaatgcaaatctcacacatgataaatggccctgataggctgtttgctgaaagacctaaggctagtgattcagtccacaattccttctggaccctaaagaaggggttcatataaaagtcatacttgtctttttgcaattttctcttggttgncttcagagaatagtcatttgcttctttcattcaggttatg

SEQ ID NO: 8303 - DNA, 456 bp, Homo sapiens
  misc_feature (1)...(456): n = g, a, c or t
cctatgtatggtggattacattttgcacatctcgacattgttttcattgtttccacaaaaattctgcctgtctcgtcagagtgctttgattaagcattactggttatggcaaacttgaactatataattgttatttgtattacaacatccatatggcttcttactatttttaaaattgttattaagagtgtacactangtatttgtgggttcatgtgagaaaataacaagcatttaaaaaactctttccatgaaaaaataaattctggattttccaacataactttaaaacanaattttgggatgcaaattattcataagctgcagtgtgacggtattcctgggaacataatggtatgttagagtctttactcaaaagcaagacacccagtgacaaggcacattcaagctcttctgttaagatcccgctcaagtgttttctcctttgtgaagtatt

SEQ ID NO: 8304 - DNA, 571 bp, Homo sapiens
  misc_feature (1)...(571): n = g, a, c or t
aganntgtnatacgacncactatagggcgaattgggccctctagatgcatgctcgagcgctgagagatcccctcataatttccccaaagcgtaaccatgtgtgaataaattttgagctagtagggttgcagccacgagtaagtcttcccttgttattgtgtagccagaatgccgcaaaacttccatgcctaagcgaactgttgagagtacgtttcgatttctgactgtgttagcctggaagtgcttgtcccaaccttgtttctgagcatgaacgcccgcaagccaacatgttagttgaagcatcagggcgattagcagcatgatatcaaaacgctctgagctgctcgttcggctatggcgtaggcctagtccgtaggcaggacttttcaagtctcggaaggtttcttcaatctgcattcgcttcgaatagatattaacaagttgtttgggtgttcgaatttcaacaggtaagttagttgctagaacccatggctcctttgccgacgctgagtagattttaggtgacgggtggtgacaatgagtccgtgtcgagcgctgnntttttcggcct

SEQ ID NO: 8305 - DNA, 376 bp, Homo sapiens
cctaggtgtcggctgggcattgcctacacgtgaagagatcactccgcgtccccactgcacctgtcacaaagtgccttctgatatgcctggcaaaccaaaatcggtgagcgccagcttgcttccctagaagacatttctaaatattcataacatgcttgctcaaatcaatcaccttattttacatccgctccagggagaaatgaagacatggtcctacgttgttctgtaattattttctatgtaaattttgttccttgtcacaattatatatgtcttaggggaaaggaccatttcacatgtgtcacctcatgtgattctcaccacagccctgtgattgctcctgttttataaataatgacatagttccagttgatgg

SEQ ID NO: 8306 - DNA, 316 bp, Homo sapiens
ctgagactgcccagtataggaagaagcagaagatatgtaaggggtgttagggtaagcgtttgaagtaggaggagcaacaggctgctgaggtcgatacattgctgacccccctgttccgaagggatacggctgggctggttgataaggctgtggctgtggataaggtggtacctgggtgtgcatatgacctggagatgtgggaagctgaccagcagcatttggattaacatttccatgcattatgaaacccggaggtggaggattttctccatggggataatattgttgagtttgaactcttggcatctggtggtgg

SEQ ID NO: 8307 - DNA, 508 bp, Homo sapiens
  misc_feature (1)...(508): n = g, a, c or t
ctgcacatggattggttaacataatatatactgctatataatcttttaagggctaatatttgtagataatttaaaagcatgtcaatttcctctaagatttgattatttaacctgcacaaaggccaatcttcagttatcaatgacaagaaaactctagggctgccaaaataacttcattttagaccccagagttagtgttaggctggtaatgtttctaatttgggaataatgagactagaaagctaggagggccccctccaaatttctcccttgtattaggctgaagtagaacataacgtggcttaaagcataaacttaaagcatatgctttgagttttaaaaatgttaacctgtaattaattattagagtattatccatagtctactatgatagtcagttaatattctctaaatcagattatattcatttgaaaatgnatttgnatatttgcaaatgtgttattacacaagatcttacctatgtcaatttaaagaggttaaagatgca

SEQ ID NO: 8308 - DNA, 378 bp, Homo sapiens
ctgggaggtaaatggtgactgtatttccaaagaagctcttttgattcagaactccaggagaccctgacatgaaaaccttaaagcaaatgactgtcacatgcttcaaggagtttatgtcaagacagttctacttatgtaaagtaagattataaaatgaaagagagtgtataaagaaaatcctaaggaatccactaaaaaacaactagaacgaagaggcaagttcagcaaggttgcaagatacaagacctatatataaaaatcaattgcatttctgtacacttgtaataaacaatcaaaaaaattaagaaaattacatttgcatttgcatcaaaaatagtaaaatatttacaagtaaatttaacaaaagaactgcaaaac

SEQ ID NO: 8309 - DNA, 297 bp, Homo sapiens
cctgggtatctgaggcttgcttggcttgtgtccatgcttaaacccacggaagggggagactctttcggatttgtagggtgaaatggcaattattctctccatgctggggaggaggggaggagggtctcagacagctttcgtgttcatggtggcttggctttgactctccaaagagcaataaatgccacttggagctgtatctggccccaaagtttagggattgaaaacatgcttctttgaggaggaaacccctttaggttcagaagaatatggggtgctttgctcccttggacacag

SEQ ID NO: 8310 - DNA, 437 bp, Homo sapiens
ccttgcttatccaagagtcaaaatggaaattaccacacctactacagttgcctgagaattataacaccatttttcagtactaccacagaaaaacctgtagtgtctgcaccaaggttcctaaagatcctgctgtttgccttgtgtgtggtacttttgtatgcctgaaaggactttgctgcaagcaacaaagttactgtgaatgtgtactgcactctcagaactgtggtgcaggaacaggtattttccttttgatcaatgcatcggtaattatcatcattcgaggtcaccgcttctgcctctggggttccgtgtatttggatgctcatggagaggaacaccgggatcttaggcgaggcaaacctctctacatttgtaaggaaagatacaaagttcttgagcaacagtggatttctcatacttttgatcacatcaataaa

SEQ ID NO: 8311 - DNA, 254 bp, Homo sapiens
ccagggagcctctactcattttgagaattcctttgagggttcatcatttgcagtgggtgacattgccctggcactgtactcagctctgttctcctactcaggctgggacaccctcaactatgtcactgaagagatcaagaatcctgagaggaacctgcccctctccattggcatctccatgcccattgtcaccatcatctatatcttgaccaatgtggcctattatactgtgctagacatgagagacatcttgg

SEQ ID NO: 8312 - DNA, 433 bp, Homo sapiens
ctgcttctgatttgcacccaaaatggcaccacccaaaaaaacacaacctatgtcgggttcggatttttaagaagttatttcagttaagcagacactaaagtacaattatacttggcttcttgtggcataaatgatcttgaattttaagatcatttggcttttacctatttagaacaaaacagtctatattttcctgtacttagaagttggaaatgaaataatttttaaagcccacaggagattaatttgtactaagtcattactatgtatcaggcattgtgcttggtgctttctagtcactgaaggagtattaaatatgtgaaatgcctgtcacagtgacttgcatgtggcaatcactcaaagatccccttctttaaccaatgtggtgaggttgtagtattattataaatttttaattatataacaactgagg

SEQ ID NO: 8313 - DNA, 449 bp, Homo sapiens; identical to SEQ ID NO: 8036

SEQ ID NO: 8314 - DNA, 515 bp, Homo sapiens
  misc_feature (1)...(515): n = g, a, c or t
ccaacatggtgaaaccccgtctctactaaaaatacaaaaaaattaggcaggcatggtggcacactcctataatcccagctactcggtaggctgaggcaggaggattgcttgagcccgggaggtggaggttgcagtgagccaagatcgtgccactgcactccagcctggctgacagagcgactctgactctaaataaataaatacatacatagatacatggtaacttagttccctctctttcttttgtattgacaccagatttactcaatactgttttagtttgtcagtccaataagatgagaaaataagtatgagatgcaacttggaattaaagtgatcaaatgtttgctctgacagataagcttcagcacctgttaacttggagaatcaagtgaaactccaccggcttcatgtggaagctcgtcaggcagcatcacaacatgtacataacccaagagccgttctgtacaaggttctccttaaaatataatgggaggccnggcgcggcggctcat

SEQ ID NO: 8315 - DNA, 442 bp, Homo sapiens
  misc_feature (1)...(442): n = g, a, c or t
attttgagtacattgaagagaacaagtatagcagagccaaatctcctcagccacctgttgaagaagaagatgaacacttcgatgacacagtggtttgtcttgatacttataattgtgatctacattttaaaatatcaagagatcgtctcagtgcttcttcccttacaatggagagttttgcttttctttgggctggaggaagagcatcctatggtgtgtcaaaaggcaaagtgtgttttgagatgaaggttacagagaagatcccagtaaggcatttatatacaaaagatattgacatacatgaagttcgtattggctggtcactaactacaagtggaatgttacttggtgaanaagaattttcttatgggtattctctaaaaggaataaaaacatgcaactgtgagactgaagattatggagaaaagtttgatgaaaatga

SEQ ID NO: 8316 - DNA, 140 bp, Homo sapiens
ctgtcactttgcgggggtagcggtcaattccagccaccagagcatggctgtaggggcgatctgaggtgccatcatcaatgttcttcacgatgacagctttgcgtccggagtagcgtccagccaggacaagcaccaccttc

SEQ ID NO: 8317 - DNA, 386 bp, Homo sapiens
catcggtgctgaaattgagcattttaaatagtacagtaggctggtatacattaggaaatggactgcactggaggcaaatagaaaactaaagaaattagataggctggaaatgcttactttctgctctcattttctttcattttgtctgctgtctttttgaatgccaatactttcatttaaaatgttttgggagcacggcaacccaaaatgactgaacggtggtccaaaaatccaaaccaactgataattacttctcgaggtgataggaaaggcacaggaagttaggactttggctgaaatgatgaaaacacatgttcgccattttagggatcagcgcctcgactcctgccacctccggctccaacgatgatcatgtttggatgtat

SEQ ID NO: 8318 - DNA, 451 bp, Homo sapiens
  misc_feature (1)...(451): n = g, a, c or t
gaggtctgcagggncaggtctgcatagcagaggtcgccctccaggggctgcagtacctgctctggggacatcccggctgctttctgctggtacttcatcatcctccaagccaagagtgaggcggccaccaaaagcagcagcaatatggtgaagatgaggggcaggaggacactgagcttcaggagcttgtgcctgttgtccaagtggtggccggtcagagttggggagctgctagtttcttcttgggtgactggtgctgggtcaatggtcacttgaactgtgaccccaaggtcatttccagttttctcaattccacaccagtaagtgtcagcatcagttttcatganatcctccatggtcacagtgaacgtgcggtttttctgattgtccttgatggacacccggtccctcttcacctcctgctctgacccactggttttaacaaggatct

SEQ ID NO: 8319 - DNA, 280 bp, Homo sapiens
  misc_feature (1)...(280): n = g, a, c or t
ccaccttatatataattatatattctaccataaatgctggccttcttcaaattatgattttggaaaatctaacccatacagagggataaaaaattgacatcccttggacaacttctccttgtttttttttgttttgttttgtttttaacattccaagctctctctggtcccctatccaaggagaaatgctagggcctcgaggatgtcgctatatatttttntaactaaatgataaatttntnttcaaatngttngaatncgtttccaaanctttcanagt

SEQ ID NO: 8320 - DNA, 308 bp, Homo sapiens
cctagagatcgttcagggtgttgtaactgggaacatctgaatgctgaggcttagtccagtgttctctctcccttaccactcctcttccccttccctctataatggcagtacccagggcccggtccatagactactatcgagtgctcctatgtgcatcttagtacgtatcattttcccttgcctttttccttctatcctttcagtggtagcaactgcccttgctaatcaccgtaacctcggctgagaaagaagaggaagcgaaatccaagatgcagctcagttcatcaaagcctagcaggtcccctcag

SEQ ID NO: 8321 - DNA, 556 bp, Homo sapiens
ctgtatacttactggtttagcatccctaatccaaaaacctataatttgaaatgtttcaataaacatttcctttgaatatcatgtgggcgctcacacagtgttggattttagagcatttcaaaattcgaatttttggattaaggattctcagcctgtaaacctagagttcttgactcaaatggactttcagtaccctttcctcaaccttcccacactcccgaccatacacatgtacctgcccacagacattcatacagtttccttattttaatgtcctgggaagaggtagaaacatcttgtcaaagtcactctttcagtggtgggcatctgcgctctaccatctggctgctcaaatgaaaatcgaaccttgcggaaaatttcctccacatcacaggaacaggcatattcttgcatatgttcaatgagtcttccaataaaaacagagcccattgtgggatgtctccaagaaacattatctggtgtggaagagcagaaagcgataaaatccttctctatgtgggctttcttaatagcatcatcctcaaactcttctgta

SEQ ID NO: 8322 - DNA, 192 bp, Homo sapiens
ttaaatgatgttttattagataaatttcaatcagggtttttagattaaacaaacaaacaattgggtacccagttaaattttcatttcagataaacaacaaataattttttagtataagtacattattgtttatctgaaattttaattgaactaacaatcctagtttgatactcccagtcttgtcattgccag

SEQ ID NO: 8323 - DNA, 494 bp, Homo sapiens
  misc_feature (1)...(494): n = g, a, c or t
gactcagactcctcatttgtaaattggaaatactttcgtatctttctaattcattgatgtgacaaactgagatagcacaaataaagcccttgcataaaacaattgatcaattaaatgtaactattgtaactatcaacattatcattttaaccaagtgaggtctgccaacaaggtattattacctccatttcatgaattaagacctgagcctcaaagcacttgaatgacttgcccacaatcacacaagtaaatggagacactggcttagactttggttttcactctcccagggagttcactgtcacatattgtgtgagttcatttaagcttctccaggagcctgctgatgatttctaaaaagtttatagagtccagaagaagactggggtctgacaatcccgtgagtagagaatgaatcagaaagaaatgtctanttttagttacagtcacttctgtggttccacaggctggaaaaatagcaattactttagtgt

SEQ ID NO: 8324 - DNA, 326 bp, Homo sapiens
ccagtggtgggttagaggcaggcaagggtgggagcagagatgggtgaatgggaggacatggggaaaccagtcagatggcatcacccattgggaggcagcatcttaccctttaaaaaacaaacatcagttgcatggaggaacagaaatattaagactatgtaatttaatctcaagaggttactagggtgtgctccaaatatattccgatgctgctgaaattaatcagaaagggaacagttcccagctactatcccatctgcctcaagtagaccaccctaattccttgatcctgtgcttcaagttgttagaaaaccattcaaaaaaag

SEQ ID NO: 8325 - DNA, 247 bp, Homo sapiens
cctctcccacttcgactgaggaggagcaggtgatgcttagaaatgaccaggacaccctcatggcccggtggacagggagaaacagccgatcttccctgcaggtggactggcacgaggaggagtgggagaaagtgtggctgaacgtggacaagagcctagagtgcatcattcagcgtgtggacaagctgctgcagaaggagcggctgcatggcgagggctgtgaggatgtcttcccctgtgcaggcag

SEQ ID NO: 8326 - DNA, 413 bp, Homo sapiens
ttggtcaccacagtgacagaaattgctggataagcgaagtgccactgggttctttgccctcccttcacaccatgggataaatctgtatcaagacggttcttttctagatttcctctacctttttgctcttaaaactgcttctctgctctgagaagcacagctacctgccttcactgaaatatacctcaggctgaaatttggggtgggatagcaggtcagttgatcttctgcaggaaggtgcagcttttccatatcagctcaaccacgccgccagtccattcttaaggaactgccgactaggactgatgatgcattttagctttgagcttttgggggttattctaccaacaaacagtccattggaaagaaaacagtccctggaattaacagatcagaatgttcacactggttaa

SEQ ID NO: 8327 - DNA, 426 bp, Homo sapiens
  misc_feature (1)...(426): n = g, a, c or t
ccggtgagttgggtgccggtggagtcgtgttggtcctcanaatccccgcgtagccgctgcctcctcctaccctcgccatgtttcttacccggtctgagtacgacaggggcgtgaatactttttctcccgaaggaagattatttcaagtggaatatgccattgaggctatcaagcttggttctacagccattgggatccagacatcagagggtgtgtgcctagctgtggagaagagaattacttccccactgatggagcccancagcattgagaaaattgtagagattgatgctcacataggttgtgccatgagtgggctaattgctgatgctaagactttaattgataaagccagagtggagacacagaaccactggttcacctacaatgagacaatgacagtgganagtgtgacccaagctgtgt

SEQ ID NO: 8328 - DNA, 178 bp, Homo sapiens
  misc_feature (1)...(178): n = g, a, c or t
ccaatgancatntcntacagaaggaccccgaaagaccaccagtccacagagaatgtgtacttcangccctgtangatctcaggggcgatatantcaggggtgccgcancaaggtgctggcccggctctccnngaatatnttntctttncacatcccaaanncggnaatctngatgtgg

SEQ ID NO: 8329 - DNA, 269 bp, Homo sapiens
  misc_feature (1)...(269): n = g, a, c or t
gtaatcccttccttttactacattttaattaccagggncacanaaatataaatggaaaaaaaacttantgccnganaaagtaaagcgngtatagacattctgttntatttaaaaataaatatcacctcttacaattagtgttgaatttttggaagacaatttgtgagactttcaaaatttattgtnncaatattagtattctgatngtaattttatatganagctttgcanaacgttaacattgggagaaactgggcaanntgtnaagg

SEQ ID NO: 8330 - DNA, 328 bp, Homo sapiens; identical to SEQ ID NO: 8110

SEQ ID NO: 8331 - DNA, 431 bp, Homo sapiens
  misc_feature (1)...(431): n = g, a, c or t
agctggtccagcagctcgagcagtgggagttccgagtctgtggagtttttcttgttgattctcagttcatggtggagtcattcaagtttatttctggcatcttggcagccctgagtgccatgatctctctagaaattccgcaagtcaacatcatgacaaaaatggatctgctgagtaaaaaagcaaaaaaggaaattgagaaatttttagatccagacatgtattctttattagaagattctacaagtgacttaagaagcaaaaaattcaagaaactgactaaagctatatgtggactgattgatgactacagcatggntcgatttttaccttacgatcagtcagatgaagaaagcatgaacattgtattgcagcatattgattttgccattcaatatggagaanacctagaatttaaagaaccanaggaa

SEQ ID NO: 8332 - DNA, 366 bp, Homo sapiens
  misc_feature (1)...(366): n = g, a, c or t
ccaacatggtgaaaccttgtctctactatttttacaaaagttagtcggacgtacagacgggtgcctgtagtcccagctacttgggaggctgaggcaggagaatttgtttgaacccagaggtgaaagttgcagggagccgaggttgtgccactgcactccagcctgggagacagagcgagactgtctccaaaacaaacaaacaaacaaacaaacaaaaaaaccctgtagcttgggatcagccttctcttctgntgnttttctttaaaaaataaaaattaaaaataggcttcaagtgatcctcccgccatgacctccaaaactgctgggattgtaggtgtgagcactgcacccagccgtatgtttttt

SEQ ID NO: 8333 - DNA, 395 bp, Homo sapiens
  misc_feature (1)...(395): n = g, a, c or t
ctggacaggttgattataccaaggcttgggaagagtactacaagaaaatgggtcaggcagttcctgctccgactggggctcctccaggtggtcagccagattatagtgcagcctgggctgagtattatagacaacaagcagcctattatgcccagacaagtccccagggaatgccacagcatcctccagcacctcaggtataattgccttcccagaccttccaccttaggttctgctgcaaaaagcaccagtgctgaagatgctgcaagcaccaaatcatagctcataaaatcaggtcctgagatagttacccataaagaggaatcctttgagtgtatgccattggtgagccgatgagcatggaccatanaagggctcaatgtagaaggtaaaat

SEQ ID NO: 8334 - DNA, 454 bp, Homo sapiens
  misc_feature (1)...(454): n = g, a, c or t
ctggtttcaaagatccccttctggcctctggaacagatggcgttggaactaaactaaagattgcccagctatgcaataaacatgataccattggtcaagatttggtagcaatgtgtgttaatgatattctggcacaaggagcagagcccctcttcttccttgattacttttcctgtggaaaacttgacctcagtgtaactgaagctgttgttgctggaattgctaaagcttgtggaaaagctggatgtgctctccttggaggtgaaacagcanaaatgcctgacatgtatccccctggagagtatgacctagctgggtttgccgttggtgccatggagcgagatcagaaactccctcacctggaaagaatcactgagggtgatgttgttgttggaatagcttcatctggtcttcatagcaatggatttagccttgtgaggaaaatcgtggcaaa

SEQ ID NO: 8335 - DNA, 346 bp, Homo sapiens
ctgactgtaacctccgcctcctgggttcgagattctcctgcctcagcctcccaagtagctgggattacgggcgcccgccaccacgcccggctaattttttgtatttttagtagagacagggtttcaccgtgttagccaggatggtctcgatctcctgaccttgtgatccacccacctcggcctcccaaagtgctgggattacaggcgtgagccactgcgcccggccacattcagttcttatcaaagaaataacccagacttaatcttgaatgatacgattatgcccaatattaagtaaaaaatataagaaaaggttatcttaaatagatcttaggcaaaataccag

SEQ ID NO: 8336 - DNA, 431 bp, Homo sapiens
  misc_feature (1)...(431): n = g, a, c or t
cactactgtgggttttactccttgccggatattgatccaaaagaataattgaagcaatgaaactatagaatttatctccaggatgtggtcagcacacaatattcatgcctcctttgttaaataagagacgtgttttccaagtctaatgttgccaaaaagactacgtcagtgctttctgtggaatggaactcttatttcaacagtaagtctgaatcatgaccatttatttatttaacagatattgngacaataaattatctgccaggaactgngcaatgcattgctaattcaaagacaagacatagaccctctcttacaggacttctctctctggaggagcananaggcttgtaaatatacnataagtaaaaacataacaagtntgattagagaggaatgcntaaggagttgtagaagcagggatagagana

SEQ ID NO: 8337 - DNA, 336 bp, Homo sapiens
  misc_feature (1)...(336): n = g, a, c or t
ctgggagaggagcagagccctgggatgagactgattgattcagaccagatggatggcctcacataggtgtgacaaaaatagtaacacattgcagacattccaggaactgtcctcttctcctggcctggaggtgggtcgcctgtgttgtctccttatctacctcttatgtgcttccgaatcaaagaatgtcaatgatgctaactcttttccatgttagcacctggtcacaaggcatcanacttgaagttccattaaaaaagtctaatgaccattgcccaagtttccctgtaggtaaagccaaagcaaatnntttngcctncngcctaaatatgtngt

SEQ ID NO: 8338 - DNA, 370 bp, Homo sapiens
  misc_feature (1)...(370): n = g, a, c or t
ccattgttgagcccagtgagagacatttctaccagccaatctggacactggtgggtgctggtgccnaacaattgncctcatctggtcgncccacggnaagtgtgatnccatctggtgtanaatggatcaaagctagagtgactgagttgaacccanacaanaactgcattcacacanatnacgacgaaaagatctcntaccganatnttattatngctcncggaatccanccacagcanctcggncctgagagcctgtcancccgtangtcngggcaaacaggttggcngcagncatcacatantccanatgcnggggattgttgacatcaaaggtgagcgggtgtggacagcntttgggcccngaccag

SEQ ID NO: 8339 - DNA, 230 bp, Homo sapiens
ctgcggaagcccagacaccaggaaggtgagatcttcgacacagaaaaagagaaatatgagattacggagcagcgcaagattgatcagaaagctgtggactcacaaattttaccaaaaatcaaagctattcctcagctccagggctacctgcgatctgtgtttgctctgacgaatggaatttatcctcacaaattggtgttctaaatgtcttaagaacctaattaaatagc

SEQ ID NO: 8340 - DNA, 525 bp, Homo sapiens
  misc_feature (1)...(525): n = g, a, c or t
caagacctttggaaagatgaaacctcgttatgaaatcaactccctgattagataccactgcaaagatggtttcattcaacgtcaccttccaactatccggtgcttaggaaatggaagatgggctatacctaaaattacctgcatgaacccatctgcataccaaaggacttattctatgaaatactttaaaaattcctcatcagcaaaggacaattcaataaatacatccaaacatgatcatcgttggagccggaggtggcaggagtcgaggcgctgatccctaaaatggcgaacatgtgttttcatcatttcagccaaagtcctaacttcctgtgcctttcctatcacctcgagaagtaattatcagttggtttggatttttggaccaccgntcantcattttgggttgccgtgctcccaaaacattttaaatgaaagtattggcattcaaaaagacagcngacaaaatgaaangaaaatgagagcagaaagtaagcatttccagcctatctaatttctttagnt

SEQ ID NO: 8341 - DNA, 486 bp, Homo sapiens
  misc_feature (1)...(486): n = g, a, c or t
gcagtgagccgagatcatgccgttgcaccccagctcaggtgacagcgtgagactctgatgcaaaaataaataaagaaataaaagaaaaggaagagagaaggcagcattagatggctgatgttatggcttcgtgaaacagtttatggcataaagaaataactccccaactccttagttttccaagtatgtaaatgtttctgctcatccaaacactagcataggtaagtgaggacacatatttcatctagcccaaatatattttttaaaagaatccctgcagattttttgcttctataaaaaatatcccaacccaaatttctaaaaattttgatttttggaattaaatgataatactaattancatttacctatacatccttttctattttaaaatcattgcataatctggcatttatatttaattttctaaatcattttccctagagagcattcatgtaattttagaacttggaaggaaccaggatt

SEQ ID NO: 8342 - DNA, 368 bp, Homo sapiens
  misc_feature (1)...(368): n = g, a, c or t
cctccaggcttctagagcagctagcttgggctggattctcacacccaggctgccccttggattgttctacccaagcttttccctggggtctgggctcactccataaggtaaggngccttttaccttatggtccttctttagcaggtaacaaaggagcatcaggggcaggctgccctggtggcatcacactggctagtgaggccgtgaatatcttgtcccccancagggccgacagtttctatcacagaaaacagtgtgttcagtggtgaaaatcgttgcatgcatgttttcatntgancgtgtccttctcccatactccctatcanccagccctgcctgtagctgntgtatggngattgcacttggac

SEQ ID NO: 8343 - DNA, 384 bp, Homo sapiens
  misc_feature (1)...(384): n = g, a, c or t
agaaaaagggccgttctgccatcaacgaagtggtaacccgagaatacaccatcaacattcacaagcgcatccatggagtgggcttcaagaagcgtgcacctcgggcactcaaagagattcggaaatttgccatgaaggagatgggaactccagatgtgcgcattgacaccaggctcaacaaagctgtctgggccaaaggaataaggaatgtgccataccgaatccgtgtgcggntgtccagaaaacgtaatgaggatgaagattcaccaaataagctatatactttggntaccnatgtacctgntaccactttcaaaaatntacagacagncaatgnggatganaactaatcgctgatcgtcagatcaaataaagttattaaat

SEQ ID NO: 8344 - DNA, 508 bp, Homo sapiens
ctaatatcataaataaggttgtttaagacgtgcttcaaatatccatattaaccactatttttcaaggaagtatggaaaagtacactctgtcactttgtcactcgatgtcattccaaagttattgcctactaagtaatgactgtcatgaaagcagcattgaaataatttgtttaaagggggcactcttttaaacgggaagaaaatttccgcttcctggtcttatcatggacaatttgggctagaggcaggaaggaagtgggatgacctcaggaggtcaccttttcttgattccagaaacatatgggctgataaacccggggtgacctcatgaaatgagttgcagcagaagtttatttttttcagaacaagtgatgtttgatggacctctgaatctctttagggagacacagatggctgggatccctcccctgtacccttctcactgccaggagaactacgtgtgaaggtattcaaggcagggagtatacattgctgtttcctgttgggc

SEQ ID NO: 8345 - DNA, 273 bp, Homo sapiens; identical to SEQ ID NO: 7855

SEQ ID NO: 8346 - DNA, 555 bp, Homo sapiens
tggagacgacattgaaaatgaaattcttatctctggacttacagggagaccccagagagagtcaaccccttctgggcactgtgattgatgggatgctgctgctgaaaacacctgaagagcttcaagctgaaaggaatttccacactgtcccctacatggtcggaattaacaagcaggagtttggctggttgattccaatgcagttgatgagctatccactctccgaagggcaactggaccagaagacagccatgtcactcctgtggaagtcctatccccttgtttgcattgctaaggaactgattccagaagccactgagaaatacttaggaggaacagacgacactgtcaaaaagaaagacctgttcctggacttgatagcagatgtgatgtttggtgtcccatctgtgattgtggcccggaaccacagagatgctggagcacccacctacatgtatgagtttcagtaccgtccaagcttctcatcagacatgaaacccaagacggtgataggagaccacggggatgagctcttctccgtctttggggccccat

SEQ ID NO: 8347 - DNA, 479 bp, Homo sapiens
  misc_feature (1)...(479): n = g, a, c or t
caagaggagatcggcgcggttgtcagctaaacctcctgcaaaagtggaagcgaagccgaaaaaggcagcagcgaaggataaatcttcagacaaaaaagtgcaaacaaaagggaaaaggggagcaaagggaaaacaggccgaagtggctaaccaagaaactaaagaagacttacctgcggaaaacggggaaacgaagactgaggagagtccagcctctgatgaagcaggagagaaagaagccaagtctgattaataaccatataccatgtcttatcagtggtccctgtctcccttcttgtacaatccagaggaatatttttatcaactattttgtaaatgcaagttttttagtagctctagaaacatttttaagaaggagggaatcccacctcatcccattttttaagtgtaaatgcttttttttaagaggngaaatcatttgctggttgtttattttttggtacaaccagaaaantagt

SEQ ID NO: 8348 - DNA, 487 bp, Homo sapiens
actaaacagccaatcatggtattcaaaggacaccgtaaagcagtctcttatgcaaagtttgtgagtggtgaggaaattgtctctgcctcaacagacagtcagctaaaactgtggaatgtagggaaaccatactgcctacgttccttcaagggtcatatcaatgaaaaaaactttgtaggcctggcttccaatggagattatatagcttgtggaagtgaaaataactctctctacctgtactataaaggactttctaagactttgctaacttttaagtttgatacagtcaaaagtgttctcgacaaagaccgaaaagaagatgatacaaatgaatttgttagtgctgtgtgctggagggcactaccagatggggagtccaatgtgctgattgctgctaacagtcagggtacaattaaggtgctagaattggtatgaagggttaactcaagtcaaattgtacttgatcctgctgaaatacatctgcaga

SEQ ID NO: 8349 - DNA, 275 bp, Homo sapiens
  misc_feature (1)...(275): n = g, a, c or t
gaaaagtcccggntttaggtttcagaaacagaattttcccgaatgtttaaaatggtgaatggttccataaactgtgttaaccaggcttcttacaggctagtcccagaatctgaccaccatgtgcaatactgtttctaagaaaagtgtgctccaagcaagaaccttcaaacatttaacctgaatgaatgaatataacctcttcacggntcanngttttcataagcaaaacanganaatagcancattgatgtcttttaaaaaaaanntanggctgg

SEQ ID NO: 8350 - DNA, 519 bp, Homo sapiens
ctggcattggtctagagctttataaggccattcagcgagggaccatcaagtgcaactttgcgggggttgccttgggtgattcctggatctcccctgttgattcggtgctctcctggggaccttacctgtacagcatgtctcttctcgaagacaaaggtctggcagaggtgtctaaggttgcagagcaagtactgaatgccgtaaataaggggctctacagagaggccacagagctgtgggggaaagcagaaatgatcattgaacagaacacagatggggtgaacttctataacatcttaactaaaagcactcccacgtctacaatggagtcgagtctagaattcacacagagccacctagtttgtctttgtcagcgccacgtgagacacctacaacgagatgccttaagccagctcatgaatggccccatcagaaagaagctcaaaattattcctgaggatcaatcctggggaggccaggctaccaacgtctttgtgaacatggaggaggacttcatga

SEQ ID NO: 8351 - DNA, 252 bp, Homo sapiens
  misc_feature (1)...(252): n = g, a, c or t
caccgtcctgctcttccagttcgggatgaatgcaagttctagccggtttttcctacaaggaatccagttgaatacaattcttcctgacgccagagaccctgcctttaaagctgccaacggctccctgcgagcgctgcaggccacagtcggcaattcctacaagtgcaacgcggaggagcacgtccgtgtcacgaaggcgttttcagtcaatatantcaaagtgtgggtccaggctttcaaggtggaaggtgg

SEQ ID NO: 8352 - DNA, 495 bp, Homo sapiens
  misc_feature (1)...(495): n = g, a, c or t
tgctcttcanatacctgacatagcaaggaaagagtgtgctgaaattggtagtacgttattctgcagttctgggcagcttctttcctgtagagttttggagcacatctctgaaagtggatgggtctggtgcctgcacacctccgtggttccttttcctgagctccagctgtggctgtctgtcagagaagcacatttttctgcagataattagaatggcttcccccatctctcacggactgtcccaagtctagaaaagaattgagttcctcttctattagtcaaataaaagggaagagaatgtttgtcttcctttcctttctgtagtgttaagaaaataaacgaacttaatgattctaaattatcagtgagcttaacactgtactatagaccaaagattaccttttcaaaaagtcctttgaggngaaatattttgtatacgtaatacatagatgcncatataaacacacacatatagaatctcaatattttaacact

SEQ ID NO: 8353 - DNA, 457 bp, Homo sapiens
ctgagcacaggccctgcagtacctacacttgacttccaagaagggaaggggttgtgtagaaatcctgcatcctcttggcatgtggaatgttctctaggtatccttattccccacagaagggactctaggtccaattctctgtcttatgactgctaccttaaggccaatgagggattctgactttgggtgggaatgaacttgggtttttccctttattcctcagttgacaggtatatacagctctgaaaccagagaaacctgactagaaaactgactgtctgaaagatgtttatcccataaagtcaaggtcgcattttccatttgaaggatagtaatattcttatatcttttgaaatcagtgcagctaaaactggcttacagtaatcttgttttctggctatgaaagattctaaaaggtgaaatataattgtttaaggagagatattgatggacctcg

SEQ ID NO: 8354 - DNA, 545 bp, Homo sapiens
  misc_feature (1)...(545): n = g, a, c or t
ttctgagagtggcgtggccctcacttctgttctggtgaagaaaggtgatgtcaagcccttggctgagcaaattgntatcactgctgggtgcaaaaccaccacctctgctgtcatggttcactgcctgcgacagaagacggaagaggagctcttggagacgacattgaaaatgaaattcttatctctggacttacagggagaccccagagagagtcaaccccttctgggcactgtgattgatgggatgctgctgctgaaaacacctgaagagcttcaagctgaaaggaatttccacactgtcccctacatggtcggaattaacaagcaggagtttggctggttgattccaatgcagttgatgagctatccactctccgaagggcaactggaccagaagacagccatgtcactcctgtggaagtcctatccccttgtttgcattgctaaggaactgattccagaagccactgagaaatacttaggaggaacagacgacactgtcaaaaagaaagacctgttcctggacttgatagcagatgtgatgt

SEQ ID NO: 8355 - DNA, 552 bp, Homo sapiens
  misc_feature (1)...(552): n = g, a, c or t
ccattctattgtggcaaggctgagtagaagatcctaccccaattccttgtaggagtataggccggtctaaagtgagctctatgggcagatctaccccttacttattattccagatctgcagtcacttcgtgggatctgcccctccctgcttcaatacccaaatcctctccagctataacagtagggatgagtacccaaaagctcagccagccccatcaggactcttgtgaaaagagaggatatgttcacacctagcgtcagtattttccctgctaggggttttaggtctcttcccctctcagagctacttgggccatagctcctgctccacagccatcccagccttggcatctagagcttgatgccagtaggctcaactagggagtgagtgcaaaaagctgagtatggtgagagaagcctgtgccctgatccaagtttactcaaccctctcaggtgaccaaaatccccttctcatcactcccctccaaagaggtgactgngccctgcctctgtttgacaaacctctaacccaggtcttgacaccagacctgc

SEQ ID NO: 8356 - DNA, 345 bp, Homo sapiens
  misc_feature (1)...(345): n = g, a, c or t
atanaaaactaaagaaattagataggctggaaatgcttactttctgctctcattttctttcattttgtctgctgtctttttgaatgccaatactttcatttaaaatgttttgggagcacggcaacccaaaatgactgaacggtggtccaaaaatccaaaccaactgataattacttctcgaggtgataggaaaggcacaggaagttaggactttggctgaaatgatgaaaacacatgttcgccattttagggatcagcgcctcgactcctgccacctccggctccaacgatgatcatgtttggatgtatttattgaattgtcctttgctgatgaggaatttttaa

SEQ ID NO: 8357 - DNA, 377 bp, Homo sapiens
cacacggctcacattgcatgcaagtttgctgagctgaaggaaaagattgatcgccgttctggtaaaaagctggaagatggccctaaattcttgaagtctggtgatgctgccattgttgatatggttcctggcaagcccatgtgtgttgagagcttctcagactatccacctttgggtcgctttgctgttcgtgatatgagacagacagttgcggtgggtgtcatcaaagcagtggacaagaaggctgctggagctggcaaggtcaccaagtctgcccagaaagctcagaaggctaaatgaatattatccctaatacctgccaccccactcttaatcagtggtgggagaacggtctcagaactgtttgtttcaattgg

SEQ ID NO: 8358 - DNA, 462 bp, Homo sapiens
  misc_feature (1)...(462): n = g, a, c or t
ccactgtgtagcaccttctaattcaatttcatcggcagttgtaataacagttccagcctcaggtgttttaatggtgggaaacatcttgattgcttctccagaaacttgaccataggttttgttttggaaatcttggagaatctcagttccttccacagcaataagttctgtgggagaagcttccatttcttctaataactcaggtttaccatcatcttctgaaggttctaattttgtgtcaggagataaagagggaggctcagttatgtgaaggtattcctcacttgatggtttgaaagtcgcttcaatatttacatgaatttccttaaaagaatcctgtggggacattacagatgagccgacgtctattcctggcagagcactgggctgggggatctctgtgtgtccagaggcttcactgcctgagtagatagtgaggggagatgatggtgtctganaaga

SEQ ID NO: 8359 - DNA, 564 bp, Homo sapiens
  misc_feature (1)...(564): n = g, a, c or t
ctgccacaaaccaggtgaagctttgttctaagaatatttgtttcatctagtttatgagtccaaatgatatagactgtaaatgtcacagcagtggtgaaagactgctcggtcatgagcaccgacagtaactcactggcacgtgaatttctgaccgatgtcaaccggctttgcaatgcagtggtccagagggtggaggccagggaggaagaagaggaggagacgcacatggcaacccttggacagtaccttgtccatggtcgaggatttctattacttaccaagctaaattctataattgatcaggcattgacatgtagagaagaactcctgactcttcttctgtctctccttccactggtatggaagatacctgtccaagaagaaaaggcaacagattttaacctaccgctctcagcagatataatcctgaccaaagaaaagaactcaagttcacaaagatccactcaggaaaaattacatttagaaggaagtgccctgtctagtcaggtttctgcaaaagtaaatgttttttcgaaaaagcagacgacagcgtnaaattaccca

SEQ ID NO: 8360 - DNA, 457 bp, Homo sapiens
  misc_feature (1)...(457): n = g, a, c or t
ccaaaaacctgcactcagaaagaggtgatgtttttaggagaaattgaagaaatcttagatgtcattgaaccaacacagttcaaaaaaattgaagagccacttttcaagcagatatccaagtgtgtatccagttctcattttcaggttgcagaaagggcattgtacttctggaataacgaatatattcttagtttgattgaggagaacattgataaaattctgccaattatgtttgccagtttgtacaaaatttccaaagaacactggaatccgaccattgtancactggtatacaatgtgctgaaaaccctaatggaaatgaatggcaagcttttcgatgaccttactagctcatacaaagctgaaagacaganagagaaaaagaaggaattgnaacgtgaanaattatggaaaaaattagangagctaaagctaaagaaagctctnnaaaaacaga

SEQ ID NO: 8361 - DNA, 186 bp, Homo sapiens
ccacagcggcccttcacctcagctccccgggtcaatgcgatatcggcctgttctgtgatcagatctacgtagttgctggcccacacatcataaggtacaataaatttggctgcaaactctgccatgagacacgtcgtcccattttcccgcaccacaaatatatctttttcagggttagtggaaagg

SEQ ID NO: 8362 - DNA, 509 bp, Homo sapiens
ccattaaaaagcaagatgaacctattgatctcttcatgattgagatcatggagatgaaacataaatctgaaactgatacaagcttaatcagagggcttgttttggaccacggagcacggcatcctgatatgaagaaaagggtggaggatgcatacatcctcacttgtaacgtgtcattagagtatgagaaaacagaagtgaattctggctttttttacaagagtgcagaagagagagaaaaactcgtgaaagctgaaagaaaattcattgaagatagggttaaaaaaataatagaactgaaaaggaaagtctgtggcgattcagataaaggatttgttgttattaatcaaaagggaattgaccccttttccttagatgctctttcaaaagaaggcatagtcgctctgcgcagagctaaaaggagaaatatggagaggctgactcttgcttgtggtggggtagccctgaattcttttgacgacctaagtcctgactgcttgggacatgta

SEQ ID NO: 8363 - DNA, 445 bp, Homo sapiens
cccttggaagggcccccctctgtttgataatcaacaaatctttccccatcataggaaaataaaagaatgaagcaatgcctggaagaagaactgaaatcaagaagggacctagaaaagctggtgcggaggcttttgaagcaaacagatgagtgtattcgaggcgagtccagtagcaagacctcaattcttccataaccatcactgtgccactgggtggagtgtgccttcagggcatcttgaaatgtcccgctgaatgatttgactcagtttgctcacttctttggcttttgttttgtgtttgagtctctctctctctccctctctcttctctttctctccccgctgtgtgcatatgtgtgtgcgtgcacgtgcgcgcttgggcatttgctgttgtttggttattggttggttgttcattttttttttcaacaggtgaaaaagcagg

SEQ ID NO: 8364 - DNA, 321 bp, Homo sapiens
ccaggctggtctcgaactcttggcctcaggtgatccacccactttggcctcccaaagtgctggggttacaggcatgagcgacctcatgggtgtagattttgcgaacagataaaggtagatgatattgggctgctttgttgtcatcatctattctattccctctccttgagaagttctcatgaaacacttatacctcgatgtgagtcaccttaaatcgttttgggatgcggcaagcaacacataagttaatagccatcatgacaacccctgaagacacctgggctttggcactgggagcgtggtccaagtatggtagcgagg

SEQ ID NO: 8365 - DNA, 466 bp, Homo sapiens
gtaaaagatttggtatattcagaatgcatgtgatggaacacacacataggagttatgaaccaaggtgcaattaatttagatcagaagccatatattccagatggtctgatgaaaaagccaattaagtataaaatgaaaacttgctcaaaaaggcaattaattttccgttttaatttaattatttattgtgaaagatatatagttgacagtatgttgacctgtttttttctcctttcttgttttataatgtcatatcttcctgacatatgtgtttctctataaaatttgaataattgcactaaattaaatcctgctagttttgggagaaaaatctagtagggttctttttctaaggtggtgattataacagttatgcatattcaatgaatattcaattctgcttttcaaaataacctattaagttttaaagagtaattacattagctatattcactagtaaacattt

SEQ ID NO: 8366 - DNA, 186 bp, Homo sapiens
ctgccacaaccgccatgaccccagtggcagggtcagtgcccacaagggggttgcctgctttgactgaactaacctgtgggtttagtccaacgaacagatgtgcctgatttcagggctgaatttttgcttgaccacaagtctcgggcagaacagattcgcctatgactgaatcgactgaatggatgg

SEQ ID NO: 8367 - DNA, 337 bp, Homo sapiens; identical to SEQ ID NO: 4598

SEQ ID NO: 8368 - DNA, 401 bp, Homo sapiens
  misc_feature (1)...(401): n = g, a, c or t
ccagcctggtctcgaactcctgatcttaagtgatccgcccatcttggcctctcaaagtgctgggattacaagcgtgagccaccgcacccagcagtaaaaataatactagtaattattaactacatttttaaaacatatgtgctctgagcaagactctgggccagggtctttcctgattattctcttgagtacttaccccagttctttgagttagacactaccgccctcatttttatgatgagttaagacagcaagtaacttgtctaagaacactcccttagtgaagtgtagagttaggattccaacccaatgtatgtgctgctgtgttatactttctaacactacaagtaacagcccanatggagagtgaggagggaggaaagcgttatttanggaccagg

SEQ ID NO: 8369 - DNA, 340 bp, Homo sapiens
  misc_feature (1)...(340): n = g, a, c or t
cgcgtcaggttataaatgaccctatctccttagttgtgtactctcgtgccaaaactgctggctgagtgtaccctttctgcaggaagtaaaaatggccttactaaataaatttatgttcaagtgctatttctttatggcaccggagaacaagcatttcaaacaatttggtggcaatccgtacggggatacattcttctctaggggcggtctccagtcctctctcatggggtagcgctcccctacttcattgcaaggtcctcataggtaagaaattgagacccacccggtgtgacgaataaacctgggctctcancaatgggggcaaaaaaaaaaaaactgg

SEQ ID NO: 8370 - DNA, 170 bp, Homo sapiens
gtcccgatcaaggtccagatcagttgacagtggcaattaaactgtaaataacttgccctgggggcctttttttaaaaaacaaaaaccacaaaaattcccaaaccatacttgctaaaaattctggtaagtatgtgcttttctgtgggggtgggatttggaaggggggttgg

SEQ ID NO: 8371 - DNA, 449 bp, Homo sapiens; identical to SEQ ID NO: 8036

SEQ ID NO: 8372 - DNA, 493 bp, Homo sapiens
  misc_feature (1)...(493): n = g, a, c or t
ccattatagtaatagtcataaatcaaaataccaaacagatctttatgaaagagaaaggagtaaaaagagagaccgaagcagaagtccaaagaagtccaaagataaagaaaaatctaagtatagatgaaagatgaagaggcagaattgagaggctaacatatttactcttgtctaacttaagagtgccaggaaagcagatgcttagattttgtgtcaaagcttgttatttttttcatactaggattatggtctttagattaatactgattatatagagcacggaaagataaagaattgaacattttctttgtatacttttttacactaattttattgttatacataaatggtagtcttcatttttgaagtcttacattttcactctttttttaatgaagtatttcatactacaaaaatacataaacgnatatataaagggataataaatgtaaatatctgtgtactcatcagncagcttaagatacagatgttg

SEQ ID NO: 8373 - DNA, 481 bp, Homo sapiens
ccaggtgcgcaccctgtggcatgaccctcgtcacataggctggaaagatttcaccgcctacagatggcgtctcagccacaggccaaagacgggtttcattagagtggtgatgtatgaagggaagaaaatcatggctgactcaggacccatctatgataaaacctatgctggtggtagactagggttgtttgtcttctctcaagaaatggtgttcttctctgacctgaaatacgaatgtagagatccctaatcatcaaattgttgattgaaagactgatcataaaccaatgctggtattgcaccttctggaactatgggcttgagaaaacccccaggatcacttctccttggcttccttcttttctgtgcttgcatcagtgtggactcctagaacgtgcgacctgcctcaagaaaatgcagttttcaaaaacagactcagcattcagcctccaatgaataagacatcttccaagcatataaa

SEQ ID NO: 8374 - DNA, 114 bp, Homo sapiens
cgcgtatgtgaacttccagcagccggcggacgcggagcgtgctttggacaccatgaattttgatgttataaagggcaagccagtacgcatcatgtggtctcagcgtgatccatc

SEQ ID NO: 8375 - DNA, 462 bp, Homo sapiens
  misc_feature (1)...(462): n = g, a, c or t
ctggtggttttcttcaggttccagcctctcttggcatctgctgccttgtttcctgtggaaacagcaagcagctctgcacggttcttctcatccttgccttgcagaagagcctgtttatttttgcctctgtcacttcctgaagaaatcagtgtattttcaatacagtgtggctcctttctcctaggttcagttaggtcgtgtttcctagcagtgtcactattcaagggttgagtccacgtcttgctctctggagaatgtcaatgtaatgtatttttcccatcgtacagagtctttgttgatttgcaaaatgttggatttggggttcatacccatattttttgttgtcatgggcatttaggtcatcantctgntctcttatttgcttgntcttttgttaattcattcccatggctatatgccagacacagcatgatgcanaaggaatacgacagaggatgacac

SEQ ID NO: 8376 - DNA, 368 bp, Homo sapiens
ccatgtaaataagatgatttaatgttgattttaatcctgtatataaaataaaaagtcacaatgagtttgggcatatttaatgatgattatggagccttagaggtctttaatcattggttcggctgcttttatgtagtttaggctggaaatggtttcacttgctctttgactgtcagcaagactgaagatggcttttcctggacagctagaaaacacaaaatcttgtaggtcattgcacctatctcagccataggtgcagtttgcttctacatgatgctaaaggctgcgaatgggatcctgatggaactaaggactccaatgtcgaactcttctttgctgcattcctttttcttcacttacaagaaagg

SEQ ID NO: 8377 - DNA, 497 bp, Homo sapiens
gtttgtgaaagatgtcttttcacctataggggagagactgggctgggaccccaaacctggagaaggtcatctcgatgcactcctgaggggcttggttctgggaaaactaggaaaagcaggacataaggcaacgttagaagaagcccgtcgtcggtttaaggaccacgtggaaggaaaacagattctctccgctgatctgaggagtcctgtctatctgactgttttgaagcatggtgatggcactactttagatattatgttaaaacttcataaacaagcagatatgcaagaagagaaaaaccgaatcgaaagagtccttggcgctactcttttgcctgacctgattcaaaaagtcctcacgtttgcactttcagaagaggtacgtccacaggacactgtatcggtaattggtggagtagctggaggcagcaagcatggtaggaaagctgcttggaaattcataaaggacaactgggaagaactttataaccgatacc

SEQ ID NO: 8378 - DNA, 329 bp, Homo sapiens
  misc_feature (1)...(329): n = g, a, c or t
gggagtagccaggctggatggctcaaatataaatgaatgaggaattctttatgaagtatcagtcagattttatgattaagtgatgtaatataggaattatgtaaaagggaagaatgtctgatactgatctattagagaggtactttagaggcttcttgattggcataaagttcctaaggttatagattttccccccttttggctgtatagcaaagtgttttaatccacggttgtgtcttattgttccattaaaattgtatcttcgatccatcaataaatacttgtggttgaatcaaaaaaaanaaaaaaaaaaaaaaaaaggcttgtac

SEQ ID NO: 8379 - DNA, 415 bp, Homo sapiens
  misc_feature (1)...(415): n = g, a, c or t
gaggtatggatggatgaatagatagatgatggatggatggaggggtaatgaatagatggatgacttaaactttagcaaaaggaattcatctggaaaatcataaaaggtgagtctgatgcataatataagtgtgaggaagaaatggaatctgagtctggagaggtacactagacagacagaagcagatgagtgaaactcttggatagcatctttcttcaaattccttgaatatattaaataataaatttggaattatagagccctcattggaagaatataaaatttcaaattaaaaaactagggcatatgcatatccaactgcttttttaaaaaagaaaagaaaaggaactaagggcaaaaacatggctgtcagctttctctntatcttctcaattcttttcaaattctancccac

SEQ ID NO: 8380 - DNA, 571 bp, Homo sapiens
ccaccaacagtttcccagccacatgctgggccctctaggtctctccagcccactctaaggacccaagaaatgcagccacagtccatctctcttttttctctccttccgggggaccaaggtaccttctggggcatacaacatggcagcagggcctcgggaagaggggtaggaggaccgagcagcattctctgtagaggaagacaggaaaggagaccctcttggcacacatttatggagggttgtccctgaagagaagggcaggtgggagaggttccctgttacttaagagaaggcaccagtggcaaagagcacaatgaagaggatgatgataaaaacaatcacgcagataaggacaatcatcttcacgttcttccaccagaattttcgagccaccttctgcgatgtcgtcttgaagtgctcagatgtggcttccagatcctctgtcttgttgcggagatgttccaagttttccccccgggccaggatccgctccacattctgggtcataatattcttaactccctccacctcactttgcaggttccgcacacgatcatttcctccaccttca

SEQ ID NO: 8381 - DNA, 204 bp, Homo sapiens
  misc_feature (1)...(204): n = g, a, c or t
ctgggatttcaaacagactgtcccattgtcaaacatttggtttgaaataaaaggactcttagtataactctgggccagaggggaagaaggggtgagggcagctagcgtggcaccctgggtccaactccaaccccttctgttgccagcaatgtgaccaaatacttacacctcccancaagtttctgtttctttaatgnaaatgta

SEQ ID NO: 8382 - DNA, 466 bp, Homo sapiens
  misc_feature (1)...(466): n = g, a, c or t
ccagcgacagcctggcctgggaatggactggcagctcatcactaaaatgactcctttcatggaatccactgttatgcagccacactgaccacagagcaactgaataggtgagcattggattgttgatgacaactcttcagcagaacaattgtgtgtttgaagggactgttttatgatgaaataactgttatttcctggagctaattgttgaatgacagtttgtcaactgtttaaatgaatttcatttgaattaacaattatacagccactcagaggtcctacattcgccagagttggcatccagttgatgggttcatttgaattaaatggtttggaggctaacgtgattttttaaattgaatttcatcactattctgtgtattctatttatcactattctaaatgactcatggttggctaattgattatcatgtaancaagctatttgaagaaattgattacatat

SEQ ID NO: 8383 - DNA, 255 bp, Homo sapiens
ccatgtcgtactactttgaccgcgatgatgtggctttgaagaactttgccaaatactttcttcaccaatctcatgaggagagggaacatgctgagaaactgatgaagctgcagaaccaacgaggtggccgaatcttccttcaggatatcaagaaaccagactgtgatgactgggagagcgggctgaatgcaatggagtgtgcattacatttggaaaaaaatgtgaatcagtcactactggaactgcacaaactgg

SEQ ID NO: 8384 - DNA, 182 bp, Homo sapiens
ccaatcaattctggaattacccacttgtttaattttgagcaacatgatctagcattaatgtaatcacattctaaatcagacaatgtaattatgaagtagaccgagaggaagatgagcgcgcaacaatcgaggagagagaagacgaacaccaccgcctccatcctcctcctccgtcgccgccg

SEQ ID NO: 8385 - DNA, 390 bp, Homo sapiens
  misc_feature (1)...(390): n = g, a, c or t
cctttatgttggggcctatgtggaaactctagccccgtgcttccattacatacaaaccgaatatattaaagctttagagtttttacaactatctatctttcccctgacatctccccagccaccttagaggtgggaaaggaaaggatataagaaaaccccactaaatgtggagtacatttcatcaaagtctgtgtgagccagcttgcccccagtcaccacgacgttgactgcatctcccgccttcaggtgcacgatgaggtggaatgcccccgggcccccgcaggtatgcaaagctcctggagggcggtggtattccaggaactctctcctgtacccagcggtatgcagacctgcccgggcggncactcgagccctatagtgagtcgtatt

SEQ ID NO: 8386 - DNA, 275 bp, Homo sapiens
  misc_feature (1)...(275): n = g, a, c or t
ctggtactctgcantggttttctctttgttgttcacaatcacagtacatttatatgtccctgagtcatagatccggacttcaggaataaaataactctctgtgctcttcatggaggagatgttgtaaaacagcacgtnatccttatagaanancatctggtgctgaggcttgacgtgagangtggtgctgacatccncgaancactgcanggtcaggttcttcccattttgcaccgtccngtccggnaggctcttcatgtcaacactgntgattg

SEQ ID NO: 8387 - DNA, 363 bp, Homo sapiens
cctctctcacctctcctactcacttaaagcccgcctgacagaaaccacggccacatttggttctaagaaaccctctgtcattcgctcccacattctgatgagcaaccgcttccctatttatttatttatttgtttgtttgttttattcattggtctaatttattcaaagggggcaagaagtagcagtgtctgtaaaagagcctagtttttaatagctatggaatcaattcaatttggactggtgtgctctctttaaatcaagtcctttaattaacactgaaaatatataagctcagattatttaaatgggaatatttataaatgagcaaatatcatactgttcaatggttctgaaataaactt

SEQ ID NO: 8388 - DNA, 334 bp, Homo sapiens
  misc_feature (1)...(334): n = g, a, c or t
tgacagantncaancaaataanatagngatgctggtcaggcttggnggctnatgcctgtnttccctaaactttgggagcctaaggngagaactccttgaactcctaaggccaggagttcaagaccagcctggataacatagcaagaccccatctctacaaaaaaccaaaaccaaacaaacaaaaatgatagtggtgcttccctcaggatgcttgtggtctaatgggagacagaacagcaaagggatgattagaagttggttgctgtgagccaggcacagtgctgatataatcccancgctatgggaggctgaggtgggtggatcatttgaggcc

SEQ ID NO: 8389 - DNA, 478 bp, Homo sapiens
  misc_feature (1)...(478): n = g, a, c or t
ccagcgacagcctggcctgggaatggactggcagctcatcactaaaatgactcctttcatggaatccactgttatgcagccacactgaccacagagcaactgaataggtgagcattggattgttgatgacaactcttcagcagaacaattgtgtgtttgaagggactgttttatgatgaaataactgttatttcctggagctaattgttgaatgacagtttgtcaactgtttaaatgaatttcatttgaattaacaattatacagccactcagaggtcctacattcgccagagttggcatccagttgatgggttcatttgaattaaatggtttggaggctaacgtgattttttaaattgaatttcatcactattctgngtattctatttatcactattctaaatgactcatggntggctaattgattatcatgtaagcaagctatttggaagaaattgattacatatatttatatata

SEQ ID NO: 8390 - DNA, 554 bp, Homo sapiens
ctgcaaagttaatagccagtatagtgtttggggaaacactataagctattaccaaaaaatcctctgtgagagggtgttagttggatgtcacataacataaatgatgtactgtgtggaagaacagttgttgtattgtgtattgtgggatttgtttttagatgaaaccgttaatgtatgtagtaggaattaacttttacataggtgaagtacaaatagagaagtgatagtgatttttttctctttatcaccaaaatcttatattgctaaagaatgaattttccctctcagaaaacactacattatcctaatttctttactttttaatcttgctattcaacagaaaaatatcctgttgcattcttcttttccaagtatgtcttaaataacggtagccccctgctcttccattttaactttagagtcagcatgtcatttgccattaacgaaaaccaaaacaaaacaaaaactaaagaaaaccaaactaagaggatatctacagaaatttcattgaatgtattaatgccagttactccacaaactggcctattattatt

SEQ ID NO: 8391 - DNA, 444 bp, Homo sapiens
  misc_feature (1)...(444): n = g, a, c or t
cttttttttttttttttttttttggaaacagggttttgctctgttgcccaggctggagtgcagtggtgcaatctcactgcagcctccacttcctggctgcaagcaatcctccaagcacagcctntcgagtagctgggactacaggcatgtgccacttgtctggctaattttattttttgtananatgaggtctcactatgctgcccaggctggtctcaaactactgggtttaagcgatcctcccacctnagcctcccaaaatgttgggattacaggcgtgagccaccatgcctagccggtaatctcttttttagtgaaaaaaattgaggtttanaaagtttaagtaacttgaccaaggtcgtacagctaatgagtaggagggcgagctggagctanaatccaaatcacagttctggtcttaaaacctccttatttccattaata

SEQ ID NO: 8392 - DNA, 474 bp, Homo sapiens
gggagatcagcactctctccccaatttatgttctcaatgggcatatgttgtttagaccaccaaaaatcaaggttagacatcctcagatgattgcaccaccctaaagccttacctccatttcaccgaaggagtcaccgccccccacaactgtcacacccaccagtgcaacccactactcatctctattactatccctacctctagcaactctaaccccaccttaggtgcttctatggtctaggagaaaatgccgttagaaaggactctacaggcttctttgaaatgcgctttgtttcttccccgctatcctctattgttaccccttccccaagcccatccaatcaaaccatctaccatttcatgcccaatgacaaaaccaaagtagttataataaaagtcaaggatttaaaacaaactttagccataacaactgggtaccaagatataaatgcctggctgaaatggattaaatat

SEQ ID NO: 8393 - DNA, 444 bp, Homo sapiens
  misc_feature (1)...(444): n = g, a, c or t
ccactagaggtctgtgtgccattgcccaggcagagtctctgcgttacaaactcctaggagggcttgctgtgcggagggcctgctatggtgtgctgcggttcatcatggagagtggggccaaaggctgcgaggttgtggtgtctgggaaactccgaggacagagggctaaatccatgaagtttgtggatggcctgatgatccacagcggagaccctgttaactactacgttgacactgctgtgcgccacgtgttgctcagacagggtgtgctgggcatcaaggtgaagatcatgctgccctgggacccaactggtaagattggccctaagaagcccctgcctgaccacgtgagcattgtggaacccaaagatgagatactgcccaccacccccatctcagaacagaagggtgggaagccaganccgcctgccatgccccanccag

SEQ ID NO: 8394 - DNA, 59 bp, Homo sapiens
  misc_feature (1)...(59): n = g, a, c or t
cggccgaggtcccccccccctttttttttttttttttttttttttttnttnagggaagt

SEQ ID NO: 8395 - DNA, 334 bp, Homo sapiens
cctaggcacagaggagcaggttagggcacattcaccttctcaggattctgtggctccctcattggagaagggagacagcatcttgggggcgcaattccaagagcagcgagggcagaggttagagatggctgagagcccctaacctgaggcggcaccacaataggcagcaacaactgtgtggaaagctggatgaactggtcagtagcggaaaatgggagggggcactgggttggcctcttggggaggggtccaaccttggcttggatgagctcatgagaatacccagtgttcccaagcagaggggggcagagcccaaagcccctttctctgcagg

SEQ ID NO: 8396 - DNA, 564 bp, Homo sapiens
ccagtggggcagcccttccccattggggtttccattgcgagcaaagttggcccagaatttcatcaccatcttgctaagtctgatctcctcttctgaggcaccctcttttaaaaatggggccccaaagacggagaagagctcatccccgtggtctcctatcaccgtcttgggtttcatgtctgatgagaagcttggacggtactgaaactcatacatgtaggtgggtgctccagcatctctgtggttccgggccacaatcacagatgggacaccaaacatcacatctgctatcaagtccaggaacaggtctttctttttgacagtgtcgtctgttcctcctaagtatttctcagtggcttctggaatcagttccttagcaatgcaaacaaggggataggacttccacaggagtgacatggctgtcttctggtccagttgcccttcggagagtggatagctcatcaactgcattggaatcaaccagccaaactcctgcttgttaattccgaccatgtaggggacagtgtggaaattcctttcagcttgaagctcttcaggtgtttt

SEQ ID NO: 8397 - DNA, 606 bp, Homo sapiens
  misc_feature (1)...(606): n = g, a, c or t
ctgtcagttctctaaacatttgcagcatcctactcagatctggagcatggaatacagtcttcagtttcttggaaaccatttttggctttttcagcctccagatctcactccatttcatgattccactcatgtcctgcagcagctccattgttgaccactgactccgacactccacatctgagatgagctctctcaccaactgcttctgctgaactagctcatcctcagcctctgcaaacttatccagcgtcttcttttcttcttcttccaatctttgcagctctctctgctcctcattatttaggatgcttctaagctgatcaaattctgtttgtatcctttgtctctcagtttgtacctgatacttccaggaagttttctcttctctgatgtcagcttccagcttctcagcttcctcctcttccttcttcagcctcttgaggactgcctggagtttctcctgacattccttgaatacttcctccgtgaggactgtgtggtgaccacggtgctcctganaccgctcacaaagccngcaaatgactttcctatcctccttacagaanantaggagtttctctccatgatgatcacaganatctctct

SEQ ID NO: 8398 - DNA, 372 bp, Homo sapiens
  misc_feature (1)...(372): n = g, a, c or t
gtctgaatgtggtgctttgcttctgtcctggttgaccctctgctgctgggccatcaaagtttggtgcatcttctgccaatcgcagacatagctgagcatacagngagctatactttggctcttctagggctttgtccacaatcagcagtatgacccctttaaggatgagtttagactctacacccacattgaggagctcaaggcatagcttgtcaaacttttcaggagtaagcttatttagtatgcctcttactttcctgaagattgcatcatgtcgttctttttcgtttgcggagttgtttgctgcggagttgtcatctcgtctagtgcttcgtgcaggaatccatttctgagcgttttgccctgnggttt

SEQ ID NO: 8399 - DNA, 570 bp, Homo sapiens
  misc_feature (1)...(570): n = g, a, c or t
cctccccttccccagcagttcgaggctcttcactcttccagatcccagagcttctgctctgttttactcctggtcaaaaatcccagcatccttctgtacctctcaaaagccctgtttttcgggaagctgcctccggactacttttgtttcccaggattttgaagcctgaataccagggcttacttgggagaatctgttctttggcttgaagaagcggaatcgagtgaaggagacagaaaaatagagtaacaatagagtgataagtgcttataccagtgacatacagggcctgtgggaacataaagctaaccaagcagagtgggtcgggggcctgctgaggccatttctctttttttttcttaattgacacagaattgtacatatttatggggtatatagtgatgttccgataaatgtaatgtattgngatcagatcaaggtagttagcatattcacctcaaacgtgtatcatttctttgngttgggagcatttaatatcctagctatttgaaactatatattattgncagctatagtcatcctacagtgctatagaacactagaacttat

SEQ ID NO: 8400 - DNA, 542 bp, Homo sapiens
  misc_feature (1)...(542): n = g, a, c or t
ctaaaataaaatttttttaatttttaaaaattacatttttatattatcttattagtatatgctcactgaggaagaaaacatttcaagcaatacagaaatgaatataaataaaatgttnaggttcttctcacctccctgttactcatagttgctagaggtgatcatttgaaaacgtggtaggctgggtgtggtggctcacacctgtaatccgagtactttgggaggccaaaaaaaaggaaggaggcttacttgaagccaggggttcaagaccaacctggcaacatagtgagaccccatctctgcaaaaaaaaattttttttaagtaactgccttttaatagcaaaataataccatcctaatctaaccacagagttaaaaaagaaagaaagtgtggtgtatatgattcagaccatttgttatctttatacaaaagtgactatgtgaaattctttgnttgtatttaagctaacgtgggattatattttacaaagtttttgtgaacttgcattttgtatttaccttgtctatagagcacagataca

SEQ ID NO: 8401 - DNA, 503 bp, Homo sapiens
gtttcattagagtggtgatgtatgaagggaagaaaatcatggctgactcaggacccatctatgataaaacctatgctggtggtagactagggttgtttgtcttctctcaagaaatggtgttcttctctgacctgaaatacgaatgtagagatccctaatcatcaaattgttgattgaaagactgatcataaaccaatgctggtattgcaccttctggaactatgggcttgagaaaacccccaggatcacttctccttggcttccttcttttctgtgcttgcatcagtgtggactcctagaacgtgcgacctgcctcaagaaaatgcagttttcaaaaacagactcagcattcagcctccaatgaataagacatcttccaagcatataaacaattgctttggtttccttttgaaaaagcatctacttgcttcagttgggaaggtgcccattccactctgcctttgtcacagagcagggtgctattgtgaggccatctctgagca

SEQ ID NO: 8402 - DNA, 358 bp, Homo sapiens
cctgtggggacgcagcagcatctctggagcggaggaagagagaggctgacacaaggctctccccctggggcggaagagctgccccagaagctgagaaacctccacaaaacaaaaacagtttgattccatccagcaactggtgacttattagctgcattgttttcaacatcacccctggcctgagctcaaatgtggctttattttgcaagcggctttgtgtgtggagacacatccggggttgataatgttgcagactgggatattttggttctttattgaaagggaagatcttactgccaccgggccccgcctcaccctccagattggaaactatgtgacccttacgatggggtcccag

SEQ ID NO: 8403 - DNA, 265 bp, Homo sapiens
  misc_feature (1)...(265): n = g, a, c or t
cttcactcagcaccttggcangatctgtgacggactcaggaagctgctagacgaagggaagctctgagagccctgagcctagcacattccaccttgacaaaatggttgactgagaaaacacagataatgggcttcctaaccctgctcacctggcactaacacttttcaatcttcaggcttcattccttcccaagagtgcttttgactctgagaccagcccacccccaaacagctagtggagaaggagcaatgctgaggggtgagg

SEQ ID NO: 8404 - DNA, 205 bp, Homo sapiens
  misc_feature (1)...(205): n = g, a, c or t
caaatcatttnacactgtttgtatcangngcttggcacaggaagatgccncanggtcaataaaatncagacaatattattacttaaatcctataaaacttttctgaggctggatgtggtggctcatgcctgtaatcccaacactttgggaggccaaggcaggaggaatgcttgagcccagganttcaagattagcctgggcaaaa

SEQ ID NO: 8405 - DNA, 358 bp, Homo sapiens
  misc_feature (1)...(358): n = g, a, c or t
ttcagccacctctctttttcagttggctgacttccacacctagcatctcatgagtgccaagcaaaaggagagaagagagaaatagcctgcgctgttttttagtttgggggttttgctgtttccttttatgagacccattcctatttcttatagtcaatgtttcttttatcacgatattattagtaagaaaacatcactgaaatgctagctgcaagtgacatctctttgatgtcatatggaagagttaaaacaggtgganaaattccttgattnacaangaaatgctctcctttcccctgcccccanaccttttatccacttacctagattctacatattctttaaatttcatctcagg

SEQ ID NO: 8406 - DNA, 391 bp, Homo sapiens
  misc_feature (1)...(391): n = g, a, c or t
ctgaggaacaaagtatcagaggagcatgatgttctcaggaagaaagagatggagtcagggcccaaagcatcccatggctatggaggtcggtttggagtagaaagagaccgaatggacaagagtgcagtgggccatgagtatgttgccgaggtggagaagcactcttctcagacggatgctgccaaaggctttgggggcaagtacggagttgagagggacagggcagacaagtcagcagtcggctttgattataaaggagaagtggagaagcatacatctcanaaagattactctcgtggctttggtggccggtacggggtggagaaggataaatgggacaaagcagctctgggatatgactacaagggagagacggagaaacacgagtccc

SEQ ID NO: 8407 - DNA, 383 bp, Homo sapiens
  misc_feature (1)...(383): n = g, a, c or t
tgcctgttggtcctgcangcggaaaccaaatgttggagcagtatgacaagctacaagatggcagcatcaaaatgaagcctctgatgggggtgatatacgtgcctttaacagataaagaaaagcagtggtccagggatgaattgtaaaagcaacatcagcttgaccagtataaaattacagtggattgctcatctcagtcctcaaagctttttgaaaaccaacaccatcacagcttgttttggactttgttacactgttattttcagcatgaaaatgtgtgtttttttagggtttctgattcttcaaagaggcacagagccaaattggnagaggaaggatgcaaagnataaatttgtgtaatattactttaacatgcccatatt

SEQ ID NO: 8408 - DNA, 497 bp, Homo sapiens
  misc_feature (1)...(497): n = g, a, c or t
aaggctaacagaaaagtgtttggacagtgggtgtcgagcagtactctaaacatgagtgaagccataaaagggttcctggtcaagtgctgtgcatacaattcccttggcacatcttgtgagacgatccttttaaactctccaggccccttccctttcatccaagacaacatctcattctatgcaacaattggtgtttgtctcctcttcattgtcgttttaaccctgctaatttgtcacaagtacaaaaagcaatttaggtatgaaagccagctacagatggtacaggtgaccggctcctcanataatgagtacttctacgttgatttcagagaatatgaatatgatctcnaatgggagtttccaagagaaaatttagagtttgggaaggtactangatcaggtgcttttggaaaagtgatgaacgcaacagcttatggaattagcaaaacaggagtctcaatccncgttgccgtcaaaatgctgaaagaaaaagcaga

SEQ ID NO: 8409 - DNA, 541 bp, Homo sapiens
  misc_feature (1)...(541): n = g, a, c or t
ccccatcaccactgncccgnggntgcctgtgtacctcttgccttttctgggcttgcntttctctcctctagtgggtggggatgactttcaatgactttcaatacttcccctgaaggaagaatgataaggagaaatgtctgttttgaggaaagggctttgaattccccanatactgaacaatttgtgtttgtgactgatggagaatttcaggaatgaatganaaagcctttgtgaaactatgcaacagtttacatcagtcatgtgaagtatttgtctaaaacagagcaaactgaagaccaaattattctcctgttgaggtccgtggatggcagatttaaagggaagaaccacaaaggcttgcaaagataggagaggctccatctctaatgcatgtanaagctccttacgggtgcccatcaagagcatagcttggaagccaccatgctgtgcggaactgcgtcagggcaaatgtcacagcaggatttccccaacccagctccatcatcacaaacncaganagctgcaggggaggacctcggcc

SEQ ID NO: 8410 - DNA, 433 bp, Homo sapiens; identical to SEQ ID NO: 8312

SEQ ID NO: 8411 - DNA, 379 bp, Homo sapiens
gagaaagccatgttcagttcgagcgccaagatcgtgaagcccaatggcgagaagccggacgagttcgagtccggcatctcccaggctcttctggagctggagatgaactcggacctcaaggctcagctcagggagctgaatattacggcagctaaggaaattgaagttggtggtggtcggaaagctatcataatctttgttcccgttcctcaactgaaatctttccagaaaatccaagtccggctagtacgcgaattggagaaaaagttcagtgggaagcatgtcgtctttatcgctcagaggagaattctgcctaagccaactcgaaaaagccgtacaaaaaataagcaaaagcgtcccaggagccgtactctgacag

SEQ ID NO: 8412 - DNA, 353 bp, Homo sapiens
ccagtggggcagcccttccccattggggtttccattgcgagcaaagttggcccagaatttcatcaccatcttgctaagtctgatctcctcttctgaggcaccctcttttaaaaatggggccccaaagacggagaagagctcatccccgtggtctcctatcaccgtcttgggtttcatgtctgatgagaagcttggacggtactgaaactcatacatgtaggtgggtgctccagcatctctgtggttccgggccacaatcacagatgggacaccaaacatcacatctgctatcaagtccaggaacaggtctttctttttgacagtgtcgtctgttcctcctaagtatttctcag

SEQ ID NO: 8413 - DNA, 505 bp, Homo sapiens
ccagtggaaatcatgccatatatggactccaaagttgacaatctgcctctgagttctggctctgcccatgggagaattcaattgaatatttttagtccttcatctccttatttgtaaatgggaagtaaaaatttatgccgtgcctatgtttcaggctggtaaaggatcaaataacatgatgccaacataagtgctttataaaatcttactatacttgaaaggtattcaatttttattcatcatttttacctacactgatttccagaaagaattttagttcagttacaacagaagatacataggcaataggaccgactattaaaacaaagataaaagaacaagaattatataataaaatagcagataattgtcccagaaaacctaagttaagcatagttgtaagagttgaacactaaatttagctttgaacttcctggcagctaagacagaacacaaaatacaattagacacaaaggtctccataatttacaaactgaagcatgct

SEQ ID NO: 8414 - DNA, 210 bp, Homo sapiens
ctgatccacgaggaccttcttgaggacatttgggaagcctcggaggccagacgcagggaataggcggtccagcgacaagtaccagtagtgcaggaagggacccatgctgcagcccaccgcaaacatgctcgctataagagtgtaagtcagggggctgggtcgggccggcaagttcctcagtccattccctctctccctccctggctaagg

SEQ ID NO: 8415 - DNA, 504 bp, Homo sapiens
  misc_feature (1)...(504): n = g, a, c or t
ctggggcttgtttagcttccagcacactctcagtcatagcatgtgtagctaaaggaagtaatgggaaggggttcatgttctctttataatgcagtggcnaaaggttctgaaagccttttaaactcgaaccagtgggggaaagatggatcttgaagctaatcctgcanagagttttatngaggccanggattgccttctaaattatgataaaacanaagtgaagagtttcanagcatcagattgagtgaaaagttgtcagattctgtattttttaacaatcttcaataatgtaaagattacttttaaaatatttaagttnaaactacttgaatagtattttgctgaagagcaagatatgcattaatcaccggttttatactgtccaaaatgaagcatccccgtgacaaaccanagtgggcagaagcatcnnanagcgtgacaggaaatcccaagactgcttccgcctcanaggcgtnccggctgcgattcgctgccctgttgtca

SEQ ID NO: 8416 - DNA, 399 bp, Homo sapiens
  misc_feature (1)...(399): n = g, a, c or t
tgattgtanctntgttggngtatntcgtgtncaagatggaaaagtgcttttgttgttctacctgatccagttgggggagcangaatngggggtgcctgnctaacggcctctagcccatgtgcttatactgggatctgtcccgagggatctgcacctggttggcantcattttgtggtgngacgtggtaaatcncgagtgttaccatgatgacgaggcccaagatgagccccaaaatcangggcaaggtttcttccagntgntcccgctcatncactgggcattnatgctcttcactgaagacaaaatntganataatgnnaaaaggntggatgtggaccncananaggatcatggggaccgtcttctgcggatcactacaggccaatgaaatggtttgt

SEQ ID NO: 8417 - DNA, 473 bp, Homo sapiens
  misc_feature (1)...(473): n = g, a, c or t
ctggcattggtctanagctntataaggccattcagcgagggaccatcaagtgcaactttgcgggggttgccttgggtgattcctggatctcccctgttgattcggtgctctcctggggaccttacctgtacancatgtntcttctcgaanacaaaggtctggcanaggtgtctaaggttgcanagcaagtactgaatgccgtaaataaggggctctacagagaggccacanagctgtgggggaaagcagaaatgatcattgaacagaacacagatggggtgaacttctataacatcttaactaaangcactcccacgtctacaatggagtcnagtctagaattcacacanagccacctaggccaggctaccaacgnctttgtgaacatggaggaggacttcatgaagccagtcattagcattgtggacgagttgctggangcagggatcaacgtnacggtgtataatggacag

SEQ ID NO: 8418 - DNA, 353 bp, Homo sapiens
  misc_feature (1)...(353): n = g, a, c or t
ccttctctgcttcagtcntgttcttcangatagtgtacatgcnnccaatgttgaagcaaatccgggagtgggggtcctggacggnactgaaggcatccagggctcccttccagtccttnttgtccgctgccagcaccccttcattccagagnctgatggcctccaccagggacatgantaggtagaaactaggaggccaanagagctgccngganacagagagaagacaggttggagcgtctcccctagcagggctgccttantggcccccaaggtgttcactttctgggccagatgagtagaatggggcccagcctcccttaaganaacttctcagtgttgcaaatgcatca

SEQ ID NO: 8419 - DNA, 496 bp, Homo sapiens
  misc_feature (1)...(496): n = g, a, c or t
tcgacgccaggagaaaggggggaggagaagccgttggatggacaggaacacagggagaggccggagggggaaacaggggatttgggcaagagagcagaagatgtaaaaggtgaccgggagcttcgaccagggcctcgagatgagccacggtccaatgggcgacgagaggaaaagacagagaagccccggttcatgttcaatatcgccgatggtggcttcacagagcttcacacactgtggcagaatgaggaacgggcagctatttcctcggggaaactcaatgagatctggcacagaagacatgactattggcttctggctgggattgtcctccatggctatgcacggtggcaggacatccanaatgatgctcaatttgccattatcaacgagccatttaaaactgaagccaataaggggaactttctggagatgaaaaataagttcctggcccggaggttcaagctcctggagcaggcgctggtgattgaggagc

SEQ ID NO: 8420 - DNA, 208 bp, Homo sapiens
  misc_feature (1)...(208): n = g, a, c or t
gaatnaagcactttgtctgatggtcaanctattgcagaccanagtgaaatnataccaacattnggccaatttgaaaggactcaggaggagtatgaatacaaaaaacatgctggtcctncntttcaaccagaattntcntcaggagctgaggaggcattnatagaccatactccctatctaagtattgctactacccaccttatggatc

SEQ ID NO: 8421 - DNA, 313 bp, Homo sapiens
ccggacccggagccgccatgcccaagtgtcccaagtgcaacaaggaggtgtacttcgccgagagggtgacctctctgggcaaggactggcatcggccctgcctgaagtgcgagaaatgtgggaagacgctgacctctgggggccacgctgagcacgaaggcaaaccctactgcaaccacccctgctacgcagccatgtttgggcctaaaggctttgggcggggcggagccgagagccacactttcaagtaaaccaggtggtggagaccccatccttggctgcttgcagggccactgtccaggcaaatgccagg

SEQ ID NO: 8422 - DNA, 471 bp, Homo sapiens
  misc_feature (1)...(471): n = g, a, c or t
cctttctctatatcacctttctggaaatcctgccccaggagctggccagttctgancaaaggatcctcaaggtcattctgctcctagcangctttgccctgctcactggcctgctcttnatccaaatctagggggcttcaagagaggggcaggggagattgatgatcaggtgcccctgttctcccttccctcccccanttgtggggaataggaaggaaaggggaagggaaatactgangaccaaaaagttctctgggagctaaagatagagcctttggggctatctgactaatgagagggaagtgggcagacaagaggctggccccantcccaaggaacaagagatggtcaagtcgctngagacatatcaggggacattaggattggggaagacacttgactgctagaatcagaggttggacactatacataaggacaggctcacatgggaggctggaggtgggtacccag

SEQ ID NO: 8423 - DNA, 332 bp, Homo sapiens
  misc_feature (1)...(332): n = g, a, c or t
aggccacctggattgcgcctaatgtgtttgagcatcacttaggagaagtcttctatttatttatttatttatttatttatttgtttgttttagaagattctatgttaatattttatgtgtaaaataaggntatgattgaatntacttgcacactctcccattatatnntattgtttattttangtcaaacccaagttagttcaatcctgattcatatttaatttgaanatagaaggtttgcanatattctctagtcatttgntaatatttcttcgtgatgacatatcacatgtcagncactgtgatagangctgaggaatccnanaaaatgg

SEQ ID NO: 8424 - DNA, 379 bp, Homo sapiens
  misc_feature (1)...(379): n = g, a, c or t
aggagtaccataattntggtagctaaatatatattttanatngatgaagaagctagaaaacaggcanattcctgactgctagtttatatagaaatgtattcttttagtttttaaagtaanggcaaacttaacaatgacttgtactctgaaagttttggaaacgtattcaaacaattngaatataaatttatcatttanttataaaaatatatancgacatcctcgaggccctagcatttctccttggataggggaccanagagagcttggaatgttaaaaacanaacanaacaaaanaaaacaaggagaagttgtncaanggatgtcaattttttatccctctgtatgggttagattttccaaaatcataatttgaaga

SEQ ID NO: 8425 - DNA, 282 bp, Homo sapiens
gaggcacaaggcacaacaggctgctctgggattctcttcagccaatcttcattgctcaagtgtctgaagcagccatggcagaagtacctgagctcgccagtgaaatgatggcttattacagtggcaatgaggatgacttgttctttgaagctgatggccctaaacagatgaagtgctccttccaggacctggacctctgccctctggatggcggcatccagctacgaatctccgaccaccactacagcaagggcttcaggcaggccgcgtcagttgttgtgg

SEQ ID NO: 8426 - DNA, 389 bp, Homo sapiens
  misc_feature (1)...(389): n = g, a, c or t
ctggtgtcaagacctgggttagaggtttgtcaaacagaggcagggcccagtcacctctttggaggggagtgatgagaaggggattttggtcacctgagagggttgagtaaacttggatcanggcacangcttctctcaccatactcanntttttgcactcactccctantngagcctactggcatcaagctctagatgccaaggctgggatggctgtggagcaggagctatggcccaagtngctntganaggggaagagacctaaaacccntagcagggaaaatactgacgctnggtgtgaacatatnactntcttttcacaagagtcctgatggggctnggctgagcttttgggtactcatccctactgnntatagctggagaggatt

SEQ ID NO: 8427 - DNA, 392 bp, Homo sapiens
  misc_feature (1)...(392): n = g, a, c or t
catgctgnncctgtcctggcctcaagtganccacccacctnnncctctcagtgttgngnttataggcaaccgnncccggccaaatccattntcatcactnaatgtttaaaggctacgttcagtttcctatangtgatattgntaggatctactancaaatganttggtaacctnacatctttgnattcatgtcnaaaaaaattcttttataagaacaaaaatggtactcttagcctcattcactggagtattactgaaaagcatgatattcttactctattttgggtacattatgacagagaggntattattacnanctgtcagnanaactnaggcttcttgagtaanggggattgaggnaaacntttggaanctggtgaatacatttcaag

SEQ ID NO: 8428 - DNA, 321 bp, Homo sapiens
  misc_feature (1)...(321): n = g, a, c or t
ctggcttccnagaggcaattctgtccttggaagccaggtttgaccatctgtaatcagccttgtgagaagtctcgtttgagggggccagggatggaacgggagggcgcatatcgtatgaggtatgggcattgtgttaagctgggggaagttgcagcttgtcctgaattacatggagaggaataaagtgggtgagtaggaggagccatttcatctgaaagcctgaggcccctctggtcccctcgataaaccccactggtgtcccaggccacaggtaacaggagaatagacatttaatgtcacagaatgtcagagcaggcaagg

SEQ ID NO: 8429 - DNA, 383 bp, Homo sapiens
  misc_feature (1)...(383): n = g, a, c or t
ccatggacaagctgaggaagatgctggttccctgcccacagaccttccaggagaatgacctgagcaccttctttcccttnatntttgaagaagaacctatcttcttcgacacatgggataacgaggcttatgtgcacgatgcacctgtacgatcactgaactgcacgctccgggactcacagcaaaaaagcttggtgatgtctggtccatatgaactgaaagctctccacctccagggacaggatatggagcaacaagtggtgttctccatgtcntttgtacaaggagaagaaagtaatgacaaaatacctgtggccttgggcctcaaggaaaagaatctgtacctgtcctgcgtgttgaaagatgataagcccactctacag

SEQ ID NO: 8430 - DNA, 476 bp, Homo sapiens
ctggcattgtggcagtgctaaagcagcgccccagattggtggctgcagcagtccaggcattttacctacgagaccctattgacctgcgagcttgtcgtgttttcaagacattcttgcctgaaacacgaataatgacatcggtcacattcactaaatgtctatatgcacaattggtgcaacaaaggtttgtgccagaccggcggagtggatacaggctgcctcctccatctgatccccagtaccgagcccatgaattgggcatgaaattggctcatggatttgagatcttatgctccaaatgtagcccacatttttctgactgcaagaaatcccttgtgactgcctcaccactctgggccagtttccttgaaagtctgaaaaagaatgattactttaagggactgatagaaggttctgctcagtaccgggaaaggctagaaatggcagagaattacttccagctctcagtagactgg

SEQ ID NO: 8431 - DNA, 495 bp, Homo sapiens
ctgttagggctgaatcttctggagaaaaaggtgccatctcaggagaatagcttttactctggtaggaatgcttccgagacaccacaaggcagcctgaacactcagttgcagggtcgggcttgcggtgggtgacccagagccaccaaagtcacatccacaactaatgagggaaatctgtaaagccagttagatagaagaattttatttttctgtgggttttgtgttgtcttttttatgttaaaaagaaatccagtttgtgtttttctatagaaaaagtaaaagatcaggttatactttaggttaggggttctatttattcctgttagtaaataaaattaacaaatttctttgtttaacaaaagattaatctttaaaccactaaaatacatagactgattgattattcaacacattggaattgatgtcggtcatagtttcctgaagcatttagttacaacctgaaggaataaaatgatttgtggaaatgcttaaaat

SEQ ID NO: 8432 - DNA, 383 bp, Homo sapiens
ccatggacaagctgaggaagatgctggttccctgcccacagaccttccaggagagtgacctgagcaccttctttcccttcatctttgaagaagaacctatcttctttgacacatgggataacgaggcttatgtgcacgatgcacctgtacgatcactgaactgcacgctccgggactcacagcaaaaaagcttggtgatgtctggtccatatgaactgaaagctctccacctccagggacaggatatggagcaacaagtggtgttctccatgtcctttgtacaaggagaagaaagtaatgacaaaatacctgtggccttgggcctcaaggaaaagaatctgtacctgtcctgcgtgttgaaagatgataagcccactctacag

SEQ ID NO: 8433 - DNA, 460 bp, Homo sapiens
  misc_feature (1)...(460): n = g, a, c or t
ccagatttctgaagaaacatggaattttctgcagtttatttatggtggagggcctgaagttatcctgcgacctccggttgttcatgttgatccagatatacttcaagcagaagaaaaaattgaagtagaaactcggtctttgtaatttttaggatgtagagagttctaatgaggaatcattttcatgtgccctgacatgtacacatgcgaaaacattcctaaaagcgtgtttatttgctttattttttttcatcatttatcccatttatttcttcttagtgggcattatggaagaatatattaaaatgtgtaatataccacaggttggtatatttagttttaaatacttaccataaagtctttcagtgtaatttttttttgagacagagtcttgctttgtcacccaggctggagtgctgtggtgttacctcagctcactgnancctccacctnctgggtt

SEQ ID NO: 8434 - DNA, 482 bp, Homo sapiens
  misc_feature (1)...(482): n = g, a, c or t
ccaatatgcctttggagcacagcctatggtttatgtttcttttatgaccacctttaatatctgtcaaacgactagacatgctatagctttacccgaaggtaatttgattgactgtgctctgctagaagatggtgtatgggtccctctcgaggtaactgccaataaatgataagtggtatttgttttanataatgcctctacctnagtggtagctttgataatggcaaattgtaattgcaagtgccattttcanaataggcattggtttattttaggaagaggataataaagttccttttagttatcaaagtaacaccttttattgntaaatctcaacttttgaagaaaacactttcaatttcttaactttttcctcagggttagtgagttagtacaactacccaaagaagtgttaaaatattganattctatatgtgtgngtttatatgtgcatctatgtattacgtatncaaaatatttca

SEQ ID NO: 8435 - DNA, 411 bp, Homo sapiens
ccttattattattattattttttttttgctgacaagtccaagatggcagtcggaactctgacccataaaaccagaaggcttagatgaagaacaaaaagaagggaaaccaaccctgcttccttttgcctgttattaatcgctgcaataaagccattagaatctaccaacatatcacccaacttgaaaagaagagagattctgaaaaatagtcagaaaagaagggtaaatggaaatgatgagtccctcccctttatggctattttaagaagcacaccatgttattcatatggcccgtgcttagcccactccctgaattgtttgattttagtggatataaaaattcttcctaagggctttcttagttccactgccagcagtagttccccatttctatttctcgttaggtctcaa

SEQ ID NO: 8436 - DNA, 430 bp, Homo sapiens
  misc_feature (1)...(430): n = g, a, c or t
aaataggaantattttaatgtttcttggggaatatgttagagaatttccttactcttgattgtgggatactatttaattatttcactttagaaagctgagtgtttcacaccttatctatgtagaatatatttccttattcagaatttctaaaagtttaagttctatgagggctaatatcttatcttcctataattttagacattctttatctttttagtatggcaaactgccatcatttacttttaaactttgattttatatgctatttattaagtattttattaggagtaccataattctggtagctaaatatatattttagatanatgaanaagctagaaaacaggcaaattcctgactgctagtttatatagaaatgtattcttttagtnnttaaagtnaangcaaacttaacaatgacttgtactc

SEQ ID NO: 8437 - DNA, 390 bp, Homo sapiens
  misc_feature (1)...(390): n = g, a, c or t
tgttttctaagtcctctcccctaataaaacctacccaacaatagtgctttnaaaagtggtannttatcttgaagatactctnnccaaatgcaaagataaacattctttttgtctgctttataaatatgaaatatgccagatctatantatnttaatgtgcatctactttaaatnagtcatcttgnggtttttataattcccttatgttcttgcccctctncacttgaaataacaaaatgccttaattttatggattagttctcttatagnanacaggcagctatatncagcaaaaccaataaagttatnttncaactttnatagttgnaaaatntcttataacaggaatacaaaacagctangnaaacatgccacattttattttagcat

SEQ ID NO: 8438 - DNA, 436 bp, Homo sapiens
  misc_feature (1)...(436): n = g, a, c or t
cctggctcaacaaaagggctggggattggccctgaaaggagagagctgactgtcctggctgatggacaggagatcctcttagcactaccctaaggcaggcagttgggcattggtgtagacaacaggaaagtccaggctatagccgtactcaaaaacctttctgttccctttctgccagccctagggattgagtccacattcagcacaggactctctgggtacagctctctttaggaagacacaaattgcatggtgaagtcagttatatcctggccgcctttggtccctcccaggaagacgggcatgttttctgcttgagaggtgctgatgtaccagttggggaactgggcagactcaaattccagcttgntattgatttctatcttgttgaagacaaatcgcttttccatcttcttctttgggtaatttttgggat

SEQ ID NO: 8439 - DNA, 310 bp, Homo sapiens
gaaaaaatatataataagtacataaaactacacaaatgtttgcatttcaggattatgaattataagtcagtttgttacttcaccatagcaagatgttgtgaatccactaaaatgttctttatggggattgtaatttaaagactgaagagcaggaacgatcactggttacaactgtatgacgtggactggacaaagactcgagattaatatccaaaaaggtttatagatgggtttgaataatagataatgggtcatttttataacattttacaataattaattttatttcatcttttaatgtggggggtgg

SEQ ID NO: 8440 - DNA, 313 bp, Homo sapiens
  misc_feature (1)...(313): n = g, a, c or t
aaacaatgaggggagagaatgagggacagagagaggaggggactgaggggccaaggaggttccgatgagcaaaaatggaagagaaagaacgtcagagaggangctattgggggatgaggagagagaccagagatcaagaagcatgaaggtattgagggccanagaggggacttctagggacatggagaggctgcaggacagagaaagggctcggggaacgggacagtggttctttcatttcaatgatcaaagttcccagctttttgacaccacaggggcaccctgacaattctggcaataagaacatgaaagg

SEQ ID NO: 8441 - DNA, 481 bp, Homo sapiens
  misc_feature (1)...(481): n = g, a, c or t
ccttggcctggccttgactttgggaaccttggaaatctttgggccttgactttgggaatcttggctgtggctgggagaaagctgggtggtcttggaggatgagcagaggtgacaggcttgggtgggaccgtttgaacatccttcctaaccagtgccttccccggcacagactggacttcgacattgtccggcgaagcagtgggtggtgtctggcagcgacttgggagatcatttcccgatgacatcacagtgtggtgttttctcttggatgcaaaccacactcttcacttggcttcaaaacagcttaagcgagcgaacagagactaggagggaacggaaactgtccgagcaggcgggcgggggcggcttangatctgtagtcctttttgctgtagggtttattgcccaaaatactatcaatctcgtggataatggaagacgacagtttcggaaggacctgtattgccccaatgttctccat

SEQ ID NO: 8442 - DNA, 467 bp, Homo sapiens
cctggacctgtgtaaaccttcaaacactcttttttacattaggtcatgaagttaaattttttactgtttctgtgctacagactcttcaaaggaaaatagttaagtcaatttcaaagaaaatgaccagcacatttttaaaacattagaaatgatttgactttgactatctactgccaaaaaaaggttaaggaatttgtaatgagaagctaaaaactttaaggaattttaaggaactcaaaacaaaaactcattaaatgtaattaaagtgaattctacaaataaagtctcttaatacatttctataatagtcacttaagacttaaattcaaacactagcaaaccacaaaatcagactgtatgactgacatccaaaagataaatataaatcaaaatccgaccccagcattagccaaggggtaggtgttcctcttgaggaaggcaggaattcctcttctgccacctgttgg

SEQ ID NO: 8443 - DNA, 391 bp, Homo sapiens
cgagatcgtaccactgcactctcgtctgagcgatagagtgagactctgcctcaaaaacaacaataacaaaaagaaaaacctgtgaggttgtaggttctttcccctttttcctttcctttttttttccccctttttcctttttcctttcctttttctctcactctgtcacccaacctggatgggagtggagtgtagtggtgtgatcatggcccactgcagccttaacttccttggctcaagtgatcctcctgcctcagcctcctgagtagttgggacaacaggcatgcactaccatgcctggctaattttttactttttgtagagacagggttttgccatgttgcccgggctggtctcaaactcctgggctcaggagatccacccacctagg

SEQ ID NO: 8444 - DNA, 430 bp, Homo sapiens
ccattcctgaatctatatttggcaaagccattctattattaacactgtaacatactgcattcaaatctaacctttgactttctcaaacgtatccctttatctcaactttacattattctgtgaaatattagacaagtagagaaaaggaaacagacccagaagttttgattcagtgatactgacccaatacacaccgtaaagttgtacagcaaaaactataactagttaagatcactcccaattttttgctcattcgcatataatacttaatatcctaaaatattgctaaaattatttaaggtagtatttataaggctattcctataaagtgttggcattttataaaatacttcagatttgaatattcctcaatctccgtgtccatccagctcttcttactcatgttaatttctctctagactctttgcag

SEQ ID NO: 8445 - DNA, 273 bp, Homo sapiens
ttttttttttgaactaaaaaagaactttatttattgagggcaaggggatgcaaacaatacaaaaatcaaaagcttatctggtatttaacttttctttctctgcttgtcaaatgagagttagattttatttttacatttgctaagtgtcctgatctgctcatgaaatccttctatgggggaagctgtggggcagattccttaagcgaccctttgggacaactcttatcagggaggagcgaactgctcatttctgcctacttctttcccttctgc

SEQ ID NO: 8446 - DNA, 510 bp, Homo sapiens
  misc_feature (1)...(510): n = g, a, c or t
ccttggctgcaggaacagactttttccatcggcttttccagggcccaggtgaagaggccacttcagcaacagagggtacaggagagagtttaggggctggtggagattaaagtgggataagtgtatctaaatagacttatgtacactaaaccaatgaaggagaggtttggctttaagaaataaatatgcccccaaccccagaaaccaagctgctgagtaggttccacaggcgagatacacatttaacactcaccccgggccagtacacttgactggnttaattntagtacatctgtcatcactatacactgagtagaatacagtggataagcaaaggtttctccaccatggagagagatttgtgttgccacaaactgtttctgtcacccacccgtgtggggacttctgagaaagttttcttgttccaagganccatgtgactcancgcgaggccctgcctcagcagaagctctgagccagaagccacatatattgctggagacaacatgg

SEQ ID NO: 8447 - DNA, 492 bp, Homo sapiens
  misc_feature (1)...(492): n = g, a, c or t
ctgtctgtactanacaaggttaccaagtgcngaattggttaatactaacagagagatttgctccattctctttggaataacaggacatgctgtatagatacaggcagnaggtttgctctgtacccatgtgtacagcctacccatacagggactgggattcgaggacttccaggcgcatagggtagaaccaaatgatagggtaggagcatgtgttctttagggccttgtaaggctgtttccttttgcatctggaactgactatataattgtcttcaatgaagactaattcaattttgcatatagaggagccaaagagagatttcagctctgtatttgtggtatcagtttggaaaaaaaaatctgatactccatttgattattgtaaatatttgatcttgaatcacttgacagtgtttgtttgaattgtgtnngntttttcctttgatgggcttaaaagaaattatccaaagggnganagagcagtatgccact

SEQ ID NO: 8448 - DNA, 313 bp, Homo sapiens
ctggagactcaaactcctgtacagctaccttctgggaaatagtttttgacacctatttttcagattcttgtccggaatttctgctgctcttttcaaaaaagggcattaacaattctctggaaataaagcacctgttagcctgacatatgcaaaaagcagggcggcatcacccattacgagctcccccagccagcagtcagtattggattggccttgcctggctggtggcagtttgggagaaacagccaaagaggttagtttatttcaacaccaaattagaccatggcccatttccaacgggtctctttaaagg

SEQ ID NO: 8449 - DNA, 428 bp, Homo sapiens
  misc_feature (1)...(428): n = g, a, c or t
cctggctcancaaaagggctggggattggccctgaaaggagagagctgactgtcctggctgatggacaggagatcctcttagcactaccctaaggcaggcagtngggcattggtgtagacaacaggaaagtccaggctatagccgnactcaaaaacctttctgtnccctttctgccanccctagggattgagtccacattcagcacaggactctctgggtacagctntctttaggaagacacaaattgcatggtgaagtcagttatatcctggccgcctttggtccctcccaggaagacgggcatgttttctgcntgnnaggtgctgatgtnccagttggggaactgggcagactcaanttccggcttgttattgattnctatcttgntgaagacaaatcgcttttccatcttcttnctttgggtaat

SEQ ID NO: 8450 - DNA, 383 bp, Homo sapiens; identical to SEQ ID NO: 7947

SEQ ID NO: 8451 - DNA, 68 bp, Homo sapiens
  misc_feature (1)...(68): n = g, a, c or t
caagcttttttttttnntttttttttttttttttgctttnaatatattttattctgacnaagttacaa

SEQ ID NO: 8452 - DNA, 368 bp, Homo sapiens; identical to SEQ ID NO: 8376

SEQ ID NO: 8453 - DNA, 608 bp, Homo sapiens
  misc_feature (1)...(608): n = g, a, c or t
ccacactctacttctgcttctgccacctatggggtcgaggcaggtgtggtgccttggctaagtccacagacttctgagaggcccacgctttcttcttctccagaaataaaccctgaaactcaagcagctttaatcagagggcaggattccacgatagcagcatcagaacagcaagtggcagcgagaattcttgattccaatgatcaggcaacagtaaaccctgtggaatttaatactgaggttgcaacaccaccattttcccttctggagacttctaatgaaacagatttcctgattggcattaatgaagagtcagtggaaggcacggcaatctatttaccaggacctgatcgctgcaaaatgaacccgtgccttaacggaggcacctgttatcctactgaaacttcctacgtatgcacctgtgtgccaggatacagcggagaccagtgtgaacttggtaagatggtacttggctgaaaaggtgcagttctttcacagaagatatattgggggagaatntatgttgncgaatcaatcagagatttcaaagaaacccatatgaagattaattatatgttaaatgaagttaaaatctgagggtaattaac

SEQ ID NO: 8454 - DNA, 323 bp, Homo sapiens
  misc_feature (1)...(323): n = g, a, c or t
ctgtgttnccatgggacccctctnattcattagccttgggcttacactgagttctccacatgaaactgatgacttgtccanaacaactgcccagcaaaagctaagactcattcaacttgaaggcttgaaaacccaacaagtnaaccttttctaccttctttatgctctcttgcaagtccttatataggtttatattttcctggccccataggggcagaccttatagaggcaaagacctttgaattctggggagatggtgatcaccttattaactcccttctgcatacgtggattacagaggagtaagcanaccaagagcacag

SEQ ID NO: 8455 - DNA, 264 bp, Homo sapiens
  misc_feature (1)...(264): n = g, a, c or t
ccacaacaactgacgcggcctgcctgaagcccttgctgtagtggtggtcggagattcgtanctggatgccgncatccagagggcagaggtccaggtcctggaaggagcacttcatctgtttagggccatcagcttcaaagaacaagtcatcctcattgccactgtaataagccatcatttcactggcgagctcaggtacttntaccatggctgcttcagacacttgagcaatgaagattggctgaagagaatcccagagcagcc

SEQ ID NO: 8456 - DNA, 434 bp, Homo sapiens
  misc_feature (1)...(434): n = g, a, c or t
ctgcatccacagacttcaactacatgattacttctttgcccattcttctctttnttttctttcccgaataacctntttcagatacggtncanggtagaaattttnctcttnatatttggtccactgctctttangcaanatctgatgcttcaanattcaggtccagtgccctcttaatgcgaaacatcctgtcattatnaaggttctcaggaagtcttcttatggcttcttttacatcttcatcctcntatattgtatcatctcgcattaaccctatgatagatgacaaagttagattgcacatgcatctcaaaaatngcggnttttttaaattagtnaaatacctttatgacttataacttacaacttttggngaactatcgaattcaaatnactaggttcaatggaaattcaatgcatttcatacattatag

SEQ ID NO: 8457 - DNA, 490 bp, Homo sapiens
cctgagcagacactgctgggggagagagaaagttcacatccccccaccaagcacggtctcagattaggttattacaaagggcgagggggaggagggcatcccaggagtctaacatccaacccgacctatgtagaatgacgggtgaccacgccctgacccagccacacacttgaaccctgggacttcagtgaggtaggtggtatcagccccatttcacaggtgggcaaactgaggcagaatgaaatgcaatagctcgcttttaataacaacatacaaaagtctggagaaggccccaaagtagtcccctgttcccagagcccaaagaataaacagatgggagaacaagaccctcctcttccttttcccccacagagaagatccctaaacacatcaccggaacccctcaaatattcctgggaacttcaaacaaaaaaacatagcaacaaagagacccagcttccagtttattcccagttgggtaggggacagg

SEQ ID NO: 8458 - DNA, 338 bp, Homo sapiens
  misc_feature (1)...(338): n = g, a, c or t
ctgcccgcaggccccaggtcttcatggagttgctccttanttctctatgaaacacctcctctgctgagaagtccccgtggtgcaggagcagtaaggtatccccagacttgntggagaatgggactagctggtcaccccgctgccgggcnatcacagtgaccacgtgagctgggcccaggtcagggtcatnnncgctcagnccnncataggaaaagganacncgcaagtctnccacctntggatacttgggattttngntgtggtagaaaaagtctccacggcgaatgatgtccacatgagggtcctccagcttggataggctcanggacttgaagttg

SEQ ID NO: 8459 - DNA, 477 bp, Homo sapiens
  misc_feature (1)...(477): n = g, a, c or t
ccagtggaatgatgttccctgcaattaccatctcacctatacgtgcaagaaaggaacagtcgcttgcggccagccccctgttgtagaaaatgccaagacctttggaaagatgaaacctcgttatgaaatcaactccctgattagataccactgcaaagatggtttcattcaacgtcaccttccaactatccggtgcttaggaaatggaanatgggctatacctaaaattacctgcatgaaccgtaagtggtcctttanaaagaatggactaccgtgctataacaactactagacaccttcattttacggctgtngtatcggcagtttanggtatggagcaagtaatattgngtgttttctttttttctttctttccttccatgtagcatctgcntaccaaaggacttattctatgaaatactttaaaaattnctcatcaacaaaggacaattcaataaatacatccnaacatgatca

SEQ ID NO: 8460 - DNA, 429 bp, Homo sapiens
  misc_feature (1)...(429): n = g, a, c or t
ccaaaaaaaagaaggccntnntgacctgccacataatncnttggggaaagaaatctaatattcatagcacanaagaactcaaagaggataaaattctggaagccatggaatggtactcagaagtgcctgcggngaaacactccatatgcttttctcaaacacatntgttaaaaacaaatgtagttctnaaaaatattgagatgccatgttttaaatctctgcangacacaagaggccactcaggttttctaatnttatttgaacacaaaatatttaattttttgcatgtagagaataagaggtaatcattancctgaaaagagaggatttataatcancattatgcagaaagaaagcaaaattacaaataccanncctactcacatgaaaatttttcangtttacgctgatatatatctgagtgcttat

SEQ ID NO: 8461 - DNA, 423 bp, Homo sapiens
  misc_feature (1)...(423): n = g, a, c or t
gcacgccctgcaagggaggtatccgttacagcactgatgtgagtgtagatgaagtaaaagctttggcttctctgatgacatacaagtgtgcagtggttgatgtgccgtttgggggtgctaaagctggtgttaagatcaatcccaagaactatactgataatgaattggaaaagatcacaaggaggttcaccatggagctagcaaaaaagggctttattggtcctggcattgatgtgcctgctccagacatgagcacaggtgagcgggagatgtcctggatcgctgatacctatgccagcaccatagggcactatgatattaatgcacacgcctgtgttactggtaaacccatcagccaagggggaatccatggacgcatctctgctactggccgnggtgtcttccatgggatngaaaatttca

SEQ ID NO: 8462 - DNA, 154 bp, Homo sapiens
  misc_feature (1)...(154): n = g, a, c or t
agcagcagcttaaatatgaggcaagcagtcaggggttagccatgcctggggctgggttggggtcatgaggctacaggcacagactgtccccaggtggacagaagttggagcaggaagaggaggaggaaggggccgcanagcancctgggtcaga

SEQ ID NO: 8463 - DNA, 251 bp, Homo sapiens
ccagtcccagcagtctgactttttttttctttaagagacagggtctcactctgttgctcaggctggagtgtagtggcgcgatcatagctcgctgcagcctcaaactcctgggctccagtgatcctcccctcagcctcctgagtacaggtgcacgtcactgcagccagccagtctgacatcttgattccagggtggaaaacccttcttgtctccatggtaatggctgggctctcccaccctccaatagttca

SEQ ID NO: 8464 - DNA, 379 bp, Homo sapiens
ctgaaaaaaatcatgcagacatttgttacacagcagtggaaacagagcaaagaaaaatccaattgcctgcacaataaaaagttgtcagagaagaaagtgaagtctcccctgcatttattttctactttgcgcaggtcgccaagttatcctccccctggttgtggcaaaagcaaatccaaactgaaatctgagcaggacggaatctccaaaacgcataagctgctgcggaggacttgttccagcacagtcaagactgatgatgtgtgtgtcacaaagtcacacaggacctttggccgctccttgtccagcgatcccagggcggagcaggctatgacagcaattaaatcgcacaaacttttgaaccgtccttgccctgcag

SEQ ID NO: 8465 - DNA, 514 bp, Homo sapiens
cctttgagagatatgggcatagaattcaccctcaaaaagctcatgttctgattaaccacatcaacagttaagtaatatggaagtcaagtaacaaagacaataacacaactaattataaacaagacatataagcagtttaataccaccttagtgattctgattgactcatattgataacatattccacatggtcatgcacaataactccatttaccctaaatcatggattagtttccatcaaaacaccactccatttgagttttaaaattaaaagtattctccagcacaattacaggattttgaaaaccagaacacagtatagaaacataaaatatatataaaattaaccaaaattaaaataagacaatgtattaatagataatcatactataaacacacaatcactggctgaactagacaaggaaagggtaaattctttgagggcagggccttttccttgtcctgcagctaggaacaaagcacccagaacaacagatgtcatgggcttgataaa

SEQ ID NO: 8466 - DNA, 408 bp, Homo sapiens
  misc_feature (1)...(408): n = g, a, c or t
ctgggagatgctggatacntattatttggagtggtgttatttgtttgggaactcttacctaccaccttagtcgtttatttcttccgagttagaaatcctacaaaggaccttaccaaccctggaatggtccccagccatggattcagtcccagatcttatttctttgacaaccctcgaagatatgacagtgatgatgaccttgcctggaacattgcccctcanggacttcagggaggttttgctccanattactatgattggggacaacaaactaacagcttcctggcacaagcaggaactttgcaagactcaactttggatcctgacaaaccaagccttgggtagcatcagttaacagttttatggacgattcctcanatgaaaagcttcagaaaagcatagtgacag

SEQ ID NO: 8467 - DNA, 136 bp, Homo sapiens
gcagtgaagcctctggacacacagagatcccccagcccagtgctctgccaggaatagacgtcggctcatctgtaatgtccccacaggattcttttaaggaaattcatgtaaatattgaagcgactttcaaaccatc

SEQ ID NO: 8468 - DNA, 470 bp, Homo sapiens
  misc_feature (1)...(470): n = g, a, c or t
ccagttcttagctgtggatcccaaagggcgagccgttatgattagtgccattgagaaacagaaattggtgtatattttgaacagagatgctgcancccgacttaccatttcatctcccctggaagcccacaaagcaaacactttagtgtatcatgtagttggagtagatgtcggatttgaaaatccaatgtttgcttgtctggaaatggattatgaggaagcagacaatgatccaacaggggaagcagcagctaatacccagcagacacttactttctatgagctagaccttggtttaaatcatgtggtccgaaaatacagtgaacctttggaggaacacggnaacttccttattacagttcctggagggtcagatggtccaagtggagtactgatctgctctgaaaactatattacttacaanaactttggtgaccagccagatatccgctgtccaattcccagnangc

SEQ ID NO: 8469 - DNA, 492 bp, Homo sapiens
  misc_feature (1)...(492): n = g, a, c or t
ctgtctgtnctanacaaggttaccaagtgcggaattggttaatactaacagagagatttgctccattctctttggaataacaggacatgctgtatagatacaggcagtaggtttgctctgtacccatgtgtacagcctacccatgcagggactgggattcgaggacttccaggcgcatagggtagaaccaaatgatagggtaggagcatgtgttctttagggccttgtaaggctgtttccttttgcatctggaactgactatataattgtcttcaatgaagactaattcaattttgcatatagaggagccaaagagagatttcagctctgtatttgtggtatcagtttggaaaaaaaaatctgatactccatttgattattgtaaatatttgatcttgaatcacttgacagtgtttgtttgaattgtgtttgttttttcctttgatgggcttaaaaganattatccaaagggagaaagagcagtatgccact

SEQ ID NO: 8470 - DNA, 429 bp, Homo sapiens
  misc_feature (1)...(429): n = g, a, c or t
ccaaattccagcatgcctggttcaagagaagttcagatacacccggactcggatcaaatctcagggcttcatgggaattcatttcactctgaagatgaaattgaatatgaaaaccaaaaaaggctggaagaagaggaggacttgaatgtgcttacatttgaagatcttctttgctttgcatatcaagttgccaaaggaatggaatttctggaatttaagtcgtgtgttcacagagacctggccgncaggaacgtgcttgtcacccacgggaaagtggtgaanatatgtnactttggattggctcgatatatcatgagtgattccaactatgttgtcaggggcaatgcccgtctgcctgtaaaatggatggnccccgaaagcctgtttgaaggcatctacaccattaagagtgatgnctggncatatgga

SEQ ID NO: 8471 - DNA, 512 bp, Homo sapiens
  misc_feature (1)...(512): n = g, a, c or t
cctgagatgaaatttaaagaatatgtagaatctaggtaagtggataaaaggtctgggggcaggggaaaggagagcatttcattgtgaatcaaggaatttctccacctgttttaactcttccatatgacatcaaagagatgtcacttgcagctagcatttcagtgatgttttcttactaataatatcgtgataaaagaaacattgactataagaaataggaatgggtctcataaaaggaaacagcaaaacccccaaactaaaaaacaacgcaggctatttctctcttctctccttttgcttggcactcatgagatgctaggtgtggaagtcagccaactgaaaaagagaggtggctgaagaaggtggggaggctgaagccagttaaataggatggtccaattcacagacggcgaggctacagtgcaaataggactctttcaacttgancangaccccattacttcactggagttagaaagaaaggagagcgtagactttttgaactttctata

SEQ ID NO: 8472 - DNA, 301 bp, Homo sapiens
  misc_feature (1)...(301): n = g, a, c or t
cctgattatctaaaagctatttggaatgtaatcaactgggagaatgtaactgaaagatacatggcttgcaaaaagtaaaccacgatcgttatgctgagtatgttaagctctttatgactgtttttgtagtggtatagagtactgcagaatacagtaagctgctctattgtagcatttcttgatgttgcttantcacttatttcataaacaacttaatgttctgaataatttcttactaaacatttngttattgggcaagtgattgaaaatagtaaatgctttgtgtgattgaatctgattg

SEQ ID NO: 8473 - DNA, 449 bp, Homo sapiens
cctggctcaacaaaagggctggggattggccctgaaaggagagagctgactgtcctggctgatggacaggagatcctcttagcactaccctaaggcaggcagttgggcattggtgtagacaacaggaaagtccaggctatagccgtactcaaaaacctttctgttccctttctgccagccctagggattgagtccacattcagcacaggactctctgggtacagctctctttaggaagacacaaattgcatggtgaagtcagttatatcctggccgcctttggtccctcccaggaagacgggcatgttttctgcttgagaggtgctgatgtaccagttggggaactgggcagactcaaattccagcttgttattgatttctatcttgttgaagacaaatcgcttttccatcttcttctttgggtaatttttgggatctacactctccag

SEQ ID NO: 8474 - DNA, 428 bp, Homo sapiens
  misc_feature (1)...(428): n = g, a, c or t
tttttttttcaattaagctatttttatttaacatgtaatagtcataaagcanctccatatatttagttttctgatatcctaatgtatttccacaaaccttttaagtctacaattttatatagttttccatcagggaggcaagatatatataatttctttttatatttaactaaaggttttaagagggcttantctctaaatcagtancaattagtcntaacaccatacaaacacatttaaatattcaggaaagaggttgttaanattattgcttantcttataaaatggtgaattttaaccaaattgatacctctgtaatcttatttatgtttcctataacatcatactgcttggcaagtaatgtaagttttgacataatttaaaaattcaagtanttgtaaacaaattctaatttgttaaacaattc

SEQ ID NO: 8475 - DNA, 364 bp, Homo sapiens; identical to SEQ ID NO: 8232

SEQ ID NO: 8476 - DNA, 240 bp, Homo sapiens
  misc_feature (1)...(240): n = g, a, c or t
ctgctgttacnttcanagaataagagcaaccataactnacatcaagccaatttanattagactaatntaanttgtctaattaaattgnctctagatgagagcccaatctcatctagaantgaagaaatctntctattgacagntattagtnnaagaggttctaatacccngtgtaaggcagaaatatacattggagttagtctgtctgangtatgcagaacaaatggcantatcatgaag

SEQ ID NO: 8477 - DNA, 441 bp, Homo sapiens
  misc_feature (1)...(441): n = g, a, c or t
ctgccgctgctcgttgttttttctgcaatgatatttgggactattacaaatcaagatctgcctgtgatcaagtgtgttttaatcaatcataagaacaatgattcatcagtggggaagtcatcatcatatcccatggtatcagaatccccggaagacctngggtgtgcgttgagaccccagagctcagggacagngtacgaagctgccgctgtggaagtggatgtatctgcttccatcacactgcaagtgctggtcgatgccccagggaacatttcctgtctctgggtctttaagcacagctccctgaattgccagccacattttgatttacaaaacagaggagttgtttccatggncattttgaaaatggnagaaacccaagctggagaatacctactttttattcagagtgaagctaccaattacacaatattgtttaca

SEQ ID NO: 8478 - DNA, 515 bp, Homo sapiens
ccagatgacctgttgtctaccaaagaaagctgggtagaagcaactcctagacaagttgtagagctctcagggagttcttcgattccaattacagaaggctctggagaagcagaagaagatgaagatacaatgttcaccatggtaactgatttatcacagagaaatactactgatacactcattactttagacactagcaggataatcacagaaagcttttttgaggttcctgcaaccaccatttatccagtttctgaacaaccttctgcaaaagtggtgcctaccaagtttgtaagtgaaacagacacttctgagtggatttccagtaccactgttgaggaaaagaaaaggaaggaggaggagggaactacaggacctgatcgctgcaaaatgaacccgtgccttaacggaggcacctgttatcctactgaaacttcctacgtatgcacctgtgtgccaggatacagcggagaccagtgtgaacttgattttgatgaatgtcactctaatccctg

SEQ ID NO: 8479 - DNA, 189 bp, Homo sapiens
  misc_feature (1)...(189): n = g, a, c or t
cctgggtgatacatggcgnaagagaanattccaganacttatgccaggatcccaccataaaagagctggaatcgattataagcaaaaggaatattcaattttcctgcaagaatatctncagacctgacaagtttcttcagngtgtgaaaaatcctgaggattcatnntngcacatctgagatctgagcc

SEQ ID NO: 8480 - DNA, 272 bp, Homo sapiens
  misc_feature (1)...(272): n = g, a, c or t
agggcccaaggcagccccctgggttctccaaccactgcaagcaaggtctggggacaaccttgacaacccccagccttcttgctgggctggcgctgctgccactcaaataggacataggacaagcttgtctgacatcagctactggagttaaattatggctttataggactcaaacctgttgtttttcccaactctgttctctccctccaatncaacccctgccacagtgcatgggcaggctagccttgaatggactggacagacaccaacag

SEQ ID NO: 8481 - DNA, 349 bp, Homo sapiens
  misc_feature (1)...(349): n = g, a, c or t
ccaggctcccaggtgacttacgttaatagcanacttctagttagaagaggagaatttatttcattaaaaaaaaaaaataagtcaaacagttcaagaaagtattcatttatgtaaaagaagtcaattggtatgttactaaagataataggaagaaaattagctcactattttagttgcntactgatgattttaaggtttaaataattaagatttaaatataccgtatgtaaatgtagaagtctgtatcgtaataaatctgttgctaagnaaaatgggaatncatgacaacgaggaatgtaggtattaaaaatgtcagaattagaangagaacagnaaaagagcaaaagct

SEQ ID NO: 8482 - DNA, 412 bp, Homo sapiens
  misc_feature (1)...(412): n = g, a, c or t
tgtacatgggggtaggccggggcacaaagcctgttcctaagactaacttgggaccaaggagccctgaggagttggggcacgggctccacagaaacatctaggcttcggtaaccaatgcacagtgacgctcccatgttgacttaaaaagcagataaaaacaaccaaacaaaaagtccctaccattgcacccctgtagtaggccgttgtgatcgtccgaaaccgttcctgaccggctgtgtccctaaacatgaagagaagggatattagcaacattaaaggaaaataactgtcctcagtaggagacaaggagcatctacccgggatgcctggctttctcaccgttcagccactgngataccttcttctgctaangcagcaccttctaatctccctattattacanggaaggaca

SEQ ID NO: 8483 - DNA, 445 bp, Homo sapiens
ctgaggaagctcttcattggagggttgagctttgaaacaactgatgagagcctgaggagccattttgagcaatggggaacgctcacggactgtgtggtaatgagagatccaaacaccaagcgctccaggggctttgggtttgtcacatatgccactgtggaggaggtggatgcagctatgaatgcaaggccacacaaggtggatggaagagttgtggaaccaaagagagctgtctccagagaagattctcaaagaccaggtgcccacttaactgtgaaaaagatatttgttggtggcattaaagaagacactgaagaacatcacctaagagattattttgaacagtatggaaaaattgaagtgattgaaatcatgactgaccgaggcagtggcaagaaaaggggctttgcctttgtaacctttgacgaccatgactccgtggata

SEQ ID NO: 8484 - DNA, 357 bp, Homo sapiens
ccaaaggcttccctcacgtgcaggtagggaatggtgtggtccaggaccgcttgcatgagccaggaatcttgcagtcttcaaagattagctcacaggtgttagagcccctcatccccagcttgtccagcttcttagaggtgctaaagccaggcatacccttctccacaatgaaggctgtgatgccccgagaagctggcacagcagccagatctgtcttggcatagacaatcaggacgtcagcatcagggccattagtgatccagaacttgttgccattcaggatgtagtgatttcctttcttttccgctttgagcttcatagagacaacatcagagcctgcattgggctcactcatgg

SEQ ID NO: 8485 - DNA, 494 bp, Homo sapiens
ccagaatagaagtgtcttatctaacctgaccagctcaaggtaaaagacctcaagaatcggacattggctgtgtctgtgtctccaaagaaaatgtcccagtcagctcaccctactgtgaaacccatattgaatccagaacttctatttagtttgtgtcctttttttctcataaacaaatttgttatagtcttactaagatataattggcatagaataaactttacacttaaagtgaaaaacttgagttctgaggcatgtatatatttccacagtcgccaccacagtcaggtaatcattcccctaaattttttgtgcctccttatcttccttcccttcccctaccccagctcctcctttcctcaggcagccccgatctgctttctgtcgctatagaataatttgacttttctggaattttatgtacatggaatcatacagtatgtgttcttttttggtctgacattcactcaccataattgagtttcatccatgtt

SEQ ID NO: 8486 - DNA, 505 bp, Homo sapiens
  misc_feature (1)...(505): n = g, a, c or t
ccaactaatttagttttgatgcactgtcagatagactaatcactgtctaagattttcctgaatctctgcttcatgttatgcttttcaaggagatgataatagcttgttaaccaccattcacagctcttcaactactcacaagccttcaagaactcaccttaaggagcccactgaatattaaatattaaacagctacaaaagagtgctactaagacaattttgctttgatgagctggataaaatcaagtcagaggttcagtataaactctgacaggactttaataattcctaatatgtatgaaatgaaaatgaaaatggtcaaaatcatttaggaactctcaatttttcaagactcgaagcaaattaaccatggactttatacttgtaattagttaagaagaaaagctattgcctaaaagcagttatgtgtgngtaattcttgacttcggatatctaatttcttctattccaaggtatttagttctaaggtaactaaaatagtaac

SEQ ID NO: 8487 - DNA, 469 bp, Homo sapiens
  misc_feature (1)...(469): n = g, a, c or t
ctgtctcttacttttaaccagtgaaattgacctgcccgtgaagaggcgggcataacacagcaagacgagaagaccctatggagctttaatttattaatgcaaacagtacctaacaaacccacaggtcctaaactaccaaacctgcattaaaaatttcggttggggcgacctcggagcanaacccaacctccgagcagtacatgctaagacttcaccagtcaaagcgaactactatactcaattgatccaataacttgaccaacggaacaagttaccctagggataacagcgcaatcctattctagagtccatatcaacaatanggtttacgacctcgatgttggatcaggacatcccaatggtgcagccgctattaaaggttcgtttgttcaacgattaaantnctacgtgatctgagttcagaccggagtaatccaggtcggnttctatctacttcaaattcctccct

SEQ ID NO: 8488 - DNA, 380 bp, Homo sapiens
  misc_feature (1)...(380): n = g, a, c or t
ctgatgatggacagtgaaactggtcgatccaagggatatggatttattacattttctgactcagaatgtgccaaaaaggctttggaacaacttaatggatttgaactagcaggaagaccaatgaaagttggtcatgttactgaacgtactgatgcttcgagtgctagttcatttttggacagtgatgaactggaaaggactggaattgatttgggaacaactggtcgtcttcagttaatggcaagacttgcagagggtacaggtttgcagattccgccagcagcacagcaagctctacagatgagtggctctttggcatttggtgctgtggcagatttgcaaacaanactttcccagcagactgaagcttcagctttagc

SEQ ID NO: 8489 - DNA, 544 bp, Homo sapiens
  misc_feature (1)...(544): n = g, a, c or t
ccatcggtgctgaaattgancattttaaatagtacagtaggctggtatacattaggaaatggactgcactggaggcaaatagaaaactaaagaaattagataggctggaaatgcttactttctgctctcattttctttcattttgtctgctgtctttttgaatgccaatactttcatttaaaatgttttgggagcacggcaacccaaaatgactgaacggtggtccaaaaatccaaaccaactgataattacttctcaaggtgataggaaaggcacaggaagttaggactttggctgaaatgatgaaaacacatgttcgccattttagggatcagcgcctngactcctgccacctncggctccaacgatgatcatgtttggatgtatttattgaattgtcctttgctgatgaggaatttttaaagtatttcatagaataagncctttggtatgcanatgggttcatgcaggtaattttaggtatagcccatcttgcatttcctaagcnccggatagttggaaggtgacgnngaatgaaaccatc

SEQ ID NO: 8490 - DNA, 597 bp, Homo sapiens
  misc_feature (1)...(597): n = g, a, c or t
ccatataatttttagctacaaaagtttaagcaaaaacaaactctgcaatgatgtggaatagcagaaaagatcctttgcaggcaagagactctagcatatttacctatgtagttaacaggctgcagacctggttgctacatacctgtattgtgtatttcctcagcaatatacatgccttctcgataggttagtcccccgacaacaggagttcctgtggctggagccagtgtagggtcaaatgcatcaatatcaaaactcaaatggattggtctttgtctcctaaaaaggaagaggataaaataatacttaaaataatacttaactggttgtccttggacactcatccttcttatggttgcaactccttgattttgttgctattagtcctagtactttgttaataaagctgttaatacatttccaggcttcctattcttggaagttactgagattggcaatattaacttcctacataccacttcatgatactgccatttgttctgcatacctcagacagactaactccaatgtatatttctgccttacactgggtattagaacctcttatactaataactgncaatagagagatttctt

SEQ ID NO: 8491 - DNA, 173 bp, Homo sapiens
  misc_feature (1)...(173): n = g, a, c or t
aagaagatggaanagcgatttntnttnaacaaganagaaatcaataacaagctggaatttgagtctgcccagttccccaactngtacatcagcacctctcaancanaanacatgcccgtcttcctgggagggaccaaaggcggncaggatataacngacttcaccatgcaatt

SEQ ID NO: 8492 - DNA, 312 bp, Homo sapiens
  misc_feature (1)...(312): n = g, a, c or t
acaagctnttttttttnnttttttttttttttngctttgaaatgatttattcacctgggaaagtgatcacaacttgctgntaattaaaaccaacantanaacagngagtncaattgaagtccatcattgttattatcataaatatgcncccaacaaaaaacaaactaaaanaaaatncnctcaaaagcacacagngggcacattttgtntttgggtagnggaagtgtaggtaatgtcagtgttnggggtttttntttgaatttttaagctgttttaaaaataagttttgttattaggaaaattntttttaaa

SEQ ID NO: 8493 - DNA, 343 bp, Homo sapiens
  misc_feature (1)...(343): n = g, a, c or t
ccagcaatnnaaggaggctcgaaagtttcttttataagaatgcctgctagcaagggttccagcaaggtggttggttggtctgtaagtcagtcttgagtacttgaaacagttctgtgtttgttttttttccttancgtttagaatagccatcattgtccggcaataggcagagctatcacgtccaggaaaaatgagggagggaaccacagaggcagcgtgagatccaaatacagcattcaaaggtaattggtccagtggtgcctggggagggaggaagggtgatactccagggttagccgtcttnttttgggggtgtgtaccanccgnttntttcgnggatctg

SEQ ID NO: 8494 - DNA, 550 bp, Homo sapiens
  misc_feature (1)...(550): n = g, a, c or t
ccacgagannattgtgaacctgctgggggcgtgcacactgtcaggaccaatttacttgatttttgaatactgttgctatggtgatcttctcaactatctaagaagtaaaagagaaaaatttcacaggacttggacagagattttcaaggaacacaatttcagtttttaccccactttccaatcacatccaaattccagcatgcctggttcaagagaagttcagatacacccggactcggatcaaatctcagggcttcatgggaattcatttcactctgaagatgaaattgaatatgaaaaccaaaaaaggctggaagaagaggaggacttgaatgtgcttacatttgaagatcttctttgctttgcatatcaagttgccaaaggaatggaatntctggaatntaagtngtgtgntcacagagnnctggccgccaggaacgtgcttgtcacccacgggaaagtggtgaagatatgtgactttggattggctcgagatatcatgagtgattccaactatgttgtcaggggcaatgcccntctgcctgtaaaa

SEQ ID NO: 8495 - DNA, 574 bp, Homo sapiens
ccttatgaaggacattgtaggagccaatgagaaagaaatagccctaatgaatgctttgactgtaaatttacatcttctaatgttatcattttttaagcctacgccaaaacgatataaaattcttctagaagccaaagccttcccttctgatcattatgctattgagtcacaactacaacttcacggacttaacattgaagaaagtatgcggatgataaagccaagagagggggaagaaaccttaagaatagaggatatccttgaagtaattgagaaggaaggagactcaattgcagtgatcctgttcagtggggtgcatttttacactggacagcactttaatattcctgccatcacaaaagctggacaagcgaagggttgttatgttggctttgatctagcacatgcagttggaaatgttgaactctacttacatgactggggagttgattttgcctgctggtgttcctacaagtatttaaatgcaggagcaggaggaattgctggtgccttcattcatgaaaagcatgcccatacgattaaacctgcattagtgggatggtttggacctgcc

SEQ ID NO: 8496 - DNA, 366 bp, Homo sapiens
  misc_feature (1)...(366): n = g, a, c or t
ctgttcttagaaagcatnccatatanttatccagagcactcangttttggttctcttttacatanctgcattcggagatactctatgtgagacatgtttaaaaaaagagaaacatttatacctggaatttatattcttncaagtaatnttttantcttgttggtaaaggcagtccccanatggcaccggtacattngttaatggngagcctacagagatgctgcnganatggtgctgacgtgtanagcggtttggncanataaaggtgnacagtgccgttncggggggcttctggacctgtccgcttatccttgcncatntgaacatagtngtcgatcagatganccanactgtcaaattgtttaa

SEQ ID NO: 8497 - DNA, 504 bp, Homo sapiens
cgaggtccttcttcactgaagagtatgtcagggaccaccctgaggaccaggacaagctgacccacctcaaggacctgattgcatggcagatccccttcttgggagctgggattaagatccatgagaaaagggtgtcagataacttgcgacccttccatgaccggatggaggaatgtttcaagaacctgaaaatgaaggtggagaaggagtacggtgtccgagagatgcctgactttgacgacaggagagtgggccgtcccaggtctatgctgcgctcatacagacagatgtccatcatctctctggcttccatgaattctgactgcagcacccccagcaagcctacctcagagagctttgacctggaattagcatcacccaagacgccgagagtggagcaggaggaaccgatctccccggggagcaccctgcctgaggtcaagctgcggaggtccaagaagaggacaaagagaagcagcgtagtttttgcggatgagaaagcag

SEQ ID NO: 8498 - DNA, 455 bp, Homo sapiens
  misc_feature (1)...(455): n = g, a, c or t
ccaccaccagctttggctctaactgcagactttgttcttggtgaattgctatagaactgggaatgaggtgtgccctgggcacaggggcactgccccaccaaggtggtgcccactccactgctgggaaaacgaagttacctagcggagcctggagcccactgggtggtcactaatttcagcacaggcagtgcagtgtttgtgctttttttttggagatggagtctcactctgtcacccaggctggagtgcaatggcgtgatctaggctcactgcaacctccgcctcccaggttcgagcaatcctcctgcctcagcctcccaagtagctgggactacaggcacacgccgncacgcctggctagtgtttgctcttaaatacacaaaatgcactgaaccagcaaaaacaaagtcccaggtctgaggagctctgaggatgatgcctgtgatggcctctgg

SEQ ID NO: 8499 - DNA, 544 bp, Homo sapiens
ggacgggcccggtgcggctgtgtgggttcgggagcggagttgcagaatccaaggacccgttttgttctttctccgcactgctttatgggaggcattatggcccccaaagacataatgacaaatactcatgctaaatccatcctcaattcaatgaactccctcaggaagagcaataccctctgtgatgtgacattgagagtagagcagaaagacttccctgcccatcggattgtgctggctgcctgtagtgattacttctgtgccatgttcactagtgagctctcagagaaggggaaaccttatgttgacatccaaggtttgactgcctctaccatggaaattttattggactttgtgtacacagaaacggtacatgtgacagtggagaatgtacaagaactgcttcctgcagcctgtctgcttcagttgaaaggtgtgaaacaagcctgctgtgagttcttagaaagtcagttggacccttctaattgcctgggtattagggattttgctgaaacccacaattgtgttgacctgatgcaaacag

SEQ ID NO: 8500 - DNA, 289 bp, Homo sapiens
  misc_feature (1)...(289): n = g, a, c or t
aatcaacntatagtttanttttttctgggtttttgttttgttttgttttctttctaatcgaggtgtgaaaaagttctaggttcagttgaagttctgatgaagaaacacaattgagattttttcagtgataaaatctgcatatttgtatttcaacaatgtagctaaaacttgatgtaaattcctcctttttttccttttttggcttaatgaatatcatttattcagtatgaaatctttatactatatgttccacgtgttaagaataaatgtacattaaatcttggtaaaa

SEQ ID NO: 8501 - DNA, 303 bp, Homo sapiens
ccgggcaggtcaagagtgagccattctccatccctgaggacgacggcaatgacctcactcacaccttcttcaatccagaccgggagggttggctgctcaagctagggggccgcgtgaagacgtggaaacggcgctggttcatcctgaccgacaactgcctctactacttcgagttcaccactgacaaggagccacggggaattatacctcttgagaacctctcggtgcagaaggtggatgaccccaagaagccattctgcctggagctctacaaccctagctgccgaggccagaaaatcaagg

SEQ ID NO: 8502 - DNA, 341 bp, Homo sapiens
ctgcccaagggcgttcgtaacgggaatgccgaagcgtgggaaaaagggagcggtggcggaagacggggatgagctcaggacagagccagaggccaagaagagtaagacggccgcaaagaaaaatgacaaagaggcagcaggagagggcccagccctgtatgaggaccccccagatcagaaaacctcacccagtggcaaacctgccacactcaagatctgctcttggaatgtggatgggcttcgagcctggattaagaagaaaggattagattgggtaaaggaagaagccccagatatactgtgccttcaagagaccaaatgttcagagaacaaactaccag

SEQ ID NO: 8503 - DNA, 514 bp, Homo sapiens
  misc_feature (1)...(514): n = g, a, c or t
gaaatcgaantgttgaatttttggcttgtgagagtttggttccaaaccttaaattcantcaaggtctgtgtctttgttagttacaaaactttaactttattcaaattgatgagctcttgaataattgataatatagnataaatgaaaattaaattctactaaaatctattgaagcangaaaaaaagagcgctatggaccttgactancagagtaatttcccctgttctgttgttcactttctcataaatgttcattagtaggtaaaaattgcaggggatgatataaactgatgcatctgttttgcaataacatatctaatcttctgctccaggagacgttcacagaatttgncagcnaaacctaatacatattcataaccaatatgctntntnaccaanggaaattgaggcaagtacaacagaatgaancatgagaaaccagcatgttaattttaaatttaattatagttataggggaaaaggctgcattntgatagtgtatactcattcagac

SEQ ID NO: 8504 - DNA, 610 bp, Homo sapiens
ctgtcaccaccaagcatgaactttcactgattacccataacctactggaaatcttcagccttgctgtcagcatagaccactgtgagaaacagtacattccattccagtttgccctgctttttgaagatctaaatgccattccatgttttctgttacatattgaagtttcttggttgccaaagaaaaacggattctgctgaacttgtggacagaacaaccccaaggttggaagaaaaaggaaaaataatctatacttgaacatttcaaaagttaaaattttcaacagagttttaacacactgaagcttaaaatacattgacactgaaatgtcaatgggcaaacaccaatttcgccgttcattatgaaatacatcaaacaaaacttgccaaaaatacaaccataaaaatatagcaaatgtatgtatgagcaaactaatgctaaaaatgtctaattttcttggctagtctttcaaggaccagattcatgagtgttatttgaagggaaaaagtgaaatacttggaattattttgagtgatgtgctcctgagcttgttcttaaaatctaccagtggtagcttttggaaagaatgtgtttcataccgatgtgcagg

SEQ ID NO: 8505 - DNA, 285 bp, Homo sapiens
ccacagtgtcaacctgagtggagaaccacgagttctcaccccggtagttgggagtaaggtccagaatgacacggatgctcttttttttagccgattgcaagagactgtcaaaatcttccttggagccaaaattggggtcgatctgcagcaagtcagtctgagcgacatcatccttctggttcttgtgaattggacccagcacaaggcccttcaccttcagagagctcaggtaatcgagacgccccttcagacccgccaggttgcccgcgccgtggccctggaagg

SEQ ID NO: 8506 - DNA, 242 bp, Homo sapiens
  misc_feature (1)...(242): n = g, a, c or t
actgacgancnggtcacataatcaggagccagactnctgagttgtaactgggcccccaactttccgtgtgattattaaaagagcccttcttcttttctaaaacttantgccaaatgctgaggagcataatgtnggtgagaattttttttttttgggggggngaaaattaagctagagcttnttgaantacctagttnccaggggctttttattgtatttttncttatggncctagantgaca

SEQ ID NO: 8507 - DNA, 554 bp, Homo sapiens
  misc_feature (1)...(554): n = g, a, c or t
tttttttttatcgttaacaaaagaaaaaaatgtctttataagtacataccttttgtcgtcaaaaaaaatatagaaacacaatgtattcaaaaaaaatcaaaattatacagccatgtttatgaagtctacatttcccttgtcttggatatatatatatggagatatatatacaattcaagcagttttaattaagggtaatcattgggtttttctgaaaccggaaaagtcacgagtctctctcttttttcactttcacatctccagcaaggatggttgcaatttccccttgcataaaggcccaggggacattggagcccacaagagggcatttttccccactgggacaatagacctctccactagctccctgctgtttgatgctttgtctggagcaagggaagcagaacttgtgcgaagggacggacgggcactgcacaaaatgggtgtcctccagccgctcgtggcagagggtgcagcacagcggggcactggttgccaganaggagtccgggaggctggcagggtgcactggctccagtcctcctgtgttgcct

SEQ ID NO: 8508 - DNA, 449 bp, Homo sapiens
ctggagagtgtagatcccaaaaattacccaaagaagaagatggaaaagcgatttgtcttcaacaagatagaaatcaataacaagctggaatttgagtctgcccagttccctaactggtacatcagcacctctcaagcagaaaacatgcccgtcttcctgggagggaccaaaggcggccaggatataactgacttcaccatgcaatttgtgtcttcctaaagagagctgtacccagagagtcctgtgctgaatgtggactcaatccctagggctggcagaaagggaacagaaaggtttttgagtacggctatagcctggactttcctgttgtctacaccaatgcccaactgcctgccttagggtagtgctaagaggatctcctgtccatcagccaggacagtcagctctctcctttcagggccaatccccagcccttttgttgagccagg

SEQ ID NO: 8509 - DNA, 391 bp, Homo sapiens
cctaagacccaacagatgtaggatccagatctggattcgtgccagccccaccaatggtctgtcaggccaagaaggtgctttctttggtaattcatgttttttaacttcctggagaagagatcttttcccacaagccatcttcattttttttgtagagtagggctttatttccaggaaacagtgtgttagctggagatgggtgtttttttaaaaacatcaaggtagatctaatatgttcaacaaagtggggtggctcagccagaggcgaagtggaaagattctctagtatttgcttgtcatcttggtgcaaccagaaatccacatgtggaaatggtgtccaggagtacggtcctatacgaagttgttctgtctctgcatcataaatgctaat

SEQ ID NO: 8510 - DNA, 335 bp, Homo sapiens
  misc_feature (1)...(335): n = g, a, c or t
ctgtggcngnctgtcanagaagcacatttttctgcagataattagaatggcttcccccatctctcacggactgtcccaagtctagaaaagaattgagttcctcttctattagtcaaataaaagggaagagaatgtttgtcttcctttcctttctgtagtgttaagaaaataaacgaacttaatgattctaaattatcagtgagcttaacactgtactatagaccaaagattaccttttcaaaaagtcctttgaggtgaaatattttgtatacgtaatacatagatgcacatataaacacacacatatagaatctcaatattttaacacttctttg

SEQ ID NO: 8511 - DNA, 604 bp, Homo sapiens
ccactcattctactgcttagctcacagtgtttctgcagcggtatgtctcaccacttgttctgttgttccccttacacactccagtatgtatctctgccatcaaactgtccacgtgtgagctgaacctgctatttgttcattaacttactgttttataccatttgagcaggaagttgtagtcattctctggctttgtagtttgctttattgctcataagtaataactggaaaaaggagttttaaaacactcattattttcaaacattttgactaatatttattctgaaatgtcagggtaatttggtaaaatatcaaaatgctaaaactgaagacttatttttttctttaccagaaagtaataattacatatatttataactgcagagtccaatacaatgaattaatatttcttccaaatgttcttacttaacatctttctagctttagcaaagcagtatcttactttcacattaaaaaaaagaaacccttcataatagtgtaaggcagtttgtggaaaacttattaccgtcattttacactttactaaattcaggctaaaccatcatcaaattaaccagaattaagattagggctcaagtcttct

SEQ ID NO: 8512 - DNA, 529 bp, Homo sapiens
  misc_feature (1)...(529): n = g, a, c or t
gnaaatattccaaaattaactgtggtgacagatgcacttacctgtgactacactaaaagccactgaattgtacacataaaatgggtgaattttaagatatgtgaattatatctcaataatgttatttttaataatgctgttattaagattttgattgggattaaattgggatctatagatttggagaaaacatgtatgtttataatattgattctttcaatncatgaacattatataatgctccaattatttgggncttctttagtttctctcaataatgtnntatagaattccatgcagaagtactgtacatattttattanagtcattcctcgatatttactattactgatgctatttatatggtntattttaaagaagacaaagcattgaatttttttattgtggggaagaacagagcatggtgtncatattaaataatcaaaatttcaaaataaatcactatacatggnctaacatgattntttctgattttaaattttatttacagaaaagtcatacaaatata

SEQ ID NO: 8513 - DNA, 592 bp, Homo sapiens
  misc_feature (1)...(592): n = g, a, c or t
caaagatattccagccagggtaaccctgatgcagctccctaccaggcaagagatccgagtgaggaacctgttcaatgtggtggactgcaagctccattggcagaagaacggagactacttgtgtgtgaaagtagataggactccgaaaggcacccagggtgttgtcacaaattttgaaattttccgaatgagggagaaacaggtacctgtggatgtggtcgagatgaaagaaaccatcatagcctttgcctgggaaccaaatggaagtaagtttgctgtgctgcacggagaggctccgcggatatctgtgtctttctaccacgtcaaaaacaacgggaagattgaactcatcaagatgttcgacaagcagcaggcgaacaccatcttctggagcccccaaggacagttcgtggtgttggcgggcctgaggagtatgaacggtgccttagcgtttgtggacacttcggactgcacggtcatgaacatcgcagagcactacatggcttccgacgtcgaatgggatcctactgggcgctacgtcgtcacctctgtgtcctggtggagccataaggnggacaacgcgacctcggcc

SEQ ID NO: 8514 - DNA, 591 bp, Homo sapiens
tgatcagcccctaaaggtaatgccagcccctccaccaaaggagaatgcttgggtgaagcgaagttctaaccctcctgctcgatctcagagctcagacacagagcagcagtcccctacaagtggtgggggaaaagtagctccagctcaaccatctgaggaaggaccaggaaggaaagatgaaaataaagtagatgggatgaatgccccaaaaggccaaactgggaactctagccgtggtccaggagacggagggaacagagaccactggaaggagtcagataggaaagatggcaaaaaggatcaagactccagatctgcacctgagccaaagaaacctgaggaaaatccagcttctaagttcagttctgcaagcaagtatgctgctctctctgttgatggtgaagatgaaaatgagggagaagattatgccgaatagacctctacatcctgtgcttttctcctagtttctctccaccctggaacattcgagagcaaatcaaaacctctatccagacaagacaaaataaaactcaacatctcctgaagacctttcttacctttttttaaaaacaaaaaatgaaattattttgc

SEQ ID NO: 8515 - DNA, 476 bp, Homo sapiens
  misc_feature (1)...(476): n = g, a, c or t
tgctgcctcacatcancatgttgtcaggatcttgcatcantattgagcaccanccattccctgaccagactctatgtgggggagaatgccttgggagactcaggagtngcaattttatgtgaaaaagccaanaatccanngtgtnacctgcagaaactggggttggtgaattctggccttacgtnagtctgttgttcagctttgtnctcggtactcagcactaatcagaatctcacgcacctttacctgcgaggcaacactctcngagacaaggggatcaaactactctgtgagggactcttgcaccccgactgcaagcttcaggtgttggaattagacaactgcaaccttacgtcacactgctgctgggatctttccacacttctgacctccanccanagcctgcgaaagctgagcctgngcaacaatgacctgggcgacctggggtcatgatgttctgngaagtgctgaaacag

SEQ ID NO: 8516 - DNA, 616 bp, Homo sapiens
  misc_feature (1)...(616): n = g, a, c or t
ctcaaatgcngtcggcttgtcctggctcttgccctcatcctggttctggaatcctcagttcaaggttatcctacgcagagagccaggtaccaatgggtgcgctgcaatccagacagtaattctgcaaactgccttgaagaaaaaggaccaatgttcgaactacttccaggtgaatccaacaagatcccccgtctgaggactgacctttttccaaagacgagaatccaggacttgaatcgtatcttcccactttctgaggactactctggatcaggcttcggctccggctccggctctggatcaggatctgggagtggcttcctaacggaaatggaacaggattaccaactagtagacgaaagtgatgctttccatgacaaccttaggtctcttgacaggaatctgccctcagacagccaggacttgggtcaacatggattagaagaggattttatgttataaaagaggattttcccaccttgacaccaggcaatgtagttagcatattttatgtaccatggttatatgattaatcttgggacaaagaattttatagaaatttttaaacatctgaaaaagaagcttaagttttatcatccttttttttctcatgaat

SEQ ID NO: 8517 - DNA, 294 bp, Homo sapiens
  misc_feature (1)...(294): n = g, a, c or t
acgtgaaaatgctacagttatggataanacccnagctttgattgantccgttattccgaaaggggcacaggcatgccaaatttgcatcacatacatttgtgaagaagacagntacctggcagagacgctgggactctnancagctcttcaggcagtgcaggacaacccagctatgcccacatgctcaagcccanaaggcanaatcaagctttgctttctagaanacgctcaanggatatggaaacaaaagttgcagaggtgccatgttcagaatacaataataaagtggagcga

SEQ ID NO: 8518 - DNA, 580 bp, Homo sapiens
  misc_feature (1)...(580): n = g, a, c or t
ctggtttnnanttctaanngtataaaaattggaaatttgaaatagttctgtaaaagaaaaaaatgtaaaaatacatctgctttctctcatggtttaatacagcattggaaggctttcanatgttttcttaaaaaaaaacaaaacccaaaaaaactcaacatttaaaaccaaatctcagcttcatttccagaaatattgcagtttggtttaggtaatgtttcatttaatctactccagtttccacaaaatggcattttattaaaaaaacctttcagttatttggtccttttgcaatttgctgtgcacataatgcctactgtaccaaacttttattgcctttaaatttagttgtaattttattgataaaatttaaatctagtgtctttatttcttctgttacaatagtgttgcttgtgtaagcaggttagagtgcacagtgtccccaattgttcctggcactgcaaaaccaaattaaacaattccacaaagaattctgacatcaatgtgttttcctcagtcaggtctatttcaagattctagaagttccttttgtaaaacttgcctttaaaactcttcctcc

SEQ ID NO: 8519 - DNA, 332 bp, Homo sapiens
ctgccacaaaccaggtgaagctttgttctaagaatatttgtttcatctagtttatgagtccaaatgatatagactgtaaatgtcacagcagtggtgaaagactgctcggtcatgagcaccgacagtaactcactggcacgtgaatttctgaccgatgtcaaccggctttgcaatgcagtggtccagagggtggaggccagggaggaagaagaggaggagacgcacatggcaacccttggacagtaccttgtccatggtcgaggatttctattacttaccaagctaaattctataattgatcagtagagatggggtttcaccgtgttgaccag

SEQ ID NO: 8520 - DNA, 587 bp, Homo sapiens
  misc_feature (1)...(587): n = g, a, c or t
cctaaggctgatgaggaagaggaagtgtcagatgaagtcgatggggcagaggtccctaaccccgactcagtcacagatgacctcaaggtcagtgaaaagtcagaagcagcagtgaagctgaggaacacagaagcatcttcagaagaagagtcatctgctagcaggatgcaggtggagcagaatttatcagatcatatcaaactctcaggtgagaagatggttgattaggtttcacatataagtagtaggtggttgatgatcagatgtcttaaatggatgttcactatgacaagtatctgactagtccacatagcttaatcagtaatctaccaaagtcatgggtaactcaaccaatagtcccagggaatattgtaaaagtcaggagcctcactgctatgtgtagcagaattgtgagacaagcagccagcagtgcctatttggtttaataaaaaagaagattctaaaatgagtttttttttttcgtgcaactcaatttacaatatacgtttttggaaggcttcttttgaattcacatgagtagagaaaaccaattatagataattctttgtagatncttagctttcgac

SEQ ID NO: 8521 - DNA, 647 bp, Homo sapiens
  misc_feature (1)...(647): n = g, a, c or t
ccatcatctccaactctttaccccaacctggcaccttgtagggggctagaagggtgaggggaggtgtctttcacttatgcttaggtcactcttagaggactatcctcaaacttgaggtgacagggaactcttcacgggggcaggatttgatgttttgtttttagccatgtttgtcaatgacaatgtcaatttctagttccaatttgtacccttgtctcatttctacattaaaaacaaaaaacaatcatctgtcataaaagttcagagtaagctgggtgtggtggcacatgactttagtcccagctacttggggggctgaggcaggagggtcgcttgagcccaggaaagttcgagtccaagctgggcaacagagcaaaaccttgtctcttaaaaaagaaaaaaaatagagttcagaatagataaaagagttgttattctaagaaaatagactactgaaggagaaaggctttaataatattaaaaataggcaaggtaatgcttttcatagtatagtaagatttgcctaataccatcttatttctttgattaaaagttacttancttcagcatgcgtgtacattcaaaatacaaaattaaagcatgagttgtcattaatttgcagaattctatgattgaagcctctaaat

SEQ ID NO: 8522 - DNA, 474 bp, Homo sapiens
ccatataatacttgcacattatgcaaaaaaaaatgttgatagtatctccttgccacacaatatgcagagttgacaacctttgaaaaccaaggtaactaatatgtttgtcctagttgtgtggcgcttggtaacaaagtctgtacatattatgtataaaatgtgtattggttagcatttagtactaagaaattctgagtttaaaataagtgatttttttcaaagtagcgatatctatatctgtgtttatctaaaaatactggcttgaatagaaaacattctcagatgattcaagattgagtaaaaatgagaatcccatacattccattattaaattctgccctattcccaattgttagcatctggctgatattaaggtctttgattgtcacaatattctcaataaatgagacattctgaactgcctggtgatattttcaaaaagagcaattaaaatgtgtattccctctaatacag

(The sequence listing continues in the following parts.)
